United States Patent Application Publication US 2011/0183924 A1 - sequence listing, part 138

SEQ ID NO: 368648 - DNA, 1361 bp, Homo sapiens
aaaaaaaaaaaaaaaaaaaaaaaaaaaaaggtttttgaagatggcggccctcaaggctctggtgtccggctgtgggcggcttctccgtgggctactagcgggcccggcagcgaccagctggtctcggcttccagctcgcgggttcagggaagtggtggagacccaagaagggaagacaactataattgaaggccgtatcacagcgactcccaaggagagtccaaatcctcctaacccctctggccagtgccccatctgccgttggaacctgaagcacaagtataactatgacgatgttctgctgcttagccagttcatccggcctcatggaggcatgctgccccgaaagatcacaggcctatgccaggaagaacaccgcaagatcgaggagtgtgtgaagatggcccaccgagcaggtacctgacgcgctgggctcctggctccgtcaagcccatctacaaaaaaggcccccgctggaacagggtgcgcatgcccgtggggtcaccccttctgagggacaatgtctgctactcaagaacaccttggaagctgtatcactgacagagagcagtgcttccagagttcctcctgcacctgtgctggggagtaggaggcccactcacaagcccttggccacaactatactcctgtcccaccccaccacgatggcctggtccctccaacatgcatggacaggggacagtgggactaacttcagtacccttggcctgcacagtagcaatgctgggagctagaggcaggcagggcagttgggtcccttgccagctgctatggggcttaggccatgctcagtgctggggacaggagttttgcccaacgcagtgtcataaactgggttcatgggcttacccattgggtgtgcgctcactgcttgggaagtgcagggggtcctgggcacattgccagctgggtgctgagcattgagtcactgatctcttgtgatggggccaatgagtcaattgaattcatgggccaaacaggtcccatcctcttcatgaaaaaagtgagctccttactgtgggagagctgcagggagccaaggtgggctgcctgacacacttgccgctctcgtgtgaatccaagaaactgcgttcctcaaaggggccctggttgtcaccttctcccacagccatttccacccatcgttgtctagaatctctttcattagcacattccaacccctctgccacttggtttagaaatgagctccctggctcagtgggcctttcagaatctggaaccagacggaggtggagttaagaagataggacagaacaggcaggccaagttcactgaagcttaagaaaatcatgtttagactctgtttaaaaacatccagg

SEQ ID NO: 368649 - DNA, 1412 bp, Homo sapiens
aaaaaaaaaaaaaaaaaaaaaaaaaaaaaggtttttgaagatggcggccctcaaggctctggtgtccggctgtgggcggcttctccgtgggctactagcgggcccggcagcgaccagctggtctcggcttccagctcgcgggttcagggaagtggtggagacccaagaagggaagacaactataattgaaggccgtatcacagcgactcccaaggagagtccaaatcctcctaacccctctggccagtgccccatctgccgttggaacctgaagcacaagtataactatgacgatgttctgctgcttagccagttcatccggcctcatggaggcatgctgccccgaaagatcacaggcctatgccaggaagaacaccgcaagatcgaggagtgtgtgaagatggcccaccgagcaggcctcggcttcctgaaggagttgttccgaagagcaaaccccaactcaaccggtacctgacgcgctgggctcctggctccgtcaagcccatctacaaaaaaggcccccgctggaacagggtgcgcatgcccgtggggtcaccccttctgagggacaatgtctgctactcaagaacaccttggaagctgtatcactgacagagagcagtgcttccagagttcctcctgcacctgtgctggggagtaggaggcccactcacaagcccttggccacaactatactcctgtcccaccccaccacgatggcctggtccctccaacatgcatggacaggggacagtgggactaacttcagtacccttggcctgcacagtagcaatgctgggagctagaggcaggcagggcagttgggtcccttgccagctgctatggggcttaggccatgctcagtgctggggacaggagttttgcccaacgcagtgtcataaactgggttcatgggcttacccattgggtgtgcgctcactgcttgggaagtgcagggggtcctgggcacattgccagctgggtgctgagcattgagtcactgatctcttgtgatggggccaatgagtcaattgaattcatgggccaaacaggtcccatcctcttcatgaaaaaagtgagctccttactgtgggagagctgcagggagccaaggtgggctgcctgacacacttgccgctctcgtgtgaatccaagaaactgcgttcctcaaaggggccctggttgtcaccttctcccacagccatttccacccatcgttgtctagaatctctttcattagcacattccaacccctctgccacttggtttagaaatgagctccctggctcagtgggcctttcagaatctggaaccagacggaggtggagttaagaagataggacagaacaggcaggccaagttcactgaagcttaagaaaatcatgtttagactctgtttaaaaacatccagg

SEQ ID NO: 368650 - DNA, 846 bp, Homo sapiens
aaaaaaaaaaaaaaaaaaaaaaaaaaaaaggtttttgaagatggcggccctcaaggctctggtgtccggctgtgggcggcttctccgtgggctactagcgggcccggcagcgaccagctggtctcggcttccagctcgcgggttcagggaagtggtggagacccaagaagggaagacaactataattgaaggccgtatcacagcgactcccaaggagagtccaaatcctcctaacccctctggccagtgccccatctgccgttggaacctgaagcacaagtataactatgacgatgttctgctgcttagccagttcatccggcctcatggaggcatgctgccccgaaagatcacaggcctatgccaggaagaacaccgcaagatcgaggagtgtgtgaagatggcccaccgagcaggtagaaggccctggggaccaagaggggcagagggctgcaggcactctctccccacccagctgccccatgtttcagcccctcctggaagaaaagtggatatccggagtgtatcatatcacacaatgcaactttccgtcctggtttccttggccctagagtgcaggagttgaaagatatccctatttccgcatcagtctataccaatcaaggcggtcctgaggagtgcgagagaaccaatcaaggacagcggcgggctggcgaggcctaaaaggcaggaagggcgcgggccttgagtgtgcaacctggttggagaggcgtcccctgtgccctcctccctaacgggggtgtcgtgcttgcgtcacgcagaaagagcagaaagacaacaaaaaacagacacccacaacgaacaaagaaagaaaaaaacagaaag

SEQ ID NO: 368651 - DNA, 496 bp, Homo sapiens
agaggaatataaaagcagtgggatatctggatttcttatactcagtcaaccacaacatggccttagtactgaactagcccagggtttcaatggaactcgtagatctcattcccaaggctggtcctggttgaagggagaaggtcaaaaaaggacgtgtcttctgaaaggcattacccatggaaagccaagggggagggttgcccactaggaggagcttcttttgtagaagccagaatggaggaaaggggctttctgacttggagcatctgaggaaatagattatttgaggatctagtactcccagaataatctgtaaccacaagaaacacatttcttgaactccagcgccccagaacaggatatccatatccaatcccatcgtatccatcctggatgttatgaatttccagagagggccacttctacccccctaggagtcatacatctggctacttatttgttaaaaataaaattctgtaccatttataaaatgggc

SEQ ID NO: 368652 - DNA, 543 bp, Homo sapiens
tcggccgccacggacggagactgaggctcagaggggacaagacctgcttgaggtcacacaggcagttgagagcagagctgagtcttgaacttgggtctggctgatacccaagactgtccccactgcaatgtgacactcccagcctccagcggaagccttgggagcaggtccccaaaaagccaaagcggaagaaaaggcggcgacgcaacgtgaactgcctgaagaacgtggtgatctggtacgaggaccacaagcaccgctgcccgtacgagccgcacctggcggagctagaccccacttttggcctgtacaccacggccgtgtggcagtgcgaagctggccaccgctacttccaggacctgcattcgcccctgaagcccctcagcgactcagaccctgacagtgacaaaggtaggtctgcagggcgagggcacatagggggccgcccatttctgggggcttcttacgagccctaggctagcatcacaaacagaatagcagccacagtggctctggctctggctctggcactggggcagagca

SEQ ID NO: 368653 - DNA, 3240 bp, Homo sapiens
gctctcttccctcatctctagcagtatggcatcccctccccaggatctcgggctgccagcgatgggcaggcgagacccctccagaatctgcaggcgcctctggttctccgaattcaaataaaaaggggcgggagcgctgttggttgtgcgcatgcgcagtttccattcttggtctccttttggcgccctggggcagcgagagaccgtgagaaatttctcggcggcgccgaagatgcgcgccacttccggtctggctcctaacaacgggggaggctggtaaccagggtgggggggatggcggagcgggcgctagagcccgaggcggaggcggaggctgaggcgggcgcgggcggggaggcagcagccgaggagggcgcagcgggccgaaaggcgcggggccggccgcgactcacggagtcggaccgggcccggcgacggctcgagtcccggaagaagtacgacgtgcggcgcgtgtacctgggcgaggcgcacgggccctgggtggacctgcggcgccgcagcggctggagcgacgccaagctcgccgcctacctcatctctctggagcgcggccagcggagcggccgccacgggtgagggggcctggccccgagggagggagggaggagacgcccccagaccccgccgggctttaccccgccccctccgcttctagggccagcccccggcacctgcggaccccgcccaggagccgggccggcggcctgggtctcgtactgcctggccgggacgcgcctggctcgtggccccgcctcccatcgttccgactgcccaatcctagggtgcacccagcccctcgacccgccttctgagcgcttggccccgcccgctagaactctggcggcccaatcctgggactggccccacctccaggccttgtaactaaccaggccctgggggggcagccccgccccctcaccggtctcatcctcccccgcttagttccccacctggcctgggactctggacaccctggggcactcagccctgcccttcttgaagttctggtgccccatctgggactccgtatggccccattcccacaaccctagatccaacacatccgggggacccttcacaacctggactgcactcccctaaacctatttctgtgaagcaactcagcccagggagactcggatgaagaggaaacccctagttagcttggcaggtggagggcagagaggcctgtctttgtaaattctcagtcttgagaaggagcagtgtggatggagtttttcccttcctgccttatatgttgatgtgatgattgagttaaaataggcaaagagcttagaagagtgcctggcaggtagtgggttccctaagtattaacttttacgaggatgacgtttattccgtatcacaagcagtgccgcaaggaaatccttgttctgccctggttttcaggaagccttgggagcaggtccccaaaaagccaaagcggaagaaaaggcggcgacgcaacgtgaactgcctgaagaacgtggtgatctggtacgaggaccacaagcaccgctgcccgtacgagccgcacctggcggagctagaccccacttttggcctgtacaccacggccgtgtggcagtgcgaagctggccaccgctacttccaggacctgcattcgcccctgaagcccctcagcgactcagaccctgacagtgacaaagtgggcaatgggctggtggctggcagctctgactcatccagctctggctctgcctctgactctgaggagtctcctgagggccagccggtcaaggctgcggcagcggcagcggcagcgacgcccaccagcccggtgggcagcagcgggctcatcactcaggagggcgtgcacattccctttgacgtccaccacgtggaaagcctggccgagcagggtaccccgctgtgctccaacccagcaggcaatgggcctgaagccctggagacagtggtgtgcgtgccggtgcctgtgcaagtgggtgcgggccccagcgccctctttgagaacgtgccccaggaggccctgggtgaggtggtggccagctgccccatgccaggcatggtgcccggctcacaggtgatcatcattgcgggccctggttacgacgctctcacggccgagggcattcacctcaacatggcagcaggcagcggtgtccccggcagtggactgggcgaggaggtgccctgtgccatgatggagggtgtggcagcctacacccagacagagcccgagggtagccagcctagcaccatggacgccaccgcagtagcaggcatcgagaccaagaaagagaaggaggacctgtgcttgctaaagaaggaggagaaggaggagccagtagccccggagctggcaacaacggtgcctgagagcgcagagcctgaggcagaggcggacggggaggagctggacggcagcgacatgtcagccatcatctatgaaatccccaaggagcctgagaagaggcggcggagcaagcggtcgcgggtgatggatgctgacggcctgctcgagatgttccactgcccatacgagggctgcagccaagtctacgtggccctcagcagcttccagaaccacgtcaatcttgtgcatcggaaaggaaagaccaaagtgtgccctcatcctggctgtggcaagaagttctatttatccaaccacctgcggcggcacatgatcatccattcaggtgtccgtgaattcacctgcgagacctgcggcaagtccttcaagaggaagaaccacctggaggtacatcggcgcacccacaccggcgagacccccctgcagtgcgagatctgtggctaccagtgccggcagcgcgcgtcgctcaactggcacatgaagaagcacactgcggaggtgcagtacaacttcacgtgcgatcgctgcgggaagcgcttcgagaagctggacagcgtcaagttccacacgctcaaaagccacccggatcacaagcccacctgacccacctgaccactgaccgcccctatttattcgtccgctcggacaccacgcccgggcttgccggggcctggacagctgcgagggccgcccggaccgcgggccggaaggaggcgcccccgccccgccccagagctgggccccctgggcaggttccccaccccgccccaccgcatccttctcggagctggtgcctggggctgcattgctggaactgtgtcaagagagcagagtgagattaaagagcgagaaaggaaaaaaaa

SEQ ID NO: 368654 - DNA, 2364 bp, Homo sapiens
gctctcttccctcatctctagcagtatggcatcccctccccaggatctcgggctgccagcgatgggcaggcgagacccctccagaatctgcaggcgcctctggttctccgaattcaaataaaaaggggcgggagcgctgttggttgtgcgcatgcgcagtttccattcttggtctccttttggcgccctggggcagcgagagaccgtgagaaatttctcggcggcgccgaagatgcgcgccacttccggtctggctcctaacaacgggggaggctggtaaccagggtgggggggatggcggagcgggcgctagagcccgaggcggaggcggaggctgaggcgggcgcgggcggggaggcagcagccgaggagggcgcagcgggccgaaaggcgcggggccggccgcgactcacggagtcggaccgggcccggcgacggctcgagtcccggaagaagtacgacgtgcggcgcgtgtacctgggcgaggcgcacgggccctgggtggacctgcggcgccgcagcggctggagcgacgccaagctcgccgcctacctcatctctctggagcgcggccagcggagcggccgccacgggaagccttgggagcaggtccccaaaaagccaaagcggaagaaaaggcggcgacgcaacgtgaactgcctgaagaacgtggtgatctggtacgaggaccacaagcaccgctgcccgtacgagccgcacctggcggagctagaccccacttttggcctgtacaccacggccgtgtggcagtgcgaagctggccaccgctacttccaggacctgcattcgcccctgaagcccctcagcgactcagaccctgacagtgacaaagtgggcaatgggctggtggctggcagctctgactcatccagctctggctctgcctctgactctgaggagtctcctgagggccagccggtcaaggctgcggcagcggcagcggcagcgacgcccaccagcccggtgggcagcagcgggctcatcactcaggagggcgtgcacattccctttgacgtccaccacgtggaaagcctggccgagcagggtaccccgctgtgctccaacccagcaggcaatgggcctgaagccctggagacagtggtgtgcgtgccggtgcctgtgcaagtgggtgcgggccccagcgccctctttgagaacgtgccccaggaggccctgggtgaggtggtggccagctgccccatgccaggcatggtgcccggctcacaggtgatcatcattgcgggccctggttacgacgctctcacggccgagggcattcacctcaacatggcagcaggcagcggtgtccccggcagtggactgggcgaggaggtgccctgtgccatgatggagggtgtggcagcctacacccagacagagcccgagggtagccagcctagcaccatggacgccaccgcagtagcaggcatcgagaccaagaaagagaaggaggacctgtgcttgctaaagaaggaggagaaggaggagccagtagccccggagctggcaacaacggtgcctgagagcgcagagcctgaggcagaggcggacggggaggagctggacggcagcgacatgtcagccatcatctatgaaatccccaaggagcctgagaagaggcggcggagcaagcggtcgcgggtgatggatgctgacggcctgctcgagatgttccactgcccatacgagggctgcagccaagtctacgtggccctcagcagcttccagaaccacgtcaatcttgtgcatcggaaaggaaagaccaaagtgtgccctcatcctggctgtggcaagaagttctatttatccaaccacctgcggcggcacatgatcatccattcaggtgtccgtgaattcacctgcgagacctgcggcaagtccttcaagaggaagaaccacctggaggtgcgagatctgtggctaccagtgccggcagcgcgcgtcgctcaactggcacatgaagaagcacactgcggaggtgcagtacaacttcacgtgcgatcgctgcgggaagcgcttcgagaagctggacagcgtcaagttccacacgctcaaaagccacccggatcacaagcccacctgacccacctgaccactgaccgcccctatttattcgtccgctcggacaccacgcccgggcttgccggggcctggacagctgcgagggccgcccggaccgcgggccggaaggaggcgcccccgccccgccccagagctgggccccctgggcaggttccccaccccgccccaccgcatccttctcggagctggtgcctggggctgcattgctggaactgtgtcaagagagcagagtgagattaaagagcgagaaaggaaaaaaaa

SEQ ID NO: 368655 - DNA, 2402 bp, Homo sapiens
gctctcttccctcatctctagcagtatggcatcccctccccaggatctcgggctgccagcgatgggcaggcgagacccctccagaatctgcaggcgcctctggttctccgaattcaaataaaaaggggcgggagcgctgttggttgtgcgcatgcgcagtttccattcttggtctccttttggcgccctggggcagcgagagaccgtgagaaatttctcggcggcgccgaagatgcgcgccacttccggtctggctcctaacaacgggggaggctggtaaccagggtgggggggatggcggagcgggcgctagagcccgaggcggaggcggaggctgaggcgggcgcgggcggggaggcagcagccgaggagggcgcagcgggccgaaaggcgcggggccggccgcgactcacggagtcggaccgggcccggcgacggctcgagtcccggaagaagtacgacgtgcggcgcgtgtacctgggcgaggcgcacgggccctgggtggacctgcggcgccgcagcggctggagcgacgccaagctcgccgcctacctcatctctctggagcgcggccagcggagcggccgccacgggaagccttgggagcaggtccccaaaaagccaaagcggaagaaaaggcggcgacgcaacgtgaactgcctgaagaacgtggtgatctggtacgaggaccacaagcaccgctgcccgtacgagccgcacctggcggagctagaccccacttttggcctgtacaccacggccgtgtggcagtgcgaagctggccaccgctacttccaggacctgcattcgcccctgaagcccctcagcgactcagaccctgacagtgacaaagtgggcaatgggctggtggctggcagctctgactcatccagctctggctctgcctctgactctgaggagtctcctgagggccagccggtcaaggctgcggcagcggcagcggcagcgacgcccaccagcccggtgggcagcagcgggctcatcactcaggagggcgtgcacattccctttgacgtccaccacgtggaaagcctggccgagcagggtaccccgctgtgctccaacccagcaggcaatgggcctgaagccctggagacagtggtgtgcgtgccggtgcctgtgcaagtgggtgcgggccccagcgccctctttgagaacgtgccccaggaggccctgggtgaggtggtggccagctgccccatgccaggcatggtgcccggctcacaggtgatcatcattgcgggccctggttacgacgctctcacggccgagggcattcacctcaacatggcagcaggcagcggtgtccccggcagtggactgggcgaggaggtgccctgtgccatgatggagggtgtggcagcctacacccagacagagcccgagggtagccagcctagcaccatggacgccaccgcagtagcaggcatcgagaccaagaaagagaaggaggacctgtgcttgctaaagaaggaggagaaggaggagccagtagccccggagctggcaacaacggtgcctgagagcgcagagcctgaggcagaggcggacggggaggagctggacggcagcgacatgtcagccatcatctatgaaatccccaaggagcctgagaagaggcggcggagcaagcggtcgcgggtgatggatgctgacggcctgctcgagatgttccactgcccatacgagggctgcagccaagtctacgtggccctcagcagcttccagaaccacgtcaatcttgtgcatcggaaaggaaagaccaaagtgtgccctcatcctggctgtggcaagaagttctatttatccaaccacctgcggcggcacatgatcatccattcaggtgtccgtgaattcacctgcgagacctgcggcaagtccttcaagaggaagaaccacctggaggtacatcggcgcacccacaccggcgagacccccctgcagtgcgagatctgtggctaccagtgccggcagcgcgcgtcgctcaactggcacatgaagaagcacactgcggaggtgcagtacaacttcacgtgcgatcgctgcgggaagcgcttcgagaagctggacagcgtcaagttccacacgctcaaaagccacccggatcacaagcccacctgacccacctgaccactgaccgcccctatttattcgtccgctcggacaccacgcccgggcttgccggggcctggacagctgcgagggccgcccggaccgcgggccggaaggaggcgcccccgccccgccccagagctgggccccctgggcaggttccccaccccgccccaccgcatccttctcggagctggtgcctggggctgcattgctggaactgtgtcaagagagcagagtgagattaaagagcgagaaaggaaaaaaaa

SEQ ID NO: 368656 - DNA, 2584 bp, Homo sapiens
gctctcttccctcatctctagcagtatggcatcccctccccaggatctcgggctgccagcgatgggcaggcgagacccctccagaatctgcaggcgcctctggttctccgaattcaaataaaaaggggcgggagcgctgttggttgtgcgcatgcgcagtttccattcttggtctccttttggcgccctggggcagcgagagaccgtgagaaatttctcggcggcgccgaagatgcgcgccacttccggtctggctcctaacaacgggggaggctggtaaccagggtgggggggatggcggagcgggcgctagagcccgaggcggaggcggaggctgaggcgggcgcgggcggggaggcagcagccgaggagggcgcagcgggccgaaaggcgcggggccggccgcgactcacggagtcggaccgggcccggcgacggctcgagtcccggaagaagtacgacgtgcggcgcgtgtacctgggcgaggcgcacgggccctgggtggacctgcggcgccgcagcggctggagcgacgccaagctcgccgcctacctcatctctctggagcgcggccagcggagcggccgccacgggaagccttgggagcaggtccccaaaaagccaaagcggaagaaaaggcggcgacgcaacgtgaactgcctgaagaacgtggtgatctggtacgaggaccacaagcaccgctgcccgtacgagccgcacctggcggagctagaccccacttttggcctgtacaccacggccgtgtggcagtgcgaagctggccaccgctacttccaggacctgcattcgcccctgaagcccctcagcgactcagaccctgacagtgacaaagtgggcaatgggctggtggctggcagctctgactcatccagctctggctctgcctctgactctgaggagtctcctgagggccagccggtcaaggctgcggcagcggcagcggcagcgacgcccaccagcccggtgggcagcagcgggctcatcactcaggagggcgtgcacattccctttgacgtccaccacgtggaaagcctggccgagcagggtaccccgctgtgctccaacccagcaggcaatgggcctgaagccctggagacagtggtgtgcgtgccggtgcctgtgcaagtgggtgcgggccccagcgccctctttgagaacgtgccccaggaggccctgggtgaggtggtggccagctgccccatgccaggcatggtgcccggctcacaggtgatcatcattgcgggccctggttacgacgctctcacggccgagggcattcacctcaacatggcagcaggcagcggtgtccccggcagtggactgggcgaggaggtgccctgtgccatgatggagggtgtggcagcctacacccagacagagcccgagggtagccagcctagcaccatggacgccaccgcagtagcaggcatcgagaccaagaaagagaaggaggacctgtgcttgctaaagaaggaggagaaggaggagccagtagccccggagctggcaacaacggtgcctgagagcgcagagcctgaggcagaggcggacggggaggagctggacggcagcgacatgtcagccatcatctatgaaatccccaaggagcctgagaagaggcggcggagcaagcggtcgcgggtgatggatgctgacggcctgctcgagatgttccactgcccatacgagggctgcagccaagtctacgtggccctcagcagcttccagaaccacgtcaatcttgtgcatcggaaaggaaagaccaaagtgtgccctcatcctggctgtggcaagaagttctatttatccaaccacctgcggcggcacatgatcatccattcaggtgtccgtgaattcacctgcgagacctgcggcaagtccttcaagaggaagaaccacctggaggtacatcggcgcacccacaccggcgagacccccctgcagtgagtgacaggccgccccgtgccgctagaggattgggtgggaggggatcccagcaggtcccaggggcggcttcgccccaacgcagtgtctgggcccggttccacctgcgctcggccttgtagggccccgccccgccccgcccactctgaccccgccccgtcccgccacgggctcccggcaggtgcgagatctgtggctaccagtgccggcagcgcgcgtcgctcaactggcacatgaagaagcacactgcggaggtgcagtacaacttcacgtgcgatcgctgcgggaagcgcttcgagaagctggacagcgtcaagttccacacgctcaaaagccacccggatcacaagcccacctgacccacctgaccactgaccgcccctatttattcgtccgctcggacaccacgcccgggcttgccggggcctggacagctgcgagggccgcccggaccgcgggccggaaggaggcgcccccgccccgccccagagctgggccccctgggcaggttccccaccccgccccaccgcatccttctcggagctggtgcctggggctgcattgctggaactgtgtcaagagagcagagtgagattaaagagcgagaaaggaaaaaaaa

SEQ ID NO: 368657 - DNA, 1743 bp, Homo sapiens
cgtctgttcgcagagctgtgggcggagttgaggccttggaggctgagatgtggttctgcgcgtgtgcggacggctgtctgttaactccgcggtcagttcccggactggtggctggtctgcagggttgacctgcgcaatgcagaggctgcaggtagtgctgggccacctgaggggtccggccgattccggctggatgccgcaggccgcgccttgcctgagcggtgccccgcaggcctcggccgcggacgtggtggtggtgcacgggcggcgcacggccatctgccgggcgggccgcggcggcttcaaggacaccacccccgacgagcttctctcggcagtcatgaccgcggttctcaaggacgtgaatctgaggccggaacagctgggggacatctgtgtcggaaatgtgctgcagcctggggccggggcaatcatggcccgaatcgcccagtttctgagtgacatcccggagactgtgcctttgtccactgtcaatagacagtgttcgtcggggctacaggcagtggccagcatagcaggtggcatcagaaatgggtcttatgacattggcatggcctgtggggtggagtccatgtccctggctgacagagggaaccctggaaatattacttcgcgcttgatggagaaggagaaggccagagattgcctgattcctatggggataacctctgagaatgtggctgagcggtttggcatttcacgggagaagcaggatacctttgccctggcttcccagcagaaggcagcaagagcccagagcaagggctgtttccaagctgagattgtgcctgtgaccaccacggtccatgatgacaagggcaccaagaggagcatcactgtgacccaggatgagggtatccgccccagcaccaccatggagggcctggccaaactgaagcctgccttcaagaaagatggttctaccacagctggaaactctagccaggtgagtgatggggcagctgccatcctgctggcccggaggtccaaggcagaagagttgggccttcccatccttggggtcctgaggtcttatgcagtggttggggtcccacctgacatcatgggcattggacctgcctatgccatcccagtagctttgcaaaaagcagggctgacagtgagtgacgtggacatcttcgagatcaatgaggcctttgcaagccaggctgcctactgtgtggagaagctacgactcccccctgagaaggtgaaccccctggggggtgcagtggccttagggcacccactgggctgcactggggcacgacaggtcatcacgctgctcaatgagctgaagcgccgtgggaagagggcatacggagtggtgtccatgtgcatcgggactggaatgggagccgctgccgtctttgaataccctgggaactgagtgaggtcccaggctggaggcgctacgcagacagtcctgctgctctagcagcaaggcagtaacaccacaaaagcaaaaccacatgggaaaactcagcactggtggtggtggcagtggacagatcaaggcacttcaactcatttggaaaatgtgaacactgatgacatggtataggagtgggtggggtgttgagccacccatcagaccctctttagctgtgcaagataaaagcagcctgggtcacccaggccacaaggccatggttaattcttaaggcaaggcaaatccatggatgagaagtgcaatgggcatagtaaaagtgcatgaattta

SEQ ID NO: 368658 - DNA, 414 bp, Homo sapiens
gaaggtgaaccccctggggtgacagtggccttagggacccactgggctgcactggggcacgacaggtcatcacgctgccatcctgctggcccggaggtccaaggcagaagagttgggccttcccatccttggggtcctgaggtcttatgcagtggttggggtcccacctgacatcatgggcattggacctgcctatgccatcccagtagctttgcaaaaagcagggctgacagtgagtgacgtggacatcttcgagatcaatgaggcctttgcaagccagctgagattgtgcctgtgaccaccacggtccatgatgacaagggcaccaagaggagcatcactgtgacccaggatgagggtatccgccccagcaccaccatggagggcctggcaaactgaagtcctgctgctcta

SEQ ID NO: 368659 - DNA, 1681 bp, Homo sapiens
  misc_feature (20)..(20): n is a, c, g, or t
cccccccccgagaggacttnggctaggtcgaggcttcccggactggtggctggtctgcagggttgacctgcgcaatgcagaggctgcaggtagtgctgggccacctgaggggtccggccgattccggctggatgccgcaggccgcgccttgcctgagcggtgccccgcaggcctcggccgcggacgtggtggtggtgcacgggcggcgcacggccatctgccgggcgggccgcggcggcttcaaggacaccacccccgacgagcttctctcggcagtcatgaccgcggttctcaaggacgtgaatctgaggccggaacagctgggggacatctgtgtcggaaatgtgctgcagcctggggccggggcaatcatggcccgaatcgcccagtttctgagtgacatcccggagactgtgcctttgtccactgtcaatagacagtgttcgtcggggctacaggcagtggccagcatagcaggtggcatcagaaatgggtcttatgacattggcatggcctgtggggtggagtccatgtccctggctgacagagggaaccctggaaatattacttcgcgcttgatggagaaggagaaggccagagattgcctgattcctatggggataacctctgagaatgtggctgagcggtttggcatttcacgggagaagcaggatacctttgccctggcttcccagcagaaggcagcaagagcccagagcaagggctgtttccaagctgagattgtgcctgtgaccaccacggtccatgatgacaagggcaccaagaggagcatcactgtgacccaggatgagggtatccgccccagcaccaccatggagggcctggccaaactgaagcctgccttcaagaaagatggttctaccacagctggaaactctagccaggtgagtgatggggcagctgccatcctgctggcccggaggtccaaggcagaagagttgggccttcccatccttggggtcctgaggtcttatgcagtggttggggtcccacctgacatcatgggcattggacctgcctatgccatcccagtagctttgcaaaaagcagggctgacagtgagtgacgtggacatcttcgagatcaatgaggcctttgcaagccaggctgcctactgtgtggagaagctacgactcccccctgagaaggtgaaccccctggggggtgcagtggccttagggcacccactgggctgcactggggcacgacaggtcatcacgctgctcaatgagctgaagcgccgtgggaagagggcatacggagtggtgtccatgtgcatcgggactggaatgggagccgctgccgtctttgaataccctgggaactgagtgaggtcccaggctggaggcgctacgcagacagtcctgctgctctagcagcaaggcagtaacaccacaaaagcaaaaccacatgggaaaactcagcactggtggtggtggcagtggacagatcaaggcacttcaactcatttggaaaatgtgaacactgatgacatggtataggagtgggtggggtgttgagccacccatcagaccctctttagctgtgcaagataaaagcagcctgggtcacccaggccacaaggccatggttaattcttaaggcaaggcaaatccatggatgagaagtgcaatgggcatagtaaaagtgcatgaattta

SEQ ID NO: 368660 - DNA, 1911 bp, Homo sapiens
cgtctgttcgcagagctgtgggcggagttgaggccttggaggctgagatgtggttctgcgcgtgtgcggacggctgtctgttaactccgcggtcagttcccggactggtggctggtctgcagggttgacctgcgcaatgcagaggctgcaggtagtgctgggccacctgaggggtccggccgattccggctggatgccgcaggccgcgccttgcctgagcggtgccccgcaggcctcggccgcggacgtggtggtggtgcacgggcggcgcacggccatctgccgggcgggccgcggcggcttcaaggacaccacccccgacgagcttctctcggcagtcatgaccgcggttctcaaggacgtgaatctgaggccggaacagctgggggacatctgtgtcggaaatgtgctgcagcctggggccggggcaatcatggcccgaatcgcccagtttctgagtgacatcccggagactgtgcctttgtccactgtcaatagacagtgttcgtcggggctacaggcagtggccagcatagcaggtggcatcagaaatgggtcttatgacattggcatggcctgtggggtggagtccatgtccctggctgacagagggaaccctggaaatattacttcgcgcttgatggagaaggagaaggccagagattgcctgattcctatggggataacctctgagaatgtggctgagcggtttggcatttcacgggagaagcaggatacctttgccctggcttcccagcagaaggcagcaagagcccagagcaagggctgtttccaagctgagattgtgcctgtgaccaccacggtccatgatgacaagggcaccaagaggagcatcactgtgacccaggatgagggtatccgccccagcaccaccatggagggcctggccaaactgaagcctgccttcaagaaagatggttctaccacagctggtgagactggtccggggtaggggtatgagaaagcaggccatggccatgctgggtgctgtactctgggaacctggaatagaccaggcccctctgcaaagtagaagtgggagggctgggatctcctcatccccaccccgatgccttcttaccccaacagtttgcccctaggaaactctagccaggtgagtgatggggcagctgccatcctgctggcccggaggtccaaggcagaagagttgggccttcccatccttggggtcctgaggtcttatgcagtggttggggtcccacctgacatcatgggcattggacctgcctatgccatcccagtagctttgcaaaaagcagggctgacagtgagtgacgtggacatcttcgagatcaatgaggcctttgcaagccaggctgcctactgtgtggagaagctacgactcccccctgagaaggtgaaccccctggggggtgcagtggccttagggcacccactgggctgcactggggcacgacaggtcatcacgctgctcaatgagctgaagcgccgtgggaagagggcatacggagtggtgtccatgtgcatcgggactggaatgggagccgctgccgtctttgaataccctgggaactgagtgaggtcccaggctggaggcgctacgcagacagtcctgctgctctagcagcaaggcagtaacaccacaaaagcaaaaccacatgggaaaactcagcactggtggtggtggcagtggacagatcaaggcacttcaactcatttggaaaatgtgaacactgatgacatggtataggagtgggtggggtgttgagccacccatcagaccctctttagctgtgcaagataaaagcagcctgggtcacccaggccacaaggccatggttaattcttaaggcaaggcaaatccatggatgagaagtgcaatgggcatagtaaaagtgcatgaattta

SEQ ID NO: 368661 - DNA, 1695 bp, Homo sapiens
cgtctgttcgcagagctgtgggcggagttgaggccttggaggctgagatgtggttctgcgcgtgtgcggacggctgtctgttaactccgcggtcagttcccggactggtggctggtctgcagggttgacctgcgcaatgcagaggctgcaggtagtgctgggccacctgaggggtccggccgattccggctggatgccgcaggccgcgccttgcctgagcggtgccccgcaggcctcggccgcggacgtggtggtggtgcacgggcggcgcacggccatctgccgggcgggccgcggcggcttcaaggacaccacccccgacgagcttctctcggcagtcatgaccgcggttctcaaggacgtgaatctgaggccggaacagctgggggacatctgtgtcggaaatgtgctgcagcctggggccggggcaatcatggcccgaatcgcccagtttctgagtgacatcccggagactgtgcctttgtccactgtcaatagacagtgttcgtcggggctacaggcagtggccagcatagcaggtggcatcagaaatgggtcttatgacattggcatggcctgtggggtggagtccatgtccctggctgacagagggaaccctggaaatattacttcgcgcttgatggagaaggagaaggccagagattgcctgattcctatggggataacctctgagaatgtggctgagcggtttggcatttcacgggagaagcaggatacctttgccctggcttcccagcagaaggcagcaagagcccagagcaagggctgtttccaagctgagattgtgcctgtgaccaccacggtccatgatgacaagggcaccaagaggagcatcactgtgacccaggatgagggtatccgccccagcaccaccatggagggcctggccaaactgaagcctgccttcaagaaagatggttctaccacagctggaaactctagccaggtgagtgatggggcagctgccatcctgctggcccggaggtccaaggcagaagagttgggccttcccatccttggggtcctgaggtcttatgcagtggttggggtcccacctgacatcatgggcattggacctgcctatgccatcccagtagctttgcaaaaagcagggctgacagtgagtgacgtggacatcttcgagatcaatgaggcctttgcaagccaggctgcctactgtgtggagaagctacgactcccccctgagaaggtgaaccccctggggggtgcagtggccttagggcacccactgggctgcactggggcacgacaggtcatcacgctgctcaatgagctgaagcgccgtgggaagagggcatacggagtggtgtccatgtgcatcgggactggaatgggagccgctgccgtctttgaataccctgggaactgagtgaggtcccaggctggaggcgctacgcagacagtcctgctgctctagcagcaaggcagtaacaccacaaaagcaaaaccacatgggaaaactcagcactggtggtggtggcagtggacagatcaaggcacttcaactcatttggaaaatgtgaacactgatgacatggtataggagtgggttggtgattttttaaacaaacattgcctttctcaagaacacagccctggtatttacgttgtccagggcgattattattttggttgaatattaaattattttca

SEQ ID NO: 368662 - DNA, 1563 bp, Homo sapiens
cgtctgttcgcagagctgtgggcggagttgaggccttggaggctgagatgtggttctgcgcgtgtgcggacggctgtctgttaactccgcggtcagttcccggactggtggctggtctgcagggttgacctgcgcaatgcagaggctgcaggtagtgctgggccacctgaggggtccggccgattccggctggatgccgcaggccgcgccttgcctgagcggtgccccgcaggcctcggccgcggacgtggtggtggtgcacgggcggcgcacggccatctgccgggcgggccgcggcggcttcaaggacaccacccccgacgagcttctctcggcagtcatgaccgcggttctcaaggacgtgaatctgaggccggaacagctgggggacatctgtgtcggaaatgtgctgcagcctggggccggggcaatcatggcccgaatcgcccagtttctgagtgacatcccggagactgtgcctttgtccactgtcaatagacagtgttcgtcggggctacaggcagtggccagcatagcaggtggcatcagaaatgggtcttatgacattggcatggcctgtggggtggagtccatgtccctggctgacagagggaaccctggaaatattacttcgcgcttgatggagaaggagaaggccagagattgcctgattcctatggggataacctctgagaatgtggctgagcggtttggcatttcacgggagaagcaggatacctttgccctggcttcccagcagaaggcagcaagagcccagagcaagggctgtttccaagctgagattgtgcctgtgaccaccacggtccatgatgacaagggcaccaagaggagcatcactgtgacccaggatgagggtatccgccccagcaccaccatggagggcctggccaaactgaagcctgccttcaagaaagatggttctaccacagctgggctgacagtgagtgacgtggacatcttcgagatcaatgaggcctttgcaagccaggctgcctactgtgtggagaagctacgactcccccctgagaaggtgaaccccctggggggtgcagtggccttagggcacccactgggctgcactggggcacgacaggtcatcacgctgctcaatgagctgaagcgccgtgggaagagggcatacggagtggtgtccatgtgcatcgggactggaatgggagccgctgccgtctttgaataccctgggaactgagtgaggtcccaggctggaggcgctacgcagacagtcctgctgctctagcagcaaggcagtaacaccacaaaagcaaaaccacatgggaaaactcagcactggtggtggtggcagtggacagatcaaggcacttcaactcatttggaaaatgtgaacactgatgacatggtataggagtgggtggggtgttgagccacccatcagaccctctttagctgtgcaagataaaagcagcctgggtcacccaggccacaaggccatggttaattcttaaggcaaggcaaatccatggatgagaagtgcaatgggcatagtaaaagtgcatgaattta

SEQ ID NO: 368663 - DNA, 1744 bp, Homo sapiens
  misc_feature (1294)..(1294): n is a, c, g, or t
  misc_feature (1297)..(1297): n is a, c, g, or t
  misc_feature (1300)..(1301): n is a, c, g, or t
  misc_feature (1304)..(1304): n is a, c, g, or t
  misc_feature (1329)..(1329): n is a, c, g, or t
  misc_feature (1334)..(1335): n is a, c, g, or t
  misc_feature (1337)..(1337): n is a, c, g, or t
  misc_feature (1346)..(1346): n is a, c, g, or t
  misc_feature (1348)..(1348): n is a, c, g, or t
  misc_feature (1364)..(1364): n is a, c, g, or t
  misc_feature (1370)..(1371): n is a, c, g, or t
  misc_feature (1376)..(1376): n is a, c, g, or t
  misc_feature (1382)..(1383): n is a, c, g, or t
  misc_feature (1395)..(1396): n is a, c, g, or t
  misc_feature (1398)..(1398): n is a, c, g, or t
  misc_feature (1403)..(1405): n is a, c, g, or t
  misc_feature (1412)..(1412): n is a, c, g, or t
  misc_feature (1415)..(1415): n is a, c, g, or t
  misc_feature (1417)..(1418): n is a, c, g, or t
  misc_feature (1420)..(1420): n is a, c, g, or t
cgtctgttcgcagagctgtgggcggagttgaggccttggaggctgagatgtggttctgcgcgtgtgcggacggctgtctgttaactccgcggtcagttcccggactggtggctggtctgcagggttgacctgcgcaatgcagaggctgcaggtagtgctgggccacctgaggggtccggccgattccggctggatgccgcaggccgcgccttgcctgagcggtgccccgcaggcctcggccgcggacgtggtggtggtgcacgggcggcgcacggccatctgccgggcgggccgcggcggcttcaaggacaccacccccgacgagcttctctcggcagtcatgaccgcggttctcaaggacgtgaatctgaggccggaacagctgggggacatctgtgtcggaaatgtgctgcagcctggggccggggcaatcatggcccgaatcgcccagtttctgagtgacatcccggagactgtgcctttgtccactgtcaatagacagtgttcgtcggggctacaggcagtggccagcatagcaggtggcatcagaaatgggtcttatgacattggcatggcctgtggggtggagtccatgtccctggctgacagagggaaccctggaaatattacttcgcgcttgatggagaaggagaaggccagagattgcctgattcctatggggataacctctgagaatgtggctgagcggtttggcatttcacgggagaagcaggatacctttgccctggcttcccagcagaaggcagcaagagcccagagcaagggctgtttccaagctgagattgtgcctgtgaccaccacggtccatgatgacaagggcaccaagaggagcatcactgtgacccaggatgagggtatccgccccagcaccaccatggagggcctggccaaactgaagcctgccttcaagaaagatggttctaccacagctggaaactctagccaggtgagtgatggggcagctgccatcctgctggcccggaggtccaaggcagaagagttgggccttcccatccttggggtcctgaggtcttatgcagtggttggggtcccacctgacatcatgggcattggacctgcctatgccatcccagtagctttgcaaaaagcagggctgacagtgagtgacgtggacatcttcgagatcaatgaggcctttgcaagccaggctgcctactgtgtggagaagctacgactcccccctgagaaggtgaaccccctggggggtgcagtggccttagggcacccactgggctgcactggggcacgacanttnttnnttntttttttttttttttatctcctttntaagnntncatacgtantnttttcctttttcttcnttactnnaattntatccnnttccttcttttnntnccctnnntatcttnttntnntntcttttttgtattcctattcatacagtcctgctgctctagcagcaaggcagtaacaccacaaaagcaaaaccacatgggaaaactcagcactggtggtggtggcagtggacagatcaaggcacttcaactcatttggaaaatgtgaacactgatgacatggtataggagtgggtggggtgttgagccacccatcagaccctctttagctgtgcaagataaaagcagcctgggtcacccaggccacaaggccatggttaattcttaaggcaaggcaaatccatggatgagaagtgcaatgggcatagtaaaagtgcatgaattta

SEQ ID NO: 368664 - DNA, 1318 bp, Homo sapiens
cgtctgttcgcagagctgtgggcggagttgaggccttggaggctgagatgtggttctgcgcgtgtgcggacggctgtctgttaactccgcggtcagttcccggactggtggctggtctgcagggttgacctgcgcaatgcagaggctgcaggtagtgctgggccacctgaggggtccggccgattccggctggatgccgcaggccgcgccttgcctgagcggtgccccgcaggcctcggccgcggacgtggtggtggtgcacgggcggcgcacggccatctgccgggcgggccgcggcggcttcaaggacaccacccccgacgagcttctctcggcagtcatgaccgcggttctcaaggacgtgaatctgaggccggaacagctgggggacatctgtgtcggaaatgtgctgcagcctggggccggggcaatcatggcccgaatcgcccagtttctgagtgacatcccggagactgtgcctttgtccactgtcaatagacagtgttcgtcggggctacaggcagtggccagcatagcaggtggcatcagaaatgggtcttatgacattggcatggcctgtggggtggagtccatgtccctggctgacagagggaaccctggaaatattacttcgcgcttgatggagaaggagaaggccagagattgcctgattcctatggggataacctctgagaatgtggctgagcggtttggcatttcacgggagaagcaggatacctttgccctggcttcccagcagaaggcagcaagagcccagagcaagggctgtttccaagctgagattgtgcctgtgaccaccacggtccatgatgacaagggcaccaagaggagcatcactgtgacccaggatgagggtatccgccccagcaccaccatggagggcctggccaaactgaagcctgccttcaagaaagatggttctaccacagctggaaactctagccaggtgagtgatggggcagctgccatcctgctggcccggaggtccaaggcagaagagttgggccttcccatccttggggtcctgaggtcttatgcagtggttggggtcccacctgacatcatgggcattggacctgcctatgccatcccagtagctttgcaaaaagcagaatgtgaacactgatgacatggtataggagtgggtggggtgttgagccacccatcagaccctctttagctgtgcaagataaaagcagcctgggtcacccaggccacaaggccatggttaattcttaaggcaaggcaaatccatggatgagaagtgcaatgggcatagtaaaagtgcatgaattta

SEQ ID NO: 368665 - DNA, 1277 bp, Homo sapiens
gcggtctgttagtagtatagtgatgccagcagctaggactgggagagataggagaagtaggactgctgtgattgtggcatcagaaatgggtcttatgacattggcatggcctgtggggtggagtccatgtccctggctgacagagggaaccctggaaatattacttcgcgcttgatggagaaggagaaggccagagattgcctgattcctatggggataacctctgagaatgtggctgagcggtttggcatttcacgggagaagcaggatacctttgccctggcttcccagcagaaggcagcaagagcccagagcaagggctgtttccaagctgagattgtgcctgtgaccaccacggtccatgatgacaagggcaccaagaggagcatcactgtgacccaggatgagggtatccgccccagcaccaccatggagggcctggccaaactgaagcctgccttcaagaaagatggttctaccacagctggaaactctagccaggtgagtgatggggcagctgccatcctgctggcccggaggtccaaggcagaagagttgggccttcccatccttggggtcctgaggtcttatgcagtggttggggtcccacctgacatcatgggcattggacctgcctatgccatcccagtagctttgcaaaaagcagggctgacagtgagtgacgtggacatcttcgagatcaatgaggcctttgcaagccaggctgcctactgtgtggagaagctacgactcccccctgagaaggtgaaccccctggggggtgcagtggccttagggcacccactgggctgcactggggcacgacaggtcatcacgctgctcaatgagctgaagcgccgtgggaagagggcatacggagtggtgtccatgtgcatcgggactggaatgggagccgctgccgtctttgaataccctgggaactgagtgaggtcccaggctggaggcgctacgcagacagtcctgctgctctagcagcaaggcagtaacaccacaaaagcaaaaccacatgggaaaactcagcactggtggtggtggcagtggacagatcaaggcacttcaactcatttggaaaatgtgaacactgatgacatggtataggagtgggtggggtgttgagccacccatcagaccctctttagctgtgcaagataaaagcagcctgggtcacccaggccacaaggccatggttaattcttaaggcaaggcaaatccatggatgagaagtgcaatgggcatagtaaaagtgcatgaattta

SEQ ID NO: 368666 - DNA, 1647 bp, Homo sapiens
cgtctgttcgcagagctgtgggcggagttgaggccttggaggctgagatgtggttctgcgcgtgtgcggacggctgtctgttaactccgcggtcagttcccggactggtggctggtctgcagggttgacctgcgcaatgcagaggctgcaggtagtgctgggccacctgaggggtccggccgattccggctggatgccgcaggccgcgccttgcctgagcggtgccccgcaggcctcggccgcggacgtggtggtggtgcacgggcggcgcacggccatctgccgggcgggccgcggcggcttcaaggacaccacccccgacgagcttctctcggcagtcatgaccgcggttctcaaggacgtgaatctgaggccggaacagctgggggacatctgtgtcggaaatgtgctgcagcctggggccggggcaatcatggcccgaatcgcccagtttctgagtgacatcccggagactgtgcctttgtccactgtcaatagacagtgttcgtcggggctacaggcagtggccagcatagcagggtggagtccatgtccctggctgacagagggaaccctggaaatattacttcgcgcttgatggagaaggagaaggccagagattgcctgattcctatggggataacctctgagaatgtggctgagcggtttggcatttcacgggagaagcaggatacctttgccctggcttcccagcagaaccaccacggtccatgatgacaagggcaccaagaggagcatcactgtgacccaggatgagggtatccgccccagcaccaccatggagggcctggccaaactgaagcctgccttcaagaaagatggttctaccacagctggaaactctagccaggtgagtgatggggcagctgccatcctgctggcccggaggtccaaggcagaagagttgggccttcccatccttggggtcctgaggtcttatgcagtggttggggtcccacctgacatcatgggcattggacctgcctatgccatcccagtagctttgcaaaaagcagggctgacagtgagtgacgtggacatcttcgagatcaatgaggcctttgcaagccaggctgcctactgtgtggagaagctacgactcccccctgagaaggtgaaccccctggggggtgcagtggccttagggcacccactgggctgcactggggcacgacaggtcatcacgctgctcaatgagctgaagcgccgtgggaagagggcatacggagtggtgtccatgtgcatcgggactggaatgggagccgctgccgtctttgaataccctgggaactgagtgaggtcccaggctggaggcgctacgcagacagtcctgctgctctagcagcaaggcagtaacaccacaaaagcaaaaccacatgggaaaactcagcactggtggtggtggcagtggacagatcaaggcacttcaactcatttggaaaatgtgaacactgatgacatggtataggagtgggtggggtgttgagccacccatcagaccctctttagctgtgcaagataaaagcagcctgggtcacccaggccacaaggccatggttaattcttaaggcaaggcaaatccatggatgagaagtgcaatgggcatagtaaaagtgcatgaattta

SEQ ID NO: 368667 - DNA, 1176 bp, Homo sapiens
cgtctgttcgcagagctgtgggcggagttgaggccttggaggctgagatgtggttctgcgcgtgtgcggacggctgtctgttaactccgcggtcagttcccggactggtggctggtctgcagggttgacctgcgcaatgcagaggctgcaggtagtgctgggccacctgaggggtccggccgattccggctggatgccgcaggccgcgccttgcctgagcggtgccccgcaggcctcggccgcggacgtggtggtggtgcacgggcggcgcacggccatctgccgggcgggccgcggcggcttcaaggacaccacccccgacgagcttctctcggcagtcatgaccgcggttctcaaggacgtgaatctgaggccggaacagctgggggacatctgtgtcggaaatgtgctgcagcctggggccggggcaatcatggcccgaatcgcccagtttctgagtgacatcccggagactgtgcctttgtccactgtcaatagacagtgttcgtcggggctacaggcagtggccagcatagcaggtggcatcagaaatgggtcttatgacattggcatggcctgtggggtggagtccatgtccctggctgacagagggaaccctggaaatattacttcgcgcttgatggagaaggagaaggccagagattgcctgattcctatggggataacctctgagaatgtggctgagcggtttggcatttcacgggagaagcaggatacctttgccctggcttcccagcagaaggcagcaagagcccagagcaagggctgtttccaagctgagattgtgcctgtgagtgctggggcggataccctcatcctgggtcacagtgatgctcctcttggtgcccttgtcatcatggaccgtggtggtcacgggccagtacggatgtgcgggtgatgggaacgtggtgggggaagcagaggatgctggagccctcgaggagaacagacacaggctggggcagcaggggctgggggcggccacaatcactgctcaggttctccaaagacgtccgtcctgttgcgcttcatgttctcaaaggtcaaggccggccagccatgggttggagatgtcttgatgtcgtgccggtggctcacagtgtgtgtgcctcgtagaccggacagcaacctggtccacaacatataagggtctcc

SEQ ID NO: 368668 - DNA, 816 bp, Homo sapiens
cgtctgttcgcagagctgtgggcggagttgaggccttggaggctgagatgtggttctgcgcgtgtgcggacggctgtctgttaactccgcggtcagttcccggactggtggctggtctgcagggttgacctgcgcaatgcagaggctgcaggtagtgctgggccacctgaggggtccggccgattccggctggatgccgcaggccgcgccttgcctgagcggtgccccgcaggcctcggccgcggacgtggtggtggtgcacgggcggcgcacggccatctgccgggcgggccgcggcggcttcaaggacaccacccccgacgagcttctctcggcagtcatgaccgcggttctcaaggacgtgaatctgaggccggaacagctgggggacatctgtgtcgtgacatcccggagactgtgcctttgtccactgtcaatagacagtgttcgtcggggctacaggcagtggccagcatagcagggtggagtccatgtccctggctgacagagggaaccctggaaatattacttcgcgcttgatggagaaggagaaggccagagattgcctgattcctatggggataacctctgagaatgtggctgagcggtttggcatttcacgggagaagcaggatacctttgccctggcttcccagcagaagtgagtgctgattggggaggaatgtttaaagggctggagagtgaggttttgagtctatctaagtggtctgaagtggcaccatttcgtggttactgctgggcagtgagtgctttccaggccttgtgccacccaggttgggggtgggaagtaggaag

SEQ ID NO: 368669 - DNA, 177 bp, Homo sapiens
tgtggagaagctacgactcccccctgagaaggtgaaccccctggggggtgcagtggccttagggcacccactgggctgcactggggcacgacaggtcatcacgctgctcaatgagctgaagcgccgtgggaagaggtaaggctttgctcctggcggtggggtcatagggggatatcc

SEQ ID NO: 368670 - DNA, 505 bp, Homo sapiens
cgtctgttcgcagagctgtgggcggagttgaggccttggaggctgagatgtggttctgcgcgtgtgcggacggctgtctgttaactccgcggtcagttcccggactggtggctggtctgcagggttgacctgcgcaatgcagaggctgcaggtagtgctgggccacctgaggggtccggccgattccggctggatgccgcaggccgcgccttgcctgagcggtgccccgcaggcctcggccgcggacgtggtggtggtgcacgggcggcgcacggccatctgccgggcgggccgcggcggcttcaaggacaccacccccgacgagcttctctcggcagtcatgaccgcggttctcaaggacgtgaatctgaggccggaacagctgggggacatctgtgtcgaaatgtcctgcctccgcgcagcctgcagcgggagaccctgtccccgccccagccgtcctcctggggtggaccctagtttaataaagattcaccaagtttcacgc

SEQ ID NO: 368671 - DNA, 1750 bp, Homo sapiens
  misc_feature (29)..(29): n is a, c, g, or t
  misc_feature (40)..(40): n is a, c, g, or t
ggacaccagggaactaagagactacaagntttgtccacanaaaagcacggcgttattatatactgaactgtgcatactaaacggtctaagggtacgagctgggttcccggactggtggctggtctgcagggttgacctgcgcaatgcagaggctgcaggtagtgctgggccacctgaggggtccggccgattccggctggatgccgcaggccgcgccttgcctgagcggtgccccgcaggcctcggccgcggacgtggtggtggtgcacgggcggcgcacggccatctgccgggcgggccgcggcggcttcaaggacaccacccccgacgagcttctctcggcagtcatgaccgcggttctcaaggacgtgaatctgaggccggaacagctgggggacatctgtgtcggaaatgtgctgcagcctggggccggggcaatcatggcccgaatcgcccagtttctgagtgacatcccggagactgtgcctttgtccactgtcaatagacagtgttcgtcggggctacaggcagtggccagcatagcaggtggcatcagaaatgggtcttatgacattggcatggcctgtggggtggagtccatgtccctggctgacagagggaaccctggaaatattacttcgcgcttgatggagaaggagaaggccagagattgcctgattcctatggggataacctctgagaatgtggctgagcggtttggcatttcacgggagaagcaggatacctttgccctggcttcccagcagaaggcagcaagagcccagagcaagggctgtttccaagctgagattgtgcctgtgaccaccacggtccatgatgacaagggcaccaagaggagcatcactgtgacccaggatgagggtatccgccccagcaccaccatggagggcctggccaaactgaagcctgccttcaagaaagatggttctaccacagctggaaactctagccaggtgagtgatggggcagctgccatcctgctggcccggaggtccaaggcagaagagttgggccttcccatccttggggtcctgaggtcttatgcagtggttggggtcccacctgacatcatgggcattggacctgcctatgccatcccagtagctttgcaaaaagcagggctgacagtgagtgacgtggacatcttcgagatcaatgaggcctttgcaagccaggctgcctactgtgtggagaagctacgactcccccctgagaaggtgaaccccctggggggtgcagtggccttagggcacccactgggctgcactggggcacgacaggtcatcacgctgctcaatgagctgaagcgccgtgggaagagggcatacggagtggtgtccatgtgcatcgggactggaatgggagccgctgccgtctttgaataccctgggaactgagtgaggtcccaggctggaggcgctacgcagacagtcctgctgctctagcagcaaggcagtaacaccacaaaagcaaaaccacatgggaaaactcagcactggtggtggtggcagtggacagatcaaggcacttcaactcatttggaaaatgtgaacactgatgacatggtataggagtgggtggggtgttgagccacccatcagaccctctttagctgtgcaagataaaagcagcctgggtcacccaggccacaaggccatggttaattcttaaggcaaggcaaatccatggatgagaagtgcaatgggcatagtaaaagtgcatgaattta

SEQ ID NO: 368672 - DNA, 2033 bp, Homo sapiens
cgtctgttcgcagagctgtgggcggagttgaggccttggaggctgagatgtggttctgcgcgtgtgcggacggctgtctgttaactccgcggtcagttcccggactggtggctggtctgcagggttgacctgcgcaatgcagaggctgcaggtagtgctgggccacctgaggggtccggccgattccggctggatgccgcaggccgcgccttgcctgagcggtgccccgcaggcctcggccgcggacgtggtggtggtgcacgggcggcgcacggccatctgccgggcgggccgcggcggcttcaaggacaccacccccgacgagcttctctcggcagtcatgaccgcggttctcaaggacgtgaatctgaggccggaacagctgggggacatctgtgtcggaaatgtgctgcagcctggggccggggcaatcatggcccgaatcgcccagtttctgagtgacatcccggagactgtgcctttgtccactgtcaatagacagtgttcgtcggggctacaggcagtggccagcatagcaggtggcatcagaaatgggtcttatgacattggcatggcctgtggggtggagtccatgtccctggctgacagagggaaccctggaaatattacttcgcgcttgatggagaaggagaaggccagagattgcctgattcctatggggataacctctgagaatgtggctgagcggtttggcatttcacgggagaagcaggatacctttgccctggcttcccagcagaaggcagcaagagcccagagcaagggctgtttccaagctgagattgtgcctgtgaccaccacggtccatgatgacaagggcaccaagaggagcatcactgtgacccaggatgagggtatccgccccagcaccaccatggagggcctggccaaactgaagcctgccttcaagaaagatggttctaccacagctggaaactctagccaggtgagtgatggggcagctgccatcctgctggcccggaggtccaaggcagaagagttgggccttcccatccttggggtcctgaggtcttatgcagtggttggggtcccacctgacatcatgggcattggacctgcctatgccatcccagtagctttgcaaaaagcagggctgacagtgagtgacgtggacatcttcgagatcaatgaggcctttgcaagccaggctgcctactgtgtggagaagctacgactcccccctgagaaggtgaaccccctggggggtgcagtggccttagggcacccactgggctgcactggggcacgacaggtcatcacgctgctcaatgagctgaagcgccgtgggaagagggcatacggagtggtgtccatgtgcatcgggactggaatgggagccgctgccgtctttgaataccctgggaactgagtgaggtcccaggctggaggcgctacgcagacagtcctgctgctctagcagcaaggcagtaacaccacaaaagcaaaaccacatgggaaaactcagcactggtggtggtggcagtggacagatcaaggcacttcaactcatttggaaaatgtgaacactgatgacatggtataggagtgggtggggtgttgagccacccatcagaccctctttagctgtgcaagataaaagcagcctgggtcacccaggccacaaggccatggttaattcttaaggcaaggcaaatccatggatgagaagtgcaatgggcatagtaaaagtgcatgaatttaaaaaaaataaataaaaagagcgaagaaaaaaaatatattgggaaagaaagagaactaaaaaaaagtttatgaaaacgaatataaaggacagcaggaccacagtgttgatagtagacacaggtgaaaagaggagatcacaacaaggacaatacggaggagagaaagagggaaggaataccacacgaagaaaaaacacccggggagaaaccgagaagttcaacaacaacacagaagagctcgacagaaaaaggggaataaaaaaaaggacacaagaaaaagaataacaaacg

SEQ ID NO: 368673 - DNA, 2025 bp, Homo sapiens
cgtctgttcgcagagctgtgggcggagttgaggccttggaggctgagatgtggttctgcgcgtgtgcggacggctgtctgttaactccgcggtcagttcccggactggtggctggtctgcagggttgacctgcgcaatgcagaggctgcaggtagtgctgggccacctgaggggtccggccgattccggctggatgccgcaggccgcgccttgcctgagcggtgccccgcaggcctcggccgcggacgtggtggtggtgcacgggcggcgcacggccatctgccgggcgggccgcggcggcttcaaggacaccacccccgacgagcttctctcggcagtcatgaccgcggttctcaaggacgtgaatctgaggccggaacagctgggggacatctgtgtcggaaatgtgctgcagcctggggccggggcaatcatggcccgaatcgcccagtttctgagtgacatcccggagactgtgcctttgtccactgtcaatagacagtgttcgtcggggctacaggcagtggccagcatagcaggtggcatcagaaatgggtcttatgacattggcatggcctgtggggtggagtccatgtccctggctgacagagggaaccctggaaatattacttcgcgcttgatggagaaggagaaggccagagattgcctgattcctatggggataacctctgagaatgtggctgagcggtttggcatttcacgggagaagcaggatacctttgccctggcttcccagcagaaggcagcaagagcccagagcaagggctgtttccaagctgagattgtgcctgtgaccaccacggtccatgatgacaagggcaccaagaggagcatcactgtgacccaggatgagggtatccgccccagcaccaccatggagggcctggccaaactgaagcctgccttcaagaaagatggttctaccacagctggaaactctagccaggtgagtgatggggcagctgccatcctgctggcccggaggtccaaggcagaagagttgggccttcccatccttggggtcctgaggtcttatgcagtggttggggtcccacctgacatcatgggcattggacctgcctatgccatcccagtagctttgcaaaaagcagaggtaaggtggctccttcatatagtatctgggtcccacctggatcctgcagctgccctgcatgctgttgccaggggcatgagggtggtcctgtgggtgctgcagagtggaggtggggcaggctagtgtcccatacttcaagcccttcctgaccccacagctgggattggctcacccttctggaagagacacacaccaggcagcctgtaggcccatggatggggtgggccccaggggaggcagagggccagtgtgtcagctcaggtctttaccttgtctgcagggctgacagtgagtgacgtggacatcttcgagatcaatgaggcctttgcaagccaggctgcctactgtgtggagaagctacgactcccccctgagaaggtgaaccccctggggggtgcagtggccttagggcacccactgggctgcactggggcacgacaggtcatcacgctgctcaatgagctgaagcgccgtgggaagagggcatacggagtggtgtccatgtgcatcgggactggaatgggagccgctgccgtctttgaataccctgggaactgagtgaggtcccaggctggaggcgctacgcagacagtcctgctgctctagcagcaaggcagtaacaccacaaaagcaaaaccacatgggaaaactcagcactggtggtggtggcagtggacagatcaaggcacttcaactcatttggaaaatgtgaacactgatgacatggtataggagtgggtggggtgttgagccacccatcagaccctctttagctgtgcaagataaaagcagcctgggtcacccaggccacaaggccatggttaattcttaaggcaaggcaaatccatggatgagaagtgcaatgggcatagtaaaagtgcatgaattta

SEQ ID NO: 368674 - DNA, 2261 bp, Homo sapiens
cgtctgttcgcagagctgtgggcggagttgaggccttggaggctgagatgtggttctgcgcgtgtgcggacggctgtctgttaactccgcggtcagttcccggactggtggctggtctgcagggttgacctgcgcaatgcagaggctgcaggtagtgctgggccacctgaggggtccggccgattccggctggatgccgcaggccgcgccttgcctgagcggtgccccgcaggcctcggccgcggacgtggtggtggtgcacgggcggcgcacggccatctgccgggcgggccgcggcggcttcaaggacaccacccccgacgagcttctctcggcagtcatgaccgcggttctcaaggacgtgaatctgaggccggaacagctgggggacatctgtgtcggaaatgtgctgcagcctggggccggggcaatcatggcccgaatcgcccagtttctgagtgacatcccggagactgtgcctttgtccactgtcaatagacagtgttcgtcggggctacaggcagtggccagcatagcaggtggcatcagaaatgggtcttatgacattggcatggcctgtggggtggagtccatgtccctggctgacagagggaaccctggaaatattacttcgcgcttgatggagaaggagaaggccagagattgcctgattcctatggggataacctctgagaatgtggctgagcggtttggcatttcacgggagaagcaggatacctttgccctggcttcccagcagaaggcagcaagagcccagagcaagggctgtttccaagctgagattgtgcctgtgaccaccacggtccatgatgacaagggcaccaagaggagcatcactgtgacccaggatgagggtatccgccccagcaccaccatggagggcctggccaaactgaagcctgccttcaagaaagatggttctaccacagctggaaactctagccaggtgagtgatggggcagctgccatcctgctggcccggaggtccaaggcagaagagttgggccttcccatccttggggtcctgaggtcttatgcagtggttggggtcccacctgacatcatgggcattggacctgcctatgccatcccagtagctttgcaaaaagcagggctgacagtgagtgacgtggacatcttcgagatcaatgaggcctttgcaagccaggctgcctactgtgtggagaagctacgactcccccctgagaaggtgaaccccctggggggtgcagtggccttagggcacccactgggctgcactggggcacgacaggtcatcacgctgctcaatgagctgaagcgccgtgggaagagggcatacggagtggtgtccatgtgcatcgggactggaatgggagccgctgccgtctttgaataccctgggaactgagtgaggtcccaggctggaggcgctacgcagacagtcctgctgctctagcagcaaggcagtaacaccacaaaagcaaaaccacatgggaaaactcagcactggtggtggtggcagtggacagatcaaggcacttcaactcatttggaagagccttggccccggagccgcagggtgcaggacttctcaccgagcacaccttccaccaccatcgtggactcgtacagctcactactcctgtggggagcatgtgggggctgaggcctccctattccttgagacacaacaatattgaaattagaccaactgataaccctacaatagcctctaagtcttcaagtgaaaagaagagtcgtacgtatctcactttaaatcaaaatgattaagctaaaaaatgattaagcttagtgaggaaggcacattcaaagctgacacaggcagaaagctagctttgtgccaaacagacaaattgtgaaatgcaaagaaatgtaatatctagcaaatgccctatttgtgaaaattttgaagtaaaagataataaagcaaataaaatgttatgcaaacaaggaaaagaaaataggagaaagaaataatgtgatcaggttaactgataaaacagaggagaacaaaactgctgcttgaaatccctgcacaggttacgtgcaatgcaatccttaatgatggaatgagggcatcaaagggcgggggagctgagcaaagcactgctgaagatccattggcttagccaggtcagggctccagccccagagctcagagcaacacatggaagagtgggctgccccaggcacagaagtcaaatatcacatgatctcactcaagtgggtgctaaaaa

SEQ ID NO: 368675 - DNA, 1528 bp, Homo sapiens
cgtctgttcgcagagctgtgggcggagttgaggccttggaggctgagatgtggttctgcgcgtgtgcggacggctgtctgttaactccgcggtcagttcccggactggtggctggtctgcagggttgacctgcgcaatgcagaggctgcaggtagtgctgggccacctgaggggtccggccgattccggctggatgccgcaggccgcgccttgcctgagcggtgccccgcaggcctcggccgcggacgtggtggtggtgcacgggcggcgcacggccatctgccgggcgggccgcggcggcttcaaggacaccacccccgacgagcttctctcggcagtcatgaccgcggttctcaaggacgtgaatctgaggccggaacagctgggggacatctgtgtcggaaatgtgctgcagcctggggccggggcaatcatggcccgaatcgcccagtttctgagtgacatcccggagactgtgcctttgtccactgtcaatagacagtgttcgtcggggctacaggcagtggccagcatagcaggtggcatcagaaatgggtcttatgacattggcatggcctgtggggtggagtccatgtccctggctgacagagggaaccctggaaatattacttcgcgcttgatggagaaggagaaggccagagattgcctgattcctatggggataacctctgagaatgtggctgagcggtttggcatttcacgggagaagcaggatacctttgccctggcttcccagcagaaggcagcaagagcccagagcaagggctgtttccaagctgagattgtgcctgtgaccaccacggtccatgatgacaagggcaccaagaggagcatcactgtgacccaggatgagggtatccgccccagcaccaccatggagggcctggccaaactgaagcctgccttcaagaaagatggttctaccacagctggaaactctagccaggtgagtgatggggcagctgccatcctgctggcccggaggtccaaggcagaagagttgggccttcccatccttggggtcctgaggtcttatgcagtggttggggtcccacctggtcatcacgctgctcaatgagctgaagcgccgtgggaagagggcatacggagtggtgtccatgtgcatcgggactggaatgggagccgctgccgtctttgaataccctgggaactgagtgaggtcccaggctggaggcgctacgcagacagtcctgctgctctagcagcaaggcagtaacaccacaaaagcaaaaccacatgggaaaactcagcactggtggtggtggcagtggacagatcaaggcacttcaactcatttggaaaatgtgaacactgatgacatggtataggagtgggtggggtgttgagccacccatcagaccctctttagctgtgcaagataaaagcagcctgggtcacccaggccacaaggccatggttaattcttaaggcaaggcaaatccatggatgagaagtgcaatgggcatagtaaaagtgcatgaattta

SEQ ID NO: 368676 - DNA, 1700 bp, Homo sapiens
cgtctgttcgcagagctgtgggcggagttgaggccttggaggctgagatgtggttctgcgcgtgtgcggacggctgtctgttaactccgcggtcagttcccggactggtggctggtctgcagggttgacctgcgcaatgcagaggctgcaggtagtgctgggccacctgaggggtccggccgattccggctggatgccgcaggccgcgccttgcctgagcggtgccccgcaggcctcggccgcggacgtggtggtggtgcacgggcggcgcacggccatctgccgggcgggccgcggcggcttcaaggacaccacccccgacgagcttctctcggcagtcatgaccgcggttctcaaggacgtgaatctgaggccggaacagctgggggacatctgtgtcggaaatgtgctgcagcctggggccggggcaatcatggcccgaatcgcccagtttctgagtgacatcccggagactgtgcctttgtccactgtcaatagacagtgttcgtcggggctacaggcagtggccagcatagcagggtggagtccatgtccctggctgacagagggaaccctggaaatattacttcgcgcttgatggagaaggagaaggccagagattgcctgattcctatggggataacctctgagaatgtggctgagcggtttggcatttcacgggagaagcaggatacctttgccctggcttcccagcagaaggcagcaagagcccagagcaagggctgtttccaagctgagattgtgcctgtgaccaccacggtccatgatgacaagggcaccaagaggagcatcactgtgacccaggatgagggtatccgccccagcaccaccatggagggcctggccaaactgaagcctgccttcaagaaagatggttctaccacagctggaaactctagccaggtgagtgatggggcagctgccatcctgctggcccggaggtccaaggcagaagagttgggccttcccatccttggggtcctgaggtcttatgcagtggttggggtcccacctgacatcatgggcattggacctgcctatgccatcccagtagctttgcaaaaagcagggctgacagtgagtgacgtggacatcttcgagatcaatgaggcctttgcaagccaggctgcctactgtgtggagaagctacgactcccccctgagaaggtgaaccccctggggggtgcagtggccttagggcacccactgggctgcactggggcacgacaggtcatcacgctgctcaatgagctgaagcgccgtgggaagagggcatacggagtggtgtccatgtgcatcgggactggaatgggagccgctgccgtctttgaataccctgggaactgagtgaggtcccaggctggaggcgctacgcagacagtcctgctgctctagcagcaaggcagtaacaccacaaaagcaaaaccacatgggaaaactcagcactggtggtggtggcagtggacagatcaaggcacttcaactcatttggaaaatgtgaacactgatgacatggtataggagtgggtggggtgttgagccacccatcagaccctctttagctgtgcaagataaaagcagcctgggtcacccaggccacaaggccatggttaattcttaaggcaaggcaaatccatggatgagaagtgcaatgggcatagtaaaagtgcatgaattta

SEQ ID NO: 368677 - DNA, 1644 bp, Homo sapiens
cgtctgttcgcagagctgtgggcggagttgaggccttggaggctgagatgtggttctgcgcgtgtgcggacggctgtctgttaactccgcggtcagttcccggactggtggctggtctgcagggttgacctgcgcaatgcagaggctgcaggtagtgctgggccacctgaggggtccggccgattccggctggatgccgcaggccgcgccttgcctgagcggtgccccgcaggcctcggccgcggacgtggtggtggtgcacgggcggcgcacggccatctgccgggcgggccgcggcggcttcaaggacaccacccccgacgagcttctctcggcagtcatgaccgcggttctcaaggacgtgaatctgaggccggaacagctgggggacatctgtgtcggaaatgtgctgcagcctggggccggggcaatcatggcccgaatcgcccagtttctgagtgacatcccggagactgtgcctttgtccactgtcaatagacagtgttcgtcggggctacaggcagtggccagcatagcaggtggcatcagaaatgggtcttatgacattggcatggcctgtgggataacctctgagaatgtggctgagcggtttggcatttcacgggagaagcaggatacctttgccctggcttcccagcagaaggcagcaagagcccagagcaagggctgtttccaagctgagattgtgcctgtgaccaccacggtccatgatgacaagggcaccaagaggagcatcactgtgacccaggatgagggtatccgccccagcaccaccatggagggcctggccaaactgaagcctgccttcaagaaagatggttctaccacagctggaaactctagccaggtgagtgatggggcagctgccatcctgctggcccggaggtccaaggcagaagagttgggccttcccatccttggggtcctgaggtcttatgcagtggttggggtcccacctgacatcatgggcattggacctgcctatgccatcccagtagctttgcaaaaagcagggctgacagtgagtgacgtggacatcttcgagatcaatgaggcctttgcaagccaggctgcctactgtgtggagaagctacgactcccccctgagaaggtgaaccccctggggggtgcagtggccttagggcacccactgggctgcactggggcacgacaggtcatcacgctgctcaatgagctgaagcgccgtgggaagagggcatacggagtggtgtccatgtgcatcgggactggaatgggagccgctgccgtctttgaataccctgggaactgagtgaggtcccaggctggaggcgctacgcagacagtcctgctgctctagcagcaaggcagtaacaccacaaaagcaaaaccacatgggaaaactcagcactggtggtggtggcagtggacagatcaaggcacttcaactcatttggaaaatgtgaacactgatgacatggtataggagtgggtggggtgttgagccacccatcagaccctctttagctgtgcaagataaaagcagcctgggtcacccaggccacaaggccatggttaattcttaaggcaaggcaaatccatggatgagaagtgcaatgggcatagtaaaagtgcatgaattta

SEQ ID NO: 368678 - DNA, 1868 bp, Homo sapiens
cgtctgttcgcagagctgtgggcggagttgaggccttggaggctgagatgtggttctgcgcgtgtgcggacggctgtctgttaactccgcggtcagttcccggactggtggctggtctgcagggttgacctgcgcaatgcagaggctgcaggtagtgctgggccacctgaggggtccggccgattccggctggatgccgcaggccgcgccttgcctgagcggtgccccgcaggcctcggccgcggacgtggtggtggtgcacgggcggcgcacggccatctgccgggcgggccgcggcggcttcaaggacaccacccccgacgagcttctctcggcagtcatgaccgcggttctcaaggacgtgaatctgaggccggaacagctgggggacatctgtgtcggaaatgtgctgcagcctggggccggggcaatcatggcccgaatcgcccagtttctgagtgacatcccggagactgtgcctttgtccactgtcaatagacagtgttcgtcggggctacaggcagtggccagcatagcagggtggagtccatgtccctggctgacagagggaaccctggaaatattacttcgcgcttgatggagaaggagaaggccagagattgcctgattcctatggggataacctctgagaatgtggctgagcggtttggcatttcacgggagaagcaggatacctttgccctggcttcccagcagaaggcagcaagagcccagagcaagggctgtttccaagctgagattgtgcctgtgaccaccacggtccatgatgacaagggcaccaagaggagcatcactgtgacccaggatgagggtatccgccccagcaccaccatggagggcctggccaaactgaagcctgccttcaagaaagatggttctaccacagctggtgagactggtccggggtaggggtatgagaaagcaggccatggccatgctgggtgctgtactctgggaacctggaatagaccaggcccctctgcaaagtagaagtgggagggctgggatctcctcatccccaccccgatgccttcttaccccaacagtttgcccctaggaaactctagccaggtgagtgatggggcagctgccatcctgctggcccggaggtccaaggcagaagagttgggccttcccatccttggggtcctgaggtcttatgcagtggttggggtcccacctgacatcatgggcattggacctgcctatgccatcccagtagctttgcaaaaagcagggctgacagtgagtgacgtggacatcttcgagatcaatgaggcctttgcaagccaggctgcctactgtgtggagaagctacgactcccccctgagaaggtgaaccccctggggggtgcagtggccttagggcacccactgggctgcactggggcacgacaggtcatcacgctgctcaatgagctgaagcgccgtgggaagagggcatacggagtggtgtccatgtgcatcgggactggaatgggagccgctgccgtctttgaataccctgggaactgagtgaggtcccaggctggaggcgctacgcagacagtcctgctgctctagcagcaaggcagtaacaccacaaaagcaaaaccacatgggaaaactcagcactggtggtggtggcagtggacagatcaaggcacttcaactcatttggaaaatgtgaacactgatgacatggtataggagtgggtggggtgttgagccacccatcagaccctctttagctgtgcaagataaaagcagcctgggtcacccaggccacaaggccatggttaattcttaaggcaaggcaaatccatggatgagaagtgcaatgggcatagtaaaagtgcatgaattta

SEQ ID NO: 368679 - DNA, 1464 bp, Homo sapiens
cgtctgttcgcagagctgtgggcggagttgaggccttggaggctgagatgtggttctgcgcgtgtgcggacggctgtctgttaactccgcggtcagttcccggactggtggctggtctgcagggttgacctgcgcaatgcagaggctgcaggtagtgctgggccacctgaggggtccggccgattccggctggatgccgcaggccgcgccttgcctgagcggtgccccgcaggcctcggccgcggacgtggtggtggtgcacgggcggcgcacggccatctgccgggcgggccgcggcggcttcaaggacaccacccccgacgagcttctctcggcagtcatgaccgcggttctcaaggacgtgaatctgaggccggaacagctgggggacatctgtgtcggaaatgtgctgcagcctggggccggggcaatcatggcccgaatcgcccagtttctgagtgacatcccggagactgtgcctttgtccactgtcaatagacagtgttcgtcggggctacaggcagtggccagcatagcaggtggcatcagaaatgggtcttatgacattggcatggcctgtgggataacctctgagaatgtggctgagcggtttggcatttcacgggagaagcaggatacctttgccctggcttcccagcagaaggcagcaagagcccagagcaagggctgtttccaagctgagattgtgcctgtgaccaccacggtccatgatgacaagggcaccaagaggagcatcactgtgacccaggatgagggtatccgccccagcaccaccatggagggcctggccaaactgaagcctgccttcaagaaagatggttctaccacagctgggctgacagtgagtgacgtggacatcttcgagatcaatgaggcctttgcaagccaggctgcctactgtgtggagaagctacgactcccccctgagaaggtgaaccccctggggggtgcagtggccttagggcacccactgggctgcactggggcacgacaggtcatcacgctgctcaatgagctgaagcgccgtgggaagagggcatacggagtggtgtccatgtgcatcgggactggaatgggagccgctgccgtctttgaataccctgggaactgagtgaggtcccaggctggaggcgctacgcagacagtcctgctgctctagcagcaaggcagtaacaccacaaaagcaaaaccacatgggaaaactcagcactggtggtggtggcagtggacagatcaaggcacttcaactcatttggaaaatgtgaacactgatgacatggtataggagtgggtggggtgttgagccacccatcagaccctctttagctgtgcaagataaaagcagcctgggtcacccaggccacaaggccatggttaattcttaaggcaaggcaaatccatggatgagaagtgcaatgggcatagtaaaagtgcatgaattta

SEQ ID NO: 368680 - DNA, 646 bp, Homo sapiens
cgtctgttcgcagagctgtgggcggagttgaggccttggaggctgagatgtggttctgcgcgtgtgcggacggctgtctgttaactccgcggtcagttcccggactggtggctggtctgcagggttgacctgcgcaatgcagaggctgcaggtagtgctgggccacctgaggggtccggccgattccggctggatgccgcaggccgcgccttgcctgagcggtgccccgcaggcctcggccgcggacgtggtggtggtgcacgggcggcgcacggccatctgccgggcgggccgcggcggcttcaaggacaccacccccgacgagcttctctcggcagtcatgaccgcggttctcaaggacgtgaatctgaggccggaacagctgggggacatctgtgtcggaaatgtgctgcagcctggggccggggcaatcatggcccgaatcgcccagtttctgagtgacatcccggagactgtgcctttgtccactgtcaatagacagtgttcgtcggggctacaggcagtggccagcatagcaggtggcatcagaaatgggtcttatgacattggcatggcctgtgggtaagaatttttttctgccggagcttattaaccaacttgtgacaataaaactaattttcatctg

SEQ ID NO: 368681 - DNA, 662 bp, Homo sapiens
ttgcagtgagtcaagatcacgccactagactccagcctggtgacagagcgagacttcgtctcaaaaaaaaagaaatggccttttgttagatttaaaccgacatactgaaaaattacaaaacattgctgaaagaaattaaagacttaaataaatggaaagacatccatgttcatagattggaagacttaatattgttaagatggcaatactccaaatttatccacagattgaacacaatccctataaaaatcttacttgccattcttgcagaaattgacaagctgcttgtgaagttcatgtggaaattcaagggaatcacaataggcaaaaatgttggcaaaattgaataacttacacgccgtggttttaaagcctattacaaagctgtagtaatcaaaactgcacagtaataaaaactggcataaggagagatataggtcaatggaataaaatggagagttcagaaataaacacatctatttatcatcaattgattttcaaagagggtaccaagactattcagtggggaaagaatagtctccattcaacgaatggtgctgggaaaaggatatctacatgcaaaagaatgaggctgggcacctatttcacaccatgcacaaaagttaagtccaaatggttcaacaggcatgttagtgcagaag

SEQ ID NO: 368682 - DNA, 696 bp, Homo sapiens
ttgcagtgagtcaagatcacgccactagactccagcctggtgacagagcgagacttcgtctcaaaaaaaaagaaatggccttttgttagatttaaaccgacatactgaaaaattacaaaacattgctgaaagaaattaaagacttaaataaatggaaagacatccatgttcatagattggaagacttaatattgttaagatggcaatactccaaatttatccacagattgaacacaatccctataaaaatcttacttgccattcttgcagaaattgacaagctgcttgtgaagttcatgtggaaattcaagggaatcacaataggcaaaaatgttggcaaaattgaataacttacacgccgtggttttaaagcctattacaaagctgtagtaatcaaaactgcacagtaataaaaactggcataaggagagatataggtcaatggaataaaatggagagttcagaaataaacacatctatttatcatcaattgattttcaaagagggtaccaagactattcagtggggaaagaatagtctccattcaacgaatggtgctgggaaaaggatatctacatgcaaaagaatgaggctgggcacctatttcacaccatgcacaaaagaggctgggcacctatttcacaccatgcacaaaagttaagtccaaatggttcaacaggcatgttagtgcagaag

SEQ ID NO: 368683 - DNA, 373 bp, Homo sapiens
agttcaagctcttccctcccaaagtcacatgagtgaaatgtgtagctatactggtatcccttgacaggtaggcttaaaatcccttctttaggccaggcgcggtagctcacgcctgtaatcccagcactttgggagatcgaggcggatcacttgaggtcaggagttcgagaccagtctggccaacatggcaaaaccccgtctctactaaaaatgtaaaaatttagccgaacatggtggcgtatacctgtagtcccagctactctggaaactgaggcaggaaaatcacttgaacctgggaagtggaggttacagtgaactgagatcatgccactgtactccagcctgggcaacagagttagactctgtctcaaaa

SEQ ID NO: 368684 - DNA, 720 bp, Homo sapiens
  misc_feature (86)..(86): n is a, c, g, or t
cctggctgccaggtctggagagtcggcttgactacactgtgtggagcaagttttaaagaagcaaaggcagacctgagcatgacggntttttcgaggtaggagtcgactcctgtgaggtatggtgctgggtgcagatgcagtgtggctctggatagcaccttatggacagttgtgtccccaaggaaggatgagaatagctactgaagtcctaaagagcaagcctaactcaagccattggcacacaggcattagacagaaagctggaagttgaaatggtggagtccaacttgcctggaccagcttaatggttctgctcctggtaacgtttttatccatggatgacttgcttgggtaaggacatgaagacagttcctgtcataccttttaaaggtatggagagtcggcttgactacactgtgtggagcaagttttaaagaagcaaaggactcagaattcatgattgaagaaatgcaggcagacctgttatcctaaactagggtttttaatgaccacaacaagcaagcatgcagcttactgcttgaaagggtcttgcctcacccaagctagagtgcagtggcctttgaagcttactacagcctcaaacttctgggctcaagtgatcctcagcctcccagtggtctttgtagactgcctgatggagtctcatggcacaagaagattaaaacagtgtctccaattttaataaatttttgcaatcca

SEQ ID NO: 368685 - DNA, 681 bp, Homo sapiens
  misc_feature (86)..(86): n is a, c, g, or t
cctggctgccaggtctggagagtcggcttgactacactgtgtggagcaagttttaaagaagcaaaggcagacctgagcatgacggntttttcgaggtaggagtcgactcctgtgaggtatggtgctgggtgcagatgcagtgtggctctggatagcaccttatggacagttgtgtccccaaggaaggatgagaatagctactgaagtcctaaagagcaagcctaactcaagccattggcacacaggcattagacagaaagctggaagttgaaatggtggagtccaacttgcctggaccagcttaatggttctgctcctggtaacgtttttatccatggatgacttgcttgggtatggagagtcggcttgactacactgtgtggagcaagttttaaagaagcaaaggactcagaattcatgattgaagaaatgcaggcagacctgttatcctaaactagggtttttaatgaccacaacaagcaagcatgcagcttactgcttgaaagggtcttgcctcacccaagctagagtgcagtggcctttgaagcttactacagcctcaaacttctgggctcaagtgatcctcagcctcccagtggtctttgtagactgcctgatggagtctcatggcacaagaagattaaaacagtgtctccaattttaataaatttttgcaatcca

SEQ ID NO: 368686 - DNA, 845 bp, Homo sapiens
  misc_feature (86)..(86): n is a, c, g, or t
  misc_feature (733)..(734): n is a, c, g, or t
  misc_feature (737)..(738): n is a, c, g, or t
  misc_feature (740)..(740): n is a, c, g, or t
  misc_feature (845)..(845): n is a, c, g, or t
cctggctgccaggtctggagagtcggcttgactacactgtgtggagcaagttttaaagaagcaaaggcagacctgagcatgacggntttttcgaggtaggagtcgactcctgtgaggtatggtgctgggtgcagatgcagtgtggctctggatagcaccttatggacagttgtgtccccaaggaaggatgagaatagctactgaagtcctaaagagcaagcctaactcaagccattggcacacaggcattagacagaaagctggaagttgaaatggtggagtccaacttgcctggaccagcttaatggttctgctcctggtaacgtttttatccatggatgacttgcttgggtatggagagtcggcttgactacactgtgtggagcaagttttaaagaagcaaaggactcagaattcatgattgaagaaatgcaggcagacctgttatcctaaactagggtttttaatgaccacaacaagcaagcatgcagcttactgcttgaaagggtcttgcctcacccaagctagagtgcagtggcctttgaagcttactacagcctcaaacttctgggctcaagtgatcctcagcctcccagtggtctttgtagactgcctgatggagtctcatggcacaagaagattaaaacagtgtctccaattttaataaatttttgcaatccaaaaaaaaaaaaaaaaaaaaaaaaaaaaaaaaaaaaaaaaaaattcggggggnnttnntnggggggggggaaaaaggggttgaaaggggccggggttgttttttctgcccccctttttttgttaaggggggaaaccggggggccccccaaggggggggcgaatan

SEQ ID NO: 368687 - DNA, 2362 bp, Homo sapiens
aactgaagaggcggcggagggccgaattcccttttctcaacggcttgatttcagagctgggctggtctctgacaggctcagctggagagggacgggttgggacgcactgtccttttgcccttccccctccgcgagcagaagctgactccgcaggagcgagggtcgcagagctgggggggatttcagtctccacatagttttggagccggacttttgaagaatgattcgtgaatccggaatgggtgacagcgtcatcacggcattttattggtaaagatgctttgtattggtcccggacctgctttaactttgtatttgccctgttgtgtggtcattatcttacaatacttgcgtgttgaggtgtgtttaaacactacgtgcttaacactggctaagtattggcattggggcggttggatttaggtattggtggcaatgtagaaaagtgatcaagtcagagccccttcacggactaatcacaagagaaacaacaaagctttacttgtgtgctgtgaaccacaactgcaagtggaattgtcaagagaactagccctgccaagctcaggaaaacttctgaggagatggcacatggaaaatggataagatttactgagacaaacgggagtagagaagtgtttttaattggcgataaggtgaataaaaaggcagggagaacagtagagtgatcatctgtctagagtagggggtgcatgtttgggtatagggctgtcatttaacctcttaaagaattgtctactggaactttcttcactcccatccccccaccccccaatgttgtatacaaaaccttagaggaagtgtatgcagaatgttggattttggaaaggctaatgtcgatggatcttggggaagaactgaagtagtagaaaatgaacctggataggatcagataataagatcaaatacagtagtgccttgaaagccagacaggaattctgatttgacttcatatagatgtgtgggaactgttatgggatctcaagcaaggtaatgataaaagtggtgacaatgaaagactgatgatggattagggaaaggggctaagattgggaacaagataagtagctataattgagaatgaaagtgaagcccacatctaagaggacaagtgtatatctttttaagaaatatgtcagaggccaggttggtggctcacacctgtaattccagcactttgggaggctgaggtgggtggatcatttgaggccaggaattcaagaccagcctggccaacatggtgaaaccccttctctactgaaaatacaataattagctgggcgtggtggcacatgcctatgatcccagctactggggaggctgaggcaggagaatcgttttaacccagaagacaggctgcagtgagccaagactgcaccactgcactccagcctgggcaacaaagtgagactctgcctcaaaaaataaatatgtgagaatttgatgataaagttaacaaagttaactttttagatgtaaaggtgatgttgaaggaagagtaaaagatgatgaaagttttttagtggggaaagaaaatgaaaaggaagaatggaattattactgagcaaaacagagtacagtagttggcaaagaaagattgaataagatgtgaagcgatgattagttttgaacttaatgagtttgacggaggttggaaatgcaggactgggttgcagctgtaatggtctgaagacagagatttaggagtcatatagaatgattattttcctatgtagaatgaatgattttcagaatctggggccacctactattggaacatgaggaaaaaaaaagaatcagtaaataaattggaactataaaaagtaaggaggagaaaagcccctaaaaaatggaatgtcagaggaaacaaggtcccagaaagtttagaggagtaaggatgaacaaacttgatgaacaaagtatttggccatggttttggcaaaaacaatgatcttcgaaagtacagtttctttgtagtgatagatggaagaaagagattgctgaagatttctagtaaaatatttattagtaactggaggcaataggtgtagacgacgtttccaggagattggtctcagaaggaatgagacgaattggatttaaacacaaatttttaatgttagaaatactagaatatgcttggcagtgaaagaaaaggatcctgtataggagtgattaaagatgatagagatgtgaagtacagcctggttgtggtggtgcacgcttgtagtcctagctactcgagaggctgaggtgggaggatcgcctgagcccagcaggtggaggctgcagtgatatcaggccactgcactccagcctggacaacagagtgagaccctgtctc

SEQ ID NO: 368688 - DNA, 583 bp, Homo sapiens
tcggacgcgtgggtcgacccacgcgtccgatgcagtgtggctctggatagcaccttatggacagttgtgtccccaaggaaggatgagaatagctactgaagtcctaaagagcaagcctaactcaagccattggcacacaggacaggcattagacagaaagctggaagttgaaatggtggagtccaacttgcctggaccagcttaatggttctgctcctggtaacgtttttatccatggatgacttgcttgggtatggagagtcggcttgactacactgtgtggagcaagttttaaagaagcaaaggactcagaattcatgattgaagaaatgccaggcagacctgttatcctaaactaagggtttttaatgaccacaacaagcaagcatgcagcttactgcttgaaagggtcttgcctcacccaagctagagtgcagtggcctttgaagcttactacagcctcaaacttctgggctcaagtgatcctcagcctcccagtggtctttgtagactgcctgatggagtctcatggcacaagaagattaaaacagtgtctccaattttaataaatttttgcaatcca

SEQ ID NO: 368689 - DNA, 608 bp, Homo sapiens
  misc_feature (496)..(497): n is a, c, g, or t
  misc_feature (500)..(501): n is a, c, g, or t
  misc_feature (503)..(503): n is a, c, g, or t
  misc_feature (608)..(608): n is a, c, g, or t
aaggctaggtagcgaggctgggtgtggtcgactccggtggagtccaacttgcctggaccagcttaatggttctgctcctggtaacgtttttatccatggatgacttgcttgggtatggagagtcggcttgactacactgtgtggagcaagttttaaagaagcaaaggactcagaattcatgattgaagaaatgccaggcagacctgttatcctaaactaagggtttttaatgaccacaacaagcaagcatgcagcttactgcttgaaagggtcttgcctcacccaagctagagtgcagtggcctttgaagcttactacagcctcaaacttctgggctcaagtgatcctcagcctcccagtggtctttgtagactgcctgatggagtctcatggcacaagaagattaaaacagtgtctccaattttaataaatttttgcaatccaaaaaaaaaaaaaaaaaaaaaaaaaaaaaaaaaaaaaaaaaaattcggggggnnttnntnggggggggggaaaaaggggttgaaaggggccggggttgttttttctgcccccctttttttgttaaggggggaaaccggggggccccccaaggggggggcgaatan

SEQ ID NO: 368690 - DNA, 1224 bp, Homo sapiens
  misc_feature (14)..(16): n is a, c, g, or t
  misc_feature (18)..(18): n is a, c, g, or t
  misc_feature (20)..(20): n is a, c, g, or t
  misc_feature (22)..(23): n is a, c, g, or t
  misc_feature (25)..(25): n is a, c, g, or t
  misc_feature (27)..(27): n is a, c, g, or t
  misc_feature (29)..(31): n is a, c, g, or t
gcgtcgacgcttgnnngngncnngncncnnncaagcagtaagctgcatgcttgcttgttgtggtcattaaaaaccctagggtttttaatgaccacaacaagcaagcatgcagcttactgcttgaaagggtcttgcctcacccaagctagagtgcagtggcctttgaagcttactacagcctcaaacttctgggctcaagtgatcctcagcctcccagtggtctttgtagactgcctgatggagtctcatggcacaagaagattaaaacagtgtctccaattttaataaatttttgcaatccaaaaaaaaaaaaaaaaaaaaaaaaaaaaaaaaaaaaaaaaaaaaaaaaaaacaaaaaacaaaaaaaaaaaaggggggggggccaaaaacactctcaagaggggccacaatagagaaacagaaacacgagacaacggagccccaaaagaggaggcgccaagatcaaaccgcacggaagcgcacaaaacaaaaaacaagcaaaaacagagcaaaacagggaaaaccagaaaaacacagcagagaacacacacaaaaacagagggagaaacaaaaacaagagacacacacaaaacaaaaagaaaacaccagacaacaggaacaaacaacaaacagtaacagagcaaaaaaagagataaaacaaaaagacaccaccaaaggcgacaaaaaggaaacacaactaaccagcacgcacagagcaccacgccgccacgcgggaacacaacatagaaaacgacggcgaccagagagaccacaggaaacgcaagcaaacaacacaaacagcagaacacgcacgaaacaaaaagacacaacgcagagagaacaccacaaacgcgagaaagacgagaaggagaacagagaagaagaagagaaaaaaagaaaacaaaaggaaaaggagaaaagaaaagaggaaacaaaaccagaagagaacaagagaagacgaacgagaccaacagcaagcagacagagcaaggcaagggggaaaggcggagggagagacgagagaagagcggaaggcgagggagactaggagttatagaacaacgagagagagcaagggaacagaggcgaaggggagaagggggcgagagcgcacagaggaaaaaggaggagagggcaagcgcagaggcaaagagacaggagaaaggcagaaggaaggcaaaaggaggaagagagaaggggaaacaggaagagtgagaaggaggg

SEQ ID NO: 368691 - DNA, 221 bp, Homo sapiens
  misc_feature (14)..(16): n is a, c, g, or t
  misc_feature (18)..(18): n is a, c, g, or t
  misc_feature (20)..(20): n is a, c, g, or t
  misc_feature (22)..(23): n is a, c, g, or t
  misc_feature (25)..(25): n is a, c, g, or t
  misc_feature (27)..(27): n is a, c, g, or t
  misc_feature (29)..(31): n is a, c, g, or t
gcgtcgacgcttgnnngngncnngncncnnncaagcagtaagctgcatgcttgcttgttgtggtcattaaaaaccctgcctttgaagcttactacagcctcaaacttctgggctcaagtgatcctcagcctcccagtggtctttgtagactgcctgatggagtctcatggcacaagaagattaaaacagtgtctccaattttaataaatttttgcaatcca

SEQ ID NO: 368692 - DNA, 673 bp, Homo sapiens
  misc_feature (24)..(25): n is a, c, g, or t
ggggctttttctttgtacgagtcnnctcctgtgaggtatggtgctgggtgcagatgcagtgtggctctggatagcaccttatggacagttgtgtccccaaggaaggatgagaatagctactgaagtcctaaagagcaagcctaactcaagccattggcacacaggacaggcattagacagaaagctggaagttgaaatggtaagtgaaactgtatccaagtaagcggtggagtccaacttgcctggaccagcttaatggttctgctcctggtaacgtttttatccatggatgacttgcttgggtaaggacatgaagacagttcctgtcataccttttaaaggtatggagagtcggcttgactacactgtgtggagcaagttttaaagaagcaaaggactcagaattcatgattgaagaaatgccaggcagacctgttatcctaaactaagggtttttaatgaccacaacaagcaagcatgcagcttactgcttgaaagggtcttgcctcacccaagctagagtgcagtggcctttgaagcttactacagcctcaaacttctgggctcaagtgatcctcagcctcccagtggtctttgtagactgcctgatggagtctcatggcacaagaagattaaaacagtgtctccaattttaataaatttttgcaatcca

SEQ ID NO: 368693 - DNA, 899 bp, Homo sapiens
  misc_feature (203)..(203): n is a, c, g, or t
ggatgaattaggcaaaagtataaaaatttttattttatctgaaattaatgacgacaaagacaaaatataccagaatttttgggacatagctaagcagggttaagaagaaagtctgttgtgctaaacacctacatcaaaaagttagatctcaaattaacctaatgatgcacctacaggaactggccagttcctgcttcttgagnggcttttcgaggtaggagtcgactcctgtgaggtatggtgctgggtgcagatgcagtgtggctctggatagcaccttatggacagttgtgtccccaaggaaggatgagaatagctactgaagtcctaaagagcaagcctaactcaagccattggcacacaggacaggcattagacagaaagctggaagttgaaatggtggagtccaacttgcctggaccagcttaatggttctgctcctggtaacgtttttatccatggatgacttgcttgggtatggagagtcggcttgactacactgtgtggagcaagttttaaagaagcaaaggactcagaattcatgattgaagaaatgccaggcagacctgttatcctaaactaagggtttttaatgaccacaacaagcaagcatgcagcttactgcttgaaagggtcttgcctcacccaagctagagtgcagtggcctttgaagcttactacagcctcaaacttctgggctcaagtgatcctcagcctcccagtggtctttgtagactgcctgaggaagcctaatggcccaggaggttaaaaagggggtctccaatttaaaaaattttgcgatcccaaaaaaaaaattctctcccaactcgggggaaaactactcttaaaaaactttgtggccctttgccccaacctttttaacattggcttttttgccg

SEQ ID NO: 368694 - DNA, 647 bp, Homo sapiens
aaggctaggtagcgaggctgggtgtggtcgactcctgtgaggtatggtgctgggtgcagatgcagtgtggctctggatagcaccttatggacagttgtgtccccaaggaaggatgagaatagctactgaagtcctaaagagcaagcctaactcaagccattggcacacaggcattagacagaaagctggaagttgaaatggtggagtccaacttgcctggaccagcttaatggttctgctcctggtaacgtttttatccatggatgacttgcttgggtaaggacatgaagacagttcctgtcataccttttaaaggtatggagagtcggcttgactacactgtgtggagcaagttttaaagaagcaaaggactcagaattcatgattgaagaaatgccaggcagacctgttatcctaaactaagggtttttaatgaccacaacaagcaagcatgcagcttactgcttgaaagggtcttgcctcacccaagctagagtgcagtggcctttgaagcttactacagcctcaaacttctgggctcaagtgatcctcagcctcccagtggtctttgtagactgcctgatggagtctcatggcacaagaagattaaaacagtgtctccaattttaataaatttttgcaatcca

SEQ ID NO: 368695 - DNA, 358 bp, Homo sapiens
  misc_feature (24)..(25): n is a, c, g, or t
ggggctttttctttgtacgagtcnnctcctgtgaggtatggtgctgggtgcagatgcagtgtggctctggatagcaccttatggacagttgtgtccccaaggaaggatgagaatagctactgaagtcctaaagagcaagcctaactcaagccattggcacacaggacaggcattagacagaaagctggaagttgaaatggtaggtaaactttatccaggtaggcaggtacctggcaacctcctcggacacatatggcttttaggtacctcctaggcctgatgacttaataaaatgcacagttctcttctgtaagtgttaatgagaaagttgtaaatcacagctgagtagtgtacgcat

SEQ ID NO: 368696 - DNA, 790 bp, Homo sapiens
  misc_feature (14)..(15): n is a, c, g, or t
cggccgccaacttnntttttcgaggtaggagtcgactcctgtgaggtatggtgctgggtgcagatgcagtgtggctctggatagcaccttatggacaggttgtgtccccaaggaaggatgagaatagctactgaagtcctaaagagcaagcctaactcaagccattggcacacaggacaggcattagacagaaagctggaagttgaaatggtggagtccaacttgcctggaccagcttaatggttctgctcctggtaacgtttttatccatggatgacttgcttgggtatggagagtcggcttgactacactgtgtggagcaagttttaaagaagcaaaggactcagaattcatgattgaagaaatgcaggttagtttaaactttgaaggaaatttttaaggtggcaaaaggttttggtggcatatacaccttaatctgtagatgggagtgattagctgtttaaaagttaaaatgtgactgagaaggaaattgagtagggcaaattttaaatgggtattatttttcatcttcaaacaggcagacctgttatcctaaactaagggtttttaatgaccacaacaagcaagcatgcagcttactgcttgaaagggtcttgcctcacccaagctagagtgcagtgggcttttgaagctttactacaagcctcaaaacttctgggttcaaagtgaatccttcagctccagtggttttgtgactgctgatggagtctccatggcccagcagcgattcacccggtcttccattttcatacattttggcatccagaac

SEQ ID NO: 368697 - DNA, 816 bp, Homo sapiens
  misc_feature (203)..(203): n is a, c, g, or t
ggatgaattaggcaaaagtataaaaatttttattttatctgaaattaatgacgacaaagacaaaatataccagaatttttgggacatagctaagcagggttaagaagaaagtctgttgtgctaaacacctacatcaaaaagttagatctcaaattaacctaatgatgcacctacaggaactggccagttcctgcttcttgagnggcttttcgaggtaggagtcgactcctgtgaggtatggtgctgggtgcagatgcagtgtggctctggatagcaccttatggacagttgtgtccccaaggaaggatgagaatagctactgaagtcctaaagagcaagcctaactcaagccattggcacacaggcattagacagaaagctggaagttgaaatggtggagtccaacttgcctggaccagcttaatggttctgctcctggtaacgtttttatccatggatgacttgcttgggtaaggacatgaagacagttcctgtcataccttttaaaggtatggagagtcggcttgactacactgtgtggagcaagttttaaagaagcaaaggactcagaattcatgattgaagaaatgcagggtttttaatgaccacaacaagcaagcatgcagcttactgcttgaaagggtcttgcctcacccaagctagagtgcagtggcctttgaagcttactacagcctcaaacttctgggctcaagtgatcctcagcctcccagtggtctttgtagactgcctgatggagtctcatggcacaagaagattaaaacagtgtctccaattttaataaatttttgcaatcca

SEQ ID NO: 368698 - DNA, 868 bp, Homo sapiens
tactgtcttttcgaggtaggagtcgactcctgtgaggtatgttttatctttgcgaatgttgcgggttttggggcgctccagcctttgtctgctaaggtcaccctgaattgactgggacttctaagccagtcgcgcgcctttgcagggcctacaagttgaggatggtgggggattgcacatatggtgcatgcgtgacctaagctgcgactatgttagagtagaactgcggagaagcctcggctctcgtgccctgcctctgatgaagcctgtgttgatgcagtgtggctctggatagcaccttatggacaggttgtgtccccaaggaaggatgagaatagctactgaagtcctaaagagcaagcctaactcaagccattggcacacaggacaggcattagacagaaagctggaagttgaaatggtggagtccaacttgcctggaccagcttaatggttctgctcctggtaacgtttttatccatggatgacttgcttgggtaaggacatgaagacagttcctgtcataccttttaaaggtatggagagtcggcttgactacactgtgtggagcaagttttaaagaagcaaaggactcagaattcatgattgaagaaatgccaggcagacctgttatcctaaactaagggtttttaatgaccacaacaagcaagcatgcagcttactgcttgaaagggtcttgcctcacccaagctagagtgcagtggcctttgaagcttactacagcctcaaacttctgggctcaagtgatcctcagcctcccagtggtctttgtagactgcctgatggagtctcatggcacaagaagattaaaacagtgtctccaattttaataaatttttgcaatcca

SEQ ID NO: 368699 - DNA, 1642 bp, Homo sapiens
  misc_feature (86)..(86): n is a, c, g, or t
cctggctgccaggtctggagagtcggcttgactacactgtgtggagcaagttttaaagaagcaaaggcagacctgagcatgacggntttttcgaggtaggagtcgactcctgtgaggtatggtgctgggtgcagatgcagtgtggctctggatagcaccttatggacagttgtgtccccaaggaaggatgagaatagctactgaagtcctaaagagcaagcctaactcaagccattggcacacaggcattagacagaaagctggaagttgaaatggtggagtccaacttgcctggaccagcttaatggttctgctcctggtaacgtttttatccatggatgacttgcttgggtaaggacatgaagacagttcctgtcataccttttaaaggtatggagagtcggcttgactacactgtgtggagcaagttttaaagaagcaaaggactcagaattcatgattgaagaaatgcaggcagacctgttatcctaaactagggtttttaatgaccacaacaagcaagcatgcagcttactgcttgaaagggtcttgcctcacccaagctagagtgcagtggcctttgaagcttactacagcctcaaacttctgggctcaagtgatcctcagcctcccagtggtctttgtagactgcctgatggagtctcatggcacaagaagattaaaacagtgtctccaattttaataaatttttgcaatccaaaaaaaaaaaaaaaaaaaaaaaaaaaaaaaaaaaaaaaaaaaaaaaaaaacaaaaaacaaaaaaaaaaaaggggggggggccaaaaacactctcaagaggggccacaatagagaaacagaaacacgagacaacggagccccaaaagaggaggcgccaagatcaaaccgcacggaagcgcacaaaacaaaaaacaagcaaaaacagagcaaaacagggaaaaccagaaaaacacagcagagaacacacacaaaaacagagggagaaacaaaaacaagagacacacacaaaacaaaaagaaaacaccagacaacaggaacaaacaacaaacagtaacagagcaaaaaaagagataaaacaaaaagacaccaccaaaggcgacaaaaaggaaacacaactaaccagcacgcacagagcaccacgccgccacgcgggaacacaacatagaaaacgacggcgaccagagagaccacaggaaacgcaagcaaacaacacaaacagcagaacacgcacgaaacaaaaagacacaacgcagagagaacaccacaaacgcgagaaagacgagaaggagaacagagaagaagaagagaaaaaaagaaaacaaaaggaaaaggagaaaagaaaagaggaaacaaaaccagaagagaacaagagaagacgaacgagaccaacagcaagcagacagagcaaggcaagggggaaaggcggagggagagacgagagaagagcggaaggcgagggagactaggagttatagaacaacgagagagagcaagggaacagaggcgaaggggagaagggggcgagagcgcacagaggaaaaaggaggagagggcaagcgcagaggcaaagagacaggagaaaggcagaaggaaggcaaaaggaggaagagagaaggggaaacaggaagagtgagaaggaggg

SEQ ID NO: 368700 - DNA, 1031 bp, Homo sapiens
  misc_feature (86)..(86): n is a, c, g, or t
cctggctgccaggtctggagagtcggcttgactacactgtgtggagcaagttttaaagaagcaaaggcagacctgagcatgacggntttttcgaggtaggagtcgactcctgtgaggtatggtgctgggtgcagatgcagtgtggctctggatagcaccttatggacagttgtgtccccaaggaaggatgagaatagctactgaagtcctaaagagcaagcctaactcaagccattggcacacaggcattagacagaaagctggaagttgaaatggtggagtccaacttgcctggaccagcttaatggttctgctcctggtaacgtttttatccatggatgacttgcttgggtatggagagtcggcttgactacactgtgtggagcaagttttaaagaagcaaaggactcagaattcatgattgaagaaatgcaggcagacctgttatcctaaactagggtttttaatgaccacaacaagcaagcatgcagcttactgcttgaaagggtcttgcctcacccaagctagagtgcagtggcctttgaagcttactacagcctcaaacttctgggctcaagtgatcctcagcctcccagtggtctttgtagactgcctgatggagtctcatggcacaagaagattaaaacagtgtctccaattttaataaatttttgcaatccaaaaaaaaaaaaaaaaaaaaaaaaaaaaaaaaaaaaaaaaaaagggggggggctaaaaattcccccggggggccccagtttatcgcgctatccccggtcttttacgtgcaacaagggggcccccaataggggggagggcggttttataaagcaagaggcacggccgcgcgtttaaaccccgcttctggggtcgtgggaaagcctgggtgctgggacttcttcgggaaagagcccctacctttgtgtgggcgttgagctctttttgcgacccctatccctacaagagattttacgaggtccaaggcggacatttaaaccttccagcttgttttgtgctgtatcgccccgcgt

SEQ ID NO: 368701 - DNA, 1896 bp, Homo sapiens
  misc_feature (86)..(86): n is a, c, g, or t
  misc_feature (1643)..(1643): n is a, c, g, or t
  misc_feature (1704)..(1704): n is a, c, g, or t
cctggctgccaggtctggagagtcggcttgactacactgtgtggagcaagttttaaagaagcaaaggcagacctgagcatgacggntttttcgaggtaggagtcgactcctgtgaggtatggtgctgggtgcagatgcagtgtggctctggatagcaccttatggacagttgtgtccccaaggaaggatgagaatagctactgaagtcctaaagagcaagcctaactcaagccattggcacacaggcattagacagaaagctggaagttgaaatggtggagtccaacttgcctggaccagcttaatggttctgctcctggtaacgtttttatccatggatgacttgcttgggtaaggacatgaagacagttcctgtcataccttttaaaggtatggagagtcggcttgactacactgtgtggagcaagttttaaagaagcaaaggactcagaattcatgattgaagaaatgcaggcagacctgttatcctaaactagggtttttaatgaccacaacaagcaagcatgcagcttactgcttgaaagggtcttgcctcacccaagctagagtgcagtggcctttgaagcttactacagcctcaaacttctgggctcaagtgatcctcagcctcccagtggtctttgtagactgcctgatggagtctcatggcacaagaagattaaaacagtgtctccaattttaataaatttttgcaatccatctggagtgtgtagtgtttacttaaaaaaggacagtgcttttcatctgttcattagctgtaagcataaatcacattcaaaagctattataactccatggtatttgcttcattaacactgcagccagttaaaattttatgggtattttacaaggtgtcttatgcattaaagtgcaatatttcctaattctccatatgagcaaattgtcaggtttcataggcccctgtgctaattggttttgagcttaaagtattgatggagctacttggagaaagtcatgttgagtctgaggctgggaaaataagttatagaaaatactatagaaatgcccaactagtgataggcattaatggaattgggaaaatctacaatccatagccatggtgataggtttttggcaagcactaagtgtttagggatgccaaaagtgggtataaagggcacaactggtttaaggcaatctgtcccagggaaacaggaccaaggggccaaaattccaagatgggtcaaattttaatttcagtgtcagtacagctgtgcttataatgatgtctttgttagcagtaatggttttacaaatctgtttctgggctaaagcactttagtcccattaatgataaaacttcagttactctctgaattttcctttttttgagactgaatcctgttgccccaggaggttgaggatgcagtgagctgtgtcacaccactggattccagcctgggtgacagggtgagatgttgtctcaaataaaatattaaaaattggatcaccttattcagcattctgttgtttagcagttttggaattttagttgttagtaaatcttgaccttgagtacacgttattttgatattctgtgtgacaaaatgggaagtatgcatgaagcacatctgccataaagtatggatgtctagattttnttttccctagaaaaagtagttacaattgtttgagatacaagctgaactagctgcttgtttncacagaacatttttagtttgaaaaaacctgacaaattgattattcatattttaggggtaattttggcagagatttgctcaaaaaagaacaagtcagcttggaaaaaactgatggcatttgttgccaatgataaaactcaagcttccaaatgaaacctaaaattttggaaggcttgtatacacttctgtgccc

SEQ ID NO: 368702 - DNA, 2424 bp, Homo sapiens
  misc_feature (86)..(86): n is a, c, g, or t
  misc_feature (2171)..(2171): n is a, c, g, or t
  misc_feature (2232)..(2232): n is a, c, g, or t
cctggctgccaggtctggagagtcggcttgactacactgtgtggagcaagttttaaagaagcaaaggcagacctgagcatgacggntttttcgaggtaggagtcgactcctgtgaggtatggtgctgggtgcagatgcagtgtggctctggatagcaccttatggacagttgtgtccccaaggaaggatgagaatagctactgaagtcctaaagagcaagcctaactcaagccattggcacacaggcattagacagaaagctggaagttgaaatggtggagtccaacttgcctggaccagcttaatggttctgctcctggtaacgtttttatccatggatgacttgcttgggtaaggacatgaagacagttcctgtcataccttttaaaggtatggagagtcggcttgactacactgtgtggagcaagttttaaagaagcaaaggactcagaattcatgattgaagaaatgcaggttagtttaaactttgaaggaaatttttaaggtggcaaaaggttttggtggcatatacaccttaatctgtagatgggagtgattagctgtttaaaagttaaaatgtgactgagaaggaaattgagtagggcaaattttaaatgggtattatttttcatcttcaaacaggcagacctgttatcctaaactaggtgagtcagcttttggtacatgtgatgattttcagtgtaaccaatgatgtaatgattctgccaaatgaaatataatgatatcactgtaaaaccgttccattttgattctgaggttactctactaacaagcatcacacatttgtattttgccctgattaatatgttggcttcgctttcagggtttttaatgaccacaacaagcaagcatgcagcttactgcttgaaaggtgaggattggaaatgttgggactattataattgcagaatacatgatgatctcaatccaacttgaactctctcactgattacttgatgacaataaaatatctgatattctgcattcccatgtagcattttaattgaagtctgtaaatgtggctaaaagtcttgtcttattttttgagacagggtcttgcctcacccaagctagagtgcagtggcctttgaagcttactacagcctcaaacttctgggctcaagtgatcctcagcctcccagtggtctttgtagactgcctgatggagtctcatggcacaagaagattaaaacagtgtctccaattttaataaatttttgcaatccatctggagtgtgtagtgtttacttaaaaaaggacagtgcttttcatctgttcattagctgtaagcataaatcacattcaaaagctattataactccatggtatttgcttcattaacactgcagccagttaaaattttatgggtattttacaaggtgtcttatgcattaaagtgcaatatttcctaattctccatatgagcaaattgtcaggtttcataggcccctgtgctaattggttttgagcttaaagtattgatggagctacttggagaaagtcatgttgagtctgaggctgggaaaataagttatagaaaatactatagaaatgcccaactagtgataggcattaatggaattgggaaaatctacaatccatagccatggtgataggtttttggcaagcactaagtgtttagggatgccaaaagtgggtataaagggcacaactggtttaaggcaatctgtcccagggaaacaggaccaaggggccaaaattccaagatgggtcaaattttaatttcagtgtcagtacagctgtgcttataatgatgtctttgttagcagtaatggttttacaaatctgtttctgggctaaagcactttagtcccattaatgataaaacttcagttactctctgaattttcctttttttgagactgaatcctgttgccccaggaggttgaggatgcagtgagctgtgtcacaccactggattccagcctgggtgacagggtgagatgttgtctcaaataaaatattaaaaattggatcaccttattcagcattctgttgtttagcagttttggaattttagttgttagtaaatcttgaccttgagtacacgttattttgatattctgtgtgacaaaatgggaagtatgcatgaagcacatctgccataaagtatggatgtctagattttnttttccctagaaaaagtagttacaattgtttgagatacaagctgaactagctgcttgtttncacagaacatttttagtttgaaaaaacctgacaaattgattattcatattttaggggtaattttggcagagatttgctcaaaaaagaacaagtcagcttggaaaaaactgatggcatttgttgccaatgataaaactcaagcttccaaatgaaacctaaaattttggaaggcttgtatacacttctgtgccc

SEQ ID NO: 368703 - DNA, 1248 bp, Homo sapiens
  misc_feature (86)..(86): n is a, c, g, or t
cctggctgccaggtctggagagtcggcttgactacactgtgtggagcaagttttaaagaagcaaaggcagacctgagcatgacggntttttcgaggtaggagtcgactcctgtgaggtatggtgctgggtgcagatgcagtgtggctctggatagcaccttatggacagttgtgtccccaaggaaggatgagaatagctactgaagtcctaaagagcaagcctaactcaagccattggcacacaggcattagacagaaagctggaagttgaaatggtggagtccaacttgcctggaccagcttaatggttctgctcctggtaacgtttttatccatggatgacttgcttgggtaaggacatgaagacagttcctgtcataccttttaaaggtatggagagtcggcttgactacactgtgtggagcaagttttaaagaagcaaaggactcagaattcatgattgaagaaatgcaggttagtttaaactttgaaggaaatttttaaggtggcaaaaggttttggtggcatatacaccttaatctgtagatgggagtgattagctgtttaaaagttaaaatgtgactgagaaggaaattgagtagggcaaattttaaatgggtattatttttcatcttcaaacaggcagacctgttatcctaaactaggtgagtcagcttttggtacatgtgatgattttcagtgtaaccaatgatgtaatgattctgccaaatgaaatataatgatatcactgtaaaaccgttccattttgattctgaggttactctactaacaagcatcacacatttgtattttgccctgattaatatgttggcttcgctttcagggtttttaatgaccacaacaagcaagcatgcagcttactgcttgaaaggtgaggattggaaatgttgggactattataattgcagaatacatgatgatctcaatccaacttgaactctctcactgattacttgatgacaataaaatatctgatattctgcattcccatgtagcattttaattgaagtctgtaaatgtggctaaaagtcttgtcttattttttgagacagggtcttgcctcacccaagctagagtgcagtggcctttgaagcttactacagcctcaaacttctgggctcaagtgatcctcagcctcccagtggtctttgtagactgcctgatggagtctcatggcacaagaagattaaaacagtgtctccaattttaataaatttttgcaatcca

SEQ ID NO: 368704 - DNA, 1067 bp, Homo sapiens
  misc_feature (86)..(86): n is a, c, g, or t
cctggctgccaggtctggagagtcggcttgactacactgtgtggagcaagttttaaagaagcaaaggcagacctgagcatgacggntttttcgaggtaggagtcgactcctgtgaggtatggtgctgggtgcagatgcagtgtggctctggatagcaccttatggacagttgtgtccccaaggaaggatgagaatagctactgaagtcctaaagagcaagcctaactcaagccattggcacacaggcattagacagaaagctggaagttgaaatggtggagtccaacttgcctggaccagcttaatggttctgctcctggtaacgtttttatccatggatgacttgcttgggtaaggacatgaagacagttcctgtcataccttttaaaggtatggagagtcggcttgactacactgtgtggagcaagttttaaagaagcaaaggactcagaattcatgattgaagaaatgcaggttagtttaaactttgaaggaaatttttaaggtggcaaaaggttttggtggcatatacaccttaatctgtagatgggagtgattagctgtttaaaagttaaaatgtgactgagaaggaaattgagtagggcaaattttaaatgggtattatttttcatcttcaaacaggcagacctgttatcctaaactaggtgagtcagcttttggtacatgtgatgattttcagtgtaaccaatgatgtaatgattctgccaaatgaaatataatgatatcactgtaaaaccgttccattttgattctgaggttactctactaacaagcatcacacatttgtattttgccctgattaatatgttggcttcgctttcagggtttttaatgaccacaacaagcaagcatgcagcttactgcttgaaagggtcttgcctcacccaagctagagtgcagtggcctttgaagcttactacagcctcaaacttctgggctcaagtgatcctcagcctcccagtggtctttgtagactgcctgatggagtctcatggcacaagaagattaaaacagtgtctccaattttaataaatttttgcaatcca

SEQ ID NO: 368705 - DNA, 1591 bp, Homo sapiens
  misc_feature (86)..(86): n is a, c, g, or t
cctggctgccaggtctggagagtcggcttgactacactgtgtggagcaagttttaaagaagcaaaggcagacctgagcatgacggntttttcgaggtaggagtcgactcctgtgaggtatggtgctgggtgcagatgcagtgtggctctggatagcaccttatggacagttgtgtccccaaggaaggatgagaatagctactgaagtcctaaagagcaagcctaactcaagccattggcacacaggcattagacagaaagctggaagttgaaatggtggagtccaacttgcctggaccagcttaatggttctgctcctggtaacgtttttatccatggatgacttgcttgggtaaggacatgaagacagttcctgtcataccttttaaaggtatggagagtcggcttgactacactgtgtggagcaagttttaaagaagcaaaggtatagcagttccaagtattttttttttttttttagacaagagtctagctcttgcccagaatggagtgcagcggcactatcagttcactgcaacctctgcctcccaggttcaaggaattctcctgcctcagcctcttgagtagctgggattacaggcatgtgacaccatgcctggctaattttgtacagctatgttgtccaggctggtctcgaactcttgacctcaagtgatactgcccgcactgacctcccaaagtgctgggattacaggcgtgagccaccatgccccgcctcaagtctggtttttaagtgttgtaaagccgatacaatgatgataacatagttcagcagactaacgctgatgagcaatattaagtctttcgctcctatctgatgtatctggcggtaacattctagtttatgccccgaaaaggggaatatagccattctataatgtttggagattttggattactcctaattgtatgcaagttgtcttactgtgtattgtcccttaatttcaggactcagaattcatgattgaagaaatgcaggttagtttaaactttgaaggaaatttttaaggtggcaaaaggttttggtggcatatacaccttaatctgtagatgggagtgattagctgtttaaaagttaaaatgtgactgagaaggaaattgagtagggcaaattttaaatgggtattatttttcatcttcaaacaggcagacctgttatcctaaactaggtgagtcagcttttggtacatgtgatgattttcagtgtaaccaatgatgtaatgattctgccaaatgaaatataatgatatcactgtaaaaccgttccattttgattctgaggttactctactaacaagcatcacacatttgtattttgccctgattaatatgttggcttcgctttcagggtttttaatgaccacaacaagcaagcatgcagcttactgcttgaaagggtcttgcctcacccaagctagagtgcagtggcctttgaagcttactacagcctcaaacttctgggctcaagtgatcctcagcctcccagtggtctttgtagactgcctgatggagtctcatggcacaagaagattaaaacagtgtctccaattttaataaatttttgcaatcca

SEQ ID NO: 368706 - DNA, 1873 bp, Homo sapiens
  misc_feature (86)..(86): n is a, c, g, or t
  misc_feature (1620)..(1620): n is a, c, g, or t
  misc_feature (1681)..(1681): n is a, c, g, or t
cctggctgccaggtctggagagtcggcttgactacactgtgtggagcaagttttaaagaagcaaaggcagacctgagcatgacggntttttcgaggtaggagtcgactcctgtgaggtatggtgctgggtgcagatgcagtgtggctctggatagcaccttatggacagttgtgtccccaaggaaggatgagaatagctactgaagtcctaaagagcaagcctaactcaagccattggcacacaggcattagacagaaagctggaagttgaaatggtggagtccaacttgcctggaccagcttaatggttctgctcctggtaacgtttttatccatggatgacttgcttgggtaaggacatgaagacagttcctgtcataccttttaaaggtatggagagtcggcttgactacactgtgtggagcaagttttaaagaagcaaaggactcagaattcatgattgaagaaatgcagggtttttaatgaccacaacaagcaagcatgcagcttactgcttgaaagggtcttgcctcacccaagctagagtgcagtggcctttgaagcttactacagcctcaaacttctgggctcaagtgatcctcagcctcccagtggtctttgtagactgcctgatggagtctcatggcacaagaagattaaaacagtgtctccaattttaataaatttttgcaatccatctggagtgtgtagtgtttacttaaaaaaggacagtgcttttcatctgttcattagctgtaagcataaatcacattcaaaagctattataactccatggtatttgcttcattaacactgcagccagttaaaattttatgggtattttacaaggtgtcttatgcattaaagtgcaatatttcctaattctccatatgagcaaattgtcaggtttcataggcccctgtgctaattggttttgagcttaaagtattgatggagctacttggagaaagtcatgttgagtctgaggctgggaaaataagttatagaaaatactatagaaatgcccaactagtgataggcattaatggaattgggaaaatctacaatccatagccatggtgataggtttttggcaagcactaagtgtttagggatgccaaaagtgggtataaagggcacaactggtttaaggcaatctgtcccagggaaacaggaccaaggggccaaaattccaagatgggtcaaattttaatttcagtgtcagtacagctgtgcttataatgatgtctttgttagcagtaatggttttacaaatctgtttctgggctaaagcactttagtcccattaatgataaaacttcagttactctctgaattttcctttttttgagactgaatcctgttgccccaggaggttgaggatgcagtgagctgtgtcacaccactggattccagcctgggtgacagggtgagatgttgtctcaaataaaatattaaaaattggatcaccttattcagcattctgttgtttagcagttttggaattttagttgttagtaaatcttgaccttgagtacacgttattttgatattctgtgtgacaaaatgggaagtatgcatgaagcacatctgccataaagtatggatgtctagattttnttttccctagaaaaagtagttacaattgtttgagatacaagctgaactagctgcttgtttncacagaacatttttagtttgaaaaaacctgacaaattgattattcatattttaggggtaattttggcagagatttgctcaaaaaagaacaagtcagcttggaaaaaactgatggcatttgttgccaatgataaaactcaagcttccaaatgaaacctaaaattttggaaggcttgtatacacttctgtgccc

SEQ ID NO: 368707 - DNA, 1778 bp, Homo sapiens
  misc_feature (86)..(86): n is a, c, g, or t
cctggctgccaggtctggagagtcggcttgactacactgtgtggagcaagttttaaagaagcaaaggcagacctgagcatgacggntttttcgaggtaggagtcgactcctgtgaggtatggtgctgggtgcagatgcagtgtggctctggatagcaccttatggacagttgtgtccccaaggaaggatgagaatagctactgaagtcctaaagagcaagcctaactcaagccattggcacacaggcattagacagaaagctggaagttgaaatggtggagtccaacttgcctggaccagcttaatggttctgctcctggtaacgtttttatccatggatgacttgcttgggtaaggacatgaagacagttcctgtcataccttttaaagtacatgttttattgatgttaacgttaattgattgagctactgttagtgatgattttaaaattaaagcagatgggaatctctctgagaaagaaaatggagattaatcttaaactgaaacagtagttgggaaatcttttagaaatccacctattactacctattggtaaaggagattaaatttctacaggtatggagagtcggcttgactacactgtgtggagcaagttttaaagaagcaaaggtatagcagttccaagtattttttttttttttttagacaagagtctagctcttgcccagaatggagtgcagcggcactatcagttcactgcaacctctgcctcccaggttcaaggaattctcctgcctcagcctcttgagtagctgggattacaggcatgtgacaccatgcctggctaattttgtacagctatgttgtccaggctggtctcgaactcttgacctcaagtgatactgcccgcactgacctcccaaagtgctgggattacaggcgtgagccaccatgccccgcctcaagtctggtttttaagtgttgtaaagccgatacaatgatgataacatagttcagcagactaacgctgatgagcaatattaagtctttcgctcctatctgatgtatctggcggtaacattctagtttatgccccgaaaaggggaatatagccattctataatgtttggagattttggattactcctaattgtatgcaagttgtcttactgtgtattgtcccttaatttcaggactcagaattcatgattgaagaaatgcaggttagtttaaactttgaaggaaatttttaaggtggcaaaaggttttggtggcatatacaccttaatctgtagatgggagtgattagctgtttaaaagttaaaatgtgactgagaaggaaattgagtagggcaaattttaaatgggtattatttttcatcttcaaacaggcagacctgttatcctaaactaggtgagtcagcttttggtacatgtgatgattttcagtgtaaccaatgatgtaatgattctgccaaatgaaatataatgatatcactgtaaaaccgttccattttgattctgaggttactctactaacaagcatcacacatttgtattttgccctgattaatatgttggcttcgctttcagggtttttaatgaccacaacaagcaagcatgcagcttactgcttgaaagggtcttgcctcacccaagctagagtgcagtggcctttgaagcttactacagcctcaaacttctgggctcaagtgatcctcagcctcccagtggtctttgtagactgcctgatggagtctcatggcacaagaagattaaaacagtgtctccaattttaataaatttttgcaatcca

SEQ ID NO: 368708 - DNA, 2948 bp, Homo sapiens
  misc_feature (86)..(86): n is a, c, g, or t
  misc_feature (2695)..(2695): n is a, c, g, or t
  misc_feature (2756)..(2756): n is a, c, g, or t
cctggctgccaggtctggagagtcggcttgactacactgtgtggagcaagttttaaagaagcaaaggcagacctgagcatgacggntttttcgaggtaggagtcgactcctgtgaggtatggtgctgggtgcagatgcagtgtggctctggatagcaccttatggacagttgtgtccccaaggaaggatgagaatagctactgaagtcctaaagagcaagcctaactcaagccattggcacacaggcattagacagaaagctggaagttgaaatggtggagtccaacttgcctggaccagcttaatggttctgctcctggtaacgtttttatccatggatgacttgcttgggtaaggacatgaagacagttcctgtcataccttttaaaggtatggagagtcggcttgactacactgtgtggagcaagttttaaagaagcaaaggtatagcagttccaagtattttttttttttttttagacaagagtctagctcttgcccagaatggagtgcagcggcactatcagttcactgcaacctctgcctcccaggttcaaggaattctcctgcctcagcctcttgagtagctgggattacaggcatgtgacaccatgcctggctaattttgtacagctatgttgtccaggctggtctcgaactcttgacctcaagtgatactgcccgcactgacctcccaaagtgctgggattacaggcgtgagccaccatgccccgcctcaagtctggtttttaagtgttgtaaagccgatacaatgatgataacatagttcagcagactaacgctgatgagcaatattaagtctttcgctcctatctgatgtatctggcggtaacattctagtttatgccccgaaaaggggaatatagccattctataatgtttggagattttggattactcctaattgtatgcaagttgtcttactgtgtattgtcccttaatttcaggactcagaattcatgattgaagaaatgcaggttagtttaaactttgaaggaaatttttaaggtggcaaaaggttttggtggcatatacaccttaatctgtagatgggagtgattagctgtttaaaagttaaaatgtgactgagaaggaaattgagtagggcaaattttaaatgggtattatttttcatcttcaaacaggcagacctgttatcctaaactaggtgagtcagcttttggtacatgtgatgattttcagtgtaaccaatgatgtaatgattctgccaaatgaaatataatgatatcactgtaaaaccgttccattttgattctgaggttactctactaacaagcatcacacatttgtattttgccctgattaatatgttggcttcgctttcagggtttttaatgaccacaacaagcaagcatgcagcttactgcttgaaaggtgaggattggaaatgttgggactattataattgcagaatacatgatgatctcaatccaacttgaactctctcactgattacttgatgacaataaaatatctgatattctgcattcccatgtagcattttaattgaagtctgtaaatgtggctaaaagtcttgtcttattttttgagacagggtcttgcctcacccaagctagagtgcagtggcctttgaagcttactacagcctcaaacttctgggctcaagtgatcctcagcctcccagtggtctttgtagactgcctgatggagtctcatggcacaagaagattaaaacagtgtctccaattttaataaatttttgcaatccatctggagtgtgtagtgtttacttaaaaaaggacagtgcttttcatctgttcattagctgtaagcataaatcacattcaaaagctattataactccatggtatttgcttcattaacactgcagccagttaaaattttatgggtattttacaaggtgtcttatgcattaaagtgcaatatttcctaattctccatatgagcaaattgtcaggtttcataggcccctgtgctaattggttttgagcttaaagtattgatggagctacttggagaaagtcatgttgagtctgaggctgggaaaataagttatagaaaatactatagaaatgcccaactagtgataggcattaatggaattgggaaaatctacaatccatagccatggtgataggtttttggcaagcactaagtgtttagggatgccaaaagtgggtataaagggcacaactggtttaaggcaatctgtcccagggaaacaggaccaaggggccaaaattccaagatgggtcaaattttaatttcagtgtcagtacagctgtgcttataatgatgtctttgttagcagtaatggttttacaaatctgtttctgggctaaagcactttagtcccattaatgataaaacttcagttactctctgaattttcctttttttgagactgaatcctgttgccccaggaggttgaggatgcagtgagctgtgtcacaccactggattccagcctgggtgacagggtgagatgttgtctcaaataaaatattaaaaattggatcaccttattcagcattctgttgtttagcagttttggaattttagttgttagtaaatcttgaccttgagtacacgttattttgatattctgtgtgacaaaatgggaagtatgcatgaagcacatctgccataaagtatggatgtctagattttnttttccctagaaaaagtagttacaattgtttgagatacaagctgaactagctgcttgtttncacagaacatttttagtttgaaaaaacctgacaaattgattattcatattttaggggtaattttggcagagatttgctcaaaaaagaacaagtcagcttggaaaaaactgatggcatttgttgccaatgataaaactcaagcttccaaatgaaacctaaaattttggaaggcttgtatacacttctgtgccc

SEQ ID NO: 368709 - DNA, 1895 bp, Homo sapiens
  misc_feature (86)..(86): n is a, c, g, or t
  misc_feature (1642)..(1642): n is a, c, g, or t
  misc_feature (1703)..(1703): n is a, c, g, or t
cctggctgccaggtctggagagtcggcttgactacactgtgtggagcaagttttaaagaagcaaaggcagacctgagcatgacggntttttcgaggtaggagtcgactcctgtgaggtatggtgctgggtgcagatgcagtgtggctctggatagcaccttatggacagttgtgtccccaaggaaggatgagaatagctactgaagtcctaaagagcaagcctaactcaagccattggcacacaggcattagacagaaagctggaagttgaaatggtggagtccaacttgcctggaccagcttaatggttctgctcctggtaacgtttttatccatggatgacttgcttgggtaaggacatgaagacagttcctgtcataccttttaaaggtatggagagtcggcttgactacactgtgtggagcaagttttaaagaagcaaaggactcagaattcatgattgaagaaatgcaggcagacctgttatcctaaacagggtttttaatgaccacaacaagcaagcatgcagcttactgcttgaaagggtcttgcctcacccaagctagagtgcagtggcctttgaagcttactacagcctcaaacttctgggctcaagtgatcctcagcctcccagtggtctttgtagactgcctgatggagtctcatggcacaagaagattaaaacagtgtctccaattttaataaatttttgcaatccatctggagtgtgtagtgtttacttaaaaaaggacagtgcttttcatctgttcattagctgtaagcataaatcacattcaaaagctattataactccatggtatttgcttcattaacactgcagccagttaaaattttatgggtattttacaaggtgtcttatgcattaaagtgcaatatttcctaattctccatatgagcaaattgtcaggtttcataggcccctgtgctaattggttttgagcttaaagtattgatggagctacttggagaaagtcatgttgagtctgaggctgggaaaataagttatagaaaatactatagaaatgcccaactagtgataggcattaatggaattgggaaaatctacaatccatagccatggtgataggtttttggcaagcactaagtgtttagggatgccaaaagtgggtataaagggcacaactggtttaaggcaatctgtcccagggaaacaggaccaaggggccaaaattccaagatgggtcaaattttaatttcagtgtcagtacagctgtgcttataatgatgtctttgttagcagtaatggttttacaaatctgtttctgggctaaagcactttagtcccattaatgataaaacttcagttactctctgaattttcctttttttgagactgaatcctgttgccccaggaggttgaggatgcagtgagctgtgtcacaccactggattccagcctgggtgacagggtgagatgttgtctcaaataaaatattaaaaattggatcaccttattcagcattctgttgtttagcagttttggaattttagttgttagtaaatcttgaccttgagtacacgttattttgatattctgtgtgacaaaatgggaagtatgcatgaagcacatctgccataaagtatggatgtctagattttnttttccctagaaaaagtagttacaattgtttgagatacaagctgaactagctgcttgtttncacagaacatttttagtttgaaaaaacctgacaaattgattattcatattttaggggtaattttggcagagatttgctcaaaaaagaacaagtcagcttggaaaaaactgatggcatttgttgccaatgataaaactcaagcttccaaatgaaacctaaaattttggaaggcttgtatacacttctgtgccc

SEQ ID NO: 368710 - DNA, 2576 bp, Homo sapiens
  misc_feature (86)..(86): n is a, c, g, or t
cctggctgccaggtctggagagtcggcttgactacactgtgtggagcaagttttaaagaagcaaaggcagacctgagcatgacggntttttcgaggtaggagtcgactcctgtgaggtatggtgctgggtgcagatgcagtgtggctctggatagcaccttatggacagttgtgtccccaaggaaggatgagaatagctactgaagtcctaaagagcaagcctaactcaagccattggcacacaggcattagacagaaagctggaagttgaaatggtggagtccaacttgcctggaccagcttaatggttctgctcctggtaacgtttttatccatggatgacttgcttgggtaaggacatgaagacagttcctgtcataccttttaaaggtatggagagtcggcttgactacactgtgtggagcaagttttaaagaagcaaaggactcagaattcatgattgaagaaatgcaggcagacctgttatcctaaactagggtttttaatgaccacaacaagcaagcatgcagcttactgcttgaaggggatttcagtctccacatagttttggagccggacttttgaagaatgattcgtgaatccggaatgggtgacagcgtcatcacggcattttattgacagaccatggattcttacagtgcaccagagtcaactcctagtgcatcctcaagacctgaagattactttataggtgccactcctctgcagaaacgattagaatcggtcaggaagcagagttcatttatcctgactccacctcgaaggaaaattccccagtgttcgcagttgcaggaagatgttgaccctcaaaaggttgcattccttctgcataaacagtggactttatatagtttaactcccttatataaattctcctatagtaatctcaaagagtattctagacttctcaatgcttttattgttgctgaaaagcaaaaaggacttgctgtggaagtgggagaagacttcaacatcaaagtgattttttctactctcctaggaatgaaaggaacacaaagggacccggaagcatttcttgtccagattgtgtcaaaatctcaattgccatctgagaatagagaaggtaaagtgctgtggactggctggttctgctgtgtatttggagacagtcttctggagactgtttcagaagatttcacctgtctgcccttattccttgcaaatggagcagagtctaacacagcaataattggaacttggtttcagaaaacctttgactgttatttcagtcctttagcaatcaatgcatttaatctttcctggatggctgccatgtggactgcatgcaaaatggaccattatgtggctactactgaatttctttggtctgtaccctgtagccctcaaagtctggacatttctttcgcaatacatccagaggatgcaaaagctctatgggacagtgtccacaaaacacctggggaggttacccaggaagaagttgacctattcatggattgcctttattcacatttccatagacatttcaaaattcatttatcagccacaagattagttcgtgtttcaacatctgtagcttcagcacatactgatggaaaaataaagattctgtgtcataaataccttattggagtgttagcatatttgacagaactggcaatttttcaaattgagtgaagccttatgtggactataagttatagattatatactcttattgataacttgcctaattgctatgctgaaagagactgcaggagaaataggcatctatctctgcatctgttttccccaccatgcctttggagttgccaagatggaagccaagaaggatctagaagaacaaagaatatggtagtagatgagccacagccaggtgcccatgtactaatcatgataacctgacatgccattctcaaaatgctgagttgttaatttcttgtcatctttaaatatatatatataggctgggcttggtggctcacacctgtaattccagcactttgggaggctgaggtgggtggatcatttgaggccaggaattcaagaccagcctggccaacatggtgaaaccccttctctactgaaaatacaataattagctgggcgtggtggcacatgcctatgatcccagctactggggaggctgaggcaggagaatcgttttaacccagaagacaggctgcagtgagccaagactgcaccactgcactccagcctgggcaacaaagtgagactctgcctcaaaaaataaaaaagaaataaaataaataaatacagcgtttattatgtttaaactcttaggattcaaatgagatgtatctaatggatatttctgatttgggtctttaaaacctttaatctcttttaagcattttagacttgcattcagaaagaattctgtcttctaaagacattttcctagcatttcactgcggagaactggcaatcaaaatcccctcaaaagggaactaaagattaatatacacatttttttagtcattaatatgcttctgttttaaatacagttcaactcctgttgcaatgttgaattaaatgtttattttaaaatg

SEQ ID NO: 368711 - DNA, 2065 bp, Homo sapiens
  misc_feature (86)..(86): n is a, c, g, or t
  misc_feature (1812)..(1812): n is a, c, g, or t
  misc_feature (1873)..(1873): n is a, c, g, or t
cctggctgccaggtctggagagtcggcttgactacactgtgtggagcaagttttaaagaagcaaaggcagacctgagcatgacggntttttcgaggtaggagtcgactcctgtgaggtatggtgctgggtgcagatgcagtgtggctctggatagcaccttatggacagttgtgtccccaaggaaggatgagaatagctactgaagtcctaaagagcaagcctaactcaagccattggcacacaggcattagacagaaagctggaagttgaaatggtggagtccaacttgcctggaccagcttaatggttctgctcctggtaacgtttttatccatggatgacttgcttgggtaaggacatgaagacagttcctgtcataccttttaaaggtatggagagtcggcttgactacactgtgtggagcaagttttaaagaagcaaaggactcagaattcatgattgaagaaatgcaggttagtttaaactttgaaggaaatttttaaggtggcaaaaggttttggtggcatatacaccttaatctgtagatgggagtgattagctgtttaaaagttaaaatgtgactgagaaggaaattgagtagggcaaattttaaatgggtattatttttcatcttcaaacaggcagacctgttatcctaaactaagggtttttaatgaccacaacaagcaagcatgcagcttactgcttgaaagggtcttgcctcacccaagctagagtgcagtggcctttgaagcttactacagcctcaaacttctgggctcaagtgatcctcagcctcccagtggtctttgtagactgcctgatggagtctcatggcacaagaagattaaaacagtgtctccaattttaataaatttttgcaatccatctggagtgtgtagtgtttacttaaaaaaggacagtgcttttcatctgttcattagctgtaagcataaatcacattcaaaagctattataactccatggtatttgcttcattaacactgcagccagttaaaattttatgggtattttacaaggtgtcttatgcattaaagtgcaatatttcctaattctccatatgagcaaattgtcaggtttcataggcccctgtgctaattggttttgagcttaaagtattgatggagctacttggagaaagtcatgttgagtctgaggctgggaaaataagttatagaaaatactatagaaatgcccaactagtgataggcattaatggaattgggaaaatctacaatccatagccatggtgataggtttttggcaagcactaagtgtttagggatgccaaaagtgggtataaagggcacaactggtttaaggcaatctgtcccagggaaacaggaccaaggggccaaaattccaagatgggtcaaattttaatttcagtgtcagtacagctgtgcttataatgatgtctttgttagcagtaatggttttacaaatctgtttctgggctaaagcactttagtcccattaatgataaaacttcagttactctctgaattttcctttttttgagactgaatcctgttgccccaggaggttgaggatgcagtgagctgtgtcacaccactggattccagcctgggtgacagggtgagatgttgtctcaaataaaatattaaaaattggatcaccttattcagcattctgttgtttagcagttttggaattttagttgttagtaaatcttgaccttgagtacacgttattttgatattctgtgtgacaaaatgggaagtatgcatgaagcacatctgccataaagtatggatgtctagattttnttttccctagaaaaagtagttacaattgtttgagatacaagctgaactagctgcttgtttncacagaacatttttagtttgaaaaaacctgacaaattgattattcatattttaggggtaattttggcagagatttgctcaaaaaagaacaagtcagcttggaaaaaactgatggcatttgttgccaatgataaaactcaagcttccaaatgaaacctaaaattttggaaggcttgtatacacttctgtgccc

SEQ ID NO: 368712 - DNA, 1898 bp, Homo sapiens
  misc_feature (86)..(86): n is a, c, g, or t
  misc_feature (1645)..(1645): n is a, c, g, or t
  misc_feature (1706)..(1706): n is a, c, g, or t
cctggctgccaggtctggagagtcggcttgactacactgtgtggagcaagttttaaagaagcaaaggcagacctgagcatgacggntttttcgaggtaggagtcgactcctgtgaggtatggtgctgggtgcagatgcagtgtggctctggatagcaccttatggacagttgtgtccccaaggaaggatgagaatagctactgaagtcctaaagagcaagcctaactcaagccattggcacacaggcattagacagaaagctggaagttgaaatggtggagtccaacttgcctggaccagcttaatggttctgctcctggtaacgtttttatccatggatgacttgcttgggtaaggacatgaagacagttcctgtcataccttttaaaggtatggagagtcggcttgactacactgtgtggagcaagttttaaagaagcaaaggactcagaattcatgattgaagaaatgccaggcagacctgttatcctaaactaagggtttttaatgaccacaacaagcaagcatgcagcttactgcttgaaagggtcttgcctcacccaagctagagtgcagtggcctttgaagcttactacagcctcaaacttctgggctcaagtgatcctcagcctcccagtggtctttgtagactgcctgatggagtctcatggcacaagaagattaaaacagtgtctccaattttaataaatttttgcaatccatctggagtgtgtagtgtttacttaaaaaaggacagtgcttttcatctgttcattagctgtaagcataaatcacattcaaaagctattataactccatggtatttgcttcattaacactgcagccagttaaaattttatgggtattttacaaggtgtcttatgcattaaagtgcaatatttcctaattctccatatgagcaaattgtcaggtttcataggcccctgtgctaattggttttgagcttaaagtattgatggagctacttggagaaagtcatgttgagtctgaggctgggaaaataagttatagaaaatactatagaaatgcccaactagtgataggcattaatggaattgggaaaatctacaatccatagccatggtgataggtttttggcaagcactaagtgtttagggatgccaaaagtgggtataaagggcacaactggtttaaggcaatctgtcccagggaaacaggaccaaggggccaaaattccaagatgggtcaaattttaatttcagtgtcagtacagctgtgcttataatgatgtctttgttagcagtaatggttttacaaatctgtttctgggctaaagcactttagtcccattaatgataaaacttcagttactctctgaattttcctttttttgagactgaatcctgttgccccaggaggttgaggatgcagtgagctgtgtcacaccactggattccagcctgggtgacagggtgagatgttgtctcaaataaaatattaaaaattggatcaccttattcagcattctgttgtttagcagttttggaattttagttgttagtaaatcttgaccttgagtacacgttattttgatattctgtgtgacaaaatgggaagtatgcatgaagcacatctgccataaagtatggatgtctagattttnttttccctagaaaaagtagttacaattgtttgagatacaagctgaactagctgcttgtttncacagaacatttttagtttgaaaaaacctgacaaattgattattcatattttaggggtaattttggcagagatttgctcaaaaaagaacaagtcagcttggaaaaaactgatggcatttgttgccaatgataaaactcaagcttccaaatgaaacctaaaattttggaaggcttgtatacacttctgtgccc

SEQ ID NO: 368713 - DNA, 1216 bp, Homo sapiens
  misc_feature (86)..(86): n is a, c, g, or t
cctggctgccaggtctggagagtcggcttgactacactgtgtggagcaagttttaaagaagcaaaggcagacctgagcatgacggntttttcgaggtaggagtcgactcctgtgaggtatggtgctgggtgcagatgcagtgtggctctggatagcaccttatggacagttgtgtccccaaggaaggatgagaatagctactgaagtcctaaagagcaagcctaactcaagccattggcacacaggcattagacagaaagctggaagttgaaatggtggagtccaacttgcctggaccagcttaatggttctggtaagtattaatgaaaacagtagatagacttaatgaaaatgctgatggtgatatgcttactgctgagctaatggcttaaggcttggctgatgaatactgactgtattttccttgagcatgtctggaacagtgtttatgtgttttccttgagcatgtttggaacggggtttgtgtaatgatgttgatcaaatgtctgacctgaaatgagcatgtagacaaaggtaacactgaagaaccctgtgacagacaactttgaaaagagtttaatgatgtttagcattttaatggaagtcctcatttgtattccagctcctggtaacgtttttatccatggatgacttgcttgggtaaggacatgaagacagttcctgtcataccttttaaagtacatgttttattgatgttaacgttaattgattgagctactgttagtgatgattttaaaattaaagcagatgggaatctctctgagaaagaaaatggagattaatcttaaactgaaacagtagttgggaaatcttttagaaatccacctattactacctattggtaaaggagattaaatttctacaggtatggagagtcggcttgactacactgtgtggagcaagttttaaagaagcaaaggactcagaattcatgattgaagaaatgcaggcagacctgttatcctaaactagggtttttaatgaccacaacaagcaagcatgcagcttactgcttgaaagggtcttgcctcacccaagctagagtgcagtggcctttgaagcttactacagcctcaaacttctgggctcaagtgatcctcagcctcccagtggtctttgtagactgcctgatggagtctcatggcacaagaagattaaaacagtgtctccaattttaataaatttttgcaatcca

SEQ ID NO: 368714 - DNA, 2368 bp, Homo sapiens
  misc_feature (86)..(86): n is a, c, g, or t
cctggctgccaggtctggagagtcggcttgactacactgtgtggagcaagttttaaagaagcaaaggcagacctgagcatgacggntttttcgaggtaggagtcgactcctgtgaggtatggtgctgggtgcagatgcagtgtggctctggatagcaccttatggacagttgtgtccccaaggaaggatgagaatagctactgaagtcctaaagagcaagcctaactcaagccattggcacacaggcattagacagaaagctggaagttgaaatggtggagtccaacttgcctggaccagcttaatggttctgctcctggtaacgtttttatccatggatgacttgcttgggtaaggacatgaagacagttcctgtcataccttttaaaggtatggagagtcggcttgactacactgtgtggagcaagttttaaagaagcaaaggactcagaattcatgattgaagaaatgcaggcagacctgttatcctaaactagggtttttaatgaccacaacaagcaagcatgcagcttactgcttgaaggggatttcagtctccacatagttttggagccggacttttgaagaatgattcgtgaatccggaatgggtgacagcgtcatcacggcattttattgacagaccatggattcttacagtgcaccagagtcaactcctagtgcatcctcaagacctgaagattactttataggtgccactcctctgcagaaacgattagaatcggtcaggaagcagagttcatttatcctgactccacctcgaaggaaaattccccagtgttcgcagttgcaggaatgaaaggaacacaaagggacccggaagcatttcttgtccagattgtgtcaaaatctcaattgccatctgagaatagagaaggtaaagtgctgtggactggctggttctgctgtgtatttggagacagtcttctggagactgtttcagaagatttcacctgtctgcccttattccttgcaaatggagcagagtctaacacagcaataattggaacttggtttcagaaaacctttgactgttatttcagtcctttagcaatcaatgcatttaatctttcctggatggctgccatgtggactgcatgcaaaatggaccattatgtggctactactgaatttctttggtctgtaccctgtagccctcaaagtctggacatttctttcgcaatacatccagaggatgcaaaagctctatgggacagtgtccacaaaacacctggggaggttacccaggaagaagttgacctattcatggattgcctttattcacatttccatagacatttcaaaattcatttatcagccacaagattagttcgtgtttcaacatctgtagcttcagcacatactgatggaaaaataaagattctgtgtcataaataccttattggagtgttagcatatttgacagaactggcaatttttcaaattgagtgaagccttatgtggactataagttatagattatatactcttattgataacttgcctaattgctatgctgaaagagactgcaggagaaataggcatctatctctgcatctgttttccccaccatgcctttggagttgccaagatggaagccaagaaggatctagaagaacaaagaatatggtagtagatgagccacagccaggtgcccatgtactaatcatgataacctgacatgccattctcaaaatgctgagttgttaatttcttgtcatctttaaatatatatatataggctgggcttggtggctcacacctgtaattccagcactttgggaggctgaggtgggtggatcatttgaggccaggaattcaagaccagcctggccaacatggtgaaaccccttctctactgaaaatacaataattagctgggcgtggtggcacatgcctatgatcccagctactggggaggctgaggcaggagaatcgttttaacccagaagacaggctgcagtgagccaagactgcaccactgcactccagcctgggcaacaaagtgagactctgcctcaaaaaataaaaaagaaataaaataaataaatacagcgtttattatgtttaaactcttaggattcaaatgagatgtatctaatggatatttctgatttgggtctttaaaacctttaatctcttttaagcattttagacttgcattcagaaagaattctgtcttctaaagacattttcctagcatttcactgcggagaactggcaatcaaaatcccctcaaaagggaactaaagattaatatacacatttttttagtcattaatatgcttctgttttaaatacagttcaactcctgttgcaatgttgaattaaatgtttattttaaaatg

SEQ ID NO: 368715 - DNA, 889 bp, Homo sapiens
  misc_feature (86)..(86): n is a, c, g, or t
cctggctgccaggtctggagagtcggcttgactacactgtgtggagcaagttttaaagaagcaaaggcagacctgagcatgacggntttttcgaggtaggagtcgactcctgtgaggtatggtgctgggtgcagatgcagtgtggctctggatagcaccttatggacagttgtgtccccaaggaaggatgagaatagctactgaagtcctaaagagcaagcctaactcaagccattggcacacaggcattagacagaaagctggaagttgaaatggtggagtccaacttgcctggaccagcttaatggttctgctcctggtaacgtttttatccatggatgacttgcttgggtaaggacatgaagacagttcctgtcataccttttaaaggtatggagagtcggcttgactacactgtgtggagcaagttttaaagaagcaaaggactcagaattcatgattgaagaaatgcaggttagtttaaactttgaaggaaatttttaaggtggcaaaaggttttggtggcatatacaccttaatctgtagatgggagtgattagctgtttaaaagttaaaatgtgactgagaaggaaattgagtagggcaaattttaaatgggtattatttttcatcttcaaacaggcagacctgttatcctaaactaagggtttttaatgaccacaacaagcaagcatgcagcttactgcttgaaagggtcttgcctcacccaagctagagtgcagtggcctttgaagcttactacagcctcaaacttctgggctcaagtgatcctcagcctcccagtggtctttgtagactgcctgatggagtctcatggcacaagaagattaaaacagtgtctccaattttaataaatttttgcaatcca

SEQ ID NO: 368716 - DNA, 697 bp, Homo sapiens
  misc_feature (86)..(86): n is a, c, g, or t
cctggctgccaggtctggagagtcggcttgactacactgtgtggagcaagttttaaagaagcaaaggcagacctgagcatgacggntttttcgaggtaggagtcgactcctgtgaggtatggtgctgggtgcagatgcagtgtggctctggatagcaccttatggacagttgtgtccccaaggaaggatgagaatagctactgaagtcctaaagagcaagcctaactcaagccattggcacacaggcattagacagaaagctggaagttgaaatggtggagtccaacttgcctggaccagcttaatggttctgctcctggtaacgtttttatccatggatgacttgcttgggtaaggacatgaagacagttcctgtcataccttttaaaggtatggagagtcggcttgactacactgtgtggagcaagttttaaagaagcaaaggactcagaattcatgattgaagaaatgcagggtttttaatgaccacaacaagcaagcatgcagcttactgcttgaaagggtcttgcctcacccaagctagagtgcagtggcctttgaagcttactacagcctcaaacttctgggctcaagtgatcctcagcctcccagtggtctttgtagactgcctgatggagtctcatggcacaagaagattaaaacagtgtctccaattttaataaatttttgcaatcca

SEQ ID NO: 368717 - DNA, 1715 bp, Homo sapiens
  misc_feature (86)..(86): n is a, c, g, or t
cctggctgccaggtctggagagtcggcttgactacactgtgtggagcaagttttaaagaagcaaaggcagacctgagcatgacggntttttcgaggtaggagtcgactcctgtgaggtatggtgctgggtgcagatgcagtgtggctctggatagcaccttatggacagttgtgtccccaaggaaggatgagaatagctactgaagtcctaaagagcaagcctaactcaagccattggcacacaggcattagacagaaagctggaagttgaaatggtggagtccaacttgcctggaccagcttaatggttctgctcctggtaacgtttttatccatggatgacttgcttgggtaaggacatgaagacagttcctgtcataccttttaaaggtatggagagtcggcttgactacactgtgtggagcaagttttaaagaagcaaaggactcagaattcatgattgaagaaatgcaggttagtttaaactttgaaggaaatttttaaggtggcaaaaggttttggtggcatatacaccttaatctgtagatgggagtgattagctgtttaaaagttaaaatgtgactgagaaggaaattgagtagggcaaattttaaatgggtattatttttcatcttcaaacaggcagacctgttatcctaaactaggtgagtcagcttttggtacatgtgatgattttcagtgtaaccaatgatgtaatgattctgccaaatgaaatataatgatatcactgtaaaaccgttccattttgattctgaggttactctactaacaagcatcacacatttgtattttgccctgattaatatgttggcttcgctttcagggtttttaatgaccacaacaagcaagcatgcagcttactgcttgaaaggtgaggattggaaatgttgggactattataattgcagaatacatgatgatctcaatccaacttgaactctctcactgattacttgatgacaataaaatatctgatattctgcattcccatgtagcattttaattgaagtctgtaaatgtggctaaaagtcttgtcttattttttgagacagggtcttgcctcacccaagctagagtgcagtggcctttgaagcttactacagcctcaaacttctgggctcaagtgatcctcagcctcccagtggtctttgtagactgcctgatggagtctcatggcacaagaagattaaaacagtgtctccaattttaataaatttttgcaatccaaaaaaaaaaaaaaaaaaaaaaaaaaaaaaaaaaaaaaaaaaagaaaaagagagagaagagcagagagaagaagaaagaaagaagaagagcaaagagagagaacagagagaagagagcagagagagagagaggagaggagagaagagcggggagggcaaccaaaaaaaaagaaccacaaagagaaggaagcacaagaaaacaaaagacagggacacaaccacgagaagaacaaaaaaacaaagagccgcacatcacaagaagaaaaacacacgaagtagcaaagaggaagggacgaaggaaggagggacggagagataccaaaacacaaaaccccagaaaaggaaggaagaaaggaaaaaccagcaagaagagcgagggacactcacgtgagagaagcagggcaacctcagcaaagacaagagaagcaggagagaagaaacaaacaaccagcaaagaacgcgaaccaa

SEQ ID NO: 368718 - DNA, 2611 bp, Homo sapiens
  misc_feature (86)..(86): n is a, c, g, or t
  misc_feature (2358)..(2358): n is a, c, g, or t
  misc_feature (2419)..(2419): n is a, c, g, or t
cctggctgccaggtctggagagtcggcttgactacactgtgtggagcaagttttaaagaagcaaaggcagacctgagcatgacggntttttcgaggtaggagtcgactcctgtgaggtatggtgctgggtgcagatgcagtgtggctctggatagcaccttatggacagttgtgtccccaaggaaggatgagaatagctactgaagtcctaaagagcaagcctaactcaagccattggcacacaggcattagacagaaagctggaagttgaaatggtggagtccaacttgcctggaccagcttaatggttctgctcctggtaacgtttttatccatggatgacttgcttgggtaaggacatgaagacagttcctgtcataccttttaaagtacatgttttattgatgttaacgttaattgattgagctactgttagtgatgattttaaaattaaagcagatgggaatctctctgagaaagaaaatggagattaatcttaaactgaaacagtagttgggaaatcttttagaaatccacctattactacctattggtaaaggagattaaatttctacaggtatggagagtcggcttgactacactgtgtggagcaagttttaaagaagcaaaggactcagaattcatgattgaagaaatgcaggttagtttaaactttgaaggaaatttttaaggtggcaaaaggttttggtggcatatacaccttaatctgtagatgggagtgattagctgtttaaaagttaaaatgtgactgagaaggaaattgagtagggcaaattttaaatgggtattatttttcatcttcaaacaggcagacctgttatcctaaactaggtgagtcagcttttggtacatgtgatgattttcagtgtaaccaatgatgtaatgattctgccaaatgaaatataatgatatcactgtaaaaccgttccattttgattctgaggttactctactaacaagcatcacacatttgtattttgccctgattaatatgttggcttcgctttcagggtttttaatgaccacaacaagcaagcatgcagcttactgcttgaaaggtgaggattggaaatgttgggactattataattgcagaatacatgatgatctcaatccaacttgaactctctcactgattacttgatgacaataaaatatctgatattctgcattcccatgtagcattttaattgaagtctgtaaatgtggctaaaagtcttgtcttattttttgagacagggtcttgcctcacccaagctagagtgcagtggcctttgaagcttactacagcctcaaacttctgggctcaagtgatcctcagcctcccagtggtctttgtagactgcctgatggagtctcatggcacaagaagattaaaacagtgtctccaattttaataaatttttgcaatccatctggagtgtgtagtgtttacttaaaaaaggacagtgcttttcatctgttcattagctgtaagcataaatcacattcaaaagctattataactccatggtatttgcttcattaacactgcagccagttaaaattttatgggtattttacaaggtgtcttatgcattaaagtgcaatatttcctaattctccatatgagcaaattgtcaggtttcataggcccctgtgctaattggttttgagcttaaagtattgatggagctacttggagaaagtcatgttgagtctgaggctgggaaaataagttatagaaaatactatagaaatgcccaactagtgataggcattaatggaattgggaaaatctacaatccatagccatggtgataggtttttggcaagcactaagtgtttagggatgccaaaagtgggtataaagggcacaactggtttaaggcaatctgtcccagggaaacaggaccaaggggccaaaattccaagatgggtcaaattttaatttcagtgtcagtacagctgtgcttataatgatgtctttgttagcagtaatggttttacaaatctgtttctgggctaaagcactttagtcccattaatgataaaacttcagttactctctgaattttcctttttttgagactgaatcctgttgccccaggaggttgaggatgcagtgagctgtgtcacaccactggattccagcctgggtgacagggtgagatgttgtctcaaataaaatattaaaaattggatcaccttattcagcattctgttgtttagcagttttggaattttagttgttagtaaatcttgaccttgagtacacgttattttgatattctgtgtgacaaaatgggaagtatgcatgaagcacatctgccataaagtatggatgtctagattttnttttccctagaaaaagtagttacaattgtttgagatacaagctgaactagctgcttgtttncacagaacatttttagtttgaaaaaacctgacaaattgattattcatattttaggggtaattttggcagagatttgctcaaaaaagaacaagtcagcttggaaaaaactgatggcatttgttgccaatgataaaactcaagcttccaaatgaaacctaaaattttggaaggcttgtatacacttctgtgccc

SEQ ID NO: 368719 - DNA, 1413 bp, Homo sapiens
  misc_feature (86)..(86): n is a, c, g, or t
cctggctgccaggtctggagagtcggcttgactacactgtgtggagcaagttttaaagaagcaaaggcagacctgagcatgacggntttttcgaggtaggagtcgactcctgtgaggtatggtgctgggtgcagatgcagtgtggctctggatagcaccttatggacagttgtgtccccaaggaaggatgagaatagctactgaagtcctaaagagcaagcctaactcaagccattggcacacaggcattagacagaaagctggaagttgaaatggtggagtccaacttgcctggaccagcttaatggttctgctcctggtaacgtttttatccatggatgacttgcttgggtaaggacatgaagacagttcctgtcataccttttaaaggtatggagagtcggcttgactacactgtgtggagcaagttttaaagaagcaaaggtatagcagttccaagtattttttttttttttttagacaagagtctagctcttgcccagaatggagtgcagcggcactatcagttcactgcaacctctgcctcccaggttcaaggaattctcctgcctcagcctcttgagtagctgggattacaggcatgtgacaccatgcctggctaattttgtacagctatgttgtccaggctggtctcgaactcttgacctcaagtgatactgcccgcactgacctcccaaagtgctgggattacaggcgtgagccaccatgccccgcctcaagtctggtttttaagtgttgtaaagccgatacaatgatgataacatagttcagcagactaacgctgatgagcaatattaagtctttcgctcctatctgatgtatctggcggtaacattctagtttatgccccgaaaaggggaatatagccattctataatgtttggagattttggattactcctaattgtatgcaagttgtcttactgtgtattgtcccttaatttcaggactcagaattcatgattgaagaaatgcaggttagtttaaactttgaaggaaatttttaaggtggcaaaaggttttggtggcatatacaccttaatctgtagatgggagtgattagctgtttaaaagttaaaatgtgactgagaaggaaattgagtagggcaaattttaaatgggtattatttttcatcttcaaacaggcagacctgttatcctaaactaagggtttttaatgaccacaacaagcaagcatgcagcttactgcttgaaagggtcttgcctcacccaagctagagtgcagtggcctttgaagcttactacagcctcaaacttctgggctcaagtgatcctcagcctcccagtggtctttgtagactgcctgatggagtctcatggcacaagaagattaaaacagtgtctccaattttaataaatttttgcaatcca

SEQ ID NO: 368720 - DNA, 900 bp, Homo sapiens
  misc_feature (86)..(86): n is a, c, g, or t
cctggctgccaggtctggagagtcggcttgactacactgtgtggagcaagttttaaagaagcaaaggcagacctgagcatgacggntttttcgaggtaggagtcgactcctgtgaggtatggtgctgggtgcagatgcagtgtggctctggatagcaccttatggacagttgtgtccccaaggaaggatgagaatagctactgaagtcctaaagagcaagcctaactcaagccattggcacacaggcattagacagaaagctggaagttgaaatggtggagtccaacttgcctggaccagcttaatggttctgctcctggtaacgtttttatccatggatgacttgcttgggtaaggacatgaagacagttcctgtcataccttttaaaggtatggagagtcggcttgactacactgtgtggagcaagttttaaagaagcaaaggactcagaattcatgattgaagaaatgcaggcagacctgttatcctaaacagggtttttaatgaccacaacaagcaagcatgcagcttactgcttgaaaggtgaggattggaaatgttgggactattataattgcagaatacatgatgatctcaatccaacttgaactctctcactgattacttgatgacaataaaatatctgatattctgcattcccatgtagcattttaattgaagtctgtaaatgtggctaaaagtcttgtcttattttttgagacagggtcttgcctcacccaagctagagtgcagtggcctttgaagcttactacagcctcaaacttctgggctcaagtgatcctcagcctcccagtggtctttgtagactgcctgatggagtctcatggcacaagaagattaaaacagtgtctccaattttaataaatttttgcaatcca

SEQ ID NO: 368721 - DNA, 2422 bp, Homo sapiens
  misc_feature (86)..(86): n is a, c, g, or t
  misc_feature (2169)..(2169): n is a, c, g, or t
  misc_feature (2230)..(2230): n is a, c, g, or t
cctggctgccaggtctggagagtcggcttgactacactgtgtggagcaagttttaaagaagcaaaggcagacctgagcatgacggntttttcgaggtaggagtcgactcctgtgaggtatggtgctgggtgcagatgcagtgtggctctggatagcaccttatggacagttgtgtccccaaggaaggatgagaatagctactgaagtcctaaagagcaagcctaactcaagccattggcacacaggcattagacagaaagctggaagttgaaatggtggagtccaacttgcctggaccagcttaatggttctgctcctggtaacgtttttatccatggatgacttgcttgggtaaggacatgaagacagttcctgtcataccttttaaaggtatggagagtcggcttgactacactgtgtggagcaagttttaaagaagcaaaggtatagcagttccaagtattttttttttttttttagacaagagtctagctcttgcccagaatggagtgcagcggcactatcagttcactgcaacctctgcctcccaggttcaaggaattctcctgcctcagcctcttgagtagctgggattacaggcatgtgacaccatgcctggctaattttgtacagctatgttgtccaggctggtctcgaactcttgacctcaagtgatactgcccgcactgacctcccaaagtgctgggattacaggcgtgagccaccatgccccgcctcaagtctggtttttaagtgttgtaaagccgatacaatgatgataacatagttcagcagactaacgctgatgagcaatattaagtctttcgctcctatctgatgtatctggcggtaacattctagtttatgccccgaaaaggggaatatagccattctataatgtttggagattttggattactcctaattgtatgcaagttgtcttactgtgtattgtcccttaatttcaggactcagaattcatgattgaagaaatgccaggcagacctgttatcctaaactaagggtttttaatgaccacaacaagcaagcatgcagcttactgcttgaaagggtcttgcctcacccaagctagagtgcagtggcctttgaagcttactacagcctcaaacttctgggctcaagtgatcctcagcctcccagtggtctttgtagactgcctgatggagtctcatggcacaagaagattaaaacagtgtctccaattttaataaatttttgcaatccatctggagtgtgtagtgtttacttaaaaaaggacagtgcttttcatctgttcattagctgtaagcataaatcacattcaaaagctattataactccatggtatttgcttcattaacactgcagccagttaaaattttatgggtattttacaaggtgtcttatgcattaaagtgcaatatttcctaattctccatatgagcaaattgtcaggtttcataggcccctgtgctaattggttttgagcttaaagtattgatggagctacttggagaaagtcatgttgagtctgaggctgggaaaataagttatagaaaatactatagaaatgcccaactagtgataggcattaatggaattgggaaaatctacaatccatagccatggtgataggtttttggcaagcactaagtgtttagggatgccaaaagtgggtataaagggcacaactggtttaaggcaatctgtcccagggaaacaggaccaaggggccaaaattccaagatgggtcaaattttaatttcagtgtcagtacagctgtgcttataatgatgtctttgttagcagtaatggttttacaaatctgtttctgggctaaagcactttagtcccattaatgataaaacttcagttactctctgaattttcctttttttgagactgaatcctgttgccccaggaggttgaggatgcagtgagctgtgtcacaccactggattccagcctgggtgacagggtgagatgttgtctcaaataaaatattaaaaattggatcaccttattcagcattctgttgtttagcagttttggaattttagttgttagtaaatcttgaccttgagtacacgttattttgatattctgtgtgacaaaatgggaagtatgcatgaagcacatctgccataaagtatggatgtctagattttnttttccctagaaaaagtagttacaattgtttgagatacaagctgaactagctgcttgtttncacagaacatttttagtttgaaaaaacctgacaaattgattattcatattttaggggtaattttggcagagatttgctcaaaaaagaacaagtcagcttggaaaaaactgatggcatttgttgccaatgataaaactcaagcttccaaatgaaacctaaaattttggaaggcttgtatacacttctgtgccc

SEQ ID NO: 368722 - DNA, 2133 bp, Homo sapiens
  misc_feature (86)..(86): n is a, c, g, or t
cctggctgccaggtctggagagtcggcttgactacactgtgtggagcaagttttaaagaagcaaaggcagacctgagcatgacggntttttcgaggtaggagtcgactcctgtgaggtatggtgctgggtgcagatgcagtgtggctctggatagcaccttatggacagttgtgtccccaaggaaggatgagaatagctactgaagtcctaaagagcaagcctaactcaagccattggcacacaggcattagacagaaagctggaagttgaaatggtggagtccaacttgcctggaccagcttaatggttctgctcctggtaacgtttttatccatggatgacttgcttgggtaaggacatgaagacagttcctgtcataccttttaaaggtatggagagtcggcttgactacactgtgtggagcaagttttaaagaagcaaaggactcagaattcatgattgaagaaatgcaggcagacctgttatcctaaactagggtttttaatgaccacaacaagcaagcatgcagcttactgcttgaaggggatttcagtctccacatagttttggagccggacttttgaagaatgattcgtgaatccggaatgggtgacagcgtcatcacggcattttattggtaaagatgctttgtattggtcccggacctgctttaactttgtatttgccctgttgtgtggtcattatcttacaatacttgcgtgttgaggtgtgtttaaacactacgtgcttaacactggctaagtattggcattggggcggttggatttaggtattggtggcaatgtagaaaagtgatcaagtcagagccccttcacggactaatcacaagagaaacaacaaagctttacttgtgtgctgtgaaccacaactgcaagtggaattgtcaagagaactagccctgccaagctcaggaaaacttctgaggagatggcacatggaaaatggataagatttactgagacaaacgggagtagagaagtgtttttaattggcgataaggtgaataaaaaggcagggagaacagtagagtgatcatctgtctagagtagggggtgcatgtttgggtatagggctgtcatttaacctcttaaagaattgtctactggaactttcttcactcccatccccccaccccccaatgttgtatacaaaaccttagaggaagtgtatgcagaatgttggattttggaaaggctaatgtcgatggatcttggggaagaactgaagtagtagaaaatgaacctggataggatcagataataagatcaaatacagtagtgccttgaaagccagacaggaattctgatttgacttcatatagatgtgtgggaactgttatgggatctcaagcaaggtaatgataaaagtggtgacaatgaaagactgatgatggattagggaaaggggctaagattgggaacaagataagtagctataattgagaatgaaagtgaagcccacatctaagaggacaagtgtatatctttttaagaaatatgtcagaggccaggttggtggctcacacctgtaattccagcactttgggaggctgaggtgggtggatcatttgaggccaggaattcaagaccagcctggccaacatggtgaaaccccttctctactgaaaatacaataattagctgggcgtggtggcacatgcctatgatcccagctactggggaggctgaggcaggagaatcgttttaacccagaagacaggctgcagtgagccaagactgcaccactgcactccagcctgggcaacaaagtgagactctgcctcaaaaaataaaaaagaaataaaataaataaatacagcgtttattatgtttaaactcttaggattcaaatgagatgtatctaatggatatttctgatttgggtctttaaaacctttaatctcttttaagcattttagacttgcattcagaaagaattctgtcttctaaagacattttcctagcatttcactgcggagaactggcaatcaaaatcccctcaaaagggaactaaagattaatatacacatttttttagtcattaatatgcttctgttttaaatacagttcaactcctgttgcaatgttgaattaaatgtttattttaaaatg

SEQ ID NO: 368723 - DNA, 1834 bp, Homo sapiens
  misc_feature (86)..(86): n is a, c, g, or t
  misc_feature (1581)..(1581): n is a, c, g, or t
  misc_feature (1642)..(1642): n is a, c, g, or t
cctggctgccaggtctggagagtcggcttgactacactgtgtggagcaagttttaaagaagcaaaggcagacctgagcatgacggntttttcgaggtaggagtcgactcctgtgaggtatggtgctgggtgcagatgcagtgtggctctggatagcaccttatggacagttgtgtccccaaggaaggatgagaatagctactgaagtcctaaagagcaagcctaactcaagccattggcacacaggcattagacagaaagctggaagttgaaatggtggagtccaacttgcctggaccagcttaatggttctgctcctggtaacgtttttatccatggatgacttgcttgggtatggagagtcggcttgactacactgtgtggagcaagttttaaagaagcaaaggactcagaattcatgattgaagaaatgcagggtttttaatgaccacaacaagcaagcatgcagcttactgcttgaaagggtcttgcctcacccaagctagagtgcagtggcctttgaagcttactacagcctcaaacttctgggctcaagtgatcctcagcctcccagtggtctttgtagactgcctgatggagtctcatggcacaagaagattaaaacagtgtctccaattttaataaatttttgcaatccatctggagtgtgtagtgtttacttaaaaaaggacagtgcttttcatctgttcattagctgtaagcataaatcacattcaaaagctattataactccatggtatttgcttcattaacactgcagccagttaaaattttatgggtattttacaaggtgtcttatgcattaaagtgcaatatttcctaattctccatatgagcaaattgtcaggtttcataggcccctgtgctaattggttttgagcttaaagtattgatggagctacttggagaaagtcatgttgagtctgaggctgggaaaataagttatagaaaatactatagaaatgcccaactagtgataggcattaatggaattgggaaaatctacaatccatagccatggtgataggtttttggcaagcactaagtgtttagggatgccaaaagtgggtataaagggcacaactggtttaaggcaatctgtcccagggaaacaggaccaaggggccaaaattccaagatgggtcaaattttaatttcagtgtcagtacagctgtgcttataatgatgtctttgttagcagtaatggttttacaaatctgtttctgggctaaagcactttagtcccattaatgataaaacttcagttactctctgaattttcctttttttgagactgaatcctgttgccccaggaggttgaggatgcagtgagctgtgtcacaccactggattccagcctgggtgacagggtgagatgttgtctcaaataaaatattaaaaattggatcaccttattcagcattctgttgtttagcagttttggaattttagttgttagtaaatcttgaccttgagtacacgttattttgatattctgtgtgacaaaatgggaagtatgcatgaagcacatctgccataaagtatggatgtctagattttnttttccctagaaaaagtagttacaattgtttgagatacaagctgaactagctgcttgtttncacagaacatttttagtttgaaaaaacctgacaaattgattattcatattttaggggtaattttggcagagatttgctcaaaaaagaacaagtcagcttggaaaaaactgatggcatttgttgccaatgataaaactcaagcttccaaatgaaacctaaaattttggaaggcttgtatacacttctgtgccc

SEQ ID NO: 368724 - DNA, 722 bp, Homo sapiens
  misc_feature (86)..(86): n is a, c, g, or t
cctggctgccaggtctggagagtcggcttgactacactgtgtggagcaagttttaaagaagcaaaggcagacctgagcatgacggntttttcgaggtaggagtcgactcctgtgaggtatggtgctgggtgcagatgcagtgtggctctggatagcaccttatggacagttgtgtccccaaggaaggatgagaatagctactgaagtcctaaagagcaagcctaactcaagccattggcacacaggcattagacagaaagctggaagttgaaatggtggagtccaacttgcctggaccagcttaatggttctgctcctggtaacgtttttatccatggatgacttgcttgggtaaggacatgaagacagttcctgtcataccttttaaaggtatggagagtcggcttgactacactgtgtggagcaagttttaaagaagcaaaggactcagaattcatgattgaagaaatgccaggcagacctgttatcctaaactaagggtttttaatgaccacaacaagcaagcatgcagcttactgcttgaaagggtcttgcctcacccaagctagagtgcagtggcctttgaagcttactacagcctcaaacttctgggctcaagtgatcctcagcctcccagtggtctttgtagactgcctgatggagtctcatggcacaagaagattaaaacagtgtctccaattttaataaatttttgcaatcca

SEQ ID NO: 368725 - DNA, 2945 bp, Homo sapiens
  misc_feature (86)..(86): n is a, c, g, or t
  misc_feature (1102)..(1102): n is a, c, g, or t
  misc_feature (1604)..(1604): n is a, c, g, or t
  misc_feature (1721)..(1721): n is a, c, g, or t
  misc_feature (1764)..(1764): n is a, c, g, or t
  misc_feature (1817)..(1818): n is a, c, g, or t
  misc_feature (1824)..(1824): n is a, c, g, or t
  misc_feature (1907)..(1907): n is a, c, g, or t
  misc_feature (2396)..(2396): n is a, c, g, or t
  misc_feature (2692)..(2692): n is a, c, g, or t
  misc_feature (2753)..(2753): n is a, c, g, or t
cctggctgccaggtctggagagtcggcttgactacactgtgtggagcaagttttaaagaagcaaaggcagacctgagcatgacggntttttcgaggtaggagtcgactcctgtgaggtatggtgctgggtgcagatgcagtgtggctctggatagcaccttatggacagttgtgtccccaaggaaggatgagaatagctactgaagtcctaaagagcaagcctaactcaagccattggcacacaggcattagacagaaagctggaagttgaaatggtggagtccaacttgcctggaccagcttaatggttctggtaagtattaatgaaaacagtagatagacttaatgaaaatgctgatggtgatatgcttactgctgagctaatggcttaaggcttggctgatgaatactgactgtattttccttgagcatgtctggaacagtgtttatgtgttttccttgagcatgtttggaacggggtttgtgtaatgatgttgatcaaatgtctgacctgaaatgagcatgtagacaaaggtaacactgaagaaccctgtgacagacaactttgaaaagagtttaatgatgtttagcattttaatggaagtcctcatttgtattccagctcctggtaacgtttttatccatggatgacttgcttgggtaaggacatgaagacagttcctgtcataccttttaaagtacatgttttattgatgttaacgttaattgattgagctactgttagtgatgattttaaaattaaagcagatgggaatctctctgagaaagaaaatggagattaatcttaaactgaaacagtagttgggaaatcttttagaaatccacctattactacctattggtaaaggagattaaatttctacaggtatggagagtcggcttgactacactgtgtggagcaagttttaaagaagcaaaggtatagcagttccaagtattttttttttttttttagacaagagtctagctcttgcccagaatggagtgcagcggcactatcagttcactgcaacctctgcctcccaggttcaaggaattctcctgcctcagcctcttgagtagctgaggcaggagaattgcntgaacctaggaagtggaggttgcagtgaactgagatcatgccaccgcactccagcctgggcaacggcgagacttggtctcaaaaaaaaacacacacacaaaactaccaccacctaccccaatcggttaccctttacttttcatgtgaccaccatgacctattatgtgttttgttcttacttcccccacaagaatgtaagcgcttcaagtttattccttaatgttggaaaaatgaatgaaactgcaaatgtagtagatcagtttttggggaggtaccaaagacaagttggtaaaataccttgattttgaagtgaaaaacgatgttacatttcaaagtatcttttcgccaggttatggctcaggcttcgagaccagcctggccaacatggcaaaacccggtctctactgaaaaaaagcgaaaattagccgggtgtggtagtgtgggcctgtagtcccagctactctgaaccctggaggtggaggttgcagtgaaccaagatcgngccacctcactccagcctgggcctcctaggctcaagtgattgttgtgcctcaactacctgagtagctgggatgacaggtgtgtgccaccactcccagctaatttttttttctgtatntttagtagagatggagtttcaccatgtcagccaggctagtctngaactcctggcctcaagtgatccaactgccctgccctcccaaagtgctgggannacaggngtgagccactgcatccagccaagttctattcttttttttttttttgagacggagtttcgctcgtgttgcccaggctggaatgnagcggcgcaatcttggctcactgcaacctccacctcccaggttcaagcgattctcctgcctcagccttccaagtagctgggattacaggcgtgggccaccatgcctggctatttttgtatttttagtagagagggggtttcaccacgttggccaggctggtctcgaactcctgacctcgtgatctgcccacctagcctcccaaagtgctgggattacaggcgtgagccaccgcatccagcttcttgttctctcttttatatataagtgccatttgctgaatcagaaaactttttgacaagcatattaaaagatttcagttgtatgtagtagctcatgcctgtaatcccaacactttgggaaaccaaggtggggggattgcttgagtccaggagttcaagaccggcctgggcaacatagtgagaccctgtgtctacaattaaaaaaaaaaagaaaaaaaaagtgagccgggcatgatggtgcatgcctgnagtcccaaccactcatgagactgaggtgggacgatcgcttgagcccaggaggttgaggatgcagtgagctgtgtcacaccactggattccagcctgggtgacagggtgagatgttgtctcaaataaaatattaaaaattggatcaccttattcagcattctgttgtttagcagttttggaattttagttgttagtaaatcttgaccttgagtacacgttattttgatattctgtgtgacaaaatgggaagtatgcatgaagcacatctgccataaagtatggatgtctagattttnttttccctagaaaaagtagttacaattgtttgagatacaagctgaactagctgcttgtttncacagaacatttttagtttgaaaaaacctgacaaattgattattcatattttaggggtaattttggcagagatttgctcaaaaaagaacaagtcagcttggaaaaaactgatggcatttgttgccaatgataaaactcaagcttccaaatgaaacctaaaattttggaaggcttgtatacacttctgtgccc

SEQ ID NO: 368726 - DNA, 658 bp, Homo sapiens
  misc_feature (86)..(86): n is a, c, g, or t
cctggctgccaggtctggagagtcggcttgactacactgtgtggagcaagttttaaagaagcaaaggcagacctgagcatgacggntttttcgaggtaggagtcgactcctgtgaggtatggtgctgggtgcagatgcagtgtggctctggatagcaccttatggacagttgtgtccccaaggaaggatgagaatagctactgaagtcctaaagagcaagcctaactcaagccattggcacacaggcattagacagaaagctggaagttgaaatggtggagtccaacttgcctggaccagcttaatggttctgctcctggtaacgtttttatccatggatgacttgcttgggtatggagagtcggcttgactacactgtgtggagcaagttttaaagaagcaaaggactcagaattcatgattgaagaaatgcagggtttttaatgaccacaacaagcaagcatgcagcttactgcttgaaagggtcttgcctcacccaagctagagtgcagtggcctttgaagcttactacagcctcaaacttctgggctcaagtgatcctcagcctcccagtggtctttgtagactgcctgatggagtctcatggcacaagaagattaaaacagtgtctccaattttaataaatttttgcaatcca

SEQ ID NO: 368727 - DNA, 2037 bp, Homo sapiens
  misc_feature (86)..(86): n is a, c, g, or t
  misc_feature (1784)..(1784): n is a, c, g, or t
  misc_feature (1845)..(1845): n is a, c, g, or t
cctggctgccaggtctggagagtcggcttgactacactgtgtggagcaagttttaaagaagcaaaggcagacctgagcatgacggntttttcgaggtaggagtcgactcctgtgaggtatggtgctgggtgcagatgcagtgtggctctggatagcaccttatggacagttgtgtccccaaggaaggatgagaatagctactgaagtcctaaagagcaagcctaactcaagccattggcacacaggcattagacagaaagctggaagttgaaatggtggagtccaacttgcctggaccagcttaatggttctgctcctggtaacgtttttatccatggatgacttgcttgggtatggagagtcggcttgactacactgtgtggagcaagttttaaagaagcaaaggactcagaattcatgattgaagaaatgcaggcagacctgttatcctaaacagggtttttaatgaccacaacaagcaagcatgcagcttactgcttgaaaggtgaggattggaaatgttgggactattataattgcagaatacatgatgatctcaatccaacttgaactctctcactgattacttgatgacaataaaatatctgatattctgcattcccatgtagcattttaattgaagtctgtaaatgtggctaaaagtcttgtcttattttttgagacagggtcttgcctcacccaagctagagtgcagtggcctttgaagcttactacagcctcaaacttctgggctcaagtgatcctcagcctcccagtggtctttgtagactgcctgatggagtctcatggcacaagaagattaaaacagtgtctccaattttaataaatttttgcaatccatctggagtgtgtagtgtttacttaaaaaaggacagtgcttttcatctgttcattagctgtaagcataaatcacattcaaaagctattataactccatggtatttgcttcattaacactgcagccagttaaaattttatgggtattttacaaggtgtcttatgcattaaagtgcaatatttcctaattctccatatgagcaaattgtcaggtttcataggcccctgtgctaattggttttgagcttaaagtattgatggagctacttggagaaagtcatgttgagtctgaggctgggaaaataagttatagaaaatactatagaaatgcccaactagtgataggcattaatggaattgggaaaatctacaatccatagccatggtgataggtttttggcaagcactaagtgtttagggatgccaaaagtgggtataaagggcacaactggtttaaggcaatctgtcccagggaaacaggaccaaggggccaaaattccaagatgggtcaaattttaatttcagtgtcagtacagctgtgcttataatgatgtctttgttagcagtaatggttttacaaatctgtttctgggctaaagcactttagtcccattaatgataaaacttcagttactctctgaattttcctttttttgagactgaatcctgttgccccaggaggttgaggatgcagtgagctgtgtcacaccactggattccagcctgggtgacagggtgagatgttgtctcaaataaaatattaaaaattggatcaccttattcagcattctgttgtttagcagttttggaattttagttgttagtaaatcttgaccttgagtacacgttattttgatattctgtgtgacaaaatgggaagtatgcatgaagcacatctgccataaagtatggatgtctagattttnttttccctagaaaaagtagttacaattgtttgagatacaagctgaactagctgcttgtttncacagaacatttttagtttgaaaaaacctgacaaattgattattcatattttaggggtaattttggcagagatttgctcaaaaaagaacaagtcagcttggaaaaaactgatggcatttgttgccaatgataaaactcaagcttccaaatgaaacctaaaattttggaaggcttgtatacacttctgtgccc

SEQ ID NO: 368728 - DNA, 2015 bp, Homo sapiens
  misc_feature (86)..(86): n is a, c, g, or t
  misc_feature (1762)..(1762): n is a, c, g, or t
  misc_feature (1823)..(1823): n is a, c, g, or t
cctggctgccaggtctggagagtcggcttgactacactgtgtggagcaagttttaaagaagcaaaggcagacctgagcatgacggntttttcgaggtaggagtcgactcctgtgaggtatggtgctgggtgcagatgcagtgtggctctggatagcaccttatggacagttgtgtccccaaggaaggatgagaatagctactgaagtcctaaagagcaagcctaactcaagccattggcacacaggcattagacagaaagctggaagttgaaatggtggagtccaacttgcctggaccagcttaatggttctgctcctggtaacgtttttatccatggatgacttgcttgggtatggagagtcggcttgactacactgtgtggagcaagttttaaagaagcaaaggactcagaattcatgattgaagaaatgcagggtttttaatgaccacaacaagcaagcatgcagcttactgcttgaaaggtgaggattggaaatgttgggactattataattgcagaatacatgatgatctcaatccaacttgaactctctcactgattacttgatgacaataaaatatctgatattctgcattcccatgtagcattttaattgaagtctgtaaatgtggctaaaagtcttgtcttattttttgagacagggtcttgcctcacccaagctagagtgcagtggcctttgaagcttactacagcctcaaacttctgggctcaagtgatcctcagcctcccagtggtctttgtagactgcctgatggagtctcatggcacaagaagattaaaacagtgtctccaattttaataaatttttgcaatccatctggagtgtgtagtgtttacttaaaaaaggacagtgcttttcatctgttcattagctgtaagcataaatcacattcaaaagctattataactccatggtatttgcttcattaacactgcagccagttaaaattttatgggtattttacaaggtgtcttatgcattaaagtgcaatatttcctaattctccatatgagcaaattgtcaggtttcataggcccctgtgctaattggttttgagcttaaagtattgatggagctacttggagaaagtcatgttgagtctgaggctgggaaaataagttatagaaaatactatagaaatgcccaactagtgataggcattaatggaattgggaaaatctacaatccatagccatggtgataggtttttggcaagcactaagtgtttagggatgccaaaagtgggtataaagggcacaactggtttaaggcaatctgtcccagggaaacaggaccaaggggccaaaattccaagatgggtcaaattttaatttcagtgtcagtacagctgtgcttataatgatgtctttgttagcagtaatggttttacaaatctgtttctgggctaaagcactttagtcccattaatgataaaacttcagttactctctgaattttcctttttttgagactgaatcctgttgccccaggaggttgaggatgcagtgagctgtgtcacaccactggattccagcctgggtgacagggtgagatgttgtctcaaataaaatattaaaaattggatcaccttattcagcattctgttgtttagcagttttggaattttagttgttagtaaatcttgaccttgagtacacgttattttgatattctgtgtgacaaaatgggaagtatgcatgaagcacatctgccataaagtatggatgtctagattttnttttccctagaaaaagtagttacaattgtttgagatacaagctgaactagctgcttgtttncacagaacatttttagtttgaaaaaacctgacaaattgattattcatattttaggggtaattttggcagagatttgctcaaaaaagaacaagtcagcttggaaaaaactgatggcatttgttgccaatgataaaactcaagcttccaaatgaaacctaaaattttggaaggcttgtatacacttctgtgccc

SEQ ID NO: 368729 - DNA, 2165 bp, Homo sapiens
  misc_feature (86)..(86): n is a, c, g, or t
  misc_feature (1912)..(1912): n is a, c, g, or t
  misc_feature (1973)..(1973): n is a, c, g, or t
cctggctgccaggtctggagagtcggcttgactacactgtgtggagcaagttttaaagaagcaaaggcagacctgagcatgacggntttttcgaggtaggagtcgactcctgtgaggtatggtgctgggtgcagatgcagtgtggctctggatagcaccttatggacagttgtgtccccaaggaaggatgagaatagctactgaagtcctaaagagcaagcctaactcaagccattggcacacaggcattagacagaaagctggaagttgaaatggtggagtccaacttgcctggaccagcttaatggttctgctcctggtaacgtttttatccatggatgacttgcttgaggactcagaattcatgattgaagaaatgccaggcagacctgttatcctaaactaggtgagtcagcttttggtacatgtgatgattttcagtgtaaccaatgatgtaatgattctgccaaatgaaatataatgatatcactgtaaaaccgttccattttgattctgaggttactctactaacaagcatcacacatttgtattttgccctgattaatatgttggcttcgctttcagggtttttaatgaccacaacaagcaagcatgcagcttactgcttgaaaggtgaggattggaaatgttgggactattataattgcagaatacatgatgatctcaatccaacttgaactctctcactgattacttgatgacaataaaatatctgatattctgcattcccatgtagcattttaattgaagtctgtaaatgtggctaaaagtcttgtcttattttttgagacagggtcttgcctcacccaagctagagtgcagtggcctttgaagcttactacagcctcaaacttctgggctcaagtgatcctcagcctcccagtggtctttgtagactgcctgatggagtctcatggcacaagaagattaaaacagtgtctccaattttaataaatttttgcaatccatctggagtgtgtagtgtttacttaaaaaaggacagtgcttttcatctgttcattagctgtaagcataaatcacattcaaaagctattataactccatggtatttgcttcattaacactgcagccagttaaaattttatgggtattttacaaggtgtcttatgcattaaagtgcaatatttcctaattctccatatgagcaaattgtcaggtttcataggcccctgtgctaattggttttgagcttaaagtattgatggagctacttggagaaagtcatgttgagtctgaggctgggaaaataagttatagaaaatactatagaaatgcccaactagtgataggcattaatggaattgggaaaatctacaatccatagccatggtgataggtttttggcaagcactaagtgtttagggatgccaaaagtgggtataaagggcacaactggtttaaggcaatctgtcccagggaaacaggaccaaggggccaaaattccaagatgggtcaaattttaatttcagtgtcagtacagctgtgcttataatgatgtctttgttagcagtaatggttttacaaatctgtttctgggctaaagcactttagtcccattaatgataaaacttcagttactctctgaattttcctttttttgagactgaatcctgttgccccaggaggttgaggatgcagtgagctgtgtcacaccactggattccagcctgggtgacagggtgagatgttgtctcaaataaaatattaaaaattggatcaccttattcagcattctgttgtttagcagttttggaattttagttgttagtaaatcttgaccttgagtacacgttattttgatattctgtgtgacaaaatgggaagtatgcatgaagcacatctgccataaagtatggatgtctagattttnttttccctagaaaaagtagttacaattgtttgagatacaagctgaactagctgcttgtttncacagaacatttttagtttgaaaaaacctgacaaattgattattcatattttaggggtaattttggcagagatttgctcaaaaaagaacaagtcagcttggaaaaaactgatggcatttgttgccaatgataaaactcaagcttccaaatgaaacctaaaattttggaaggcttgtatacacttctgtgccc

SEQ ID NO: 368730 - DNA, 1806 bp, Homo sapiens
  misc_feature (86)..(86): n is a, c, g, or t
  misc_feature (1553)..(1553): n is a, c, g, or t
  misc_feature (1614)..(1614): n is a, c, g, or t
cctggctgccaggtctggagagtcggcttgactacactgtgtggagcaagttttaaagaagcaaaggcagacctgagcatgacggntttttcgaggtaggagtcgactcctgtgaggtatggtgctgggtgcagatgcagtgtggctctggatagcaccttatggacagttgtgtccccaaggaaggatgagaatagctactgaagtcctaaagagcaagcctaactcaagccattggcacacaggcattagacagaaagctggaagttgaaatggtggagtccaacttgcctggaccagcttaatggttctgctcctggtaacgtttttatccatggatgacttgcttgaggactcagaattcatgattgaagaaatgccaggcagacctgttatcctaaactaagggtttttaatgaccacaacaagcaagcatgcagcttactgcttgaaagggtcttgcctcacccaagctagagtgcagtggcctttgaagcttactacagcctcaaacttctgggctcaagtgatcctcagcctcccagtggtctttgtagactgcctgatggagtctcatggcacaagaagattaaaacagtgtctccaattttaataaatttttgcaatccatctggagtgtgtagtgtttacttaaaaaaggacagtgcttttcatctgttcattagctgtaagcataaatcacattcaaaagctattataactccatggtatttgcttcattaacactgcagccagttaaaattttatgggtattttacaaggtgtcttatgcattaaagtgcaatatttcctaattctccatatgagcaaattgtcaggtttcataggcccctgtgctaattggttttgagcttaaagtattgatggagctacttggagaaagtcatgttgagtctgaggctgggaaaataagttatagaaaatactatagaaatgcccaactagtgataggcattaatggaattgggaaaatctacaatccatagccatggtgataggtttttggcaagcactaagtgtttagggatgccaaaagtgggtataaagggcacaactggtttaaggcaatctgtcccagggaaacaggaccaaggggccaaaattccaagatgggtcaaattttaatttcagtgtcagtacagctgtgcttataatgatgtctttgttagcagtaatggttttacaaatctgtttctgggctaaagcactttagtcccattaatgataaaacttcagttactctctgaattttcctttttttgagactgaatcctgttgccccaggaggttgaggatgcagtgagctgtgtcacaccactggattccagcctgggtgacagggtgagatgttgtctcaaataaaatattaaaaattggatcaccttattcagcattctgttgtttagcagttttggaattttagttgttagtaaatcttgaccttgagtacacgttattttgatattctgtgtgacaaaatgggaagtatgcatgaagcacatctgccataaagtatggatgtctagattttnttttccctagaaaaagtagttacaattgtttgagatacaagctgaactagctgcttgtttncacagaacatttttagtttgaaaaaacctgacaaattgattattcatattttaggggtaattttggcagagatttgctcaaaaaagaacaagtcagcttggaaaaaactgatggcatttgttgccaatgataaaactcaagcttccaaatgaaacctaaaattttggaaggcttgtatacacttctgtgccc

SEQ ID NO: 368731 - DNA, 1246 bp, Homo sapiens
  misc_feature (86)..(86): n is a, c, g, or t
cctggctgccaggtctggagagtcggcttgactacactgtgtggagcaagttttaaagaagcaaaggcagacctgagcatgacggntttttcgaggtaggagtcgactcctgtgaggtatggtgctgggtgcagatgcagtgtggctctggatagcaccttatggacagttgtgtccccaaggaaggatgagaatagctactgaagtcctaaagagcaagcctaactcaagccattggcacacaggcattagacagaaagctggaagttgaaatggtggagtccaacttgcctggaccagcttaatggttctgctcctggtaacgtttttatccatggatgacttgcttgggtaaggacatgaagacagttcctgtcataccttttaaaggtatggagagtcggcttgactacactgtgtggagcaagttttaaagaagcaaaggtatagcagttccaagtattttttttttttttttagacaagagtctagctcttgcccagaatggagtgcagcggcactatcagttcactgcaacctctgcctcccaggttcaaggaattctcctgcctcagcctcttgagtagctgggattacaggcatgtgacaccatgcctggctaattttgtacagctatgttgtccaggctggtctcgaactcttgacctcaagtgatactgcccgcactgacctcccaaagtgctgggattacaggcgtgagccaccatgccccgcctcaagtctggtttttaagtgttgtaaagccgatacaatgatgataacatagttcagcagactaacgctgatgagcaatattaagtctttcgctcctatctgatgtatctggcggtaacattctagtttatgccccgaaaaggggaatatagccattctataatgtttggagattttggattactcctaattgtatgcaagttgtcttactgtgtattgtcccttaatttcaggactcagaattcatgattgaagaaatgccaggcagacctgttatcctaaactaagggtttttaatgaccacaacaagcaagcatgcagcttactgcttgaaagggtcttgcctcacccaagctagagtgcagtggcctttgaagcttactacagcctcaaacttctgggctcaagtgatcctcagcctcccagtggtctttgtagactgcctgatggagtctcatggcacaagaagattaaaacagtgtctccaattttaataaatttttgcaatcca

SEQ ID NO: 368732 - DNA, 2514 bp, Homo sapiens
  misc_feature (86)..(86): n is a, c, g, or t
cctggctgccaggtctggagagtcggcttgactacactgtgtggagcaagttttaaagaagcaaaggcagacctgagcatgacggntttttcgaggtaggagtcgactcctgtgaggtatggtgctgggtgcagatgcagtgtggctctggatagcaccttatggacagttgtgtccccaaggaaggatgagaatagctactgaagtcctaaagagcaagcctaactcaagccattggcacacaggcattagacagaaagctggaagttgaaatggtggagtccaacttgcctggaccagcttaatggttctgctcctggtaacgtttttatccatggatgacttgcttgggtatggagagtcggcttgactacactgtgtggagcaagttttaaagaagcaaaggactcagaattcatgattgaagaaatgcagggtttttaatgaccacaacaagcaagcatgcagcttactgcttgaaggggatttcagtctccacatagttttggagccggacttttgaagaatgattcgtgaatccggaatgggtgacagcgtcatcacggcattttattgacagaccatggattcttacagtgcaccagagtcaactcctagtgcatcctcaagacctgaagattactttataggtgccactcctctgcagaaacgattagaatcggtcaggaagcagagttcatttatcctgactccacctcgaaggaaaattccccagtgttcgcagttgcaggaagatgttgaccctcaaaaggttgcattccttctgcataaacagtggactttatatagtttaactcccttatataaattctcctatagtaatctcaaagagtattctagacttctcaatgcttttattgttgctgaaaagcaaaaaggacttgctgtggaagtgggagaagacttcaacatcaaagtgattttttctactctcctaggaatgaaaggaacacaaagggacccggaagcatttcttgtccagattgtgtcaaaatctcaattgccatctgagaatagagaaggtaaagtgctgtggactggctggttctgctgtgtatttggagacagtcttctggagactgtttcagaagatttcacctgtctgcccttattccttgcaaatggagcagagtctaacacagcaataattggaacttggtttcagaaaacctttgactgttatttcagtcctttagcaatcaatgcatttaatctttcctggatggctgccatgtggactgcatgcaaaatggaccattatgtggctactactgaatttctttggtctgtaccctgtagccctcaaagtctggacatttctttcgcaatacatccagaggatgcaaaagctctatgggacagtgtccacaaaacacctggggaggttacccaggaagaagttgacctattcatggattgcctttattcacatttccatagacatttcaaaattcatttatcagccacaagattagttcgtgtttcaacatctgtagcttcagcacatactgatggaaaaataaagattctgtgtcataaataccttattggagtgttagcatatttgacagaactggcaatttttcaaattgagtgaagccttatgtggactataagttatagattatatactcttattgataacttgcctaattgctatgctgaaagagactgcaggagaaataggcatctatctctgcatctgttttccccaccatgcctttggagttgccaagatggaagccaagaaggatctagaagaacaaagaatatggtagtagatgagccacagccaggtgcccatgtactaatcatgataacctgacatgccattctcaaaatgctgagttgttaatttcttgtcatctttaaatatatatatataggctgggcttggtggctcacacctgtaattccagcactttgggaggctgaggtgggtggatcatttgaggccaggaattcaagaccagcctggccaacatggtgaaaccccttctctactgaaaatacaataattagctgggcgtggtggcacatgcctatgatcccagctactggggaggctgaggcaggagaatcgttttaacccagaagacaggctgcagtgagccaagactgcaccactgcactccagcctgggcaacaaagtgagactctgcctcaaaaaataaaaaagaaataaaataaataaatacagcgtttattatgtttaaactcttaggattcaaatgagatgtatctaatggatatttctgatttgggtctttaaaacctttaatctcttttaagcattttagacttgcattcagaaagaattctgtcttctaaagacattttcctagcatttcactgcggagaactggcaatcaaaatcccctcaaaagggaactaaagattaatatacacatttttttagtcattaatatgcttctgttttaaatacagttcaactcctgttgcaatgttgaattaaatgtttattttaaaatg

SEQ ID NO: 368733 - DNA, 909 bp, Homo sapiens
  misc_feature (86)..(86): n is a, c, g, or t
cctggctgccaggtctggagagtcggcttgactacactgtgtggagcaagttttaaagaagcaaaggcagacctgagcatgacggntttttcgaggtaggagtcgactcctgtgaggtatggtgctgggtgcagatgcagtgtggctctggatagcaccttatggacagttgtgtccccaaggaaggatgagaatagctactgaagtcctaaagagcaagcctaactcaagccattggcacacaggcattagacagaaagctggaagttgaaatggtggagtccaacttgcctggaccagcttaatggttctgctcctggtaacgtttttatccatggatgacttgcttgggtaaggacatgaagacagttcctgtcataccttttaaagtacatgttttattgatgttaacgttaattgattgagctactgttagtgatgattttaaaattaaagcagatgggaatctctctgagaaagaaaatggagattaatcttaaactgaaacagtagttgggaaatcttttagaaatccacctattactacctattggtaaaggagattaaatttctacaggtatggagagtcggcttgactacactgtgtggagcaagttttaaagaagcaaaggactcagaattcatgattgaagaaatgccaggcagacctgttatcctaaactaagggtttttaatgaccacaacaagcaagcatgcagcttactgcttgaaagggtcttgcctcacccaagctagagtgcagtggcctttgaagcttactacagcctcaaacttctgggctcaagtgatcctcagcctcccagtggtctttgtagactgcctgatggagtctcatggcacaagaagattaaaacagtgtctccaattttaataaatttttgcaatcca

SEQ ID NO: 368734 - DNA, 630 bp, Homo sapiens
  misc_feature (86)..(86): n is a, c, g, or t
cctggctgccaggtctggagagtcggcttgactacactgtgtggagcaagttttaaagaagcaaaggcagacctgagcatgacggntttttcgaggtaggagtcgactcctgtgaggtatggtgctgggtgcagatgcagtgtggctctggatagcaccttatggacagttgtgtccccaaggaaggatgagaatagctactgaagtcctaaagagcaagcctaactcaagccattggcacacaggcattagacagaaagctggaagttgaaatggtggagtccaacttgcctggaccagcttaatggttctgctcctggtaacgtttttatccatggatgacttgcttgaggactcagaattcatgattgaagaaatgccaggcagacctgttatcctaaactaagggtttttaatgaccacaacaagcaagcatgcagcttactgcttgaaagggtcttgcctcacccaagctagagtgcagtggcctttgaagcttactacagcctcaaacttctgggctcaagtgatcctcagcctcccagtggtctttgtagactgcctgatggagtctcatggcacaagaagattaaaacagtgtctccaattttaataaatttttgcaatcca

SEQ ID NO: 368735 - DNA, 1262 bp, Homo sapiens
  misc_feature (86)..(86): n is a, c, g, or t
cctggctgccaggtctggagagtcggcttgactacactgtgtggagcaagttttaaagaagcaaaggcagacctgagcatgacggntttttcgaggtaggagtcgactcctgtgaggtatggtgctgggtgcagatgcagtgtggctctggatagcaccttatggacagttgtgtccccaaggaaggatgagaatagctactgaagtcctaaagagcaagcctaactcaagccattggcacacaggcattagacagaaagctggaagttgaaatggtggagtccaacttgcctggaccagcttaatggttctgctcctggtaacgtttttatccatggatgacttgcttgggtaaggacatgaagacagttcctgtcataccttttaaagtacatgttttattgatgttaacgttaattgattgagctactgttagtgatgattttaaaattaaagcagatgggaatctctctgagaaagaaaatggagattaatcttaaactgaaacagtagttgggaaatcttttagaaatccacctattactacctattggtaaaggagattaaatttctacaggtatggagagtcggcttgactacactgtgtggagcaagttttaaagaagcaaaggactcagaattcatgattgaagaaatgccaggcagacctgttatcctaaactaagggtttttaatgaccacaacaagcaagcatgcagcttactgcttgaaagggtcttgcctcacccaagctagagtgcagtggcctttgaagcttactacagcctcaaacttctgggctcaagtgatcctcagcctcccagtggtctttgtagactgcctgatggagtctcatggcacaagaagattaaaacagtgtctccaattttaataaatttttgcaatccaaaaaaaaaaaaaaaaaaaaaaaaaaaaaaaaaaaaaaaaaaatttggggggggccgggcccgaaaaatttttaaacccctcggtggggggcggcgcgccagtaggttatgtgagacattgggcctaaacgctggtacccaggaacaccccggggtcagacacatgggtgggttcgcccccaaaaaaaagcccggggacaccggcggtttcggaccaatccagtgggttccgcgctcgccgcttctacacgggtccaggcgagccgatctagccccccgcggcagcgaaacagaagaagcaagaaggaaagcaggagaaggataaaaaaagagagaaaaacagcaggacagcag

SEQ ID NO: 368736 - DNA, 677 bp, Homo sapiens
  misc_feature (86)..(86): n is a, c, g, or t
cctggctgccaggtctggagagtcggcttgactacactgtgtggagcaagttttaaagaagcaaaggcagacctgagcatgacggntttttcgaggtaggagtcgactcctgtgaggtatggtgctgggtgcagatgcagtgtggctctggatagcaccttatggacagttgtgtccccaaggaaggatgagaatagctactgaagtcctaaagagcaagcctaactcaagccattggcacacaggcattagacagaaagctggaagttgaaatggtggagtccaacttgcctggaccagcttaatggttctgctcctggtaacgtttttatccatggatgacttgcttgggtaaggacatgaagacagttcctgtcataccttttaaaggtatggagagtcggcttgactacactgtgtggagcaagttttaaagaagcaaaggtatagcagttccaagtattttttttttttttttagacaagagtctagctcttgcccagaatggagtgcagcggcactatcagttcactgcaacctctgcctcccaggtcctcaaacttctgggctcaagtgatcctcagcctcccagtggtctttgtagactgcctgatggagtctcatggcacaagaagattaaaacagtgtctccaattttaataaatttttgcaatcca

SEQ ID NO: 368737 - DNA, 802 bp, Homo sapiens
aactgaagaggcggcggagggccgaattcccttttctcaacggcttgatttcagagctgggctggtctctgacaggctcagctggagagggacgggttgggacgcactgtccttttgcccttccccctccgcgagcagaagctgactccgcaggagcgagggtcgcagagctgggtgagcggaaatgtccctcccagagtgaagtcgcagggcccgccccgcgtctgagggagcggaggtcttcctgggggatttcagtctccacatagttttggagccggacttttgaagaatgattcgtgaatccggaatgggtgacagcgtcatcacggcattttattgacagaccatggattcttacagtgcaccagagtcaactcctagtgcatcctcaagacctgaagattactttataggtgccactcctctgcagaaacgattagaatcggtcaggaagcagagttcatttatcctgactccacctcgaaggaaaattccccagtgttcgcagttgcaggaagatgttgaccctcaaaaggttgcattccttctgcataaacagtggactttatatagtttaactcccttatataaattctcctatagtaatctcaaagagtattctagacttctcaatgcttttattgttgctgaaaagcaaaaaggacttgctgtggaagtgggagaagacttcaacatcaaagtgattttttctactctcctaggaatgaaaggaacacaaagggacccggaagcatttcttgtcccagggtctcattttgtcacccaggctggagtacag

SEQ ID NO: 368738 - DNA, 396 bp, Homo sapiens
tccaacaaaataagctctcagctgggtgtggtggcatgtgcctgtagtcccaggtacttgcgaggatgaagcaggaggatcgcttgagcccaggagttcgagtaggcagagctatgatcgcaccacatccagcccggatgacaaagcgagactccatctttaaaggaaaaaataaaaaaaaaaacctaagcttttaaaattagtcatctaatgaaccactgaatacgataattatgtcttacatatttacaatatacactctctgacttaacgatggtctgacttgggatttttaaatttaagatggcataaaggcacatgcattcagtagaaaccgtactgcaagtacccacacaacaattttagttttcactgttagtgttcaataacttacat

SEQ ID NO: 368739 - DNA, 810 bp, Homo sapiens
gggcgcagggagccgccgccggggctgtaggcgccaaggccatgtccgactcgtgggtcccgaactccgcctcgggccaggacccagggggccgccggagggcctgggccgagctgctggcgggaagggtcaagagggaaaaatataatcctgaaagggcacagaaattaaaggaatcagctgtgcgcctcctgcgaagccatcaggacctgaatgcccttttgcttgaggtagaaggtccactgtgtaaaaaattgtctctcagcaaagtgattgactgtgacagttctgaggcctatgctaatcattctagttcatttataggctctgctttgcaggatcaagcctcaaggctgggggttcccgtgggtattctctcagccgggatggttgcctctagcgtgggacagatctgcacggctccagcggagaccagtcaccctgtgctgctgactgtggagcagagaaagaagctgtcttccctgttagagtttgctcagtatttattggcacacagtatgttctcccgtctttccttctgtcaagaattatggaaaatacaggtaaatttgagattgcaaatctgactctccagtgttccaggcaatgttctgttgatctggatggaggcaacagagtacctgggttttcttgggaattctccaagcttctcattaattacagagagtggatgaaaaagggtttagaaatcatctgtggattggaaagaagtaccttcaattgccattttttgtccctattcacctatcattagtaatatttattagactagaatatattgaaaaacac

SEQ ID NO: 368740 - DNA, 291 bp, Homo sapiens
ttatttagaatgacagcacaggtaattttaatgtaataataagtgcacgtttttatttacagctattggttttccttttcttcttctccttgatgggcctgctgtcgtcacatctgacctcaaatgtaagtcagaccttaccagccaaggtgtcctctcccactgtgggccaggcaggggcaccaggcagccagcttccaagtcagggtttccagactagctcaggagctccttgtgtttgcggaagtgtgagtgagaactcccaggccgtgggttttttttttttttttt

SEQ ID NO: 368741 - DNA, 5881 bp, Homo sapiens
gggcgcagggagccgccgccggggctgtaggcgccaaggccatgtccgactcgtgggtcccgaactccgcctcgggccaggacccagggggccgccggagggcctgggccgagctgctggcgggaagggtcaagagggaaaaatataatcctgaaagggcacagaaattaaaggaatcagctgtgcgcctcctgcgaagccatcaggacctgaatgcccttttgcttgaggtagaaggtccactgtgtaaaaaattgtctctcagcaaagtgattgactgtgacagttctgaggcctatgctaatcattctagttcatttataggctctgctttgcaggatcaagcctcaaggctgggggttcccgtgggtattctctcagccgggatggttgcctctagcgtgggacagatctgcacggctccagcggagaccagtcaccctgtgctgctgactgtggagcagagaaagaagctgtcttccctgttagagtttgctcagtatttattggcacacagtatgttctcccgtctttccttctgtcaagaattatggaaaatacagagttctttgttgcttgaagcggtgtggcatcttcacgtacaaggcattgtgagcctgcaagagctgctggaaagccatcccgacatgcatgctgtgggatcgtggctcttcaggaatctgtgctgcctttgtgaacagatggaagcatcctgccagcatgctgacgtcgccagggccatgctttctgattttgttcaaatgtttgttttgaggggatttcagaaaaactcagatctgagaagaactgtggagcctgaaaaaatgccgcaggtcgcggttgatgtactgcagagaatgctgatttttgcacttgacgctttggctgctggagtacaggaggagtcctccactcacaagatcgtgaggtgctggttcggagtgttcagtggacacacgcttggcagtgtaatttccacagatcctctgaagaggttcttcagtcataccctgactcagatactcactcacagccctgtgctgaaagcatctgatgctgttcagatgcagagagagtggagctttgcgcggacacaccctctgctcacctcactgtaccgcaggctctttgtgatgctgagtgcagaggagttggttggccatttgcaagaagttctggaaacgcaggaggttcactggcagagagtgctctcctttgtgtctgccctggttgtctgctttccagaagcgcagcagctgcttgaagactgggtggcgcgtttgatggcccaggcattcgagagctgccagctggacagcatggtcactgcgttcctggttgtgcgccaggcagcactggagggcccctctgcgttcctgtcatatgcagactggttcaaggcctcctttgggagcacacgaggctaccatggctgcagcaagaaggccctggtcttcctgtttacgttcttgtcagaactcgtgccttttgagtctccccggtacctgcaggtgcacattctccacccacccctggttcccagcaagtaccgctccctcctcacagactacatctcattggccaagacacggctggccgacctcaaggtttctatagaaaacatgggactctacgaggatttgtcatcagctggggacattactgagccccacagccaagctcttcaggatgttgaaaaggccatcatggtgtttgagcatacggggaacatcccagtcaccgtcatggaggccagcatattcaggaggccttactacgtgtcccacttcctccccgccctgctcacacctcgagtgctccccaaagtccctgactcccgtgtggcgtttatagagtctctgaagagagcagataaaatccccccatctctgtactccacctactgccaggcctgctctgctgctgaagagaagccagaagatgcagccctgggagtgagggcagaacccaactctgctgaggagcccctgggacagctcacagctgcactgggagagctgagagcctccatgacagaccccagccagcgtgatgttatatcggcacaggtggcagtgatttctgaaagactgagggctgtcctgggccacaatgaggatgacagcagcgttgagatatcaaagattcagctcagcatcaacacgccgagactggagccacgggaacacatggctgtggacctcctgctgacgtctttctgtcagaacctgatggctgcctccagtgtcgctcccccggagaggcagggtccctgggctgccctcttcgtgaggaccatgtgtggacgtgtgctccctgcagtgctcacccggctctgccagctgctccgtcaccagggcccgagcctgagtgccccacatgtgctggggttggctgccctggccgtgcacctgggtgagtccaggtctgcgctcccagaggtggatgtgggtcctcctgcacctggtgctggccttcctgtccctgcgctctttgacagcctcctgacctgtaggacgagggattccttgttcttctgcctgaaattttgtacagcagcaatttcttactctctctgcaagttttcttcccagtcacgagatactttgtgcagctgcttatctccaggccttattaaaaagtttcagttcctcatgttcagattgttctcagaggcccgacagcctctttctgaggaggacgtagccagcctttcctggagacccttgcaccttccttctgcagactggcagagagctgccctctctctctggacacacagaaccttccgagaggtgttgaaagaggaagatgttcacttaacttaccaagactggttacacctggagctggaaattcaacctgaagctgatgctctttcagatactgaacggcaggacttccaccagtgggcgatccatgagcactttctccctgagtcctcggcttcagggggctgtgacggagacctgcaggctgcgtgtaccattcttgtcaacgcactgatggatttccaccaaagctcaaggagttatgaccactcagaaaattctgatttggtctttggtggccgcacaggaaatgaggatattatttccagattgcaggagatggtagctgacctggagctgcagcaagacctcatagtgcctctcggccacaccccttcccaggagcacttcctctttgagattttccgcagacggctccaggctctgacaagcgggtggagcgtggctgccagccttcagagacagagggagctgctaatgtacaaacggatcctcctccgcctgccttcgtctgtcctctgcggcagcagcttccaggcagaacagcccatcactgccagatgcgagcagttcttccacttggtcaactctgagatgagaaacttctgctcccacggaggtgccctgacacaggacatcactgcccacttcttcaggggcctcctgaacgcctgtctgcggagcagagacccctccctgatggtcgacttcatactggccaagtgccagacgaaatgccccttaattttgacctctgctctggtgtggtggccgagcctggagcctgtgctgctctgccggtggaggagacactgccagagcccgctgccccgggaactgcagaagctacaagaaggccggcagtttgccagcgatttcctctcccctgaggctgcctccccagcacccaacccggactggctctcagctgctgcactgcactttgcgattcaacaagtcagggaagaaaacatcaggaagcagctaaagaagctggactgcgagagagaggagctattggttttccttttcttcttctccttgatgggcctgctgtcgtcacatctgacctcaaatagcaccacagacctgccaaaggctttccacgtttgtgcagcaatcctcgagtgtttagagaagaggaagatatcctggctggcactctttcagttgacagagagtgacctcaggctggggcggctcctcctccgtgtggccccggatcagcacaccaggctgctgcctttcgctttttacagtcttctctcctacttccatgaagacgcggccatcagggaagaggccttcctgcatgttgctgtggacatgtacttgaagctggtccagctcttcgtggctggggatacaagcacagtttcacctccagctggcaggagcctggagctcaagggtcagggcaaccccgtggaactgataacaaaagctcgtctttttctgctgcagttaatacctcggtgcccgaaaaagagcttctcacacgtggcagagctgctggctgatcgtggggactgcgacccagaggtgagcgccgccctccagagcagacagcaggctgcccctgacgctgacctgtcccaggagcctcatctcttctgacgggacctgccactgcacaccagcccagctcccgtgtaaataatttattacaagcataacatggagctcttgttgcactaaaaagtggattacaaatctcctcgactgctttagtggggaaaggaatcaattatttatgaactgtccggccccgagtcactcagcgtttgcgggaaaataaaccactggtcccagagcagaggaaggctacttgagccggacaccaagcccgcctccagcaccaagggcgggcagcaccctccgaccctcccatgcgggtgcacacgaagggtgaggctgacacagccactgcggagtccaggctgctagaggtgctcatcctcactgccgtcctcaggtgggttcgggcttcaccgcctggccctctgtggtcacagaggggctcggtggcccaggtggtggttccgcctccaggggcagggccttgtcctgggtctgtgtcagcgggtgcaccatggacatgtgtacattgaggttgtgggccttctcaaaccgccggccacactggtcacaggcaaagtccagctcagtctcagccttgtgtttggtcatgtggtacttgagggatgcccgctgcctgcactggaacccacagacctcacacctgggggacagaggcagataagaaggtgcgagggccacagccctgggagggggtcctgactcacacttactgcaaaggcttggctcccgaatgtcgcatttggtggacgagaaggtgcttccgctgcttgaaggtttgtccacattcgtcacagatatagttccgcacctctgagaggggagagtccagtgagtccaggcccctgatgctccaacctcccggggggacgacgatgacaatgtgaaaccatcacagctgggaagacatttctgcacatggttcaccatgcagtgggcccaagcaaggggcctatgagggcctcgtttattaagatctttaaactgctttatacactgtcacgtggcttcatcagctgtgtgcatttcaggatggtttttaaagaaacctcagaaagctatttccttaaccacagattcttgtcttttttttttttgagatggagtttcgctctgttacccaggctgcagtgcggtggcgtgatctcagctcactgcaacctgcgcctcccgggctcaagcgattcttgtgcctcagcctgccaagtagctgggattacaggcgccccccaccacgcccagctgatttttgtatttttagtagagacagggtttacaccatattggccaggctggtcttgaattcctgaccttgtgatctgcctgcctcggtctcccaaagtgctgggattacatgtgtgagccactgcatccggcctgtgggcttatcttttaatgtcttatttgaggacgtggtgcagcagccttggtgtgggtgctcgaagtccctggcctcctacctgagcctcttctgtccagaggcccagtat

SEQ ID NO: 368742 - DNA, 5796 bp, Homo sapiens
gggcgcagggagccgccgccggggctgtaggcgccaaggccatgtccgactcgtgggtcccgaactccgcctcgggccaggacccagggggccgccggagggcctgggccgagctgctggcgggaagggtcaagagggaaaaatataatcctgaaagggcacagaaattaaaggaatcagctgtgcgcctcctgcgaagccatcaggacctgaatgcccttttgcttgaggtagaaggtccactgtgtaaaaaattgtctctcagcaaagtgattgactgtgacagttctgaggcctatgctaatcattctagttcatttataggctctgctttgcaggatcaagcctcaaggctgggggttcccgtgggtattctctcagccgggatggttgcctctagcgtgggacagatctgcacggctccagcggagaccagtcaccctgtgctgctgactgtggagcagagaaagaagctgtcttccctgttagagtttgctcagtatttattggcacacagtatgttctcccgtctttccttctgtcaagaattatggaaaatacagagttctttgttgcttgaagcggtgtggcatcttcacgtacaaggcattgtgagcctgcaagagctgctggaaagccatcccgacatgcatgctgtgggatcgtggctcttcaggaatctgtgctgcctttgtgaacagatggaagcatcctgccagcatgctgacgtcgccagggccatgctttctgattttgttcaaatgtttgttttgaggggatttcagaaaaactcagatctgagaagaactgtggagcctgaaaaaatgccgcaggtcgcggttgatgtactgcagagaatgctgatttttgcacttgacgctttggctgctggagtacaggaggagtcctccactcacaagatcgtgaggtgctggttcggagtgttcagtggacacacgcttggcagtgtaatttccacagatcctctgaagaggttcttcagtcataccctgactcagatactcactcacagccctgtgctgaaagcatctgatgctgttcagatgcagagagagtggagctttgcgcggacacaccctctgctcacctcactgtaccgcaggctctttgtgatgctgagtgcagaggagttggttggccatttgcaagaagttctggaaacgcaggaggttcactggcagagagtgctctcctttgtgtctgccctggttgtctgctttccagaagcgcagcagctgcttgaagactgggtggcgcgtttgatggcccaggcattcgagagctgccagctggacagcatggtcactgcgttcctggttgtgcgccaggcagcactggagggcccctctgcgttcctgtcatatgcagactggttcaaggcctcctttgggagcacacgaggctaccatggctgcagcaagaaggccctggtcttcctgtttacgttcttgtcagaactcgtgccttttgagtctccccggtacctgcaggtgcacattctccacccacccctggttcccagcaagtaccgctccctcctcacagactacatctcattggccaagacacggctggccgacctcaaggtttctatagaaaacatgggactctacgaggatttgtcatcagctggggacattactgagccccacagccaagctcttcaggatgttgaaaaggccatcatggtgtttgagcatacggggaacatcccagtcaccgtcatggaggccagcatattcaggaggccttactacgtgtcccacttcctccccgccctgctcacacctcgagtgctccccaaagtccctgactcccgtgtggcgtttatagagtctctgaagagagcagataaaatccccccatctctgtactccacctactgccaggcctgctctgctgctgaagagaagccagaagatgcagccctgggagtgagggcagaacccaactctgctgaggagcccctgggacagctcacagctgcactgggagagctgagagcctccatgacagaccccagccagcgtgatgttatatcggcacaggtggcagtgatttctgaaagactgagggctgtcctgggccacaatgaggatgacagcagcgttgagatatcaaagattcagctcagcatcaacacgccgagactggagccacgggaacacatggctgtggacctcctgctgacgtctttctgtcagaacctgatggctgcctccagtgtcgctcccccggagaggcagggtccctgggctgccctcttcgtgaggaccatgtgtggacgtgtgctccctgcagtgctcacccggctctgccagctgctccgtcaccagggcccgagcctgagtgccccacatgtgctggggttggctgccctggccgtgcacctgggtgagtccaggtctgcgctcccagaggtggatgtgggtcctcctgcacctggtgctggccttcctgtccctgcgctctttgacagcctcctgacctgtaggacgagggattccttgttcttctgcctgaaattttgtacagcagcaatttcttactctctctgcaagttttcttcccagtcacgagatactttgtgcagctgcttatctccaggccttattaaaaagtttcagttcctcatgttcagattgttctcagaggcccgacagcctctttctgaggaggacgtagccagcctttcctggagacccttgcaccttccttctgcagactggcagagagctgccctctctctctggacacacagaaccttccgagaggtgttgaaagaggaagatgttcacttaacttaccaagactggttacacctggagctggaaattcaacctgaagctgatgctctttcagatactgaacggcaggacttccaccagtgggcgatccatgagcactttctccctgagtcctcggcttcagggggctgtgacggagacctgcaggctgcgtgtaccattcttgtcaacgcactgatggatttccaccaaaggagatggtagctgacctggagctgcagcaagacctcatagtgcctctcggccacaccccttcccaggagcacttcctctttgagattttccgcagacggctccaggctctgacaagcgggtggagcgtggctgccagccttcagagacagagggagctgctaatgtacaaacggatcctcctccgcctgccttcgtctgtcctctgcggcagcagcttccaggcagaacagcccatcactgccagatgcgagcagttcttccacttggtcaactctgagatgagaaacttctgctcccacggaggtgccctgacacaggacatcactgcccacttcttcaggggcctcctgaacgcctgtctgcggagcagagacccctccctgatggtcgacttcatactggccaagtgccagacgaaatgccccttaattttgacctctgctctggtgtggtggccgagcctggagcctgtgctgctctgccggtggaggagacactgccagagcccgctgccccgggaactgcagaagctacaagaaggccggcagtttgccagcgatttcctctcccctgaggctgcctccccagcacccaacccggactggctctcagctgctgcactgcactttgcgattcaacaagtcagggaagaaaacatcaggaagcagctaaagaagctggactgcgagagagaggagctattggttttccttttcttcttctccttgatgggcctgctgtcgtcacatctgacctcaaatagcaccacagacctgccaaaggctttccacgtttgtgcagcaatcctcgagtgtttagagaagaggaagatatcctggctggcactctttcagttgacagagagtgacctcaggctggggcggctcctcctccgtgtggccccggatcagcacaccaggctgctgcctttcgctttttacagtcttctctcctacttccatgaagacgcggccatcagggaagaggccttcctgcatgttgctgtggacatgtacttgaagctggtccagctcttcgtggctggggatacaagcacagtttcacctccagctggcaggagcctggagctcaagggtcagggcaaccccgtggaactgataacaaaagctcgtctttttctgctgcagttaatacctcggtgcccgaaaaagagcttctcacacgtggcagagctgctggctgatcgtggggactgcgacccagaggtgagcgccgccctccagagcagacagcaggctgcccctgacgctgacctgtcccaggagcctcatctcttctgacgggacctgccactgcacaccagcccagctcccgtgtaaataatttattacaagcataacatggagctcttgttgcactaaaaagtggattacaaatctcctcgactgctttagtggggaaaggaatcaattatttatgaactgtccggccccgagtcactcagcgtttgcgggaaaataaaccactggtcccagagcagaggaaggctacttgagccggacaccaagcccgcctccagcaccaagggcgggcagcaccctccgaccctcccatgcgggtgcacacgaagggtgaggctgacacagccactgcggagtccaggctgctagaggtgctcatcctcactgccgtcctcaggtgggttcgggcttcaccgcctggccctctgtggtcacagaggggctcggtggcccaggtggtggttccgcctccaggggcagggccttgtcctgggtctgtgtcagcgggtgcaccatggacatgtgtacattgaggttgtgggccttctcaaaccgccggccacactggtcacaggcaaagtccagctcagtctcagccttgtgtttggtcatgtggtacttgagggatgcccgctgcctgcactggaacccacagacctcacacctgggggacagaggcagataagaaggtgcgagggccacagccctgggagggggtcctgactcacacttactgcaaaggcttggctcccgaatgtcgcatttggtggacgagaaggtgcttccgctgcttgaaggtttgtccacattcgtcacagatatagttccgcacctctgagaggggagagtccagtgagtccaggcccctgatgctccaacctcccggggggacgacgatgacaatgtgaaaccatcacagctgggaagacatttctgcacatggttcaccatgcagtgggcccaagcaaggggcctatgagggcctcgtttattaagatctttaaactgctttatacactgtcacgtggcttcatcagctgtgtgcatttcaggatggtttttaaagaaacctcagaaagctatttccttaaccacagattcttgtcttttttttttttgagatggagtttcgctctgttacccaggctgcagtgcggtggcgtgatctcagctcactgcaacctgcgcctcccgggctcaagcgattcttgtgcctcagcctgccaagtagctgggattacaggcgccccccaccacgcccagctgatttttgtatttttagtagagacagggtttacaccatattggccaggctggtcttgaattcctgaccttgtgatctgcctgcctcggtctcccaaagtgctgggattacatgtgtgagccactgcatccggcctgtgggcttatcttttaatgtcttatttgaggacgtggtgcagcagccttggtgtgggtgctcgaagtccctggcctcctacctgagcctcttctgtccagaggcccagtat

SEQ ID NO: 368743 - DNA, 5708 bp, Homo sapiens
gggcgcagggagccgccgccggggctgtaggcgccaaggccatgtccgactcgtgggtcccgaactccgcctcgggccaggacccagggggccgccggagggcctgggccgagctgctggcgggaagggtcaagagggaaaaatataatcctgaaagggcacagaaattaaaggaatcagctgtgcgcctcctgcgaagccatcaggacctgaatgcccttttgcttgaggtagaaggtccactgtgtaaaaaattgtctctcagcaaagtgattgactgtgacagttctgaggcctatgctaatcattctagttcatttataggctctgctttgcaggatcaagcctcaaggctgggggttcccgtgggtattctctcagccgggatggttgcctctagcgtgggacagatctgcacggctccagcggagaccagtcaccctgtgctgctgactgtggagcagagaaagaagctgtcttccctgttagagtttgctcagtatttattggcacacagtatgttctcccgtctttccttctgtcaagaattatggaaaatacagagttctttgttgcttgaagcggtgtggcatcttcacgtacaaggcattgtgagcctgcaagagctgctggaaagccatcccgacatgcatgctgtgggatcgtggctcttcaggaatctgtgctgcctttgtgaacagatggaagcatcctgccagcatgctgacgtcgccagggccatgctttctgattttgttcaaatgtttgttttgaggggatttcagaaaaactcagatctgagaagaactgtggagcctgaaaaaatgccgcaggtcgcggttgatgtactgcagagaatgctgatttttgcacttgacgctttggctgctggagtacaggaggagtcctccactcacaagatcgtgaggtgctggttcggagtgttcagtggacacacgcttggcagtgtaatttccacagatcctctgaagaggttcttcagtcataccctgactcagatactcactcacagccctgtgctgaaagcatctgatgctgttcagatgcagagagagtggagctttgcgcggacacaccctctgctcacctcactgtaccgcaggctctttgtgatgctgagtgcagaggagttggttggccatttgcaagaagttctggaaacgcaggaggttcactggcagagagtgctctcctttgtgtctgccctggttgtctgctttccagaagcgcagcagctgcttgaagactgggtggcgcgtttgatggcccaggcattcgagagctgccagctggacagcatggtcactgcgttcctggttgtgcgccaggcagcactggagggcccctctgcgttcctgtcatatgcagactggttcaaggcctcctttgggagcacacgaggctaccatggctgcagcaagaaggccctggtcttcctgtttacgttcttgtcagaactcgtgccttttgagtctccccggtacctgcaggtgcacattctccacccacccctggttcccagcaagtaccgctccctcctcacagactacatctcattggccaagacacggctggccgacctcaaggtttctatagaaaacatgggactctacgaggatttgtcatcagctggggacattactgagccccacagccaagctcttcaggatgttgaaaaggccatcatggtgtttgagcatacggggaacatcccagtcaccgtcatggaggccagcatattcaggaggccttactacgtgtcccacttcctccccgccctgctcacacctcgagtgctccccaaagtccctgactcccgtgtggcgtttatagagtctctgaagagagcagataaaatccccccatctctgtactccacctactgccaggcctgctctgctgctgaagagaagccagaagatgcagccctgggagtgagggcagaacccaactctgctgaggagcccctgggacagctcacagctgcactgggagagctgagagcctccatgacagaccccagccagcgtgatgttatatcggcacaggtggcagtgatttctgaaagactgagggctgtcctgggccacaatgaggatgacagcagcgttgagatatcaaagattcagctcagcatcaacacgccgagactggagccacgggaacacatggctgtggacctcctgctgacgtctttctgtcagaacctgatggctgcctccagtgtcgctcccccggagaggcagggtccctgggctgccctcttcgtgaggaccatgtgtggacgtgtgctccctgcagtgctcacccggctctgccagctgctccgtcaccagggcccgagcctgagtgccccacatgtgctggggttggctgccctggccgtgcacctgggtgagtccaggtctgcgctcccagaggtggatgtgggtcctcctgcacctggtgctggccttcctgtccctgcgctctttgacagcctcctgacctgtaggacgagggattccttgttcttctgcctgaaattttgtacagcagcaatttcttactctctctgcaagttttcttcccagtcacgagatactttgtgcagctgcttatctccaggccttattaaaaagtttcagttcctcatgttcagattgttctcagaggcccgacagcctctttctgaggaggacgtagccagcctttcctggagacccttgcaccttccttctgcagactggcagagagctgccctctctctctggacacacagaaccttccgagaggtgttgaaagaggaagatgttcacttaacttaccaagactggttacacctggagctggaaattcaacctgaagctgatgctctttcagatactgaacggcaggacttccaccagtgggcgatccatgagcactttctccctgagtcctcggcttcagggggctgtgacggagacctgcaggctgcgtgtaccattcttgtcaacgcactgatggatttccaccaaagctcaaggagttatgaccactcagaaaattctgatttggtctttggtggccgcacaggaaatgaggatattatttccagattgcaggatcctcctccgcctgccttcgtctgtcctctgcggcagcagcttccaggcagaacagcccatcactgccagatgcgagcagttcttccacttggtcaactctgagatgagaaacttctgctcccacggaggtgccctgacacaggacatcactgcccacttcttcaggggcctcctgaacgcctgtctgcggagcagagacccctccctgatggtcgacttcatactggccaagtgccagacgaaatgccccttaattttgacctctgctctggtgtggtggccgagcctggagcctgtgctgctctgccggtggaggagacactgccagagcccgctgccccgggaactgcagaagctacaagaaggccggcagtttgccagcgatttcctctcccctgaggctgcctccccagcacccaacccggactggctctcagctgctgcactgcactttgcgattcaacaagtcagggaagaaaacatcaggaagcagctaaagaagctggactgcgagagagaggagctattggttttccttttcttcttctccttgatgggcctgctgtcgtcacatctgacctcaaatagcaccacagacctgccaaaggctttccacgtttgtgcagcaatcctcgagtgtttagagaagaggaagatatcctggctggcactctttcagttgacagagagtgacctcaggctggggcggctcctcctccgtgtggccccggatcagcacaccaggctgctgcctttcgctttttacagtcttctctcctacttccatgaagacgcggccatcagggaagaggccttcctgcatgttgctgtggacatgtacttgaagctggtccagctcttcgtggctggggatacaagcacagtttcacctccagctggcaggagcctggagctcaagggtcagggcaaccccgtggaactgataacaaaagctcgtctttttctgctgcagttaatacctcggtgcccgaaaaagagcttctcacacgtggcagagctgctggctgatcgtggggactgcgacccagaggtgagcgccgccctccagagcagacagcaggctgcccctgacgctgacctgtcccaggagcctcatctcttctgacgggacctgccactgcacaccagcccagctcccgtgtaaataatttattacaagcataacatggagctcttgttgcactaaaaagtggattacaaatctcctcgactgctttagtggggaaaggaatcaattatttatgaactgtccggccccgagtcactcagcgtttgcgggaaaataaaccactggtcccagagcagaggaaggctacttgagccggacaccaagcccgcctccagcaccaagggcgggcagcaccctccgaccctcccatgcgggtgcacacgaagggtgaggctgacacagccactgcggagtccaggctgctagaggtgctcatcctcactgccgtcctcaggtgggttcgggcttcaccgcctggccctctgtggtcacagaggggctcggtggcccaggtggtggttccgcctccaggggcagggccttgtcctgggtctgtgtcagcgggtgcaccatggacatgtgtacattgaggttgtgggccttctcaaaccgccggccacactggtcacaggcaaagtccagctcagtctcagccttgtgtttggtcatgtggtacttgagggatgcccgctgcctgcactggaacccacagacctcacacctgggggacagaggcagataagaaggtgcgagggccacagccctgggagggggtcctgactcacacttactgcaaaggcttggctcccgaatgtcgcatttggtggacgagaaggtgcttccgctgcttgaaggtttgtccacattcgtcacagatatagttccgcacctctgagaggggagagtccagtgagtccaggcccctgatgctccaacctcccggggggacgacgatgacaatgtgaaaccatcacagctgggaagacatttctgcacatggttcaccatgcagtgggcccaagcaaggggcctatgagggcctcgtttattaagatctttaaactgctttatacactgtcacgtggcttcatcagctgtgtgcatttcaggatggtttttaaagaaacctcagaaagctatttccttaaccacagattcttgtcttttttttttttgagatggagtttcgctctgttacccaggctgcagtgcggtggcgtgatctcagctcactgcaacctgcgcctcccgggctcaagcgattcttgtgcctcagcctgccaagtagctgggattacaggcgccccccaccacgcccagctgatttttgtatttttagtagagacagggtttacaccatattggccaggctggtcttgaattcctgaccttgtgatctgcctgcctcggtctcccaaagtgctgggattacatgtgtgagccactgcatccggcctgtgggcttatcttttaatgtcttatttgaggacgtggtgcagcagccttggtgtgggtgctcgaagtccctggcctcctacctgagcctcttctgtccagaggcccagtat

SEQ ID NO: 368744 - DNA, 5991 bp, Homo sapiens
gggcgcagggagccgccgccggggctgtaggcgccaaggccatgtccgactcgtgggtcccgaactccgcctcgggccaggacccagggggccgccggagggcctgggccgagctgctggcgggaagggtcaagagggaaaaatataatcctgaaagggcacagaaattaaaggaatcagctgtgcgcctcctgcgaagccatcaggacctgaatgcccttttgcttgaggtagaaggtccactgtgtaaaaaattgtctctcagcaaagtgattgactgtgacagttctgaggcctatgctaatcattctagttcatttataggctctgctttgcaggatcaagcctcaaggctgggggttcccgtgggtattctctcagccgggatggttgcctctagcgtgggacagatctgcacggctccagcggagaccagtcaccctgtgctgctgactgtggagcagagaaagaagctgtcttccctgttagagtttgctcagtatttattggcacacagtatgttctcccgtctttccttctgtcaagaattatggaaaatacagagttctttgttgcttgaagcggtgtggcatcttcacgtacaaggcattgtgagcctgcaagagctgctggaaagccatcccgacatgcatgctgtgggatcgtggctcttcaggaatctgtgctgcctttgtgaacagatggaagcatcctgccagcatgctgacgtcgccagggccatgctttctgattttgttcaaatgtttgttttgaggggatttcagaaaaactcagatctgagaagaactgtggagcctgaaaaaatgccgcaggtcgcggttgatgtactgcagagaatgctgatttttgcacttgacgctttggctgctggagtacaggaggagtcctccactcacaagatcgtgaggtgctggttcggagtgttcagtggacacacgcttggcagtgtaatttccacagatcctctgaagaggttcttcagtcataccctgactcagatactcactcacagccctgtgctgaaagcatctgatgctgttcagatgcagagagagtggagctttgcgcggacacaccctctgctcacctcactgtaccgcaggctctttgtgatgctgagtgcagaggagttggttggccatttgcaagaagttctggaaacgcaggaggttcactggcagagagtgctctcctttgtgtctgccctggttgtctgctttccagaagcgcagcagctgcttgaagactgggtggcgcgtttgatggcccaggcattcgagagctgccagctggacagcatggtcactgcgttcctggttgtgcgccaggcagcactggagggcccctctgcgttcctgtcatatgcagactggttcaaggcctcctttgggagcacacgaggctaccatggctgcagcaagaaggccctggtcttcctgtttacgttcttgtcagaactcgtgccttttgagtctccccggtacctgcaggtgcacattctccacccacccctggttcccagcaagtaccgctccctcctcacagactacatctcattggccaagacacggctggccgacctcaaggtttctatagaaaacatgggactctacgaggatttgtcatcagctggggacattactgagccccacagccaagctcttcaggatgttgaaaaggccatcatggtgtttgagcatacggggaacatcccagtcaccgtcatggaggccagcatattcaggaggccttactacgtgtcccacttcctccccgccctgctcacacctcgagtgctccccaaagtccctgactcccgtgtggcgtttatagagtctctgaagagagcagataaaatccccccatctctgtactccacctactgccaggcctgctctgctgctgaagagaagccagaagatgcagccctgggagtgagggcagaacccaactctgctgaggagcccctgggacagctcacagctgcactgggagagctgagagcctccatgacagaccccagccagcgtgatgttatatcggcacaggtggcagtgatttctgaaagactgagggctgtcctgggccacaatgaggatgacagcagcgttgagatatcaaagattcagctcagcatcaacacgccgagactggagccacgggaacacatggctgtggacctcctgctgacgtctttctgtcagaacctgatggctgcctccagtgtcgctcccccggagaggcagggtccctgggctgccctcttcgtgaggaccatgtgtggacgtgtgctccctgcagtgctcacccggctctgccagctgctccgtcaccagggcccgagcctgagtgccccacatgtgctggggttggctgccctggccgtgcacctgggtgagtccaggtctgcgctcccagaggtggatgtgggtcctcctgcacctggtgctggccttcctgtccctgcgctctttgacagcctcctgacctgtaggacgagggattccttgttcttctgcctgaaattttgtacagcagcaatttcttactctctctgcaagttttcttcccagtcacgagatactttgtgcagctgcttatctccaggccttattaaaaagtttcagttcctcatgttcagattgttctcagaggcccgacagcctctttctgaggaggacgtagccagcctttcctggagacccttgcaccttccttctgcagactggcagagagctgccctctctctctggacacacagaaccttccgagaggtgttgaaagaggaagatgttcacgtaggtgaccgttccttctcctgcatcatgccacgtcctgagtctagggtttgtgtgtgctcctcgggcaagaacagcagcacgtggtcatggtgatgtgcacctgcagtcccagccatctgagaggctgagggggagaattctggagttcaggaggcagagtctgcagcgagctacgattgcaccactgcacacactccagcctgggcaacagaacctgtttccaaaaataaatgaagttaacttaccaagactggttacacctggagctggaaattcaacctgaagctgatgctctttcagatactgaacgctcaaggagttatgaccactcagaaaattctgatttggtctttggtggccgcacaggaaatgaggatattatttccagattgcaggagatggtagctgacctggagctgcagcaagacctcatagtgcctctcggccacaccccttcccaggagcacttcctctttgagattttccgcagacggctccaggctctgacaagcgggtggagcgtggctgccagccttcagagacagagggagctgctaatgtacaaacggatcctcctccgcctgccttcgtctgtcctctgcggcagcagcttccaggcagaacagcccatcactgccagatgcgagcagttcttccacttggtcaactctgagatgagaaacttctgctcccacggaggtgccctgacacaggacatcactgcccacttcttcaggggcctcctgaacgcctgtctgcggagcagagacccctccctgatggtcgacttcatactggccaagtgccagacgaaatgccccttaattttgacctctgctctggtgtggtggccgagcctggagcctgtgctgctctgccggtggaggagacactgccagagcccgctgccccgggaactgcagaagctacaagaaggccggcagtttgccagcgatttcctctcccctgaggctgcctccccagcacccaacccggactggctctcagctgctgcactgcactttgcgattcaacaagtcagggaagaaaacatcaggaagcagctaaagaagctggactgcgagagagaggagctattggttttccttttcttcttctccttgatgggcctgctgtcgtcacatctgacctcaaatagcaccacagacctgccaaaggctttccacgtttgtgcagcaatcctcgagtgtttagagaagaggaagatatcctggctggcactctttcagttgacagagagtgacctcaggctggggcggctcctcctccgtgtggccccggatcagcacaccaggctgctgcctttcgctttttacagtcttctctcctacttccatgaagacgcggccatcagggaagaggccttcctgcatgttgctgtggacatgtacttgaagctggtccagctcttcgtggctggggatacaagcacagtttcacctccagctggcaggagcctggagctcaagggtcagggcaaccccgtggaactgataacaaaagctcgtctttttctgctgcagttaatacctcggtgcccgaaaaagagcttctcacacgtggcagagctgctggctgatcgtggggactgcgacccagaggtgagcgccgccctccagagcagacagcaggctgcccctgacgctgacctgtcccaggagcctcatctcttctgacgggacctgccactgcacaccagcccagctcccgtgtaaataatttattacaagcataacatggagctcttgttgcactaaaaagtggattacaaatctcctcgactgctttagtggggaaaggaatcaattatttatgaactgtccggccccgagtcactcagcgtttgcgggaaaataaaccactggtcccagagcagaggaaggctacttgagccggacaccaagcccgcctccagcaccaagggcgggcagcaccctccgaccctcccatgcgggtgcacacgaagggtgaggctgacacagccactgcggagtccaggctgctagaggtgctcatcctcactgccgtcctcaggtgggttcgggcttcaccgcctggccctctgtggtcacagaggggctcggtggcccaggtggtggttccgcctccaggggcagggccttgtcctgggtctgtgtcagcgggtgcaccatggacatgtgtacattgaggttgtgggccttctcaaaccgccggccacactggtcacaggcaaagtccagctcagtctcagccttgtgtttggtcatgtggtacttgagggatgcccgctgcctgcactggaacccacagacctcacacctgggggacagaggcagataagaaggtgcgagggccacagccctgggagggggtcctgactcacacttactgcaaaggcttggctcccgaatgtcgcatttggtggacgagaaggtgcttccgctgcttgaaggtttgtccacattcgtcacagatatagttccgcacctctgagaggggagagtccagtgagtccaggcccctgatgctccaacctcccggggggacgacgatgacaatgtgaaaccatcacagctgggaagacatttctgcacatggttcaccatgcagtgggcccaagcaaggggcctatgagggcctcgtttattaagatctttaaactgctttatacactgtcacgtggcttcatcagctgtgtgcatttcaggatggtttttaaagaaacctcagaaagctatttccttaaccacagattcttgtcttttttttttttgagatggagtttcgctctgttacccaggctgcagtgcggtggcgtgatctcagctcactgcaacctgcgcctcccgggctcaagcgattcttgtgcctcagcctgccaagtagctgggattacaggcgccccccaccacgcccagctgatttttgtatttttagtagagacagggtttacaccatattggccaggctggtcttgaattcctgaccttgtgatctgcctgcctcggtctcccaaagtgctgggattacatgtgtgagccactgcatccggcctgtgggcttatcttttaatgtcttatttgaggacgtggtgcagcagccttggtgtgggtgctcgaagtccctggcctcctacctgagcctcttctgtccagaggcccagtat

SEQ ID NO: 368745 - DNA, 4955 bp, Homo sapiens
gggcgcagggagccgccgccggggctgtaggcgccaaggccatgtccgactcgtgggtcccgaactccgcctcgggccaggacccagggggccgccggagggcctgggccgagctgctggcgggaagggtcaagagggaaaaatataatcctgaaagggcacagaaattaaaggaatcagctgtgcgcctcctgcgaagccatcaggacctgaatgcccttttgcttgaggtagaaggtccactgtgtaaaaaattgtctctcagcaaagtgattgactgtgacagttctgaggcctatgctaatcattctagttcatttataggctctgctttgcaggatcaagcctcaaggctgggggttcccgtgggtattctctcagccgggatggttgcctctagcgtgggacagatctgcacggctccagcggagaccagtcaccctgtgctgctgactgtggagcagagaaagaagctgtcttccctgttagagtttgctcagtatttattggcacacagtatgttctcccgtctttccttctgtcaagaattatggaaaatacagagttctttgttgcttgaagcggtgtggcatcttcacgtacaaggcattgtgagcctgcaagagctgctggaaagccatcccgacatgcatgctgtgggatcgtggctcttcaggaatctgtgctgcctttgtgaacagatggaagcatcctgccagcatgctgacgtcgccagggccatgctttctgattttgttcaaatgtttgttttgaggggatttcagaaaaactcagatctgagaagaactgtggagcctgaaaaaatgccgcaggtcgcggttgatgtactgcagagaatgctgatttttgcacttgacgctttggctgctggagtacaggaggagtcctccactcacaagatcgtgaggtgctggttcggagtgttcagtggacacacgcttggcagtgtaatttccacagatcctctgaagaggttcttcagtcataccctgactcagatactcactcacagccctgtgctgaaagcatctgatgctgttcagatgcagagagagtggagctttgcgcggacacaccctctgctcacctcactgtaccgcaggctctttgtgatgctgagtgcagaggagttggttggccatttgcaagaagttctggaaacgcaggaggttcactggcagagagtgctctcctttgtgtctgccctggttgtctgctttccagaagcgcagcagctgcttgaaggctgtggacctcctgctgacgtctttctgtcagaacctgatggctgcctccagtgtcgctcccccggagaggcagggtccctgggctgccctcttcgtgaggaccatgtgtggacgtgtgctccctgcagtgctcacccggctctgccagctgctccgtcaccagggcccgagcctgagtgccccacatgtgctggggttggctgccctggccgtgcacctgggtgagtccaggtctgcgctcccagaggtggatgtgggtcctcctgcacctggtgctggccttcctgtccctgcgctctttgacagcctcctgacctgtaggacgagggattccttgttcttctgcctgaaattttgtacagcagcaatttcttactctctctgcaagttttcttcccagtcacgagatactttgtgcagctgcttatctccaggccttattaaaaagtttcagttcctcatgttcagattgttctcagaggcccgacagcctctttctgaggaggacgtagccagcctttcctggagacccttgcaccttccttctgcagactggcagagagctgccctctctctctggacacacagaaccttccgagaggtgttgaaagaggaagatgttcacttaacttaccaagactggttacacctggagctggaaattcaacctgaagctgatgctctttcagatactgaacggcaggacttccaccagtgggcgatccatgagcactttctccctgagtcctcggcttcagggggctgtgacggagacctgcaggctgcgtgtaccattcttgtcaacgcactgatggatttccaccaaagctcaaggagttatgaccactcagaaaattctgatttggtctttggtggccgcacaggaaatgaggatattatttccagattgcaggagatggtagctgacctggagctgcagcaagacctcatagtgcctctcggccacaccccttcccaggagcacttcctctttgagattttccgcagacggctccaggctctgacaagcgggtggagcgtggctgccagccttcagagacagagggagctgctaatgtacaaacggatcctcctccgcctgccttcgtctgtcctctgcggcagcagcttccaggcagaacagcccatcactgccagatgcgagcagttcttccacttggtcaactctgagatgagaaacttctgctcccacggaggtgccctgacacaggacatcactgcccacttcttcaggggcctcctgaacgcctgtctgcggagcagagacccctccctgatggtcgacttcatactggccaagtgccagacgaaatgccccttaattttgacctctgctctggtgtggtggccgagcctggagcctgtgctgctctgccggtggaggagacactgccagagcccgctgccccgggaactgcagaagctacaagaaggccggcagtttgccagcgatttcctctcccctgaggctgcctccccagcacccaacccggactggctctcagctgctgcactgcactttgcgattcaacaagtcagggaagaaaacatcaggaagcagctaaagaagctggactgcgagagagaggagctattggttttccttttcttcttctccttgatgggcctgctgtcgtcacatctgacctcaaatagcaccacagacctgccaaaggctttccacgtttgtgcagcaatcctcgagtgtttagagaagaggaagatatcctggctggcactctttcagttgacagagagtgacctcaggctggggcggctcctcctccgtgtggccccggatcagcacaccaggctgctgcctttcgctttttacagtcttctctcctacttccatgaagacgcggccatcagggaagaggccttcctgcatgttgctgtggacatgtacttgaagctggtccagctcttcgtggctggggatacaagcacagtttcacctccagctggcaggagcctggagctcaagggtcagggcaaccccgtggaactgataacaaaagctcgtctttttctgctgcagttaatacctcggtgcccgaaaaagagcttctcacacgtggcagagctgctggctgatcgtggggactgcgacccagaggtgagcgccgccctccagagcagacagcaggctgcccctgacgctgacctgtcccaggagcctcatctcttctgacgggacctgccactgcacaccagcccagctcccgtgtaaataatttattacaagcataacatggagctcttgttgcactaaaaagtggattacaaatctcctcgactgctttagtggggaaaggaatcaattatttatgaactgtccggccccgagtcactcagcgtttgcgggaaaataaaccactggtcccagagcagaggaaggctacttgagccggacaccaagcccgcctccagcaccaagggcgggcagcaccctccgaccctcccatgcgggtgcacacgaagggtgaggctgacacagccactgcggagtccaggctgctagaggtgctcatcctcactgccgtcctcaggtgggttcgggcttcaccgcctggccctctgtggtcacagaggggctcggtggcccaggtggtggttccgcctccaggggcagggccttgtcctgggtctgtgtcagcgggtgcaccatggacatgtgtacattgaggttgtgggccttctcaaaccgccggccacactggtcacaggcaaagtccagctcagtctcagccttgtgtttggtcatgtggtacttgagggatgcccgctgcctgcactggaacccacagacctcacacctgggggacagaggcagataagaaggtgcgagggccacagccctgggagggggtcctgactcacacttactgcaaaggcttggctcccgaatgtcgcatttggtggacgagaaggtgcttccgctgcttgaaggtttgtccacattcgtcacagatatagttccgcacctctgagaggggagagtccagtgagtccaggcccctgatgctccaacctcccggggggacgacgatgacaatgtgaaaccatcacagctgggaagacatttctgcacatggttcaccatgcagtgggcccaagcaaggggcctatgagggcctcgtttattaagatctttaaactgctttatacactgtcacgtggcttcatcagctgtgtgcatttcaggatggtttttaaagaaacctcagaaagctatttccttaaccacagattcttgtcttttttttttttgagatggagtttcgctctgttacccaggctgcagtgcggtggcgtgatctcagctcactgcaacctgcgcctcccgggctcaagcgattcttgtgcctcagcctgccaagtagctgggattacaggcgccccccaccacgcccagctgatttttgtatttttagtagagacagggtttacaccatattggccaggctggtcttgaattcctgaccttgtgatctgcctgcctcggtctcccaaagtgctgggattacatgtgtgagccactgcatccggcctgtgggcttatcttttaatgtcttatttgaggacgtggtgcagcagccttggtgtgggtgctcgaagtccctggcctcctacctgagcctcttctgtccagaggcccagtat

SEQ ID NO: 368746 - DNA, 4960 bp, Homo sapiens
ctttctacactctctcgtcgccgcacacggggagagacccaccgaccctgtggggctggtccttaacaaaaacccacaactttttgatctctgacttgaagtttttgtctgtttctccccctgcagcatctgatgctgttcagatgcagagagagtggagctttgcgcggacacaccctctgctcacctcactgtaccgcaggctctttgtgatgctgagtgcagaggagttggttggccatttgcaagaagttctggaaacgcaggaggttcactggcagagagtgctctcctttgtgtctgccctggttgtctgctttccagaagcgcagcagctgcttgaagactgggtggcgcgtttgatggcccaggcattcgagagctgccagctggacagcatggtcactgcgttcctggttgtgcgccaggcagcactggagggcccctctgcgttcctgtcatatgcagactggttcaaggcctcctttgggagcacacgaggctaccatggctgcagcaagaaggccctggtcttcctgtttacgttcttgtcagaactcgtgccttttgagtctccccggtacctgcaggtgcacattctccacccacccctggttcccagcaagtaccgctccctcctcacagactacatctcattggccaagacacggctggccgacctcaaggtttctatagaaaacatgggactctacgaggatttgtcatcagctggggacattactgagccccacagccaagctcttcaggatgttgaaaaggccatcatggtgtttgagcatacggggaacatcccagtcaccgtcatggaggccagcatattcaggaggccttactacgtgtcccacttcctccccgccctgctcacacctcgagtgctccccaaagtccctgactcccgtgtggcgtttatagagtctctgaagagagcagataaaatccccccatctctgtactccacctactgccaggcctgctctgctgctgaagagaagccagaagatgcagccctgggagtgagggcagaacccaactctgctgaggagcccctgggacagctcacagctgcactgggagagctgagagcctccatgacagaccccagccagcgtgatgttatatcggcacaggtggcagtgatttctgaaagactgagggctgtcctgggccacaatgaggatgacagcagcgttgagatatcaaagattcagctcagcatcaacacgccgagactggagccacgggaacacatggctgtggacctcctgctgacgtctttctgtcagaacctgatggctgcctccagtgtcgctcccccggagaggcagggtccctgggctgccctcttcgtgaggaccatgtgtggacgtgtgctccctgcagtgctcacccggctctgccagctgctccgtcaccagggcccgagcctgagtgccccacatgtgctggggttggctgccctggccgtgcacctgggtgagtccaggtctgcgctcccagaggtggatgtgggtcctcctgcacctggtgctggccttcctgtccctgcgctctttgacagcctcctgacctgtaggacgagggattccttgttcttctgcctgaaattttgtacagcagcaatttcttactctctctgcaagttttcttcccagtcacgagatactttgtgcagctgcttatctccaggccttattaaaaagtttcagttcctcatgttcagattgttctcagaggcccgacagcctctttctgaggaggacgtagccagcctttcctggagacccttgcaccttccttctgcagactggcagagagctgccctctctctctggacacacagaaccttccgagaggtgttgaaagaggaagatgttcacttaacttaccaagactggttacacctggagctggaaattcaacctgaagctgatgctctttcagatactgaacggcaggacttccaccagtgggcgatccatgagcactttctccctgagtcctcggcttcagggggctgtgacggagacctgcaggctgcgtgtaccattcttgtcaacgcactgatggatttccaccaaagctcaaggagttatgaccactcagaaaattctgatttggtctttggtggccgcacaggaaatgaggatattatttccagattgcaggagatggtagctgacctggagctgcagcaagacctcatagtgcctctcggccacaccccttcccaggagcacttcctctttgagattttccgcagacggctccaggctctgacaagcgggtggagcgtggctgccagccttcagagacagagggagctgctaatgtacaaacggatcctcctccgcctgccttcgtctgtcctctgcggcagcagcttccaggcagaacagcccatcactgccagatgcgagcagttcttccacttggtcaactctgagatgagaaacttctgctcccacggaggtgccctgacacaggacatcactgcccacttcttcaggggcctcctgaacgcctgtctgcggagcagagacccctccctgatggtcgacttcatactggccaagtgccagacgaaatgccccttaattttgacctctgctctggtgtggtggccgagcctggagcctgtgctgctctgccggtggaggagacactgccagagcccgctgccccgggaactgcagaagctacaagaaggccggcagtttgccagcgatttcctctcccctgaggctgcctccccagcacccaacccggactggctctcagctgctgcactgcactttgcgattcaacaagtcagggaagaaaacatcaggaagcagctaaagaagctggactgcgagagagaggagctattggttttccttttcttcttctccttgatgggcctgctgtcgtcacatctgacctcaaatagcaccacagacctgccaaaggctttccacgtttgtgcagcaatcctcgagtgtttagagaagaggaagatatcctggctggcactctttcagttgacagagagtgacctcaggctggggcggctcctcctccgtgtggccccggatcagcacaccaggctgctgcctttcgctttttacagtcttctctcctacttccatgaagacgcggccatcagggaagaggccttcctgcatgttgctgtggacatgtacttgaagctggtccagctcttcgtggctggggatacaagcacagtttcacctccagctggcaggagcctggagctcaagggtcagggcaaccccgtggaactgataacaaaagctcgtctttttctgctgcagttaatacctcggtgcccgaaaaagagcttctcacacgtggcagagctgctggctgatcgtggggactgcgacccagaggtgagcgccgccctccagagcagacagcaggctgcccctgacgctgacctgtcccaggagcctcatctcttctgacgggacctgccactgcacaccagcccagctcccgtgtaaataatttattacaagcataacatggagctcttgttgcactaaaaagtggattacaaatctcctcgactgctttagtggggaaaggaatcaattatttatgaactgtccggccccgagtcactcagcgtttgcgggaaaataaaccactggtcccagagcagaggaaggctacttgagccggacaccaagcccgcctccagcaccaagggcgggcagcaccctccgaccctcccatgcgggtgcacacgaagggtgaggctgacacagccactgcggagtccaggctgctagaggtgctcatcctcactgccgtcctcaggtgggttcgggcttcaccgcctggccctctgtggtcacagaggggctcggtggcccaggtggtggttccgcctccaggggcagggccttgtcctgggtctgtgtcagcgggtgcaccatggacatgtgtacattgaggttgtgggccttctcaaaccgccggccacactggtcacaggcaaagtccagctcagtctcagccttgtgtttggtcatgtggtacttgagggatgcccgctgcctgcactggaacccacagacctcacacctgggggacagaggcagataagaaggtgcgagggccacagccctgggagggggtcctgactcacacttactgcaaaggcttggctcccgaatgtcgcatttggtggacgagaaggtgcttccgctgcttgaaggtttgtccacattcgtcacagatatagttccgcacctctgagaggggagagtccagtgagtccaggcccctgatgctccaacctcccggggggacgacgatgacaatgtgaaaccatcacagctgggaagacatttctgcacatggttcaccatgcagtgggcccaagcaaggggcctatgagggcctcgtttattaagatctttaaactgctttatacactgtcacgtggcttcatcagctgtgtgcatttcaggatggtttttaaagaaacctcagaaagctatttccttaaccacagattcttgtcttttttttttttgagatggagtttcgctctgttacccaggctgcagtgcggtggcgtgatctcagctcactgcaacctgcgcctcccgggctcaagcgattcttgtgcctcagcctgccaagtagctgggattacaggcgccccccaccacgcccagctgatttttgtatttttagtagagacagggtttacaccatattggccaggctggtcttgaattcctgaccttgtgatctgcctgcctcggtctcccaaagtgctgggattacatgtgtgagccactgcatccggcctgtgggcttatcttttaatgtcttatttgaggacgtggtgcagcagccttggtgtgggtgctcgaagtccctggcctcctacctgagcctcttctgtccagaggcccagtat

SEQ ID NO: 368747 - DNA, 6510 bp, Homo sapiens
gggcgcagggagccgccgccggggctgtaggcgccaaggccatgtccgactcgtgggtcccgaactccgcctcgggccaggacccagggggccgccggagggcctgggccgagctgctggcgggaagggtcaagagggaaaaatataatcctgaaagggcacagaaattaaaggaatcagctgtgcgcctcctgcgaagccatcaggacctgaatgcccttttgcttgaggtagaaggtccactgtgtaaaaaattgtctctcagcaaagtgattgactgtgacagttctgaggcctatgctaatcattctagttcatttataggctctgctttgcaggatcaagcctcaaggctgggggttcccgtgggtattctctcagccgggatggttgcctctagcgtgggacagatctgcacggctccagcggagaccagtcaccctgtgctgctgactgtggagcagagaaagaagctgtcttccctgttagagtttgctcagtatttattggcacacagtatgttctcccgtctttccttctgtcaagaattatggaaaatacagagttctttgttgcttgaagcggtgtggcatcttcacgtacaaggcattgtgagcctgcaagagctgctggaaagccatcccgacatgcatgctgtgggatcgtggctcttcaggaatctgtgctgcctttgtgaacagatggaagcatcctgccagcatgctgacgtcgccagggccatgctttctgattttgttcaaatgtttgttttgaggggatttcagaaaaactcagatctgagaagaactgtggagcctgaaaaaatgccgcaggtcgcggttgatgtactgcagagaatgctgatttttgcacttgacgctttggctgctggagtacaggaggagtcctccactcacaagatcgtgaggtgctggttcggagtgttcagtggacacacgcttggcagtgtaatttccacagatcctctgaagaggttcttcagtcataccctgactcagatactcactcacagccctgtgctgaaagcatctgatgctgttcagatgcagagagagtggagctttgcgcggacacaccctctgctcacctcactgtaccgcaggctctttgtgatgctgagtgcagaggagttggttggccatttgcaagaagttctggaaacgcaggaggttcactggcagagagtgctctcctttgtgtctgccctggttgtctgctttccagaagcgcagcagctgcttgaagactgggtggcgcgtttgatggcccaggcattcgagagctgccagctggacagcatggtcactgcgttcctggttgtgcgccaggcagcactggagggcccctctgcgttcctgtcatatgcagactggttcaaggcctcctttgggagcacacgaggctaccatggctgcagcaagaaggccctggtcttcctgtttacgttcttgtcagaactcgtgccttttgagtctccccggtacctgcaggtgcacattctccacccacccctggttcccagcaagtaccgctccctcctcacagactacatctcattggccaagacacggctggccgacctcaaggtttctatagaaaacatgggactctacgaggatttgtcatcagctggggacattactgagccccacagccaagctcttcaggatgttgaaaaggccatcatggtgtttgagcatacggggaacatcccagtcaccgtcatggaggccagcatattcaggaggccttactacgtgtcccacttcctccccgccctgctcacacctcgagtgctccccaaagtccctgactcccgtgtggcgtttatagagtctctgaagagagcagataaaatccccccatctctgtactccacctactgccaggcctgctctgctgctgaagagaagccagaagatgcagccctgggagtgagggcagaacccaactctgctgaggagcccctgggacagctcacagctgcactgggagagctgagagcctccatgacagaccccagccagcgtgatgttatatcggcacaggtggcagtgatttctgaaagactgagggctgtcctgggccacaatgaggatgacagcagcgttgagatatcaaagattcagctcagcatcaacacgccgagactggagccacgggaacacatggctgtggacctcctgctgacgtctttctgtcagaacctgatggctgcctccagtgtcgctcccccggagaggcagggtccctgggctgccctcttcgtgaggaccatgtgtggacgtgtgctccctgcagtgctcacccggctctgccagctgctccgtcaccagggcccgagcctgagtgccccacatgtgctggggttggctgccctggccgtgcacctgggtgagtccaggtctgcgctcccagaggtggatgtgggtcctcctgcacctggtgctggccttcctgtccctgcgctctttgacagcctcctgacctgtaggacgagggattccttgttcttctgcctgaaattttgtacagcagcaatttcttactctctctgcaagttttcttcccagtcacgagatactttgtgcagctgcttatctccaggccttattaaaaagtttcagttcctcatgttcagattgttctcagaggcccgacagcctctttctgaggaggacgtagccagcctttcctggagacccttgcaccttccttctgcagactggcagagagctgccctctctctctggacacacagaaccttccgagaggtgttgaaagaggaagatgttcacttaacttaccaagactggttacacctggagctggaaattcaacctgaagctgatgctctttcagatactgaacggcaggacttccaccagtgggcgatccatgagcactttctccctgagtcctcggcttcagggggctgtgacggagacctgcaggctgcgtgtaccattcttgtcaacgcactgatggatttccaccaaagctcaaggagttatgaccactcagaaaattctgatttggtctttggtggccgcacaggaaatgaggatattatttccagattgcaggagatggtagctgacctggagctgcagcaagacctcatagtgcctctcggccacaccccttcccaggagcacttcctctttgagattttccgcagacggctccaggctctgacaagcgggtggagcgtggctgccagccttcagagacagagggagctgctaatgtacaaacggatcctcctccgcctgccttcgtctgtcctctgcggcagcagcttccaggcagaacagcccatcactgccagatgcgagcagttcttccacttggtcaactctgagatgagaaacttctgctcccacggaggtgccctgacacaggacatcactgcccacttcttcaggggcctcctgaacgcctgtctgcggagcagagacccctccctgatggtcgacttcatactggccaagtgccagacgaaatgccccttaattttgacctctgctctggtgtggtggccgagcctggagcctgtgctgctctgccggtggaggagacactgccagagcccgctgccccgggaactgcagaagctacaagaaggccggcagtttgccagcgatttcctctcccctgaggctgcctccccagcacccaacccggactggctctcagctgctgcactgcactttgcgattcaacaagtcagggaagaaaacatcaggaagcagctaaagaagctggactgcgagagagaggagctattggttttccttttcttcttctccttgatgggcctgctgtcgtcacatctgacctcaaatagcaccacagacctgccaaaggctttccacgtttgtgcagcaatcctcgagtgtttagagaagaggaagatatcctggctggcactctttcagttgacagagagtggtaagaaacacgctgctgaggcacaaatgcggagggccgctcttttcagaggcatcttgcaaatggttaagaacgagccctccttgaggttccttgctaagtaagtttataagctccattttagttgggacagattaagcacaaacttgtttaaagcaataagataatttactggctcactggtcaaccccaggaccaatgggcctatcatggggactgcctctctctgcaccacacccaccctcctgcaagaggtcgacccccccatcctctcccagctgctgacaggtacctgggtatcctcagctcaggctgttcgccccacactatccccacaggcaggcctcccagggtacacgtcccgacccccaggggtgtccccagcactgataataggcagagatgtccagagttgcctgagccacttcttggtgttgcagacctcaggctggggcggctcctcctccgtgtggccccggatcagcacaccaggctgctgcctttcgctttttacagggtacctccacccacagggctggtcagggctgggcagtgtttcccagacccccatctcagcacctctgggtcccgccagatgggaagggttgtctgtgcctctgctccacagatgagcagtatcccttggcatcacctgctacctttccagcagtctgtagccatttgtcactatgtctttacctctagtcttctctcctacttccatgaagacgcggccatcagggaagaggccttcctgcatgttgctgtggacatgtacttgaagctggtccagctcttcgtggctggggatacaagcacagtttcacctccagctggcaggagcctggagctcaagggtcagggcaaccccgtggaactgataacaaaagctcgtctttttctgctgcagttaatacctcggtgcccgaaaaagagcttctcacacgtggcagagctgctggctgatcgtggggactgcgacccagaggtgagcgccgccctccagagcagacagcaggctgcccctgacgctgacctgtcccaggagcctcatctcttctgacgggacctgccactgcacaccagcccagctcccgtgtaaataatttattacaagcataacatggagctcttgttgcactaaaaagtggattacaaatctcctcgactgctttagtggggaaaggaatcaattatttatgaactgtccggccccgagtcactcagcgtttgcgggaaaataaaccactggtcccagagcagaggaaggctacttgagccggacaccaagcccgcctccagcaccaagggcgggcagcaccctccgaccctcccatgcgggtgcacacgaagggtgaggctgacacagccactgcggagtccaggctgctagaggtgctcatcctcactgccgtcctcaggtgggttcgggcttcaccgcctggccctctgtggtcacagaggggctcggtggcccaggtggtggttccgcctccaggggcagggccttgtcctgggtctgtgtcagcgggtgcaccatggacatgtgtacattgaggttgtgggccttctcaaaccgccggccacactggtcacaggcaaagtccagctcagtctcagccttgtgtttggtcatgtggtacttgagggatgcccgctgcctgcactggaacccacagacctcacacctgggggacagaggcagataagaaggtgcgagggccacagccctgggagggggtcctgactcacacttactgcaaaggcttggctcccgaatgtcgcatttggtggacgagaaggtgcttccgctgcttgaaggtttgtccacattcgtcacagatatagttccgcacctctgagaggggagagtccagtgagtccaggcccctgatgctccaacctcccggggggacgacgatgacaatgtgaaaccatcacagctgggaagacatttctgcacatggttcaccatgcagtgggcccaagcaaggggcctatgagggcctcgtttattaagatctttaaactgctttatacactgtcacgtggcttcatcagctgtgtgcatttcaggatggtttttaaagaaacctcagaaagctatttccttaaccacagattcttgtcttttttttttttgagatggagtttcgctctgttacccaggctgcagtgcggtggcgtgatctcagctcactgcaacctgcgcctcccgggctcaagcgattcttgtgcctcagcctgccaagtagctgggattacaggcgccccccaccacgcccagctgatttttgtatttttagtagagacagggtttacaccatattggccaggctggtcttgaattcctgaccttgtgatctgcctgcctcggtctcccaaagtgctgggattacatgtgtgagccactgcatccggcctgtgggcttatcttttaatgtcttatttgaggacgtggtgcagcagccttggtgtgggtgctcgaagtccctggcctcctacctgagcctcttctgtccagaggcccagtat

SEQ ID NO: 368748 - DNA, 6837 bp, Homo sapiens
gggcgcagggagccgccgccggggctgtaggcgccaaggccatgtccgactcgtgggtcccgaactccgcctcgggccaggacccagggggccgccggagggcctgggccgagctgctggcgggaagggtcaagagggaaaaatataatcctgaaagggcacagaaattaaaggaatcagctgtgcgcctcctgcgaagccatcaggacctgaatgcccttttgcttgaggtagaaggtccactgtgtaaaaaattgtctctcagcaaagtgattgactgtgacagttctgaggcctatgctaatcattctagttcatttataggctctgctttgcaggatcaagcctcaaggctgggggttcccgtgggtattctctcagccgggatggttgcctctagcgtgggacagatctgcacggctccagcggagaccagtcaccctgtgctgctgactgtggagcagagaaagaagctgtcttccctgttagagtttgctcagtatttattggcacacagtatgttctcccgtctttccttctgtcaagaattatggaaaatacagagttctttgttgcttgaagcggtgtggcatcttcacgtacaaggcattgtgagcctgcaagagctgctggaaagccatcccgacatgcatgctgtgggatcgtggctcttcaggaatctgtgctgcctttgtgaacagatggaagcatcctgccagcatgctgacgtcgccagggccatgctttctgattttgttcaaatgtttgttttgaggggatttcagaaaaactcagatctgagaagaactgtggagcctgaaaaaatgccgcaggtcgcggttgatgtactgcagagaatgctgatttttgcacttgacgctttggctgctggagtacaggaggagtcctccactcacaagatcgtgaggtgctggttcggagtgttcagtggacacacgcttggcagtgtaatttccacagatcctctgaagaggttcttcagtcataccctgactcagatactcactcacagccctgtgctgaaagcatctgatgctgttcagatgcagagagagtggagctttgcgcggacacaccctctgctcacctcactgtaccgcaggctctttgtgatgctgagtgcagaggagttggttggccatttgcaagaagttctggaaacgcaggaggttcactggcagagagtgctctcctttgtgtctgccctggttgtctgctttccagaagcgcagcagctgcttgaagactgggtggcgcgtttgatggcccaggcattcgagagctgccagctggacagcatggtcactgcgttcctggttgtgcgccaggcagcactggagggcccctctgcgttcctgtcatatgcagactggttcaaggcctcctttgggagcacacgaggctaccatggctgcagcaagaaggccctggtcttcctgtttacgttcttgtcagaactcgtgccttttgagtctccccggtacctgcaggtgcacattctccacccacccctggttcccagcaagtaccgctccctcctcacagactacatctcattggccaagacacggctggccgacctcaaggtttctatagaaaacatgggactctacgaggatttgtcatcagctggggacattactgagccccacagccaagctcttcaggatgttgaaaaggccatcatggtgtttgagcatacggggaacatcccagtcaccgtcatggaggccagcatattcaggaggccttactacgtgtcccacttcctccccgccctgctcacacctcgagtgctccccaaagtccctgactcccgtgtggcgtttatagagtctctgaagagagcagataaaatccccccatctctgtactccacctactgccaggcctgctctgctgctgaagagaagccagaagatgcagccctgggagtgagggcagaacccaactctgctgaggagcccctgggacagctcacagctgcactgggagagctgagagcctccatgacagaccccagccagcgtgatgttatatcggcacaggtggcagtgatttctgaaagactgagggctgtcctgggccacaatgaggatgacagcagcgttgagatatcaaagattcagctcagcatcaacacgccgagactggagccacgggaacacatggctgtggacctcctgctgacgtctttctgtcagaacctgatggctgcctccagtgtcgctcccccggagaggcagggtccctgggctgccctcttcgtgaggaccatgtgtggacgtgtgctccctgcagtgctcacccggctctgccagctgctccgtcaccagggcccgagcctgagtgccccacatgtgctggggttggctgccctggccgtgcacctgggtgagtccaggtctgcgctcccagaggtggatgtgggtcctcctgcacctggtgctggccttcctgtccctgcgctctttgacagcctcctgacctgtaggacgagggattccttgttcttctgcctgaaattttgtacagcagcaatttcttactctctctgcaagttttcttcccagtcacgagatactttgtgcagctgcttatctccaggccttattaaaaagtttcagttcctcatgttcagattgttctcagaggcccgacagcctctttctgaggaggacgtagccagcctttcctggagacccttgcaccttccttctgcagactggcagagagctgccctctctctctggacacacagaaccttccgagaggtgttgaaagaggaagatgttcacttaacttaccaagactggttacacctggagctggaaattcaacctgaagctgatgctctttcagatactgaacggcaggacttccaccagtgggcgatccatgagcactttctccctgagtcctcggcttcagggggctgtgacggagacctgcaggctgcgtgtaccattcttgtcaacgcactgatggatttccaccaaagctcaaggagttatgaccactcagaaaattctgatttggtctttggtggccgcacaggaaatgaggatattatttccagattgcaggagatggtagctgacctggagctgcagcaagacctcatagtgcctctcggccacaccccttcccaggagcacttcctctttgagattttccgcagacggctccaggctctgacaagcgggtggagcgtggctgccagccttcagagacagagggagctgctaatgtacaaacggatcctcctccgcctgccttcgtctgtcctctgcggcagcagcttccaggcagaacagcccatcactgccagatgcgagcagttcttccacttggtcaactctgagatgagaaacttctgctcccacggaggtgccctgacacaggacatcactgcccacttcttcaggggcctcctgaacgcctgtctgcggagcagagacccctccctgatggtcgacttcatactggccaagtgccagacgaaatgccccttaattttgacctctgctctggtgtggtggccgagcctggagcctgtgctgctctgccggtggaggagacactgccagagcccgctgccccgggaactgcagaagctacaagaaggccggcagtttgccagcgatttcctctcccctgaggctgcctccccagcacccaacccggactggctctcagctgctgcactgcactttgcgattcaacaagtcagggaagaaaacatcaggaagcagctaaagaagctggactgcgagagagaggagctattggttttccttttcttcttctccttgatgggcctgctgtcgtcacatctgacctcaaatagcaccacagacctgccaaaggctttccacgtttgtgcagcaatcctcgagtgtttagagaagaggaagatatcctggctggcactctttcagttgacagagagtggtaagaaacacgctgctgaggcacaaatgcggagggccgctcttttcagaggcatcttgcaaatggttaagaacgagccctccttgaggttccttgctaagtaagtttataagctccattttagttgggacagattaagcacaaacttgtttaaagcaataagataatttactggctcactggtcaaccccaggaccaatgggcctatcatggggactgcctctctctgcaccacacccaccctcctgcaagaggtcgacccccccatcctctcccagctgctgacaggtacctgggtatcctcagctcaggctgttcgccccacactatccccacaggcaggcctcccagggtacacgtcccgacccccaggggtgtccccagcactgataataggcagagatgtccagagttgcctgagccacttcttggtgttgcagacctcaggctggggcggctcctcctccgtgtggccccggatcagcacaccaggctgctgcctttcgctttttacagggtacctccacccacagggctggtcagggctgggcagtgtttcccagacccccatctcagcacctctgggtcccgccagatgggaagggttgtctgtgcctctgctccacagatgagcagtatcccttggcatcacctgctacctttccagcagtctgtagccatttgtcactatgtctttacctctagtcttctctcctacttccatgaagacgcggccatcagggaagaggccttcctgcatgttgctgtggacatgtacttgaagctggtccagctcttcgtggctggggatacaagcacagtttcacctccagctggcaggagcctggagctcaagggtcaggtgcaagggccagtcccacctccaggggagctccccccagccggaggctccttctgccaaagaatgttccggcacagcatgcagactatgggggacacaccagccctgtttctgtatgtcttctaacctgtgagtttgcctgttttctctctagggcaaccccgtggaactgataacaaaagctcgtctttttctgctgcagttaatacctcggtgcccgaaaaagagcttctcacacgtggcagaggtaacgtcaagatgcccaccttgggccacgtgggggacatgagaattgacagctgcctgggccatgtgcctgcctggctggcaatacaactcgactatttctgccagagcccctcccctgtggtctgaggcctagtgggcggcatgggctgaggacctgctcctctctcacagctgctggctgatcgtggggactgcgacccagaggtgagcgccgccctccagagcagacagcaggctgcccctgacgctgacctgtcccaggagcctcatctcttctgacgggacctgccactgcacaccagcccagctcccgtgtaaataatttattacaagcataacatggagctcttgttgcactaaaaagtggattacaaatctcctcgactgctttagtggggaaaggaatcaattatttatgaactgtccggccccgagtcactcagcgtttgcgggaaaataaaccactggtcccagagcagaggaaggctacttgagccggacaccaagcccgcctccagcaccaagggcgggcagcaccctccgaccctcccatgcgggtgcacacgaagggtgaggctgacacagccactgcggagtccaggctgctagaggtgctcatcctcactgccgtcctcaggtgggttcgggcttcaccgcctggccctctgtggtcacagaggggctcggtggcccaggtggtggttccgcctccaggggcagggccttgtcctgggtctgtgtcagcgggtgcaccatggacatgtgtacattgaggttgtgggccttctcaaaccgccggccacactggtcacaggcaaagtccagctcagtctcagccttgtgtttggtcatgtggtacttgagggatgcccgctgcctgcactggaacccacagacctcacacctgggggacagaggcagataagaaggtgcgagggccacagccctgggagggggtcctgactcacacttactgcaaaggcttggctcccgaatgtcgcatttggtggacgagaaggtgcttccgctgcttgaaggtttgtccacattcgtcacagatatagttccgcacctctgagaggggagagtccagtgagtccaggcccctgatgctccaacctcccggggggacgacgatgacaatgtgaaaccatcacagctgggaagacatttctgcacatggttcaccatgcagtgggcccaagcaaggggcctatgagggcctcgtttattaagatctttaaactgctttatacactgtcacgtggcttcatcagctgtgtgcatttcaggatggtttttaaagaaacctcagaaagctatttccttaaccacagattcttgtcttttttttttttgagatggagtttcgctctgttacccaggctgcagtgcggtggcgtgatctcagctcactgcaacctgcgcctcccgggctcaagcgattcttgtgcctcagcctgccaagtagctgggattacaggcgccccccaccacgcccagctgatttttgtatttttagtagagacagggtttacaccatattggccaggctggtcttgaattcctgaccttgtgatctgcctgcctcggtctcccaaagtgctgggattacatgtgtgagccactgcatccggcctgtgggcttatcttttaatgtcttatttgaggacgtggtgcagcagccttggtgtgggtgctcgaagtccctggcctcctacctgagcctcttctgtccagaggcccagtat

SEQ ID NO: 368749 - DNA, 5858 bp, Homo sapiens
gggcgcagggagccgccgccggggctgtaggcgccaaggccatgtccgactcgtgggtcccgaactccgcctcgggccaggacccagggggccgccggagggcctgggccgagctgctggcgggaagggtcaagagggaaaaatataatcctgaaagggcacagaaattaaaggaatcagctgtgcgcctcctgcgaagccatcaggacctgaatgcccttttgcttgaggtagaaggtccactgtgtaaaaaattgtctctcagcaaagtgattgactgtgacagttctgaggcctatgctaatcattctagttcatttataggctctgctttgcaggatcaagcctcaaggctgggggttcccgtgggtattctctcagccgggatggttgcctctagcgtgggacagatctgcacggctccagcggagaccagtcaccctgtgctgctgactgtggagcagagaaagaagctgtcttccctgttagagtttgctcagtatttattggcacacagtatgttctcccgtctttccttctgtcaagaattatggaaaatacagagttctttgttgcttgaagcggtgtggcatcttcacgtacaaggcattgtgagcctgcaagagctgctggaaagccatcccgacatgcatgctgtgggatcgtggctcttcaggaatctgtgctgcctttgtgaacagatggaagcatcctgccagcatgctgacgtcgccagggccatgctttctgattttgttcaaatgtttgttttgaggggatttcagaaaaactcagatctgagaagaactgtggagcctgaaaaaatgccgcaggtcgcggttgatgtactgcagagaatgctgatttttgcacttgacgctttggctgctggagtacaggaggagtcctccactcacaagatcgtgaggtgctggttcggagtgttcagtggacacacgcttggcagtgtaatttccacagatcctctgaagaggttcttcagtcataccctgactcagatactcactcacagccctgtgctgaaagcatctgatgctgttcagatgcagagagagtggagctttgcgcggacacaccctctgctcacctcactgtaccgcaggctctttgtgatgctgagtgcagaggagttggttggccatttgcaagaagttctggaaacgcaggaggttcactggcagagagtgctctcctttgtgtctgccctggttgtctgctttccagaagcgcagcagctgcttgaagactgggtggcgcgtttgatggcccaggcattcgagagctgccagctggacagcatggtcactgcgttcctggttgtgcgccaggcagcactggagggcccctctgcgttcctgtcatatgcagactggttcaaggcctcctttgggagcacacgaggctaccatggctgcagcaagaaggccctggtcttcctgtttacgttcttgtcagaactcgtgccttttgagtctccccggtacctgcaggtgcacattctccacccacccctggttcccagcaagtaccgctccctcctcacagactacatctcattggccaagacacggctggccgacctcaaggtttctatagaaaacatgggactctacgaggatttgtcatcagctggggacattactgagccccacagccaagctcttcaggatgttgaaaaggccatcatggtgtttgagcatacggggaacatcccagtcaccgtcatggaggccagcatattcaggaggccttactacgtgtcccacttcctccccgccctgctcacacctcgagtgctccccaaagtccctgactcccgtgtggcgtttatagagtctctgaagagagcagataaaatccccccatctctgtactccacctactgccaggcctgctctgctgctgaagagaagccagaagatgcagccctgggagtgagggcagaacccaactctgctgaggagcccctgggacagctcacagctgcactgggagagctgagagcctccatgacagaccccagccagcgtgatgttatatcggcacaggtggcagtgatttctgaaagactgagggctgtcctgggccacaatgaggatgacagcagcgttgagatatcaaagattcagctcagcatcaacacgccgagactggagccacgggaacacatggctgtggacctcctgctgacgtctttctgtcagaacctgatggctgcctccagtgtcgctcccccggagaggcagggtccctgggctgccctcttcgtgaggaccatgtgtggacgtgtgctccctgcagtgctcacccggctctgccagctgctccgtcaccagggcccgagcctgagtgccccacatgtgctggggttggctgccctggccgtgcacctgggtgagtccaggtctgcgctcccagaggtggatgtgggtcctcctgcacctggtgctggccttcctgtccctgcgctctttgacagcctcctgacctgtaggacgagggattccttgttcttctgcctgaaattttgtacagcagcaatttcttactctctctgcaagttttcttcccagtcacgagatactttgtgcagctgcttatctccaggccttattaaaaagtttcagttcctcatgttcagattgttctcagaggcccgacagcctctttctgaggaggacgtagccagcctttcctggagacccttgcaccttccttctgcagactggcagagagctgccctctctctctggacacacagaaccttccgagaggtgttgaaagaggaagatgttcacttaacttaccaagactggttacacctggagctggaaattcaacctgaagctgatgctctttcagatactgaacggcaggacttccaccagtgggcgatccatgagcactttctccctgagtcctcggcttcagggggctgtgacggagacctgcaggctgcgtgtaccattcttgtcaacgcactgatggatttccaccaaagctcaaggagttatgaccactcagaaaattctgatttggtctttggtggccgcacaggaaatgaggatattatttccagattgcaggagatggtagctgacctggagctgcagcaagacctcatagtgcctctcggccacaccccttcccaggagcacttcctctttgagattttccgcagacggctccaggctctgacaagcgggtggagcgtggctgccagccttcagagacagagggagctgctaatgtacaaacggatcctcctccgcctgccttcgtctgtcctctgcggcagcagcttccaggcagaacagcccatcactgccagatgcgagcagttcttccacttggtcaactctgagatgagaaacttctgctcccacggaggtgccctgacacaggacatcactgcccacttcttcaggggcctcctgaacgcctgtctgcggagcagagacccctccctgatggtcgacttcatactggccaagtgccagacgaaatgccccttaattttgacctctgctctggtgtggtggccgagcctggagcctgtgctgctctgccggtggaggagacactgccagagcccgctgccccgggaactgcagaagctacaagaaggccggcagtttgccagcgatttcctctcccctgaggctgcctccccagcacccaacccggactggctctcagctgctgcactgcactttgcgattcaacaagtcagggaagaaaacatcaggaagcagctaaagaagctggactgcgagagagaggagctattggttttccttttcttcttctccttgatgggcctgctgtcgtcacatctgacctcaaatagcaccacagacctgccaaaggctttccacgtttgtgcagcaatcctcgagtgtttagagaagaggaagatatcctggctggcactctttcagttgacagagagtgacctcaggctggggcggctcctcctccgtgtggccccggatcagcacaccaggctgctgcctttcgctttttacagacgcggccatcagggaagaggccttcctgcatgttgctgtggacatgtacttgaagctggtccagctcttcgtggctggggatacaagcacagtttcacctccagctggcaggagcctggagctcaagggtcagggcaaccccgtggaactgataacaaaagctcgtctttttctgctgcagttaatacctcggtgcccgaaaaagagcttctcacacgtggcagagctgctggctgatcgtggggactgcgacccagaggtgagcgccgccctccagagcagacagcaggctgcccctgacgctgacctgtcccaggagcctcatctcttctgacgggacctgccactgcacaccagcccagctcccgtgtaaataatttattacaagcataacatggagctcttgttgcactaaaaagtggattacaaatctcctcgactgctttagtggggaaaggaatcaattatttatgaactgtccggccccgagtcactcagcgtttgcgggaaaataaaccactggtcccagagcagaggaaggctacttgagccggacaccaagcccgcctccagcaccaagggcgggcagcaccctccgaccctcccatgcgggtgcacacgaagggtgaggctgacacagccactgcggagtccaggctgctagaggtgctcatcctcactgccgtcctcaggtgggttcgggcttcaccgcctggccctctgtggtcacagaggggctcggtggcccaggtggtggttccgcctccaggggcagggccttgtcctgggtctgtgtcagcgggtgcaccatggacatgtgtacattgaggttgtgggccttctcaaaccgccggccacactggtcacaggcaaagtccagctcagtctcagccttgtgtttggtcatgtggtacttgagggatgcccgctgcctgcactggaacccacagacctcacacctgggggacagaggcagataagaaggtgcgagggccacagccctgggagggggtcctgactcacacttactgcaaaggcttggctcccgaatgtcgcatttggtggacgagaaggtgcttccgctgcttgaaggtttgtccacattcgtcacagatatagttccgcacctctgagaggggagagtccagtgagtccaggcccctgatgctccaacctcccggggggacgacgatgacaatgtgaaaccatcacagctgggaagacatttctgcacatggttcaccatgcagtgggcccaagcaaggggcctatgagggcctcgtttattaagatctttaaactgctttatacactgtcacgtggcttcatcagctgtgtgcatttcaggatggtttttaaagaaacctcagaaagctatttccttaaccacagattcttgtcttttttttttttgagatggagtttcgctctgttacccaggctgcagtgcggtggcgtgatctcagctcactgcaacctgcgcctcccgggctcaagcgattcttgtgcctcagcctgccaagtagctgggattacaggcgccccccaccacgcccagctgatttttgtatttttagtagagacagggtttacaccatattggccaggctggtcttgaattcctgaccttgtgatctgcctgcctcggtctcccaaagtgctgggattacatgtgtgagccactgcatccggcctgtgggcttatcttttaatgtcttatttgaggacgtggtgcagcagccttggtgtgggtgctcgaagtccctggcctcctacctgagcctcttctgtccagaggcccagtat

SEQ ID NO: 368750 - DNA, 2423 bp, Homo sapiens
tggcctgtaggagcactgggggcttgtcatggctggggcagcggaggtgtgtccatctcagccaccctcatctgtgtgctggtgctctctccataggtgtggtggccgagcctggagcctgtgctgctctgccggtggaggagacactgccagagcccgctgccccgggaactgcagaagctacaagaaggccggcagtttgccagcgatttcctctcccctgaggctgcctccccagcacccaacccggactggctctcagctgctgcactgcactttgcgattcaacaagtcagggaagaaaacatcaggaagcagctaaagaagctggactgcgagagagaggagctattggttttccttttcttcttctccttgatgggcctgctgtcgtcacatctgacctcaaatagcaccacagacctgccaaaggctttccacgtttgtgcagcaatcctcgagtgtttagagaagaggaagatatcctggctggcactctttcagttgacagagagtgacctcaggctggggcggctcctcctccgtgtggccccggatcagcacaccaggctgctgcctttcgctttttacagtcttctctcctacttccatgaagacgcggccatcagggaagaggccttcctgcatgttgctgtggacatgtacttgaagctggtccagctcttcgtggctggggatacaagcacagtttcacctccagctggcaggagcctggagctcaagggtcagggcaaccccgtggaactgataacaaaagctcgtctttttctgctgcagttaatacctcggtgcccgaaaaagagcttctcacacgtggcagagctgctggctgatcgtggggactgcgacccagaggtgagcgccgccctccagagcagacagcaggctgcccctgacgctgacctgtcccaggagcctcatctcttctgacgggacctgccactgcacaccagcccagctcccgtgtaaataatttattacaagcataacatggagctcttgttgcactaaaaagtggattacaaatctcctcgactgctttagtggggaaaggaatcaattatttatgaactgtccggccccgagtcactcagcgtttgcgggaaaataaaccactggtcccagagcagaggaaggctacttgagccggacaccaagcccgcctccagcaccaagggcgggcagcaccctccgaccctcccatgcgggtgcacacgaagggtgaggctgacacagccactgcggagtccaggctgctagaggtgctcatcctcactgccgtcctcaggtgggttcgggcttcaccgcctggccctctgtggtcacagaggggctcggtggcccaggtggtggttccgcctccaggggcagggccttgtcctgggtctgtgtcagcgggtgcaccatggacatgtgtacattgaggttgtgggccttctcaaaccgccggccacactggtcacaggcaaagtccagctcagtctcagccttgtgtttggtcatgtggtacttgagggatgcccgctgcctgcactggaacccacagacctcacacctgggggacagaggcagataagaaggtgcgagggccacagccctgggagggggtcctgactcacacttactgcaaaggcttggctcccgaatgtcgcatttggtggacgagaaggtgcttccgctgcttgaaggtttgtccacattcgtcacagatatagttccgcacctctgagaggggagagtccagtgagtccaggcccctgatgctccaacctcccggggggacgacgatgacaatgtgaaaccatcacagctgggaagacatttctgcacatggttcaccatgcagtgggcccaagcaaggggcctatgagggcctcgtttattaagatctttaaactgctttatacactgtcacgtggcttcatcagctgtgtgcatttcaggatggtttttaaagaaacctcagaaagctatttccttaaccacagattcttgtcttttttttttttgagatggagtttcgctctgttacccaggctgcagtgcggtggcgtgatctcagctcactgcaacctgcgcctcccgggctcaagcgattcttgtgcctcagcctgccaagtagctgggattacaggcgccccccaccacgcccagctgatttttgtatttttagtagagacagggtttacaccatattggccaggctggtcttgaattcctgaccttgtgatctgcctgcctcggtctcccaaagtgctgggattacatgtgtgagccactgcatccggcctgtgggcttatcttttaatgtcttatttgaggacgtggtgcagcagccttggtgtgggtgctcgaagtccctggcctcctacctgagcctcttctgtccagaggcccagtat

SEQ ID NO: 368751 - DNA, 5030 bp, Homo sapiens
gggcgcagggagccgccgccggggctgtaggcgccaaggccatgtccgactcgtgggtcccgaactccgcctcgggccaggacccagggggccgccggagggcctgggccgagctgctggcgggaagggtcaagagggaaaaatataatcctgaaagggcacagaaattaaaggaatcagctgtgcgcctcctgcgaagccatcaggacctgaatgcccttttgcttgaggtagaaggtccactgtgtaaaaaattgtctctcagcaaagtgattgactgtgacagttctgaggcctatgctaatcattctagttcatttataggctctgctttgcaggatcaagcctcaaggctgggggttcccgtgggtattctctcagccgggatggttgcctctagcgtgggacagatctgcacggctccagcggagaccagtcaccctgtgctgctgactgtggagcagagaaagaagctgtcttccctgttagagtttgctcagtatttattggcacacagtatgttctcccgtctttccttctgtcaagaattatggaaaatacagagttctttgttgcttgaagcggtgtggcatcttcacgtacaaggcattgtgagcctgcaagagctgctggaaagccatcccgacatgcatgctgtgggatcgtggctcttcaggaatctgtgctgcctttgtgaacagatggaagcatcctgccagcatgctgacgtcgccagggccatgctttctgattttgttcaaatgtttgttttgaggggatttcagaaaaactcagatctgagaagaactgtggagcctgaaaaaatgccgcaggtcgcggttgatgtactgcagagaatgctgatttttgcacttgacgctttggctgctggagtacaggaggagtcctccactcacaagatcgtgaggtgctggttcggagtgttcagtggacacacgcttggcagtgtaatttccacagatcctctgaagaggttcttcagtcataccctgactcagatactcactcacagccctgtgctgaaagcatctgatgctgttcagatgcagagagagtggagctttgcgcggacacaccctctgctcacctcactgtaccgcaggctctttgtgatgctgagtgcagaggagttggttggccatttgcaagaagttctggaaacgcaggaggttcactggcagagagtgctctcctttgtgtctgccctggttgtctgctttccagaagcgcagcagctgcttgaagactgggtggcgcgtttgatggcccaggcattcgagagctgccagctggacagcatggtcactgcgttcctggttgtgcgccaggcagcactggagggcccctctgcgttcctgtcatatgcagactggttcaaggcctcctttgggagcacacgaggctaccatggctgcagcaagaaggccctggtcttcctgtttacgttcttgtcagaactcgtgccttttgagtctccccggtacctgcaggtgcacattctccacccacccctggttcccagcaagtaccgctccctcctcacagactacatctcattggccaagacacggctggccgacctcaaggtttctatagaaaacatgggactctacgaggatttgtcatcagctggggacattactgagccccacagccaagctcttcaggatgttgaaaaggccatcatggtgtttgagcatacggggaacatcccagtcaccgtcatggaggccagcatattcaggaggccttactacgtgtcccacttcctccccgccctgctcacacctcgagtgctccccaaagtccctgactcccgtgtggcgtttatagagtctctgaagagagcagataaaatccccccatctctgtactccacctactgccaggcctgctctgctgctgaagagaagccagaagatgcagccctgggagtgagggcagaacccaactctgctgaggagcccctgggacagctcacagctgcactgggagagctgagagcctccatgacagaccccagccagcgtgatgttatatcggcacaggtggcagtgatttctgaaagactgagggctgtcctgggccacaatgaggatgacagcagcgttgagatatcaaagattcagctcagcatcaacacgccgagactggagccacgggaacacatggctgtggacctcctgctgacgtctttctgtcagaacctgatggctgcctccagtgtcgctcccccggagaggcagggtccctgggctgccctcttcgtgaggaccatgtgtggacgtgtgctccctgcagtgctcacccggctctgccagctgctccgtcaccagggcccgagcctgagtgccccacatgtgctggggttggctgccctggccgtgcacctgggtgagtccaggtctgcgctcccagaggtggatgtgggtcctcctgcacctggtgctggccttcctgtccctgcgctctttgacagcctcctgacctgtaggacgagggattccttgttcttctgcctgaaattttgtacagcagcaatttcttactctctctgcaagttttcttcccagtcacgagatactttgtgcagctgcttatctccaggccttattaaaaagtttcagttcctcatgttcagattgttctcagaggcccgacagcctctttctgaggaggacgtagccagcctttcctggagacccttgcaccttccttctgcagactggcagagagctgccctctctctctggacacacagaaccttccgagaggtgttgaaagaggaagatgttcacttaacttaccaagactggttacacctggagctggaaattcaacctgaagctgatgctctttcagatactgaacggcaggacttccaccagtgggcgatccatgagcactttctccctgagtcctcggcttcagggggctgtgacggagacctgcaggctgcgtgtaccattcttgtcaacgcactgatggatttccaccaaagctcaaggagttatgaccactcagaaaattctgatttggtctttggtggccgcacaggaaatgaggatattatttccagattgcaggagatggtagctgacctggagctgcagcaagacctcatagtgcctctcggccacaccccttcccaggagcacttcctctttgagattttccgcagacggctccaggctctgacaagcgggtggagcgtggctgccagccttcagagacagagggagctgctaatgtacaaacggatcctcctccgcctgccttcgtctgtcctctgcggcagcagcttccaggcagaacagcccatcactgccagatgcgagcagttcttccacttggtcaactctgagatgagaaacttctgctcccacggaggtgccctgacacaggacatcactgcccacttcttcaggggcctcctgaacgcctgtctgcggagcagagacccctccctgatggtcgacttcatactggccaagtgccagacgaaatgccccttaattttgacctctgctctggtgtggtggccgagcctggagcctgtgctgctctgccggtggaggagacactgccagagcccgctgccccgggaactgcagaagctacaagaaggccggcagtttgccagcgatttcctctcccctgaggctgcctccccagcacccaacccggactggctctcagctgctgcactgcactttgcgattcaacaagtcagggaagaaaacatcaggaagcagctaaagaagctggactgcgagagagaggagctattggttttccttttcttcttctccttgatgggcctgctgtcgtcacatctgacctcaaatagcaccacagacctgccaaaggctttccacgtttgtgcagcaatcctcgagtgtttagagaagaggaagatatcctggctggcactctttcagttgacagagagtggtaagaaacacgctgctgaggcacaaatgcggagggccgctcttttcagaggcatcttgcaaatggttaagaacgagccctccttgaggttccttgctaagtaagtttataagctccattttagttgggacagattaagcacaaacttgtttaaagcaataagataatttactggctcactggtcaaccccaggaccaatgggcctatcatggggactgcctctctctgcaccacacccaccctcctgcaagaggtcgacccccccatcctctcccagctgctgacaggtacctgggtatcctcagctcaggctgttcgccccacactatccccacaggcaggcctcccagggtacacgtcccgacccccaggggtgtccccagcactgataataggcagagatgtccagagttgcctgagccacttcttggtgttgcagacctcaggctggggcggctcctcctccgtgtggccccggatcagcacaccaggctgctgcctttcgctttttacagggtacctccacccacagggctggtcagggctgggcagtgtttcccagacccccatctcagcacctctgggtcccgccagatgggaagggttgtctgtgcctctgctccacagatgagcagtatcccttggcatcacctgctacctttccagcagtctgtagccatttgtcactatgtctttacctctagtcttctctcctacttccatgaagacgcggccatcagggaagaggccttcctgcatgttgctgtggacatgtacttgaagctggtccagctcttcgtggctggggataacatcacatgttatcgcccaacacgagatatgaatccattaacactgacatacaattgaccagctgttatagagccattcttgtatcactgaaaggctgaaatgggggaaaagagagaaacagactggctagaatacacagctcctctagtggcattcctgttataacaacctcataggtacagagatgccgctgatcactcctagatttcagtaatatataataacctaattaatcacgtcg

SEQ ID NO: 368752 - DNA, 4650 bp, Homo sapiens
gggcgcagggagccgccgccggggctgtaggcgccaaggccatgtccgactcgtgggtcccgaactccgcctcgggccaggacccagggggccgccggagggcctgggccgagctgctggcgggaagggtcaagagggaaaaatataatcctgaaagggcacagaaattaaaggaatcagctgtgcgcctcctgcgaagccatcaggacctgaatgcccttttgcttgaggtagaaggtccactgtgtaaaaaattgtctctcagcaaagtgattgactgtgacagttctgaggcctatgctaatcattctagttcatttataggctctgctttgcaggatcaagcctcaaggctgggggttcccgtgggtattctctcagccgggatggttgcctctagcgtgggacagatctgcacggctccagcggagaccagtcaccctgtgctgctgactgtggagcagagaaagaagctgtcttccctgttagagtttgctcagtatttattggcacacagtatgttctcccgtctttccttctgtcaagaattatggaaaatacagagttctttgttgcttgaagcggtgtggcatcttcacgtacaaggcattgtgagcctgcaagagctgctggaaagccatcccgacatgcatgctgtgggatcgtggctcttcaggaatctgtgctgcctttgtgaacagatggaagcatcctgccagcatgctgacgtcgccagggccatgctttctgattttgttcaaatgtttgttttgaggggatttcagaaaaactcagatctgagaagaactgtggagcctgaaaaaatgccgcaggtcgcggttgatgtactgcagagaatgctgatttttgcacttgacgctttggctgctggagtacaggaggagtcctccactcacaagatcgtgaggtgctggttcggagtgttcagtggacacacgcttggcagtgtaatttccacagatcctctgaagaggttcttcagtcataccctgactcagatactcactcacagccctgtgctgaaagcatctgatgctgttcagatgcagagagagtggagctttgcgcggacacaccctctgctcacctcactgtaccgcaggctctttgtgatgctgagtgcagaggagttggttggccatttgcaagaagttctggaaacgcaggaggttcactggcagagagtgctctcctttgtgtctgccctggttgtctgctttccagaagcgcagcagctgcttgaagactgggtggcgcgtttgatggcccaggcattcgagagctgccagctggacagcatggtcactgcgttcctggttgtgcgccaggcagcactggagggcccctctgcgttcctgtcatatgcagactggttcaaggcctcctttgggagcacacgaggctaccatggctgcagcaagaaggccctggtcttcctgtttacgttcttgtcagaactcgtgccttttgagtctccccggtacctgcaggtgcacattctccacccacccctggttcccagcaagtaccgctccctcctcacagactacatctcattggccaagacacggctggccgacctcaaggtttctatagaaaacatgggactctacgaggatttgtcatcagctggggacattactgagccccacagccaagctcttcaggatgttgaaaaggccatcatggtgtttgagcatacggggaacatcccagtcaccgtcatggaggccagcatattcaggaggccttactacgtgtcccacttcctccccgccctgctcacacctcgagtgctccccaaagtccctgactcccgtgtggcgtttatagagtctctgaagagagcagataaaatccccccatctctgtactccacctactgccaggcctgctctgctgctgaagagaagccagaagatgcagccctgggagtgagggcagaacccaactctgctgaggagcccctgggacagctcacagctgcactgggagagctgagagcctccatgacagaccccagccagcgtgatgttatatcggcacaggtggcagtgatttctgaaagactgagggctgtcctgggccacaatgaggatgacagcagcgttgagatatcaaagattcagctcagcatcaacacgccgagactggagccacgggaacacatggctgtggacctcctgctgacgtctttctgtcagaacctgatggctgcctccagtgtcgctcccccggagaggcagggtccctgggctgccctcttcgtgaggaccatgtgtggacgtgtgctccctgcagtgctcacccggctctgccagctgctccgtcaccagggcccgagcctgagtgccccacatgtgctggggttggctgccctggccgtgcacctgggtgagtccaggtctgcgctcccagaggtggatgtgggtcctcctgcacctggtgctggccttcctgtccctgcgctctttgacagcctcctgacctgtaggacgagggattccttgttcttctgcctgaaattttgtacagcagcaatttcttactctctctgcaagttttcttcccagtcacgagatactttgtgcagctgcttatctccaggccttattaaaaagtttcagttcctcatgttcagattgttctcagaggcccgacagcctctttctgaggaggacgtagccagcctttcctggagacccttgcaccttccttctgcagactggcagagagctgccctctctctctggacacacagaaccttccgagaggtgttgaaagaggaagatgttcacttaacttaccaagactggttacacctggagctggaaattcaacctgaagctgatgctctttcagatactgaacggcaggacttccaccagtgggcgatccatgagcactttctccctgagtcctcggcttcagggggctgtgacggagacctgcaggctgcgtgtaccattcttgtcaacgcactgatggatttccaccaaagctcaaggagttatgaccactcagaaaattctgatttggtctttggtggccgcacaggaaatgaggatattatttccagattgcaggagatggtagctgacctggagctgcagcaagacctcatagtgcctctcggccacaccccttcccaggagcacttcctctttgagattttccgcagacggctccaggctctgacaagcgggtggagcgtggctgccagccttcagagacagagggagctgctaatgtacaaacggatcctcctccgcctgccttcgtctgtcctctgcggcagcagcttccaggcagaacagcccatcactgccagatgcgagcagttcttccacttggtcaactctgagatgagaaacttctgctcccacggaggtgccctgacacaggacatcactgcccacttcttcaggggcctcctgaacgcctgtctgcggagcagagacccctccctgatggtcgacttcatactggccaagtgccagacgaaatgccccttaattttgacctctgctctggtgtggtggccgagcctggagcctgtgctgctctgccggtggaggagacactgccagagcccgctgccccgggaactgcagaagctacaagaaggccggcagtttgccagcgatttcctctcccctgaggctgcctccccagcacccaacccggactggctctcagctgctgcactgcactttgcgattcaacaagtcagggaagaaaacatcaggaagcagctaaagaagctggactgcgagagagaggagctattggttttccttttcttcttctccttgatgggcctgctgtcgtcacatctgacctcaaatagcaccacagacctgccaaaggctttccacgtttgtgcagcaatcctcgagtgtttagagaagaggaagatatcctggctggcactctttcagttgacagagagtggtaagaaacacgctgctgaggcacaaatgcggagggccgctcttttcagaggcatcttgcaaatggttaagaacgagccctccttgaggttccttgctaagtaagtttataagctccattttagttgggacagattaagcacaaacttgtttaaagcaataagataatttactggctcactggtcaaccccaggaccaatgggcctatcatggggactgcctctctctgcaccacacccaccctcctgcaagaggtcgacccccccatcctctcccagctgctgacaggtacctgggtatcctcagctcaggctgttcgccccacactatccccacaggcaggcctcccagggtacacgtcctcaaataagacattaaaagaaaggcccaaatggccgggcgcggtggctcacgcctgtaatcccagcactttgggaggccgaggtgggcggatcacgaggtcaggagatcaagaccatcctggctaacacggtgaaaccccgtctctactaaaaatacaaaaaatcagccgggcgtggtggcccgcacctgtagtcccagctactcgggaggctgaggcgggagaatggcgtgaacctgagaggcagaggttgcagtgagctgagatcgtgccactgcactccagcctggacgacagagagaaactccgtctca

SEQ ID NO: 368753 - DNA, 3617 bp, Homo sapiens
  misc_feature (3595)..(3595): n is a, c, g, or t
gggcgcagggagccgccgccggggctgtaggcgccaaggccatgtccgactcgtgggtcccgaactccgcctcgggccaggacccagggggccgccggagggcctgggccgagctgctggcgggaagggtcaagagggaaaaatataatcctgaaagggcacagaaattaaaggaatcagctgtgcgcctcctgcgaagccatcaggacctgaatgcccttttgcttgaggtagaaggtccactgtgtaaaaaattgtctctcagcaaagtgattgactgtgacagttctgaggcctatgctaatcattctagttcatttataggctctgctttgcaggatcaagcctcaaggctgggggttcccgtgggtattctctcagccgggatggttgcctctagcgtgggacagatctgcacggctccagcggagaccagtcaccctgtgctgctgactgtggagcagagaaagaagctgtcttccctgttagagtttgctcagtatttattggcacacagtatgttctcccgtctttccttctgtcaagaattatggaaaatacagagttctttgttgcttgaagcggtgtggcatcttcacgtacaaggcattgtgagcctgcaagagctgctggaaagccatcccgacatgcatgctgtgggatcgtggctcttcaggaatctgtgctgcctttgtgaacagatggaagcatcctgccagcatgctgacgtcgccagggccatgctttctgattttgttcaaatgtttgttttgaggggatttcagaaaaactcagatctgagaagaactgtggagcctgaaaaaatgccgcaggtcgcggttgatgtactgcagagaatgctgatttttgcacttgacgctttggctgctggagtacaggaggagtcctccactcacaagatcgtgaggtgctggttcggagtgttcagtggacacacgcttggcagtgtaatttccacagatcctctgaagaggttcttcagtcataccctgactcagatactcactcacagccctgtgctgaaagcatctgatgctgttcagatgcagagagagtggagctttgcgcggacacaccctctgctcacctcactgtaccgcaggctctttgtgatgctgagtgcagaggagttggttggccatttgcaagaagttctggaaacgcaggaggttcactggcagagagtgctctcctttgtgtctgccctggttgtctgctttccagaagcgcagcagctgcttgaagactgggtggcgcgtttgatggcccaggcattcgagagctgccagctggacagcatggtcactgcgttcctggttgtgcgccaggcagcactggagggcccctctgcgttcctgtcatatgcagactggttcaaggcctcctttgggagcacacgaggctaccatggctgcagcaagaaggccctggtcttcctgtttacgttcttgtcagaactcgtgccttttgagtctccccggtacctgcaggtgcacattctccacccacccctggttcccagcaagtaccgctccctcctcacagactacatctcattggccaagacacggctggccgacctcaaggtttctatagaaaacatgggactctacgaggatttgtcatcagctggggacattactgagccccacagccaagctcttcaggatgttgaaaaggccatcatggtgtttgagcatacggggaacatcccagtcaccgtcatggaggccagcatattcaggaggccttactacgtgtcccacttcctccccgccctgctcacacctcgagtgctccccaaagtccctgactcccgtgtggcgtttatagagtctctgaagagagcagataaaatccccccatctctgtactccacctactgccaggcctgctctgctgctgaagagaagccagaagatgcagccctgggagtgagggcagaacccaactctgctgaggagcccctgggacagctcacagctgcactgggagagctgagagcctccatgacagaccccagccagcgtgatgttatatcggcacaggtggcagtgatttctgaaagactgagggctgtcctgggccacaatgaggatgacagcagcgttgagatatcaaagattcagctcagcatcaacacgccgagactggagccacgggaacacatggctgtggacctcctgctgacgtctttctgtcagaacctgatggctgcctccagtgtcgctcccccggagaggcagggtccctgggctgccctcttcgtgaggaccatgtgtggacgtgtgctccctgcagtgctcacccggctctgccagctgctccgtcaccagggcccgagcctgagtgccccacatgtgctggggttggctgccctggccgtgcacctgggtgagtccaggtctgcgctcccagaggtggatgtgggtcctcctgcacctggtgctggccttcctgtccctgcgctctttgacagcctcctgacctgtaggacgagggattccttgttcttctgcctgaaattttgtacagcagcaatttcttactctctctgcaagttttcttcccagtcacgagatactttgtgcagctgcttatctccaggccttattaaaaagtttcagttcctcatgttcagattgttctcagaggcccgacagcctctttctgaggaggacgtagccagcctttcctggagacccttgcaccttccttctgcagactggcagagagctgccctctctctctggacacacagaaccttccgagaggtgttgaaagaggaagatgttcacttaacttaccaagactggttacacctggagctggaaattcaacctgaagctgatgctctttcagatactgaacggcaggacttccaccagtgggcgatccatgagcactttctccctgagtcctcggcttcagggggctgtgacggagacctgcaggctgcgtgtaccattcttgtcaacgcactgatggatttccaccaaagctcaaggagttatgaccactcagaaaattctgatttggtctttggtggccgcacaggaaatgaggatattatttccagattgcaggagatggtagctgacctggagctgcagcaagacctcatagtgcctctcggccacaccccttcccaggagcacttcctctttgagattttccgcagacggctccaggctctgacaagcgggtggagcgtggctgccagccttcagagacagagggagctgctaatgtacaaacggatcctcctccgcctgccttcgtctgtcctctgcggcagcagcttccaggcagaacagcccatcactgccagatgcgagcagttcttccacttggtcaactctgagatgagaaacttctgctcccacggaggtgccctgacacaggacatcactgcccacttcttcaggggcctcctgaacgcctgtctgcggagcagagacccctccctgatggtcgacttcatactggccaagtgccagacgaaatgccccttaattttgacctctgctctggtttttggttgggccccaaaccctggaaaccctgttgcttngctccttcccggttggaaagaa

SEQ ID NO: 368754 - DNA, 3113 bp, Homo sapiens
gggcgcagggagccgccgccggggctgtaggcgccaaggccatgtccgactcgtgggtcccgaactccgcctcgggccaggacccagggggccgccggagggcctgggccgagctgctggcgggaagggtcaagagggaaaaatataatcctgaaagggcacagaaattaaaggaatcagctgtgcgcctcctgcgaagccatcaggacctgaatgcccttttgcttgaggtagaaggtccactgtgtaaaaaattgtctctcagcaaagtgattgactgtgacagttctgaggcctatgctaatcattctagttcatttataggctctgctttgcaggatcaagcctcaaggctgggggttcccgtgggtattctctcagccgggatggttgcctctagcgtgggacagatctgcacggctccagcggagaccagtcaccctgtgctgctgactgtggagcagagaaagaagctgtcttccctgttagagtttgctcagtatttattggcacacagtatgttctcccgtctttccttctgtcaagaattatggaaaatacagagttctttgttgcttgaagcggtgtggcatcttcacgtacaaggcattgtgagcctgcaagagctgctggaaagccatcccgacatgcatgctgtgggatcgtggctcttcaggaatctgtgctgcctttgtgaacagatggaagcatcctgccagcatgctgacgtcgccagggccatgctttctgattttgttcaaatgtttgttttgaggggatttcagaaaaactcagatctgagaagaactgtggagcctgaaaaaatgccgcaggtcgcggttgatgtactgcagagaatgctgatttttgcacttgacgctttggctgctggagtacaggaggagtcctccactcacaagatcgtgaggtgctgagcttcagcagcccgctcctgagcacacttcctctgccagttacgataacgtgcgtgaggaggaggcgaccatgggaaagcccggggaacgctctggtcagccttttcctgtgaggatgaggtcggaaggtgcgcccactgcagtatcctgttccgcctctggaagtcctgcaccaatgtttgtcccactcactgtgacctcctcctgtgtggagtctccccttgctcctccttccctgggtgtggttcaggctctagagctggccctgcctctcagccccccacatttctagaacacactgtagctgtgcctctacagactcccgctgcctggcctccacagatcctgctcagattcaccagtaggcaaagcttggccctatttgctttttctctccatggctctgtggagatgtgcggagacccttacaggtcgggaggcggaagctgaggagtgggggctgggtggaaggtggacatcggggtttggtggaaatggggctctggggtttgcttccctctagtgtgggcaggggaccttgaagtgaagtcttgagaaaccagtagaatttgccactgtttccaggccttgtcaaccttttcattctttattttgctcctcatttcccatccctcacagtaactgtttaactgctcaattaaatgtgttgtaccgttcggtacttttactgaaaaaaaaaaaaaaaaaactcgagtttttttttttttttttttttcccgtgtaaataatttattacaagcataacatggagctcttgttgcactaaaaagtggattacaaatctcctcgactgctttagtggggaaaggaatcaattatttatgaactgtccggccccgagtcactcagcgtttgcgggaaaataaaccactggtcccagagcagaggaaggctacttgagccggacaccaagcccgcctccagcaccaagggcgggcagcaccctccgaccctcccatgcgggtgcacacgaagggtgaggctgacacagccactgcggagtccaggctgctagaggtgctcatcctcactgccgtcctcaggtgggttcgggcttcaccgcctggccctctgtggtcacagaggggctcggtggcccaggtggtggttccgcctccaggggcagggccttgtcctgggtctgtgtcagcgggtgcaccatggacatgtgtacattgaggttgtgggccttctcaaaccgccggccacactggtcacaggcaaagtccagctcagtctcagccttgtgtttggtcatgtggtacttgagggatgcccgctgcctgcactggaacccacagacctcacacctgggggacagaggcagataagaaggtgcgagggccacagccctgggagggggtcctgactcacacttactgcaaaggcttggctcccgaatgtcgcatttggtggacgagaaggtgcttccgctgcttgaaggtttgtccacattcgtcacagatatagttccgcacctctgagaggggagagtccagtgagtccaggcccctgatgctccaacctcccggggggacgacgatgacaatgtgaaaccatcacagctgggaagacatttctgcacatggttcaccatgcagtgggcccaagcaaggggcctatgagggcctcgtttattaagatctttaaactgctttatacactgtcacgtggcttcatcagctgtgtgcatttcaggatggtttttaaagaaacctcagaaagctatttccttaaccacagattcttgtcttttttttttttgagatggagtttcgctctgttacccaggctgcagtgcggtggcgtgatctcagctcactgcaacctgcgcctcccgggctcaagcgattcttgtgcctcagcctgccaagtagctgggattacaggcgccccccaccacgcccagctgatttttgtatttttagtagagacagggtttacaccatattggccaggctggtcttgaattcctgaccttgtgatctgcctgcctcggtctcccaaagtgctgggattacatgtgtgagccactgcatccggcctgtgggcttatcttttaatgtcttatttgaggacgtggtgcagcagccttggtgtgggtgctcgaagtccctggcctcctacctgagcctcttctgtccagaggcccagtat

SEQ ID NO: 368755 - DNA, 1970 bp, Homo sapiens
agcggcccggggtgagacccacgttaaaagtggcgttttggttacaaattgggacagcccttaaacccaaatcggggcaatcctttgggttataagggattttgcccaattcgggctattggttaaaaaattagctgtttttaccaaaattttacccgaattttaaccagatatttacccttacaattttcaattggcaatcaagctgggccactttttgaaaggccattcgttcgggcccttttggtttttccccaactggcgaaaaggggattttcttcaaagcgatttagttggggaaccccaaggtttttccaattacgacgtttttaaaccgcggcccattaaatgtaaaacggtcccctttaaggcgtattggcccaattagcttttattttttgccgcttgtattaattttttttattttaaatttttttttgttttttttttttttttttttttttttttttttttttttttttttttttttttttttttttttttttttttttttttttttttttttttcccgtgtaaataatttattacaagcataacatggagctcttgttgcactaaaaagtggattacaaatctcctcgactgctttagtggggaaaggaatcaattatttatgaactgtccggccccgagtcactcagcgtttgcgggaaaataaaccactggtcccagagcagaggaaggctacttgagccggacaccaagcccgcctccagcaccaagggcgggcagcaccctccgaccctcccatgcgggtgcacacgaagggtgaggctgacacagccactgcggagtccaggctgctagaggtgctcatcctcactgccgtcctcaggtgggttcgggcttcaccgcctggccctctgtggtcacagaggggctcggtggcccaggtggtggttccgcctccaggggcagggccttgtcctgggtctgtgtcagcgggtgcaccatggacatgtgtacattgaggttgtgggccttctcaaaccgccggccacactggtcacaggcaaagtccagctcagtctcagccttgtgtttggtcatgtggtacttgagggatgcccgctgcctgcactggaacccacagacctcacacctgggggacagaggcagataagaaggtgcgagggccacagccctgggagggggtcctgactcacacttactgcaaaggcttggctcccgaatgtcgcatttggtggacgagaaggtgcttccgctgcttgaaggtttgtccacattcgtcacagatatagttccgcacctctgagaggggagagtccagtgagtccaggcccctgatgctccaacctcccggggggacgacgatgacaatgtgaaaccatcacagctgggaagacatttctgcacatggttcaccatgcagtgggcccaagcaaggggcctatgagggcctcgtttattaagatctttaaactgctttatacactgtcacgtggcttcatcagctgtgtgcatttcaggatggtttttaaagaaacctcagaaagctatttccttaaccacagattcttgtcttttttttttttgagatggagtttcgctctgttacccaggctgcagtgcggtggcgtgatctcagctcactgcaacctgcgcctcccgggctcaagcgattcttgtgcctcagcctgccaagtagctgggattacaggcgccccccaccacgcccagctgatttttgtatttttagtagagacagggtttacaccatattggccaggctggtcttgaattcctgaccttgtgatctgcctgcctcggtctcccaaagtgctgggattacatgtgtgagccactgcatccggcctgtgggcttatcttttaatgtcttatttgaggacgtggtgcagcagccttggtgtgggtgctcgaagtccctggcctcctacctgagcctcttctgtccagaggcccagtat

SEQ ID NO: 368756 - DNA, 1976 bp, Homo sapiens
gggcgcagggagccgccgccggggctgtaggcgccaaggccatgtccgactcgtgggtcccgaactccgcctcgggccaggacccagggggccgccggagggcctgggccgagctgctggcgggaagggtcaagagggaaaaatataatcctgaaagggcacagaaattaaaggaatcagctgtgcgcctcctgcgaagccatcaggacctgaatgcccttttgcttgaggtagaaggtccactgtgtaaaaaattgtctctcagcaaagtgattgactgtgacagttctgaggcctatgctaatcattctagttcatttataggctctgctttgcaggatcaagcctcaaggctgggggttcccgtgggtattctctcagccgggatggttgcctctagcgtgggacagatctgcacggctccagcggagaccagtcaccctgtgctgctgactgtggagcagagaaagaagctgtcttccctgttagagtttgctcagtatttattggcacacagtatgttctcccgtctttccttctgtcaagaattatggaaaatacagagttctttgttgcttgaagcggtgtggcatcttcacgtacaaggcattgtgagcctgcaagagctgctggaaagccatcccgacatgcatgctgtgggatcgtggctcttcaggaatctgtgctgcctttgtgaacagatggaagcatcctgccagcatgctgacgtcgccagggccatgctttctgattttgttcaaatgtttgttttgaggggatttcagaaaaactcagatctgagaagaactgtggagcctgaaaaaatgccgcaggtcgcggttgatgtactgcagagaatgctgatttttgcacttgacgctttggctgctggagtacaggaggagtcctccactcacaagatcgtgaggtgctgagcttcagcagcccgctcctgagcacacttcctctgccagttacgataacgtgcgtgaggaggaggcgaccatgggaaagcccggggaacgctctggtcagccttttcctgtgaggatgaggtcggaaggtgcgcccactgcagtatcctgttccgcctctggaagtcctgcaccaatgtttgtcccactcactgtgacctcctcctgtgtggagtctccccttgctcctccttccctgggtgtggttcaggctctagagctggccctgcctctcagccccccacatttctagaacacactgtagctgtgcctctacagactcccgctgcctggcctccacagatcctgctcagattcaccagtaggcaaagcttggccctatttgctttttctctccatggctctgtggagatgtgcggagacccttacaggtcgggaggcggaagctgaggagtgggggctgggtggaaggtggacatcggggtttggtggaaatggggctctggggtttgcttccctctagtgtgggcaggggaccttgaagtgaagtcttgagaaaccagtagaatttgccactgtttccaggccttgtcaaccttttcattctttattttgctcctcatttcccatccctcacagtaactgtttaactgctcaattaaatgtgttgtaccgttcggtacttttactgaaacagtgaataaagcactgtgtgatttcctgaatgtttacatgtgcatcagttagcttgggctgctgtaacaaagtgccagagactgcggtgtggacggcagatgtgttctcacagcagtggaggctggaagttggaggtcagggtgcccctagggttgggttctggtgaggaccctcttcctggcttgcaggagacctactttttctgtgtcttcatgaggtagagaggggagagcaagccctctggtgtcttctccgggcagtcatctcatcatcacctcagccttatcaacaccccaccttgagaggctgggcttcaacagaggaactttgtggggatacagttta

SEQ ID NO: 368757 - DNA, 737 bp, Homo sapiens
gaaagcgcctggggattgtttctggtgggctgccgccgtgtgctgacatctgttttctgttcctggctctgtcttcagttgcacttgacgctttggctgctggagtacaggaggagtcctccactcacaagatcgtgaggtgctggtatgttcctgagggtggcctgcctgagtgtgcagcagggaggtgtctgccaaattaaagagccaagatattttaaacacttccagagcttcagcagcccgctcctgagcacacttcctctgccagttacgataacgtgcgtgaggaggaggcgaccatgggaaagcccggggaacgctctggtcagccttttcctgtgaggatgaggtcggaaggtgcgcccactgcagtatcctgttccgcctctggaagtcctgcaccaatgtttgtcccactcactgtgacctcctcctgtgtggagtctccccttgctcctccttccctgggtgtggttcaggctctagagctggccctgcctctcagccccccacatttctagaacacactgtagctgtgcctctacagactcccgctgcctggcctccacagatcctgctcagattcaccagtaggcaaagcttggccctatttgctttttctctccatggctctgtggagatgtgcggagacccttacaggtcgggaggcggaagctgaggagtgggggctgggtggaaggtggacatcggggtttggtggaaatggggctctg

SEQ ID NO: 368758 - DNA, 334 bp, Homo sapiens
agccagggcgccaggcccggtcagcccaggagcaccatccatggtggccacgccaagccttagcgagtgtttttctcaaaactgaatccacagcagccactctgcatgttggtctcgcctctcttcctgtgggcttttcttacctgccttgaactcttttgcagagaaacttctgctcccacggaggtgccctgacacaggacatcactgcccacttcttcagggtgagatgctccctcagcccctctcgtggccttctcagaacgccgtgggtggatcctcctgtcagcttcctgtgagttccttcactctactagttgtgggtcctcacaaa

SEQ ID NO: 368759 - DNA, 779 bp, Homo sapiens
cgcagggagccgccgccggggctgtaggcgccaaggccatgtccgactcgtgggtcccgaactccgcctcgggccaggacccagggggccgccggagggcctgggccgagctgctgggtaggtgggcgcggcaggccgcgggagtgggcggcgtccggcccgggacggtttcgccggttccccgatcccttcccgccagagcctccgccggtcggatccccggacgccgcgcccggggggctgtgcggggtgggcgcccggctggggcggcgcggctgcctcggacccggcccctcctgcgcctgggcggacgcccaccagaccgccgcccgcggggcgctcccttctttcccgaacgccgcccccgccggccgccctgtcaggcgggcctggggtgcgcggcctggggctcccctcagcgcagaggccgcccctcgccagccgtccccgggctcccctgcctcgggccctcctgggccgtcttccccggcgtccgcggtggggccgtctccgttagtttcccgagacctgcgccctggggaggagccccggcccctcttcgggagggtgtcgctggtgggtttctccgcggcgtccacctgcgcgtcgggccggggaccccgtgtgtgaattgtgctgtgatggtttcgaaccgacttctctccgtagcgggaagggtcaagagggaaaaatataatcctgaaagggcacagaaattaaaggaatcagctgtgcgcctcctgcgaagccatcaggacctgaatgcccttttgcttgag

SEQ ID NO: 368760 - DNA, 1655 bp, Homo sapiens
gggcgcagggagccgccgccggggctgtaggcgccaaggccatgtccgactcgtgggtcccgaactccgcctcgggccaggacccagggggccgccggagggcctgggccgagctgctggcgggaagggtcaagagggaaaaatataatcctgaaagggcacagaaattaaaggaatcagctgtgcgcctcctgcgaagccatcaggacctgaatgcccttttgcttgaggtagaaggtccactgtgtaaaaaattgtctctcagcaaagtgattgactgtgacagttctgaggcctatgctaatcattctagttcatttataggctctgctttgcaggatcaagcctcaaggctgggggttcccgtgggtattctctcagccgggatggttgcctctagcgtgggacagatctgcacggctccagcggagaccagtcaccctgtgctgctgactgtggagcagagaaagaagctgtcttccctgttagagtttgctcagtatttattggcacacagtatgttctcccgtctttccttctgtcaagaattatggaaaatacagagttctttgttgcttgaagcggtgtggcatcttcacgtacaaggcattgtgagcctgcaagagctgctggaaagccatcccgacatgcatgctgtgggatcgtggctcttcaggaatctgtgctgcctttgtgaacagatggaagcatcctgccagcatgctgacgtcgccagggccatgctttctgattttgttcaaatgtttgttttgaggggatttcagaaaaactcagatctgagaagaactgtggagcctgaaaaaatgccgcaggtcgcggttgatgtactgcagagaatgctgatttttgcacttgacgctttggctgctggagtacaggaggagtcctccactcacaagatcgtgaggtgctgagcttcagcagcccgctcctgagcacacttcctctgccagttacgataacgtgcgtgaggaggaggcgaccatgggaaagcccggggaacgctctggtcagccttttcctgtgaggatgaggtcggaaggtgcgcccactgcagtatcctgttccgcctctggaagtcctgcaccaatgtttgtcccactcactgtgacctcctcctgtgtggagtctccccttgctcctccttccctgggtgtggttcaggctctagagctggccctgcctctcagccccccacatttctagaacacactgtagctgtgcctctacagactcccgctgcctggcctccacagatcctgctcagattcaccagtaggcaaagcttggccctatttgctttttctctccatggctctgtggagatgtgcggagacccttacaggtcgggaggcggaagctgaggagtgggggctgggtggaaggtggacatcggggtttggtggaaatggggctctggggtttgcttccctctagtgtgggcaggggaccttgaagtgaagtcttgagaaaccagtagaatttgccactgtttccaggccttgtcaaccttttcattctttattttgctcctcatttcccatccctcacagtaactgtttaactgctcaattaaatgtgttgtaccgttcggtacttttactgaaacagtgaataaagcactgtgtgatttc

SEQ ID NO: 368761 - DNA, 6037 bp, Homo sapiens
gggcgcagggagccgccgccggggctgtaggcgccaaggccatgtccgactcgtgggtcccgaactccgcctcgggccaggacccagggggccgccggagggcctgggccgagctgctggcgggaagggtcaagagggaaaaatataatcctgaaagggcacagaaattaaaggaatcagctgtgcgcctcctgcgaagccatcaggacctgaatgcccttttgcttgaggtagaaggtccactgtgtaaaaaattgtctctcagcaaagtgattgactgtgacagttctgaggcctatgctaatcattctagttcatttataggctctgctttgcaggatcaagcctcaaggctgggggttcccgtgggtattctctcagccgggatggttgcctctagcgtgggacagatctgcacggctccagcggagaccagtcaccctgtgctgctgactgtggagcagagaaagaagctgtcttccctgttagagtttgctcagtatttattggcacacagtatgttctcccgtctttccttctgtcaagaattatggaaaatacagagttctttgttgcttgaagcggtgtggcatcttcacgtacaaggcattgtgagcctgcaagagctgctggaaagccatcccgacatgcatgctgtgggatcgtggctcttcaggaatctgtgctgcctttgtgaacagatggaagcatcctgccagcatgctgacgtcgccagggccatgctttctgattttgttcaaatgtttgttttgaggggatttcagaaaaactcagatctgagaagaactgtggagcctgaaaaaatgccgcaggtcgcggttgatgtactgcagagaatgctgatttttgcacttgacgctttggctgctggagtacaggaggagtcctccactcacaagatcgtgaggtgctggttcggagtgttcagtggacacacgcttggcagtgtaatttccacagatcctctgaagaggttcttcagtcataccctgactcagatactcactcacagccctgtgctgaaagcatctgatgctgttcagatgcagagagagtggagctttgcgcggacacaccctctgctcacctcactgtaccgcaggctctttgtgatgctgagtgcagaggagttggttggccatttgcaagaagttctggaaacgcaggaggttcactggcagagagtgctctcctttgtgtctgccctggttgtctgctttccagaagcgcagcagctgcttgaagactgggtggcgcgtttgatggcccaggcattcgagagctgccagctggacagcatggtcactgcgttcctggttgtgcgccaggcagcactggagggcccctctgcgttcctgtcatatgcagactggttcaaggcctcctttgggagcacacgaggctaccatggctgcagcaagaaggccctggtcttcctgtttacgttcttgtcagaactcgtgccttttgagtctccccggtacctgcaggtgcacattctccacccacccctggttcccagcaagtaccgctccctcctcacagactacatctcattggccaagacacggctggccgacctcaaggtttctatagaaaacatgggactctacgaggatttgtcatcagctggggacattactgagccccacagccaagctcttcaggatgttgaaaaggccatcatggtgtttgagcatacggggaacatcccagtcaccgtcatggaggccagcatattcaggaggccttactacgtgtcccacttcctccccgccctgctcacacctcgagtgctccccaaagtccctgactcccgtgtggcgtttatagagtctctgaagagagcagataaaatccccccatctctgtactccacctactgccaggcctgctctgctgctgaagagaagccagaagatgcagccctgggagtgagggcagaacccaactctgctgaggagcccctgggacagctcacagctgcactgggagagctgagagcctccatgacagaccccagccagcgtgatgttatatcggcacaggtggcagtgatttctgaaagactgagggctgtcctgggccacaatgaggatgacagcagcgttgagatatcaaagattcagctcagcatcaacacgccgagactggagccacgggaacacatggctgtggacctcctgctgacgtctttctgtcagaacctgatggctgcctccagtgtcgctcccccggagaggcagggtccctgggctgccctcttcgtgaggaccatgtgtggacgtgtgctccctgcagtgctcacccggctctgccagctgctccgtcaccagggcccgagcctgagtgccccacatgtgctggggttggctgccctggccgtgcacctgggtgagtccaggtctgcgctcccagaggtggatgtgggtcctcctgcacctggtgctggccttcctgtccctgcgctctttgacagcctcctgacctgtaggacgagggattccttgttcttctgcctgaaattttgtacagcagcaatttcttactctctctgcaagttttcttcccagtcacgagatactttgtgcagctgcttatctccaggccttattaaaaagtttcagttcctcatgttcagattgttctcagaggcccgacagcctctttctgaggaggacgtagccagcctttcctggagacccttgcaccttccttctgcagactggcagagagctgccctctctctctggacacacagaaccttccgagaggtgttgaaagaggaagatgttcacgtggtcatggtgatgtgcacctgcagtcccagccatctgagaggctgagggggagaattctggagttcaggaggcagagtctgcagcgagctacgattgcaccactgcacacactccagcctgggcaacagaacctgtttccaaaaataaatgaagttaacttaccaagactggttacacctggagctggaaattcaacctgaagctgatgctctttcagatactgaacggcaggacttccaccagtgggcgatccatgagcactttctccctgagtcctcggcttcagggggctgtgacggagacctgcaggctgcgtgtaccattcttgtcaacgcactgatggatttccaccaaagctcaaggagttatgaccactcagaaaattctgatttggtctttggtggccgcacaggaaatgaggatattatttccagattgcaggagatggtagctgacctggagctgcagcaagacctcatagtgcctctcggccacaccccttcccaggagcacttcctctttgagattttccgcagacggctccaggctctgacaagcgggtggagcgtggctgccagccttcagagacagagggagctgctaatgtacaaacggatcctcctccgcctgccttcgtctgtcctctgcggcagcagcttccaggcagaacagcccatcactgccagatgcgagcagttcttccacttggtcaactctgagatgagaaacttctgctcccacggaggtgccctgacacaggacatcactgcccacttcttcaggggcctcctgaacgcctgtctgcggagcagagacccctccctgatggtcgacttcatactggccaagtgccagacgaaatgccccttaattttgacctctgctctggtgtggtggccgagcctggagcctgtgctgctctgccggtggaggagacactgccagagcccgctgccccgggaactgcagaagctacaagaaggccggcagtttgccagcgatttcctctcccctgaggctgcctccccagcacccaacccggactggctctcagctgctgcactgcactttgcgattcaacaagtcagggaagaaaacatcaggaagcagctaaagaagctggactgcgagagagaggagctattggttttccttttcttcttctccttgatgggcctgctgtcgtcacatctgacctcaaatagcaccacagacctgccaaaggctttccacgtttgtgcagcaatcctcgagtgtttagagaagaggaagatatcctggctggcactctttcagttgacagagagtgacctcaggctggggcggctcctcctccgtgtggccccggatcagcacaccaggctgctgcctttcgctttttacagtcttctctcctacttccatgaagacgcggccatcagggaagaggccttcctgcatgttgctgtggacatgtacttgaagctggtccagctcttcgtggctggggatacaagcacagtttcacctccagctggcaggagcctggagctcaagggtcagggcaaccccgtggaactgataacaaaagctcgtctttttctgctgcagttaatacctcggtgcccgaaaaagagcttctcacacgtggcagagctgctggctgatcgtggggactgcgacccagaggtgagcgccgccctccagagcagacagcaggctgcccctgacgctgacctgtcccaggagcctcatctcttctgacgggacctgccactgcacaccagcccagctcccgtgtaaataatttattacaagcataacatggagctcttgttgcactaaaaagtggattacaaatctcctcgactgctttagtggggaaaggaatcaattatttatgaactgtccggccccgagtcactcagcgtttgcgggaaaataaaccactggtcccagagcagaggaaggctacttgagccggacaccaagcccgcctccagcaccaagggcgggcagcaccctccgaccctcccatgcgggtgcacacgaagggtgaggctgacacagccactgcggagtccaggctgctagaggtgctcatcctcactgccgtcctcaggtgggttcgggcttcaccgcctggccctctgtggtcacagaggggctcggtggcccaggtggtggttccgcctccaggggcagggccttgtcctgggtctgtgtcagcgggtgcaccatggacatgtgtacattgaggttgtgggccttctcaaaccgccggccacactggtcacaggcaaagtccagctcagtctcagccttgtgtttggtcatgtggtacttgagggatgcccgctgcctgcactggaacccacagacctcacacctgggggacagaggcagataagaaggtgcgagggccacagccctgggagggggtcctgactcacacttactgcaaaggcttggctcccgaatgtcgcatttggtggacgagaaggtgcttccgctgcttgaaggtttgtccacattcgtcacagatatagttccgcacctctgagaggggagagtccagtgagtccaggcccctgatgctccaacctcccggggggacgacgatgacaatgtgaaaccatcacagctgggaagacatttctgcacatggttcaccatgcagtgggcccaagcaaggggcctatgagggcctcgtttattaagatctttaaactgctttatacactgtcacgtggcttcatcagctgtgtgcatttcaggatggtttttaaagaaacctcagaaagctatttccttaaccacagattcttgtcttttttttttttgagatggagtttcgctctgttacccaggctgcagtgcggtggcgtgatctcagctcactgcaacctgcgcctcccgggctcaagcgattcttgtgcctcagcctgccaagtagctgggattacaggcgccccccaccacgcccagctgatttttgtatttttagtagagacagggtttacaccatattggccaggctggtcttgaattcctgaccttgtgatctgcctgcctcggtctcccaaagtgctgggattacatgtgtgagccactgcatccggcctgtgggcttatcttttaatgtcttatttgaggacgtggtgcagcagccttggtgtgggtgctcgaagtccctggcctcctacctgagcctcttctgtccagaggcccagtat

SEQ ID NO: 368762 - DNA, 5752 bp, Homo sapiens
gggcgcagggagccgccgccggggctgtaggcgccaaggccatgtccgactcgtgggtcccgaactccgcctcgggccaggacccagggggccgccggagggcctgggccgagctgctggcgggaagggtcaagagggaaaaatataatcctgaaagggcacagaaattaaaggaatcagctgtgcgcctcctgcgaagccatcaggacctgaatgcccttttgcttgaggtagaaggtccactgtgtaaaaaattgtctctcagcaaagtgattgactgtgacagttctgaggcctatgctaatcattctagttcatttataggctctgctttgcaggatcaagcctcaaggctgggggttcccgtgggtattctctcagccgggatggttgcctctagcgtgggacagatctgcacggctccagcggagaccagtcaccctgtgctgctgactgtggagcagagaaagaagctgtcttccctgttagagtttgctcagtatttattggcacacagtatgttctcccgtctttccttctgtcaagaattatggaaaatacagagttctttgttgcttgaagcggtgtggcatcttcacgtacaaggcattgtgagcctgcaagagctgctggaaagccatcccgacatgcatgctgtgggatcgtggctcttcaggaatctgtgctgcctttgtgaacagatggaagcatcctgccagcatgctgacgtcgccagggccatgctttctgattttgttcaaatgtttgttttgaggggatttcagaaaaactcagatctgagaagaactgtggagcctgaaaaaatgccgcaggtcgcggttgatgtactgcagagaatgctgatttttgcacttgacgctttggctgctggagtacaggaggagtcctccactcacaagatcgtgaggtgctggttcggagtgttcagtggacacacgcttggcagtgtaatttccacagatcctctgaagaggttcttcagtcataccctgactcagatactcactcacagccctgtgctgaaagcatctgatgctgttcagatgcagagagagtggagctttgcgcggacacaccctctgctcacctcactgtaccgcaggctctttgtgatgctgagtgcagaggagttggttggccatttgcaagaagttctggaaacgcaggaggttcactggcagagagtgctctcctttgtgtctgccctggttgtctgctttccagaagcgcagcagctgcttgaagactgggtggcgcgtttgatggcccaggcattcgagagctgccagctggacagcatggtcactgcgttcctggttgtgcgccaggcagcactggagggcccctctgcgttcctgtcatatgcagactggttcaaggcctcctttgggagcacacgaggctaccatggctgcagcaagaaggccctggtcttcctgtttacgttcttgtcagaactcgtgccttttgagtctccccggtacctgcaggtgcacattctccacccacccctggttcccagcaagtaccgctccctcctcacagactacatctcattggccaagacacggctggccgacctcaaggtttctatagaaaacatgggactctacgaggatttgtcatcagctggggacattactgagccccacagccaagctcttcaggatgttgaaaaggccatcatggtgtttgagcatacggggaacatcccagtcaccgtcatggaggccagcatattcaggaggccttactacgtgtcccacttcctccccgccctgctcacacctcgagtgctccccaaagtccctgactcccgtgtggcgtttatagagtctctgaagagagcagataaaatccccccatctctgtactccacctactgccaggcctgctctgctgctgaagagaagccagaagatgcagccctgggagtgagggcagaacccaactctgctgaggagcccctgggacagctcacagctgcactgggagagctgagagcctccatgacagaccccagccagcgtgatgttatatcggcacaggtggcagtgatttctgaaagactgagggctgtcctgggccacaatgaggatgacagcagcgttgagatatcaaagattcagctcagcatcaacacgccgagactggagccacgggaacacatggctgtggacctcctgctgacgtctttctgtcagaacctgatggctgcctccagtgtcgctcccccggagaggcagggtccctgggctgccctcttcgtgaggaccatgtgtggacgtgtgctccctgcagtgctcacccggctctgccagctgctccgtcaccagggcccgagcctgagtgccccacatgtgctggggttggctgccctggccgtgcacctgggtgagtccaggtctgcgctcccagaggtggatgtgggtcctcctgcacctggtgctggccttcctgtccctgcgctctttgacagcctcctgacctgtaggacgagggattccttgttcttctgcctgaaattttgtacagcagcaatttcttactctctctgcaagttttcttcccagtcacgagatactttgtgcagctgcttatctccaggccttattaaaaagtttcagttcctcatgttcagattgttctcagaggcccgacagcctctttctgaggaggacgtagccagcctttcctggagacccttgcaccttccttctgcagactggcagagagctgccctctctctctggacacacagaaccttccgagaggtgttgaaagaggaagatgttcacttaacttaccaagactggttacacctggagctggaaattcaacctgaagctgatgctctttcagatactgaacgctcaaggagttatgaccactcagaaaattctgatttggtctttggtggccgcacaggaaatgaggatattatttccagattgcaggagatggtagctgacctggagctgcagcaagacctcatagtgcctctcggccacaccccttcccaggagcacttcctctttgagattttccgcagacggctccaggctctgacaagcgggtggagcgtggctgccagccttcagagacagagggagctgctaatgtacaaacggatcctcctccgcctgccttcgtctgtcctctgcggcagcagcttccaggcagaacagcccatcactgccagatgcgagcagttcttccacttggtcaactctgagatgagaaacttctgctcccacggaggtgccctgacacaggacatcactgcccacttcttcaggggcctcctgaacgcctgtctgcggagcagagacccctccctgatggtcgacttcatactggccaagtgccagacgaaatgccccttaattttgacctctgctctggtgtggtggccgagcctggagcctgtgctgctctgccggtggaggagacactgccagagcccgctgccccgggaactgcagaagctacaagaaggccggcagtttgccagcgatttcctctcccctgaggctgcctccccagcacccaacccggactggctctcagctgctgcactgcactttgcgattcaacaagtcagggaagaaaacatcaggaagcagctaaagaagctggactgcgagagagaggagctattggttttccttttcttcttctccttgatgggcctgctgtcgtcacatctgacctcaaatagcaccacagacctgccaaaggctttccacgtttgtgcagcaatcctcgagtgtttagagaagaggaagatatcctggctggcactctttcagttgacagagagtgacctcaggctggggcggctcctcctccgtgtggccccggatcagcacaccaggctgctgcctttcgctttttacagtcttctctcctacttccatgaagacgcggccatcagggaagaggccttcctgcatgttgctgtggacatgtacttgaagctggtccagctcttcgtggctggggatacaagcacagtttcacctccagctggcaggagcctggagctcaagggtcagggcaaccccgtggaactgataacaaaagctcgtctttttctgctgcagttaatacctcggtgcccgaaaaagagcttctcacacgtggcagagctgctggctgatcgtggggactgcgacccagaggtgagcgccgccctccagagcagacagcaggctgcccctgacgctgacctgtcccaggagcctcatctcttctgacgggacctgccactgcacaccagcccagctcccgtgtaaataatttattacaagcataacatggagctcttgttgcactaaaaagtggattacaaatctcctcgactgctttagtggggaaaggaatcaattatttatgaactgtccggccccgagtcactcagcgtttgcgggaaaataaaccactggtcccagagcagaggaaggctacttgagccggacaccaagcccgcctccagcaccaagggcgggcagcaccctccgaccctcccatgcgggtgcacacgaagggtgaggctgacacagccactgcggagtccaggctgctagaggtgctcatcctcactgccgtcctcaggtgggttcgggcttcaccgcctggccctctgtggtcacagaggggctcggtggcccaggtggtggttccgcctccaggggcagggccttgtcctgggtctgtgtcagcgggtgcaccatggacatgtgtacattgaggttgtgggccttctcaaaccgccggccacactggtcacaggcaaagtccagctcagtctcagccttgtgtttggtcatgtggtacttgagggatgcccgctgcctgcactggaacccacagacctcacacctgggggacagaggcagataagaaggtgcgagggccacagccctgggagggggtcctgactcacacttactgcaaaggcttggctcccgaatgtcgcatttggtggacgagaaggtgcttccgctgcttgaaggtttgtccacattcgtcacagatatagttccgcacctctgagaggggagagtccagtgagtccaggcccctgatgctccaacctcccggggggacgacgatgacaatgtgaaaccatcacagctgggaagacatttctgcacatggttcaccatgcagtgggcccaagcaaggggcctatgagggcctcgtttattaagatctttaaactgctttatacactgtcacgtggcttcatcagctgtgtgcatttcaggatggtttttaaagaaacctcagaaagctatttccttaaccacagattcttgtcttttttttttttgagatggagtttcgctctgttacccaggctgcagtgcggtggcgtgatctcagctcactgcaacctgcgcctcccgggctcaagcgattcttgtgcctcagcctgccaagtagctgggattacaggcgccccccaccacgcccagctgatttttgtatttttagtagagacagggtttacaccatattggccaggctggtcttgaattcctgaccttgtgatctgcctgcctcggtctcccaaagtgctgggattacatgtgtgagccactgcatccggcctgtgggcttatcttttaatgtcttatttgaggacgtggtgcagcagccttggtgtgggtgctcgaagtccctggcctcctacctgagcctcttctgtccagaggcccagtat

SEQ ID NO: 368763 - DNA, 5813 bp, Homo sapiens
  misc_feature (31)..(32): n is a, c, g, or t
taacttacggctaggtacgaggctgggtgtnnagggctgggcgagctgctggcgggaagggtcaagagggaaaaatataatcctgaaagggcacagaaattaaaggaatcagctgtgcgcctcctgcgaagccatcaggacctgaatgcccttttgcttgaggtagaaggtccactgtgtaaaaaattgtctctcagcaaagtgattgactgtgacagttctgaggcctatgctaatcattctagttcatttataggctctgctttgcaggatcaagcctcaaggctgggggttcccgtgggtattctctcagccgggatggttgcctctagcgtgggacagatctgcacggctccagcggagaccagtcaccctgtgctgctgactgtggagcagagaaagaagctgtcttccctgttagagtttgctcagtatttattggcacacagtatgttctcccgtctttccttctgtcaagaattatggaaaatacagagttctttgttgcttgaagcggtgtggcatcttcacgtacaaggcattgtgagcctgcaagagctgctggaaagccatcccgacatgcatgctgtgggatcgtggctcttcaggaatctgtgctgcctttgtgaacagatggaagcatcctgccagcatgctgacgtcgccagggccatgctttctgattttgttcaaatgtttgttttgaggggatttcagaaaaactcagatctgagaagaactgtggagcctgaaaaaatgccgcaggtcgcggttgatgtactgcagagaatgctgatttttgcacttgacgctttggctgctggagtacaggaggagtcctccactcacaagatcgtgaggtgctggttcggagtgttcagtggacacacgcttggcagtgtaatttccacagatcctctgaagaggttcttcagtcataccctgactcagatactcactcacagccctgtgctgaaagcatctgatgctgttcagatgcagagagagtggagctttgcgcggacacaccctctgctcacctcactgtaccgcaggctctttgtgatgctgagtgcagaggagttggttggccatttgcaagaagttctggaaacgcaggaggttcactggcagagagtgctctcctttgtgtctgccctggttgtctgctttccagaagcgcagcagctgcttgaagactgggtggcgcgtttgatggcccaggcattcgagagctgccagctggacagcatggtcactgcgttcctggttgtgcgccaggcagcactggagggcccctctgcgttcctgtcatatgcagactggttcaaggcctcctttgggagcacacgaggctaccatggctgcagcaagaaggccctggtcttcctgtttacgttcttgtcagaactcgtgccttttgagtctccccggtacctgcaggtgcacattctccacccacccctggttcccagcaagtaccgctccctcctcacagactacatctcattggccaagacacggctggccgacctcaaggtttctatagaaaacatgggactctacgaggatttgtcatcagctggggacattactgagccccacagccaagctcttcaggatgttgaaaaggccatcatggtgtttgagcatacggggaacatcccagtcaccgtcatggaggccagcatattcaggaggccttactacgtgtcccacttcctccccgccctgctcacacctcgagtgctccccaaagtccctgactcccgtgtggcgtttatagagtctctgaagagagcagataaaatccccccatctctgtactccacctactgccaggcctgctctgctgctgaagagaagccagaagatgcagccctgggagtgagggcagaacccaactctgctgaggagcccctgggacagctcacagctgcactgggagagctgagagcctccatgacagaccccagccagcgtgatgttatatcggcacaggtggcagtgatttctgaaagactgagggctgtcctgggccacaatgaggatgacagcagcgttgagatatcaaagattcagctcagcatcaacacgccgagactggagccacgggaacacatggctgtggacctcctgctgacgtctttctgtcagaacctgatggctgcctccagtgtcgctcccccggagaggcagggtccctgggctgccctcttcgtgaggaccatgtgtggacgtgtgctccctgcagtgctcacccggctctgccagctgctccgtcaccagggcccgagcctgagtgccccacatgtgctggggttggctgccctggccgtgcacctgggtgagtccaggtctgcgctcccagaggtggatgtgggtcctcctgcacctggtgctggccttcctgtccctgcgctctttgacagcctcctgacctgtaggacgagggattccttgttcttctgcctgaaattttgtacagcagcaatttcttactctctctgcaagttttcttcccagtcacgagatactttgtgcagctgcttatctccaggccttattaaaaagtttcagttcctcatgttcagattgttctcagaggcccgacagcctctttctgaggaggacgtagccagcctttcctggagacccttgcaccttccttctgcagactggcagagagctgccctctctctctggacacacagaaccttccgagaggtgttgaaagaggaagatgttcacttaacttaccaagactggttacacctggagctggaaattcaacctgaagctgatgctctttcagatactgaacggcaggacttccaccagtgggcgatccatgagcactttctccctgagtcctcggcttcagggggctgtgacggagacctgcaggctgcgtgtaccattcttgtcaacgcactgatggatttccaccaaagctcaaggagttatgaccactcagaaaattctgatttggtctttggtggccgcacaggaaatgaggatattatttccagattgcaggagatggtagctgacctggagctgcagcaagacctcatagtgcctctcggccacaccccttcccaggagcacttcctctttgagattttccgcagacggctccaggctctgacaagcgggtggagcgtggctgccagccttcagagacagagggagctgctaatgtacaaacggatcctcctccgcctgccttcgtctgtcctctgcggcagcagcttccaggcagaacagcccatcactgccagatgcgagcagttcttccacttggtcaactctgagatgagaaacttctgctcccacggaggtgccctgacacaggacatcactgcccacttcttcaggggcctcctgaacgcctgtctgcggagcagagacccctccctgatggtcgacttcatactggccaagtgccagacgaaatgccccttaattttgacctctgctctggtgtggtggccgagcctggagcctgtgctgctctgccggtggaggagacactgccagagcccgctgccccgggaactgcagaagctacaagaaggccggcagtttgccagcgatttcctctcccctgaggctgcctccccagcacccaacccggactggctctcagctgctgcactgcactttgcgattcaacaagtcagggaagaaaacatcaggaagcagctaaagaagctggactgcgagagagaggagctattggttttccttttcttcttctccttgatgggcctgctgtcgtcacatctgacctcaaatagcaccacagacctgccaaaggctttccacgtttgtgcagcaatcctcgagtgtttagagaagaggaagatatcctggctggcactctttcagttgacagagagtgacctcaggctggggcggctcctcctccgtgtggccccggatcagcacaccaggctgctgcctttcgctttttacagtcttctctcctacttccatgaagacgcggccatcagggaagaggccttcctgcatgttgctgtggacatgtacttgaagctggtccagctcttcgtggctggggatacaagcacagtttcacctccagctggcaggagcctggagctcaagggtcagggcaaccccgtggaactgataacaaaagctcgtctttttctgctgcagttaatacctcggtgcccgaaaaagagcttctcacacgtggcagagctgctggctgatcgtggggactgcgacccagaggtgagcgccgccctccagagcagacagcaggctgcccctgacgctgacctgtcccaggagcctcatctcttctgacgggacctgccactgcacaccagcccagctcccgtgtaaataatttattacaagcataacatggagctcttgttgcactaaaaagtggattacaaatctcctcgactgctttagtggggaaaggaatcaattatttatgaactgtccggccccgagtcactcagcgtttgcgggaaaataaaccactggtcccagagcagaggaaggctacttgagccggacaccaagcccgcctccagcaccaagggcgggcagcaccctccgaccctcccatgcgggtgcacacgaagggtgaggctgacacagccactgcggagtccaggctgctagaggtgctcatcctcactgccgtcctcaggtgggttcgggcttcaccgcctggccctctgtggtcacagaggggctcggtggcccaggtggtggttccgcctccaggggcagggccttgtcctgggtctgtgtcagcgggtgcaccatggacatgtgtacattgaggttgtgggccttctcaaaccgccggccacactggtcacaggcaaagtccagctcagtctcagccttgtgtttggtcatgtggtacttgagggatgcccgctgcctgcactggaacccacagacctcacacctgggggacagaggcagataagaaggtgcgagggccacagccctgggagggggtcctgactcacacttactgcaaaggcttggctcccgaatgtcgcatttggtggacgagaaggtgcttccgctgcttgaaggtttgtccacattcgtcacagatatagttccgcacctctgagaggggagagtccagtgagtccaggcccctgatgctccaacctcccggggggacgacgatgacaatgtgaaaccatcacagctgggaagacatttctgcacatggttcaccatgcagtgggcccaagcaaggggcctatgagggcctcgtttattaagatctttaaactgctttatacactgtcacgtggcttcatcagctgtgtgcatttcaggatggtttttaaagaaacctcagaaagctatttccttaaccacagattcttgtcttttttttttttgagatggagtttcgctctgttacccaggctgcagtgcggtggcgtgatctcagctcactgcaacctgcgcctcccgggctcaagcgattcttgtgcctcagcctgccaagtagctgggattacaggcgccccccaccacgcccagctgatttttgtatttttagtagagacagggtttacaccatattggccaggctggtcttgaattcctgaccttgtgatctgcctgcctcggtctcccaaagtgctgggattacatgtgtgagccactgcatccggcctgtgggcttatcttttaatgtcttatttgaggacgtggtgcagcagccttggtgtgggtgctcgaagtccctggcctcctacctgagcctcttctgtccagaggcccagtat

SEQ ID NO: 368764 - DNA, 5818 bp, Homo sapiens
gggcgcagggagccgccgccggggctgtaggcgccaaggccatgtccgactcgtgggtcccgaactccgcctcgggccaggacccagggggccgccggagggcctgggccgagctgctggcgggaagggtcaagagggaaaaatataatcctgaaagggcacagaaattaaaggaatcagctgtgcgcctcctgcgaagccatcaggacctgaatgcccttttgcttgaggtagaaggtccactgtgtaaaaaattgtctctcagcaaagtgattgactgtgacagttctgaggcctatgctaatcattctagttcatttataggctctgctttgcaggatcaagcctcaaggctgggggttcccgtgggtattctctcagccgggatggttgcctctagcgtgggacagatctgcacggctccagcggagaccagtcaccctgtgctgctgactgtggagcagagaaagaagctgtcttccctgttagagtttgctcagtatttattggcacacagtatgttctcccgtctttccttctgtcaagaattatggaaaatacagagttctttgttgcttgaagcggtgtggcatcttcacgtacaaggcattgtgagcctgcaagagctgctggaaagccatcccgacatgcatgctgtgggatcgtggctcttcaggaatctgtgctgcctttgtgaacagatggaagcatcctgccagcatgctgacgtcgccagggccatgctttctgattttgttcaaatgtttgttttgaggggatttcagaaaaactcagatctgagaagaactgtggagcctgaaaaaatgccgcaggtcgcggttgatgtactgcagagaatgctgatttttgcacttgacgctttggctgctggagtacaggaggagtcctccactcacaagatcgtgaggtgctggttcggagtgttcagtggacacacgcttggcagtgtaatttccacagatcctctgaagaggttcttcagtcataccctgactcagatactcactcacagccctgtgctgaaagcatctgatgctgttcagatgcagagagagtggagctttgcgcggacacaccctctgctcacctcactgtaccgcaggctctttgtgatgctgagtgcagaggagttggttggccatttgcaagaagttctggaaacgcaggaggttcactggcagagagtgctctcctttgtgtctgccctggttgtctgctttccagaagcgcagcagctgcttgaagactgggtggcgcgtttgatggcccaggcattcgagagctgccagctggacagcatggtcactgcgttcctggttgtgcgccaggcagcactggagggcccctctgcgttcctgtcatatgcagactggttcaaggcctcctttgggagcacacgaggctaccatggctgcagcaagaaggccctggtcttcctgtttacgttcttgtcagaactcgtgccttttgagtctccccggtacctgcaggtgcacattctccacccacccctggttcccagcaagtaccgctccctcctcacagactacatctcattggccaagacacggctggccgacctcaaggtttctatagaaaacatgggactctacgaggatttgtcatcagctggggacattactgagccccacagccaagctcttcaggatgttgaaaaggccatcatggtgtttgagcatacggggaacatcccagtcaccgtcatggaggccagcatattcaggaggccttactacgtgtcccacttcctccccgccctgctcacacctcgagtgctccccaaagtccctgactcccgtgtggcgtttatagagtctctgaagagagcagataaaatccccccatctctgtactccacctactgccaggcctgctctgctgctgaagagaagccagaagatgcagccctgggagtgagggcagaacccaactctgctgaggagcccctgggacagctcacagctgcactgggagagctgagagcctccatgacagaccccagccagcgtgatgttatatcggcacaggtggcagtgatttctgaaagactgagggctgtcctgggccacaatgaggatgacagcagcgttgagatatcaaagattcagctcagcatcaacacgccgagactggagccacgggaacacatggctgtggacctcctgctgacgtctttctgtcagaacctgatggctgcctccagtgtcgctcccccggagaggcagggtccctgggctgccctcttcgtgaggaccatgtgtggacgtgtgctccctgcagtgctcacccggctctgccagctgctccgtcaccagggcccgagcctgagtgccccacatgtgctggggttggctgccctggccgtgcacctgggtgagtccaggtctgcgctcccagaggtggatgtgggtcctcctgcacctggtgctggccttcctgtccctgcgctctttgacagcctcctgacctgtaggacgagggattccttgttcttctgcctgaaattttgtacagcagcaatttcttactctctctgcaagttttcttcccagtcacgagatactttgtgcagctgcttatctccaggccttattaaaaagtttcagttcctcatgttcagattgttctcagaggcccgacagcctctttctgaggaggacgtagccagcctttcctggagacccttgcaccttccttctgcagactggcagagagctgccctctctctctggacacacagaaccttccgagaggtgttgaaagaggaagatgttcacttaacttaccaagactggttacacctggagctggaaattcaacctgaagctgatgctctttcagatactgaacggcaggacttccaccagtgggcgatccatgagcactttctccctgagtcctcggcttcagggggctgtgacggagacctgcaggctgcgtgtaccattcttgtcaacgcactgatggatttccaccaaagctcaaggagttatgaccactcagaaaattctgatttggtctttggtggccgcacaggaaatgaggatattatttccagattgcaggagatggtagctgacctggagctgcagcaagacctcatagtgcctctcggccacaccccttcccaggagcacttcctctttgagattttccgcagacggctccaggctctgacaagcgggtggagcgtggctgccagccttcagagacagagggagctgctaatgtacaaacggatcctcctccgcctgccttcgtctgtcctctgcggcagcagcttccaggcagaacagcccatcactgccagatgcgagcagttcttccacttggtcaactctgagatgagaaacttctgctcccacggaggtgccctgacacaggacatcactgcccacttcttcaggggcctcctgaacgcctgtctgcggagcagagacccctccctgatggtcgacttcatactggccaagtgccagacgaaatgccccttaattttgacctctgctctggtgtggtggccgagcctggagcctgtgctgctctgccggtggaggagacactgccagagcccgctgccccgggaactgcagaagctacaagaaggccggcagtttgccagcgatttcctctcccctgaggctgcctccccagcacccaacccggactggctctcagctgctgcactgcactttgcgattcaacaagtcagggaagaaaacatcaggaagcagctaaagaagctggactgcgagagagaggagagcaccacagacctgccaaaggctttccacgtttgtgcagcaatcctcgagtgtttagagaagaggaagatatcctggctggcactctttcagttgacagagagtgacctcaggctggggcggctcctcctccgtgtggccccggatcagcacaccaggctgctgcctttcgctttttacagtcttctctcctacttccatgaagacgcggccatcagggaagaggccttcctgcatgttgctgtggacatgtacttgaagctggtccagctcttcgtggctggggatacaagcacagtttcacctccagctggcaggagcctggagctcaagggtcagggcaaccccgtggaactgataacaaaagctcgtctttttctgctgcagttaatacctcggtgcccgaaaaagagcttctcacacgtggcagagctgctggctgatcgtggggactgcgacccagaggtgagcgccgccctccagagcagacagcaggctgcccctgacgctgacctgtcccaggagcctcatctcttctgacgggacctgccactgcacaccagcccagctcccgtgtaaataatttattacaagcataacatggagctcttgttgcactaaaaagtggattacaaatctcctcgactgctttagtggggaaaggaatcaattatttatgaactgtccggccccgagtcactcagcgtttgcgggaaaataaaccactggtcccagagcagaggaaggctacttgagccggacaccaagcccgcctccagcaccaagggcgggcagcaccctccgaccctcccatgcgggtgcacacgaagggtgaggctgacacagccactgcggagtccaggctgctagaggtgctcatcctcactgccgtcctcaggtgggttcgggcttcaccgcctggccctctgtggtcacagaggggctcggtggcccaggtggtggttccgcctccaggggcagggccttgtcctgggtctgtgtcagcgggtgcaccatggacatgtgtacattgaggttgtgggccttctcaaaccgccggccacactggtcacaggcaaagtccagctcagtctcagccttgtgtttggtcatgtggtacttgagggatgcccgctgcctgcactggaacccacagacctcacacctgggggacagaggcagataagaaggtgcgagggccacagccctgggagggggtcctgactcacacttactgcaaaggcttggctcccgaatgtcgcatttggtggacgagaaggtgcttccgctgcttgaaggtttgtccacattcgtcacagatatagttccgcacctctgagaggggagagtccagtgagtccaggcccctgatgctccaacctcccggggggacgacgatgacaatgtgaaaccatcacagctgggaagacatttctgcacatggttcaccatgcagtgggcccaagcaaggggcctatgagggcctcgtttattaagatctttaaactgctttatacactgtcacgtggcttcatcagctgtgtgcatttcaggatggtttttaaagaaacctcagaaagctatttccttaaccacagattcttgtcttttttttttttgagatggagtttcgctctgttacccaggctgcagtgcggtggcgtgatctcagctcactgcaacctgcgcctcccgggctcaagcgattcttgtgcctcagcctgccaagtagctgggattacaggcgccccccaccacgcccagctgatttttgtatttttagtagagacagggtttacaccatattggccaggctggtcttgaattcctgaccttgtgatctgcctgcctcggtctcccaaagtgctgggattacatgtgtgagccactgcatccggcctgtgggcttatcttttaatgtcttatttgaggacgtggtgcagcagccttggtgtgggtgctcgaagtccctggcctcctacctgagcctcttctgtccagaggcccagtat

SEQ ID NO: 368765 - DNA, 6321 bp, Homo sapiens
gggcgcagggagccgccgccggggctgtaggcgccaaggccatgtccgactcgtgggtcccgaactccgcctcgggccaggacccagggggccgccggagggcctgggccgagctgctggcgggaagggtcaagagggaaaaatataatcctgaaagggcacagaaattaaaggaatcagctgtgcgcctcctgcgaagccatcaggacctgaatgcccttttgcttgaggtagaaggtccactgtgtaaaaaattgtctctcagcaaagtgattgactgtgacagttctgaggcctatgctaatcattctagttcatttataggctctgctttgcaggatcaagcctcaaggctgggggttcccgtgggtattctctcagccgggatggttgcctctagcgtgggacagatctgcacggctccagcggagaccagtcaccctgtgctgctgactgtggagcagagaaagaagctgtcttccctgttagagtttgctcagtatttattggcacacagtatgttctcccgtctttccttctgtcaagaattatggaaaatacagagttctttgttgcttgaagcggtgtggcatcttcacgtacaaggcattgtgagcctgcaagagctgctggaaagccatcccgacatgcatgctgtgggatcgtggctcttcaggaatctgtgctgcctttgtgaacagatggaagcatcctgccagcatgctgacgtcgccagggccatgctttctgattttgttcaaatgtttgttttgaggggatttcagaaaaactcagatctgagaagaactgtggagcctgaaaaaatgccgcaggtcgcggttgatgtactgcagagaatgctgatttttgcacttgacgctttggctgctggagtacaggaggagtcctccactcacaagatcgtgaggtgctggttcggagtgttcagtggacacacgcttggcagtgtaatttccacagatcctctgaagaggttcttcagtcataccctgactcagatactcactcacagccctgtgctgaaagcatctgatgctgttcagatgcagagagagtggagctttgcgcggacacaccctctgctcacctcactgtaccgcaggctctttgtgatgctgagtgcagaggagttggttggccatttgcaagaagttctggaaacgcaggaggttcactggcagagagtgctctcctttgtgtctgccctggttgtctgctttccagaagcgcagcagctgcttgaagactgggtggcgcgtttgatggcccaggcattcgagagctgccagctggacagcatggtcactgcgttcctggttgtgcgccaggcagcactggagggcccctctgcgttcctgtcatatgcagactggttcaaggcctcctttgggagcacacgaggctaccatggctgcagcaagaaggccctggtcttcctgtttacgttcttgtcagaactcgtgccttttgagtctccccggtacctgcaggtgcacattctccacccacccctggttcccagcaagtaccgctccctcctcacagactacatctcattggccaagacacggctggccgacctcaaggtttctatagaaaacatgggactctacgaggatttgtcatcagctggggacattactgagccccacagccaagctcttcaggatgttgaaaaggccatcatggtgtttgagcatacggggaacatcccagtcaccgtcatggaggccagcatattcaggaggccttactacgtgtcccacttcctccccgccctgctcacacctcgagtgctccccaaagtccctgactcccgtgtggcgtttatagagtctctgaagagagcagataaaatccccccatctctgtactccacctactgccaggcctgctctgctgctgaagagaagccagaagatgcagccctgggagtgagggcagaacccaactctgctgaggagcccctgggacagctcacagctgcactgggagagctgagagcctccatgacagaccccagccagcgtgatgttatatcggcacaggtggcagtgatttctgaaagactgagggctgtcctgggccacaatgaggatgacagcagcgttgagatatcaaagattcagctcagcatcaacacgccgagactggagccacgggaacacatggctgtggacctcctgctgacgtctttctgtcagaacctgatggctgcctccagtgtcgctcccccggagaggcagggtccctgggctgccctcttcgtgaggaccatgtgtggacgtgtgctccctgcagtgctcacccggctctgccagctgctccgtcaccagggcccgagcctgagtgccccacatgtgctggggttggctgccctggccgtgcacctgggtgagtccaggtctgcgctcccagaggtggatgtgggtcctcctgcacctggtgctggccttcctgtccctgcgctctttgacagcctcctgacctgtaggacgagggattccttgttcttctgcctgaaattttgtacagcagcaatttcttactctctctgcaagttttcttcccagtcacgagatactttgtgcagctgcttatctccaggccttattaaaaagtttcagttcctcatgttcagattgttctcagaggcccgacagcctctttctgaggaggacgtagccagcctttcctggagacccttgcaccttccttctgcagactggcagagagctgccctctctctctggacacacagaaccttccgagaggtgttgaaagaggaagatgttcacttaacttaccaagactggttacacctggagctggaaattcaacctgaagctgatgctctttcagatactgaacggcaggacttccaccagtgggcgatccatgagcactttctccctgagtcctcggcttcagggggctgtgacggagacctgcaggctgcgtgtaccattcttgtcaacgcactgatggatttccaccaaagctcaaggagttatgaccactcagaaaattctgatttggtctttggtggccgcacaggaaatgaggatattatttccagattgcaggagatggtagctgacctggagctgcagcaagacctcatagtgcctctcggccacaccccttcccaggagcacttcctctttgagattttccgcagacggctccaggctctgacaagcgggtggagcgtggctgccagccttcagagacagagggagctgctaatgtacaaacggatcctcctccgcctgccttcgtctgtcctctgcggcagcagcttccaggcagaacagcccatcactgccagatgcgagcagttcttccacttggtcaactctgagatgagaaacttctgctcccacggaggtgccctgacacaggacatcactgcccacttcttcaggggcctcctgaacgcctgtctgcggagcagagacccctccctgatggtcgacttcatactggccaagtgccagacgaaatgccccttaattttgacctctgctctggtgtggtggccgagcctggagcctgtgctgctctgccggtggaggagacactgccagagcccgctgccccgggaactgcagaagctacaagaaggccggcagtttgccagcgatttcctctcccctgaggctgcctccccagcacccaacccggactggctctcagctgctgcactgcactttgcgattcaacaagtcagggaagaaaacatcaggaagcagctaaagaagctggactgcgagagagaggagctattggttttccttttcttcttctccttgatgggcctgctgtcgtcacatctgacctcaaatagcaccacagacctgccaaaggctttccacgtttgtgcagcaatcctcgagtgtttagagaagaggaagatatcctggctggcactctttcagttgacagagagtggtaagaaacacgctgctgaggcacaaatgcggagggccgctcttttcagaggcatcttgcaaatggttaagaacgagccctccttgaggttccttgctaagtaagtttataagctccattttagttgggacagattaagcacaaacttgtttaaagcaataagataatttactggctcactggtcaaccccaggaccaatgggcctatcatggggactgcctctctctgcaccacacccaccctcctgcaagaggtcgacccccccatcctctcccagctgctgacaggtacctgggtatcctcagctcaggctgttcgccccacactatccccacaggcaggcctcccagggtacacgtcccgacccccaggggtgtccccagcactgataataggcagagatgtccagagttgcctgagccacttcttggtgttgcagacctcaggctggggcggctcctcctccgtgtggccccggatcagcacaccaggctgctgcctttcgctttttacagtcttctctcctacttccatgaagacgcggccatcagggaagaggccttcctgcatgttgctgtggacatgtacttgaagctggtccagctcttcgtggctggggatacaagcacagtttcacctccagctggcaggagcctggagctcaagggtcagggcaaccccgtggaactgataacaaaagctcgtctttttctgctgcagttaatacctcggtgcccgaaaaagagcttctcacacgtggcagagctgctggctgatcgtggggactgcgacccagaggtgagcgccgccctccagagcagacagcaggctgcccctgacgctgacctgtcccaggagcctcatctcttctgacgggacctgccactgcacaccagcccagctcccgtgtaaataatttattacaagcataacatggagctcttgttgcactaaaaagtggattacaaatctcctcgactgctttagtggggaaaggaatcaattatttatgaactgtccggccccgagtcactcagcgtttgcgggaaaataaaccactggtcccagagcagaggaaggctacttgagccggacaccaagcccgcctccagcaccaagggcgggcagcaccctccgaccctcccatgcgggtgcacacgaagggtgaggctgacacagccactgcggagtccaggctgctagaggtgctcatcctcactgccgtcctcaggtgggttcgggcttcaccgcctggccctctgtggtcacagaggggctcggtggcccaggtggtggttccgcctccaggggcagggccttgtcctgggtctgtgtcagcgggtgcaccatggacatgtgtacattgaggttgtgggccttctcaaaccgccggccacactggtcacaggcaaagtccagctcagtctcagccttgtgtttggtcatgtggtacttgagggatgcccgctgcctgcactggaacccacagacctcacacctgggggacagaggcagataagaaggtgcgagggccacagccctgggagggggtcctgactcacacttactgcaaaggcttggctcccgaatgtcgcatttggtggacgagaaggtgcttccgctgcttgaaggtttgtccacattcgtcacagatatagttccgcacctctgagaggggagagtccagtgagtccaggcccctgatgctccaacctcccggggggacgacgatgacaatgtgaaaccatcacagctgggaagacatttctgcacatggttcaccatgcagtgggcccaagcaaggggcctatgagggcctcgtttattaagatctttaaactgctttatacactgtcacgtggcttcatcagctgtgtgcatttcaggatggtttttaaagaaacctcagaaagctatttccttaaccacagattcttgtcttttttttttttgagatggagtttcgctctgttacccaggctgcagtgcggtggcgtgatctcagctcactgcaacctgcgcctcccgggctcaagcgattcttgtgcctcagcctgccaagtagctgggattacaggcgccccccaccacgcccagctgatttttgtatttttagtagagacagggtttacaccatattggccaggctggtcttgaattcctgaccttgtgatctgcctgcctcggtctcccaaagtgctgggattacatgtgtgagccactgcatccggcctgtgggcttatcttttaatgtcttatttgaggacgtggtgcagcagccttggtgtgggtgctcgaagtccctggcctcctacctgagcctcttctgtccagaggcccagtat

SEQ ID NO: 368766 - DNA, 6683 bp, Homo sapiens
gggcgcagggagccgccgccggggctgtaggcgccaaggccatgtccgactcgtgggtcccgaactccgcctcgggccaggacccagggggccgccggagggcctgggccgagctgctggcgggaagggtcaagagggaaaaatataatcctgaaagggcacagaaattaaaggaatcagctgtgcgcctcctgcgaagccatcaggacctgaatgcccttttgcttgaggtagaaggtccactgtgtaaaaaattgtctctcagcaaagtgattgactgtgacagttctgaggcctatgctaatcattctagttcatttataggctctgctttgcaggatcaagcctcaaggctgggggttcccgtgggtattctctcagccgggatggttgcctctagcgtgggacagatctgcacggctccagcggagaccagtcaccctgtgctgctgactgtggagcagagaaagaagctgtcttccctgttagagtttgctcagtatttattggcacacagtatgttctcccgtctttccttctgtcaagaattatggaaaatacagagttctttgttgcttgaagcggtgtggcatcttcacgtacaaggcattgtgagcctgcaagagctgctggaaagccatcccgacatgcatgctgtgggatcgtggctcttcaggaatctgtgctgcctttgtgaacagatggaagcatcctgccagcatgctgacgtcgccagggccatgctttctgattttgttcaaatgtttgttttgaggggatttcagaaaaactcagatctgagaagaactgtggagcctgaaaaaatgccgcaggtcgcggttgatgtactgcagagaatgctgatttttgcacttgacgctttggctgctggagtacaggaggagtcctccactcacaagatcgtgaggtgctggttcggagtgttcagtggacacacgcttggcagtgtaatttccacagatcctctgaagaggttcttcagtcataccctgactcagatactcactcacagccctgtgctgaaagcatctgatgctgttcagatgcagagagagtggagctttgcgcggacacaccctctgctcacctcactgtaccgcaggctctttgtgatgctgagtgcagaggagttggttggccatttgcaagaagttctggaaacgcaggaggttcactggcagagagtgctctcctttgtgtctgccctggttgtctgctttccagaagcgcagcagctgcttgaagactgggtggcgcgtttgatggcccaggcattcgagagctgccagctggacagcatggtcactgcgttcctggttgtgcgccaggcagcactggagggcccctctgcgttcctgtcatatgcagactggttcaaggcctcctttgggagcacacgaggctaccatggctgcagcaagaaggccctggtcttcctgtttacgttcttgtcagaactcgtgccttttgagtctccccggtacctgcaggtgcacattctccacccacccctggttcccagcaagtaccgctccctcctcacagactacatctcattggccaagacacggctggccgacctcaaggtttctatagaaaacatgggactctacgaggatttgtcatcagctggggacattactgagccccacagccaagctcttcaggatgttgaaaaggccatcatggtgtttgagcatacggggaacatcccagtcaccgtcatggaggccagcatattcaggaggccttactacgtgtcccacttcctccccgccctgctcacacctcgagtgctccccaaagtccctgactcccgtgtggcgtttatagagtctctgaagagagcagataaaatccccccatctctgtactccacctactgccaggcctgctctgctgctgaagagaagccagaagatgcagccctgggagtgagggcagaacccaactctgctgaggagcccctgggacagctcacagctgcactgggagagctgagagcctccatgacagaccccagccagcgtgatgttatatcggcacaggtggcagtgatttctgaaagactgagggctgtcctgggccacaatgaggatgacagcagcgttgagatatcaaagattcagctcagcatcaacacgccgagactggagccacgggaacacatggctgtggacctcctgctgacgtctttctgtcagaacctgatggctgcctccagtgtcgctcccccggagaggcagggtccctgggctgccctcttcgtgaggaccatgtgtggacgtgtgctccctgcagtgctcacccggctctgccagctgctccgtcaccagggcccgagcctgagtgccccacatgtgctggggttggctgccctggccgtgcacctgggtgagtccaggtctgcgctcccagaggtggatgtgggtcctcctgcacctggtgctggccttcctgtccctgcgctctttgacagcctcctgacctgtaggacgagggattccttgttcttctgcctgaaattttgtacagcagcaatttcttactctctctgcaagttttcttcccagtcacgagatactttgtgcagctgcttatctccaggccttattaaaaagtttcagttcctcatgttcagattgttctcagaggcccgacagcctctttctgaggaggacgtagccagcctttcctggagacccttgcaccttccttctgcagactggcagagagctgccctctctctctggacacacagaaccttccgagaggtgttgaaagaggaagatgttcacttaacttaccaagactggttacacctggagctggaaattcaacctgaagctgatgctctttcagatactgaacggcaggacttccaccagtgggcgatccatgagcactttctccctgagtcctcggcttcagggggctgtgacggagacctgcaggctgcgtgtaccattcttgtcaacgcactgatggatttccaccaaagctcaaggagttatgaccactcagaaaattctgatttggtctttggtggccgcacaggaaatgaggatattatttccagattgcaggagatggtagctgacctggagctgcagcaagacctcatagtgcctctcggccacaccccttcccaggagcacttcctctttgagattttccgcagacggctccaggctctgacaagcgggtggagcgtggctgccagccttcagagacagagggagctgctaatgtacaaacggatcctcctccgcctgccttcgtctgtcctctgcggcagcagcttccaggcagaacagcccatcactgccagatgcgagcagttcttccacttggtcaactctgagatgagaaacttctgctcccacggaggtgccctgacacaggacatcactgcccacttcttcaggggcctcctgaacgcctgtctgcggagcagagacccctccctgatggtcgacttcatactggccaagtgccagacgaaatgccccttaattttgacctctgctctggtgtggtggccgagcctggagcctgtgctgctctgccggtggaggagacactgccagagcccgctgccccgggaactgcagaagctacaagaaggccggcagtttgccagcgatttcctctcccctgaggctgcctccccagcacccaacccggactggctctcagctgctgcactgcactttgcgattcaacaagtcagggaagaaaacatcaggaagcagctaaagaagctggactgcgagagagaggagctattggttttccttttcttcttctccttgatgggcctgctgtcgtcacatctgacctcaaatagcaccacagacctgccaaaggctttccacgtttgtgcagcaatcctcgagtgtttagagaagaggaagatatcctggctggcactctttcagttgacagagagtggtaagaaacacgctgctgaggcacaaatgcggagggccgctcttttcagaggcatcttgcaaatggttaagaacgagccctccttgaggttccttgctaagtaagtttataagctccattttagttgggacagattaagcacaaacttgtttaaagcaataagataatttactggctcactggtcaaccccaggaccaatgggcctatcatggggactgcctctctctgcaccacacccaccctcctgcaagaggtcgacccccccatcctctcccagctgctgacaggtacctgggtatcctcagctcaggctgttcgccccacactatccccacaggcaggcctcccagggtacacgtcccgacccccaggggtgtccccagcactgataataggcagagatgtccagagttgcctgagccacttcttggtgttgcagacctcaggctggggcggctcctcctccgtgtggccccggatcagcacaccaggctgctgcctttcgctttttacagggtacctccacccacagggctggtcagggctgggcagtgtttcccagacccccatctcagcacctctgggtcccgccagatgggaagggttgtctgtgcctctgctccacagatgagcagtatcccttggcatcacctgctacctttccagcagtctgtagccatttgtcactatgtctttacctctagtcttctctcctacttccatgaagacgcggccatcagggaagaggccttcctgcatgttgctgtggacatgtacttgaagctggtccagctcttcgtggctggggatacaagcacagtttcacctccagctggcaggagcctggagctcaagggtcagggcaaccccgtggaactgataacaaaagctcgtctttttctgctgcagttaatacctcggtgcccgaaaaagagcttctcacacgtggcagaggtaacgtcaagatgcccaccttgggccacgtgggggacatgagaattgacagctgcctgggccatgtgcctgcctggctggcaatacaactcgactatttctgccagagcccctcccctgtggtctgaggcctagtgggcggcatgggctgaggacctgctcctctctcacagctgctggctgatcgtggggactgcgacccagaggtgagcgccgccctccagagcagacagcaggctgcccctgacgctgacctgtcccaggagcctcatctcttctgacgggacctgccactgcacaccagcccagctcccgtgtaaataatttattacaagcataacatggagctcttgttgcactaaaaagtggattacaaatctcctcgactgctttagtggggaaaggaatcaattatttatgaactgtccggccccgagtcactcagcgtttgcgggaaaataaaccactggtcccagagcagaggaaggctacttgagccggacaccaagcccgcctccagcaccaagggcgggcagcaccctccgaccctcccatgcgggtgcacacgaagggtgaggctgacacagccactgcggagtccaggctgctagaggtgctcatcctcactgccgtcctcaggtgggttcgggcttcaccgcctggccctctgtggtcacagaggggctcggtggcccaggtggtggttccgcctccaggggcagggccttgtcctgggtctgtgtcagcgggtgcaccatggacatgtgtacattgaggttgtgggccttctcaaaccgccggccacactggtcacaggcaaagtccagctcagtctcagccttgtgtttggtcatgtggtacttgagggatgcccgctgcctgcactggaacccacagacctcacacctgggggacagaggcagataagaaggtgcgagggccacagccctgggagggggtcctgactcacacttactgcaaaggcttggctcccgaatgtcgcatttggtggacgagaaggtgcttccgctgcttgaaggtttgtccacattcgtcacagatatagttccgcacctctgagaggggagagtccagtgagtccaggcccctgatgctccaacctcccggggggacgacgatgacaatgtgaaaccatcacagctgggaagacatttctgcacatggttcaccatgcagtgggcccaagcaaggggcctatgagggcctcgtttattaagatctttaaactgctttatacactgtcacgtggcttcatcagctgtgtgcatttcaggatggtttttaaagaaacctcagaaagctatttccttaaccacagattcttgtcttttttttttttgagatggagtttcgctctgttacccaggctgcagtgcggtggcgtgatctcagctcactgcaacctgcgcctcccgggctcaagcgattcttgtgcctcagcctgccaagtagctgggattacaggcgccccccaccacgcccagctgatttttgtatttttagtagagacagggtttacaccatattggccaggctggtcttgaattcctgaccttgtgatctgcctgcctcggtctcccaaagtgctgggattacatgtgtgagccactgcatccggcctgtgggcttatcttttaatgtcttatttgaggacgtggtgcagcagccttggtgtgggtgctcgaagtccctggcctcctacctgagcctcttctgtccagaggcccagtat

SEQ ID NO: 368767 - DNA, 6054 bp, Homo sapiens
gggcgcagggagccgccgccggggctgtaggcgccaaggccatgtccgactcgtgggtcccgaactccgcctcgggccaggacccagggggccgccggagggcctgggccgagctgctggcgggaagggtcaagagggaaaaatataatcctgaaagggcacagaaattaaaggaatcagctgtgcgcctcctgcgaagccatcaggacctgaatgcccttttgcttgaggtagaaggtccactgtgtaaaaaattgtctctcagcaaagtgattgactgtgacagttctgaggcctatgctaatcattctagttcatttataggctctgctttgcaggatcaagcctcaaggctgggggttcccgtgggtattctctcagccgggatggttgcctctagcgtgggacagatctgcacggctccagcggagaccagtcaccctgtgctgctgactgtggagcagagaaagaagctgtcttccctgttagagtttgctcagtatttattggcacacagtatgttctcccgtctttccttctgtcaagaattatggaaaatacagagttctttgttgcttgaagcggtgtggcatcttcacgtacaaggcattgtgagcctgcaagagctgctggaaagccatcccgacatgcatgctgtgggatcgtggctcttcaggaatctgtgctgcctttgtgaacagatggaagcatcctgccagcatgctgacgtcgccagggccatgctttctgattttgttcaaatgtttgttttgaggggatttcagaaaaactcagatctgagaagaactgtggagcctgaaaaaatgccgcaggtcgcggttgatgtactgcagagaatgctgatttttgcacttgacgctttggctgctggagtacaggaggagtcctccactcacaagatcgtgaggtgctggttcggagtgttcagtggacacacgcttggcagtgtaatttccacagatcctctgaagaggttcttcagtcataccctgactcagatactcactcacagccctgtgctgaaagcatctgatgctgttcagatgcagagagagtggagctttgcgcggacacaccctctgctcacctcactgtaccgcaggctctttgtgatgctgagtgcagaggagttggttggccatttgcaagaagttctggaaacgcaggaggttcactggcagagagtgctctcctttgtgtctgccctggttgtctgctttccagaagcgcagcagctgcttgaagactgggtggcgcgtttgatggcccaggcattcgagagctgccagctggacagcatggtcactgcgttcctggttgtgcgccaggcagcactggagggcccctctgcgttcctgtcatatgcagactggttcaaggcctcctttgggagcacacgaggctaccatggctgcagcaagaaggccctggtcttcctgtttacgttcttgtcagaactcgtgccttttgagtctccccggtacctgcaggtgcacattctccacccacccctggttcccagcaagtaccgctccctcctcacagactacatctcattggccaagacacggctggccgacctcaaggtttctatagaaaacatgggactctacgaggatttgtcatcagctggggacattactgagccccacagccaagctcttcaggatgttgaaaaggccatcatggtgtttgagcatacggggaacatcccagtcaccgtcatggaggccagcatattcaggaggccttactacgtgtcccacttcctccccgccctgctcacacctcgagtgctccccaaagtccctgactcccgtgtggcgtttatagagtctctgaagagagcagataaaatccccccatctctgtactccacctactgccaggcctgctctgctgctgaagagaagccagaagatgcagccctgggagtgagggcagaacccaactctgctgaggagcccctgggacagctcacagctgcactgggagagctgagagcctccatgacagaccccagccagcgtgatgttatatcggcacaggtggcagtgatttctgaaagactgagggctgtcctgggccacaatgaggatgacagcagcgttgagatatcaaagattcagctcagcatcaacacgccgagactggagccacgggaacacatggctgtggacctcctgctgacgtctttctgtcagaacctgatggctgcctccagtgtcgctcccccggagaggcagggtccctgggctgccctcttcgtgaggaccatgtgtggacgtgtgctccctgcagtgctcacccggctctgccagctgctccgtcaccagggcccgagcctgagtgccccacatgtgctggggttggctgccctggccgtgcacctgggtgagtccaggtctgcgctcccagaggtggatgtgggtcctcctgcacctggtgctggccttcctgtccctgcgctctttgacagcctcctgacctgtaggacgagggattccttgttcttctgcctgaaattttgtacagcagcaatttcttactctctctgcaagttttcttcccagtcacgagatactttgtgcagctgcttatctccaggccttattaaaaagtttcagttcctcatgttcagattgttctcagaggcccgacagcctctttctgaggaggacgtagccagcctttcctggagacccttgcaccttccttctgcagactggcagagagctgccctctctctctggacacacagaaccttccgagaggtgttgaaagaggaagatgttcacttaacttaccaagactggttacacctggagctggaaattcaacctgaagctgatgctctttcagatactgaacggcaggacttccaccagtgggcgatccatgagcactttctccctgagtcctcggcttcagggggctgtgacggagacctgcaggctgcgtgtaccattcttgtcaacgcactgatggatttccaccaaagctcaaggagttatgaccactcagaaaattctgatttggtctttggtggccgcacaggaaatgaggatattatttccagattgcaggagatggtagctgacctggagctgcagcaagacctcatagtgcctctcggccacaccccttcccaggagcacttcctctttgagattttccgcagacggctccaggctctgacaagcgggtggagcgtggctgccagccttcagagacagagggagctgctaatgtacaaacggatcctcctccgcctgccttcgtctgtcctctgcggcagcagcttccaggcagaacagcccatcactgccagatgcgagcagttcttccacttggtcaactctgagatgagaaacttctgctcccacggaggtgccctgacacaggacatcactgcccacttcttcaggggcctcctgaacgcctgtctgcggagcagagacccctccctgatggtcgacttcatactggccaagtgccagacgaaatgccccttaattttgacctctgctctggtgtggtggccgagcctggagcctgtgctgctctgccggtggaggagacactgccagagcccgctgccccgggaactgcagaagctacaagaaggccggcagtttgccagcgatttcctctcccctgaggctgcctccccagcacccaacccggactggctctcagctgctgcactgcactttgcgattcaacaagtcagggaagaaaacatcaggaagcagctaaagaagctggactgcgagagagaggagctattggttttccttttcttcttctccttgatgggcctgctgtcgtcacatctgacctcaaatagcaccacagacctgccaaaggctttccacgtttgtgcagcaatcctcgagtgtttagagaagaggaagatatcctggctggcactctttcagttgacagagagtgacctcaggctggggcggctcctcctccgtgtggccccggatcagcacaccaggctgctgcctttcgctttttacagtcttctctcctacttccatgaagacgcggccatcagggaagaggccttcctgcatgttgctgtggacatgtacttgaagctggtccagctcttcgtggctggggatacaagcacagtttcacctccagctggcaggagcctggagctcaagggtcagggcaaccccgtggaactgataacaaaagctcgtctttttctgctgcagttaatacctcggtgcccgaaaaagagcttctcacacgtggcagaggtaacgtcaagatgcccaccttgggccacgtgggggacatgagaattgacagctgcctgggccatgtgcctgcctggctggcaatacaactcgactatttctgccagagcccctcccctgtggtctgaggcctagtgggcggcatgggctgaggacctgctcctctctcacagctgctggctgatcgtggggactgcgacccagaggtgagcgccgccctccagagcagacagcaggctgcccctgacgctgacctgtcccaggagcctcatctcttctgacgggacctgccactgcacaccagcccagctcccgtgtaaataatttattacaagcataacatggagctcttgttgcactaaaaagtggattacaaatctcctcgactgctttagtggggaaaggaatcaattatttatgaactgtccggccccgagtcactcagcgtttgcgggaaaataaaccactggtcccagagcagaggaaggctacttgagccggacaccaagcccgcctccagcaccaagggcgggcagcaccctccgaccctcccatgcgggtgcacacgaagggtgaggctgacacagccactgcggagtccaggctgctagaggtgctcatcctcactgccgtcctcaggtgggttcgggcttcaccgcctggccctctgtggtcacagaggggctcggtggcccaggtggtggttccgcctccaggggcagggccttgtcctgggtctgtgtcagcgggtgcaccatggacatgtgtacattgaggttgtgggccttctcaaaccgccggccacactggtcacaggcaaagtccagctcagtctcagccttgtgtttggtcatgtggtacttgagggatgcccgctgcctgcactggaacccacagacctcacacctgggggacagaggcagataagaaggtgcgagggccacagccctgggagggggtcctgactcacacttactgcaaaggcttggctcccgaatgtcgcatttggtggacgagaaggtgcttccgctgcttgaaggtttgtccacattcgtcacagatatagttccgcacctctgagaggggagagtccagtgagtccaggcccctgatgctccaacctcccggggggacgacgatgacaatgtgaaaccatcacagctgggaagacatttctgcacatggttcaccatgcagtgggcccaagcaaggggcctatgagggcctcgtttattaagatctttaaactgctttatacactgtcacgtggcttcatcagctgtgtgcatttcaggatggtttttaaagaaacctcagaaagctatttccttaaccacagattcttgtcttttttttttttgagatggagtttcgctctgttacccaggctgcagtgcggtggcgtgatctcagctcactgcaacctgcgcctcccgggctcaagcgattcttgtgcctcagcctgccaagtagctgggattacaggcgccccccaccacgcccagctgatttttgtatttttagtagagacagggtttacaccatattggccaggctggtcttgaattcctgaccttgtgatctgcctgcctcggtctcccaaagtgctgggattacatgtgtgagccactgcatccggcctgtgggcttatcttttaatgtcttatttgaggacgtggtgcagcagccttggtgtgggtgctcgaagtccctggcctcctacctgagcctcttctgtccagaggcccagtat

SEQ ID NO: 368768 - DNA, 5946 bp, Homo sapiens
gggcgcagggagccgccgccggggctgtaggcgccaaggccatgtccgactcgtgggtcccgaactccgcctcgggccaggacccagggggccgccggagggcctgggccgagctgctggcgggaagggtcaagagggaaaaatataatcctgaaagggcacagaaattaaaggaatcagctgtgcgcctcctgcgaagccatcaggacctgaatgcccttttgcttgaggtagaaggtccactgtgtaaaaaattgtctctcagcaaagtgattgactgtgacagttctgaggcctatgctaatcattctagttcatttataggctctgctttgcaggatcaagcctcaaggctgggggttcccgtgggtattctctcagccgggatggttgcctctagcgtgggacagatctgcacggctccagcggagaccagtcaccctgtgctgctgactgtggagcagagaaagaagctgtcttccctgttagagtttgctcagtatttattggcacacagtatgttctcccgtctttccttctgtcaagaattatggaaaatacagagttctttgttgcttgaagcggtgtggcatcttcacgtacaaggcattgtgagcctgcaagagctgctggaaagccatcccgacatgcatgctgtgggatcgtggctcttcaggaatctgtgctgcctttgtgaacagatggaagcatcctgccagcatgctgacgtcgccagggccatgctttctgattttgttcaaatgtttgttttgaggggatttcagaaaaactcagatctgagaagaactgtggagcctgaaaaaatgccgcaggtcgcggttgatgtactgcagagaatgctgatttttgcacttgacgctttggctgctggagtacaggaggagtcctccactcacaagatcgtgaggtgctggttcggagtgttcagtggacacacgcttggcagtgtaatttccacagatcctctgaagaggttcttcagtcataccctgactcagatactcactcacagccctgtgctgaaagcatctgatgctgttcagatgcagagagagtggagctttgcgcggacacaccctctgctcacctcactgtaccgcaggctctttgtgatgctgagtgcagaggagttggttggccatttgcaagaagttctggaaacgcaggaggttcactggcagagagtgctctcctttgtgtctgccctggttgtctgctttccagaagcgcagcagctgcttgaagactgggtggcgcgtttgatggcccaggcattcgagagctgccagctggacagcatggtcactgcgttcctggttgtgcgccaggcagcactggagggcccctctgcgttcctgtcatatgcagactggttcaaggcctcctttgggagcacacgaggctaccatggctgcagcaagaaggccctggtcttcctgtttacgttcttgtcagaactcgtgccttttgagtctccccggtacctgcaggtgcacattctccacccacccctggttcccagcaagtaccgctccctcctcacagactacatctcattggccaagacacggctggccgacctcaaggtttctatagaaaacatgggactctacgaggatttgtcatcagctggggacattactgagccccacagccaagctcttcaggatgttgaaaaggccatcatggtgtttgagcatacggggaacatcccagtcaccgtcatggaggccagcatattcaggaggccttactacgtgtcccacttcctccccgccctgctcacacctcgagtgctccccaaagtccctgactcccgtgtggcgtttatagagtctctgaagagagcagataaaatccccccatctctgtactccacctactgccaggcctgctctgctgctgaagagaagccagaagatgcagccctgggagtgagggcagaacccaactctgctgaggagcccctgggacagctcacagctgcactgggagagctgagagcctccatgacagaccccagccagcgtgatgttatatcggcacaggtggcagtgatttctgaaagactgagggctgtcctgggccacaatgaggatgacagcagcgttgagatatcaaagattcagctcagcatcaacacgccgagactggagccacgggaacacatggctgtggacctcctgctgacgtctttctgtcagaacctgatggctgcctccagtgtcgctcccccggagaggcagggtccctgggctgccctcttcgtgaggaccatgtgtggacgtgtgctccctgcagtgctcacccggctctgccagctgctccgtcaccagggcccgagcctgagtgccccacatgtgctggggttggctgccctggccgtgcacctgggtgagtccaggtctgcgctcccagaggtggatgtgggtcctcctgcacctggtgctggccttcctgtccctgcgctctttgacagcctcctgacctgtaggacgagggattccttgttcttctgcctgaaattttgtacagcagcaatttcttactctctctgcaagttttcttcccagtcacgagatactttgtgcagctgcttatctccaggccttattaaaaagtttcagttcctcatgttcagattgttctcagaggcccgacagcctctttctgaggaggacgtagccagcctttcctggagacccttgcaccttccttctgcagactggcagagagctgccctctctctctggacacacagaaccttccgagaggtgttgaaagaggaagatgttcacttaacttaccaagactggttacacctggagctggaaattcaacctgaagctgatgctctttcagatactgaacggcaggacttccaccagtgggcgatccatgagcactttctccctgagtcctcggcttcagggggctgtgacggagacctgcaggctgcgtgtaccattcttgtcaacgcactgatggatttccaccaaagctcaaggagttatgaccactcagaaaattctgatttggtctttggtggccgcacaggaaatgaggatattatttccagattgcaggagatggtagctgacctggagctgcagcaagacctcatagtgcctctcggccacaccccttcccaggagcacttcctctttgagattttccgcagacggctccaggctctgacaagcgggtggagcgtggctgccagccttcagagacagagggagctgctaatgtacaaacggatcctcctccgcctgccttcgtctgtcctctgcggcagcagcttccaggcagaacagcccatcactgccagatgcgagcagttcttccacttggtcaactctgagatgagaaacttctgctcccacggaggtgccctgacacaggacatcactgcccacttcttcaggggcctcctgaacgcctgtctgcggagcagagacccctccctgatggtcgacttcatactggccaagtgccagacgaaatgccccttaattttgacctctgctctggtgtggtggccgagcctggagcctgtgctgctctgccggtggaggagacactgccagagcccgctgccccgggaactgcagaagctacaagaaggccggcagtttgccagcgatttcctctcccctgaggctgcctccccagcacccaacccggactggctctcagctgctgcactgcactttgcgattcaacaagtcagggaagaaaacatcaggaagcagctaaagaagctggactgcgagagagaggagctattggttttccttttcttcttctccttgatgggcctgctgtcgtcacatctgacctcaaatagcaccacagacctgccaaaggctttccacgtttgtgcagcaatcctcgagtgtttagagaagaggaagatatcctggctggcactctttcagttgacagagagtgacctcaggctggggcggctcctcctccgtgtggccccggatcagcacaccaggctgctgcctttcgctttttacagtcttctctcctacttccatgaagacgcggccatcagggaagaggccttcctgcatgttgctgtggacatgtacttgaagctggtccagctcttcgtggctggggatacaagcacagtttcacctccagctggcaggagcctggagctcaagggtcaggtgcaagggccagtcccacctccaggggagctccccccagccggaggctccttctgccaaagaatgttccggcacagcatgcagactatgggggacacaccagccctgtttctttaatacctcggtgcccgaaaaagagcttctcacacgtggcagagctgctggctgatcgtggggactgcgacccagaggtgagcgccgccctccagagcagacagcaggctgcccctgacgctgacctgtcccaggagcctcatctcttctgacgggacctgccactgcacaccagcccagctcccgtgtaaataatttattacaagcataacatggagctcttgttgcactaaaaagtggattacaaatctcctcgactgctttagtggggaaaggaatcaattatttatgaactgtccggccccgagtcactcagcgtttgcgggaaaataaaccactggtcccagagcagaggaaggctacttgagccggacaccaagcccgcctccagcaccaagggcgggcagcaccctccgaccctcccatgcgggtgcacacgaagggtgaggctgacacagccactgcggagtccaggctgctagaggtgctcatcctcactgccgtcctcaggtgggttcgggcttcaccgcctggccctctgtggtcacagaggggctcggtggcccaggtggtggttccgcctccaggggcagggccttgtcctgggtctgtgtcagcgggtgcaccatggacatgtgtacattgaggttgtgggccttctcaaaccgccggccacactggtcacaggcaaagtccagctcagtctcagccttgtgtttggtcatgtggtacttgagggatgcccgctgcctgcactggaacccacagacctcacacctgggggacagaggcagataagaaggtgcgagggccacagccctgggagggggtcctgactcacacttactgcaaaggcttggctcccgaatgtcgcatttggtggacgagaaggtgcttccgctgcttgaaggtttgtccacattcgtcacagatatagttccgcacctctgagaggggagagtccagtgagtccaggcccctgatgctccaacctcccggggggacgacgatgacaatgtgaaaccatcacagctgggaagacatttctgcacatggttcaccatgcagtgggcccaagcaaggggcctatgagggcctcgtttattaagatctttaaactgctttatacactgtcacgtggcttcatcagctgtgtgcatttcaggatggtttttaaagaaacctcagaaagctatttccttaaccacagattcttgtcttttttttttttgagatggagtttcgctctgttacccaggctgcagtgcggtggcgtgatctcagctcactgcaacctgcgcctcccgggctcaagcgattcttgtgcctcagcctgccaagtagctgggattacaggcgccccccaccacgcccagctgatttttgtatttttagtagagacagggtttacaccatattggccaggctggtcttgaattcctgaccttgtgatctgcctgcctcggtctcccaaagtgctgggattacatgtgtgagccactgcatccggcctgtgggcttatcttttaatgtcttatttgaggacgtggtgcagcagccttggtgtgggtgctcgaagtccctggcctcctacctgagcctcttctgtccagaggcccagtat

SEQ ID NO: 368769 - DNA, 2275 bp, Homo sapiens
ttaggcgctaggtacgaggctgggtgttggaagctacaagaaggcggcagtttgccagcgatttcctctcccctgaggctgcctccccagcacccaacccggactggctctcagctgctgcactgcactttgcgattcaacaagtcagggaagaaaacatcaggaagcagctaaagaagctggactgcgagagagaggagctattggttttccttttcttcttctccttgatgggcctgctgtcgtcacatctgacctcaaatagcaccacagacctgccaaaggctttccacgtttgtgcagcaatcctcgagtgtttagagaagaggaagatatcctggctggcactctttcagttgacagagagtgacctcaggctggggcggctcctcctccgtgtggccccggatcagcacaccaggctgctgcctttcgctttttacagtcttctctcctacttccatgaagacgcggccatcagggaagaggccttcctgcatgttgctgtggacatgtacttgaagctggtccagctcttcgtggctggggatacaagcacagtttcacctccagctggcaggagcctggagctcaagggtcagggcaaccccgtggaactgataacaaaagctcgtctttttctgctgcagttaatacctcggtgcccgaaaaagagcttctcacacgtggcagagctgctggctgatcgtggggactgcgacccagaggtgagcgccgccctccagagcagacagcaggctgcccctgacgctgacctgtcccaggagcctcatctcttctgacgggacctgccactgcacaccagcccagctcccgtgtaaataatttattacaagcataacatggagctcttgttgcactaaaaagtggattacaaatctcctcgactgctttagtggggaaaggaatcaattatttatgaactgtccggccccgagtcactcagcgtttgcgggaaaataaaccactggtcccagagcagaggaaggctacttgagccggacaccaagcccgcctccagcaccaagggcgggcagcaccctccgaccctcccatgcgggtgcacacgaagggtgaggctgacacagccactgcggagtccaggctgctagaggtgctcatcctcactgccgtcctcaggtgggttcgggcttcaccgcctggccctctgtggtcacagaggggctcggtggcccaggtggtggttccgcctccaggggcagggccttgtcctgggtctgtgtcagcgggtgcaccatggacatgtgtacattgaggttgtgggccttctcaaaccgccggccacactggtcacaggcaaagtccagctcagtctcagccttgtgtttggtcatgtggtacttgagggatgcccgctgcctgcactggaacccacagacctcacacctgggggacagaggcagataagaaggtgcgagggccacagccctgggagggggtcctgactcacacttactgcaaaggcttggctcccgaatgtcgcatttggtggacgagaaggtgcttccgctgcttgaaggtttgtccacattcgtcacagatatagttccgcacctctgagaggggagagtccagtgagtccaggcccctgatgctccaacctcccggggggacgacgatgacaatgtgaaaccatcacagctgggaagacatttctgcacatggttcaccatgcagtgggcccaagcaaggggcctatgagggcctcgtttattaagatctttaaactgctttatacactgtcacgtggcttcatcagctgtgtgcatttcaggatggtttttaaagaaacctcagaaagctatttccttaaccacagattcttgtcttttttttttttgagatggagtttcgctctgttacccaggctgcagtgcggtggcgtgatctcagctcactgcaacctgcgcctcccgggctcaagcgattcttgtgcctcagcctgccaagtagctgggattacaggcgccccccaccacgcccagctgatttttgtatttttagtagagacagggtttacaccatattggccaggctggtcttgaattcctgaccttgtgatctgcctgcctcggtctcccaaagtgctgggattacatgtgtgagccactgcatccggcctgtgggcttatcttttaatgtcttatttgaggacgtggtgcagcagccttggtgtgggtgctcgaagtccctggcctcctacctgagcctcttctgtccagaggcccagtat

SEQ ID NO: 368770 - DNA, 2231 bp, Homo sapiens
cgaggatcgatcagacctgtagaaatctccatcgtacacaaggtcataaccaccaccgattacacctggaggtccaggagggccagggggacccagggggactgcctctctctgcaccacacccaccctcctgcaagaggtcgacccccccatcctctcccagctgctgacaggtacctgggtatcctcagctcaggctgttcgccccacactatccccacaggcaggcctcccagggtacacgtcccgacccccaggggtgtccccagcactgataataggcagagatgtccagagttgcctgagccacttcttggtgttgcagacctcaggctggggcggctcctcctccgtgtggccccggatcagcacaccaggctgctgcctttcgctttttacagtcttctctcctacttccatgaagacgcggccatcagggaagaggccttcctgcatgttgctgtggacatgtacttgaagctggtccagctcttcgtggctggggatacaagcacagtttcacctccagctggcaggagcctggagctcaagggtcagggcaaccccgtggaactgataacaaaagctcgtctttttctgctgcagttaatacctcggtgcccgaaaaagagcttctcacacgtggcagagctgctggctgatcgtggggactgcgacccagaggtgagcgccgccctccagagcagacagcaggctgcccctgacgctgacctgtcccaggagcctcatctcttctgacgggacctgccactgcacaccagcccagctcccgtgtaaataatttattacaagcataacatggagctcttgttgcactaaaaagtggattacaaatctcctcgactgctttagtggggaaaggaatcaattatttatgaactgtccggccccgagtcactcagcgtttgcgggaaaataaaccactggtcccagagcagaggaaggctacttgagccggacaccaagcccgcctccagcaccaagggcgggcagcaccctccgaccctcccatgcgggtgcacacgaagggtgaggctgacacagccactgcggagtccaggctgctagaggtgctcatcctcactgccgtcctcaggtgggttcgggcttcaccgcctggccctctgtggtcacagaggggctcggtggcccaggtggtggttccgcctccaggggcagggccttgtcctgggtctgtgtcagcgggtgcaccatggacatgtgtacattgaggttgtgggccttctcaaaccgccggccacactggtcacaggcaaagtccagctcagtctcagccttgtgtttggtcatgtggtacttgagggatgcccgctgcctgcactggaacccacagacctcacacctgggggacagaggcagataagaaggtgcgagggccacagccctgggagggggtcctgactcacacttactgcaaaggcttggctcccgaatgtcgcatttggtggacgagaaggtgcttccgctgcttgaaggtttgtccacattcgtcacagatatagttccgcacctctgagaggggagagtccagtgagtccaggcccctgatgctccaacctcccggggggacgacgatgacaatgtgaaaccatcacagctgggaagacatttctgcacatggttcaccatgcagtgggcccaagcaaggggcctatgagggcctcgtttattaagatctttaaactgctttatacactgtcacgtggcttcatcagctgtgtgcatttcaggatggtttttaaagaaacctcagaaagctatttccttaaccacagattcttgtcttttttttttttgagatggagtttcgctctgttacccaggctgcagtgcggtggcgtgatctcagctcactgcaacctgcgcctcccgggctcaagcgattcttgtgcctcagcctgccaagtagctgggattacaggcgccccccaccacgcccagctgatttttgtatttttagtagagacagggtttacaccatattggccaggctggtcttgaattcctgaccttgtgatctgcctgcctcggtctcccaaagtgctgggattacatgtgtgagccactgcatccggcctgtgggcttatcttttaatgtcttatttgaggacgtggtgcagcagccttggtgtgggtgctcgaagtccctggcctcctacctgagcctcttctgtccagaggcccagtat

SEQ ID NO: 368771 - DNA, 3939 bp, Homo sapiens
gggcgcagggagccgccgccggggctgtaggcgccaaggccatgtccgactcgtgggtcccgaactccgcctcgggccaggacccagggggccgccggagggcctgggccgagctgctggcgggaagggtcaagagggaaaaatataatcctgaaagggcacagaaattaaaggaatcagctgtgcgcctcctgcgaagccatcaggacctgaatgcccttttgcttgaggtagaaggtccactgtgtaaaaaattgtctctcagcaaagtgattgactgtgacagttctgaggcctatgctaatcattctagttcatttataggctctgctttgcaggatcaagcctcaaggctgggggttcccgtgggtattctctcagccgggatggttgcctctagcgtgggacagatctgcacggctccagcggagaccagtcaccctgtgctgctgactgtggagcagagaaagaagctgtcttccctgttagagtttgctcagtatttattggcacacagtatgttctcccgtctttccttctgtcaagaattatggaaaatacagagttctttgttgcttgaagcggtgtggcatcttcacgtacaaggcattgtgagcctgcaagagctgctggaaagccatcccgacatgcatgctgtgggatcgtggctcttcaggaatctgtgctgcctttgtgaacagatggaagcatcctgccagcatgctgacgtcgccagggccatgctttctgattttgttcaaatgtttgttttgaggggatttcagaaaaactcagatctgagaagaactgtggagcctgaaaaaatgccgcaggtcgcggttgatgtactgcagagaatgctgatttttgcacttgacgctttggctgctggagtacaggaggagtcctccactcacaagatcgtgaggtgctggttcggagtgttcagtggacacacgcttggcagtgtaatttccacagatcctctgaagaggttcttcagtcataccctgactcagatactcactcacagccctgtgctgaaagcatctgatgctgttcagatgcagagagagtggagctttgcgcggacacaccctctgctcacctcactgtaccgcaggctctttgtgatgctgagtgcagaggagttggttggccatttgcaagaagttctggaaacgcaggaggttcactggcagagagtgctctcctttgtgtctgccctggttgtctgctttccagaagcgcagcagctgcttgaagactgggtggcgcgtttgatggcccaggcattcgagagctgccagctggacagcatggtcactgcgttcctggttgtgcgccaggcagcactggagggcccctctgcgttcctgtcatatgcagactggttcaaggcctcctttgggagcacacgaggctaccatggctgcagcaagaaggccctggtcttcctgtttacgttcttgtcagaactcgtgccttttgagtctccccggtacctgcaggtgcacattctccacccacccctggttcccagcaagtaccgctccctcctcacagactacatctcattggccaagacacggctggccgacctcaaggtttctatagaaaacatgggactctacgaggatttgtcatcagctggggacattactgagccccacagccaagctcttcaggatgttgaaaaggccatcatggtgtttgagcatacggggaacatcccagtcaccgtcatggaggccagcatattcaggaggccttactacgtgtcccacttcctccccgccctgctcacacctcgagtgctccccaaagtccctgactcccgtgtggcgtttatagagtctctgaagagagcagataaaatccccccatctctgtactccacctactgccaggcctgctctgctgctgaagagaagccagaagatgcagccctgggagtgagggcagaacccaactctgctgaggagcccctgggacagctcacagctgcactgggagagctgagagcctccatgacagaccccagccagcgtgatgttatatcggcacaggtggcagtgatttctgaaagactgagggctgtcctgggccacaatgaggatgacagcagcgttgagatatcaaagattcagctcagcatcaacacgccgagactggagccacgggaacacatggctgtggacctcctgctgacgtctttctgtcagaacctgatggctgcctccagtgtcgctcccccggagaggcagggtccctgggctgccctcttcgtgaggaccatgtgtggacgtgtgctccctgcagtgctcacccggctctgccagctgctccgtcaccagggcccgagcctgagtgccccacatgtgctggggttggctgccctggccgtgcacctgggtgagtccaggtctgcgctcccagaggtggatgtgggtcctcctgcacctggtgctggccttcctgtccctgcgctctttgacagcctcctgacctgtaggacgagggattccttgttcttctgcctgaaattttgtacagcagcaatttcttactctctctgcaagttttcttcccagtcacgagatactttgtgcagctgcttatctccaggccttattaaaaagtttcagttcctcatgttcagattgttctcagaggcccgacagcctctttctgaggaggacgtagccagcctttcctggagacccttgcaccttccttctgcagactggcagagagctgccctctctctctggacacacagaaccttccgagaggtgttgaaagaggaagatgttcacttaacttaccaagactggttacacctggagctggaaattcaacctgaagctgatgctctttcagatactgaacggcaggacttccaccagtgggcgatccatgagcactttctccctgagtcctcggcttcagggggctgtgacggagacctgcaggctgcgtgtaccattcttgtcaacgcactgatggatttccaccaaagctcaaggagttatgaccactcagaaaattctgatttggtctttggtggccgcacaggaaatgaggatattatttccagattgcaggagatggtagctgacctggagctgcagcaagacctcatagtgcctctcggccacaccccttcccaggagcacttcctctttgagattttccgcagacggctccaggctctgacaagcgggtggagcgtggctgccagccttcagagacagagggagctgctaatgtacaaacggatcctcctccgcctgccttcgtctgtcctctgcggcagcagcttccaggcagaacagcccatcactgccagatgcgagcagttcttccacttggtcaactctgagatgagaaacttctgctcccacggaggtgccctgacacaggacatcactgcccacttcttcaggggcctcctgaacgcctgtctgcggagcagagacccctccctgatggtcgacttcatactggccaagtgccagacgaaatgccccttaattttgacctctgctctggtgtggtggccgagcctggagcctgtgctgctctgccggtggaggagacactgccagagcccgctgccccgggaactgcagaagctacaagaaggccggcagtttgccagcgagtacgtgtgggtggtgagatggggtgtgcccgcccagatgcacttcgggacctgctcaaggtcatctcctaaacaccctggcttgcttgagagaagcggtgtgggcagcctctcgtgtgagcagggagaaaagaaccgagttctcgtggtggtgggcgcctgtaatcccaactactggggaggccgaggcaggagaatcagttgaacccaggaggtggagtttccagtgagccgagatcactccaacggccaatagagcaagactctgtcca

SEQ ID NO: 368772 - DNA, 1759 bp, Homo sapiens
gggcgcagggagccgccgccggggctgtaggcgccaaggccatgtccgactcgtgggtcccgaactccgcctcgggccaggacccagggggccgccggagggcctgggccgagctgctggcgggaagggtcaagagggaaaaatataatcctgaaagggcacagaaattaaaggaatcagctgtgcgcctcctgcgaagccatcaggacctgaatgcccttttgcttgaggtagaaggtccactgtgtaaaaaattgtctctcagcaaagtgattgactgtgacagttctgaggcctatgctaatcattctagttcatttataggctctgctttgcaggatcaagcctcaaggctgggggttcccgtgggtattctctcagccgggatggttgcctctagcgtgggacagatctgcacggctccagcggagaccagtcaccctgtgctgctgactgtggagcagagaaagaagctgtcttccctgttagagtttgctcagtatttattggcacacagtatgttctcccgtctttccttctgtcaagaattatggaaaatacagagttctttgttgcttgaagcggtgtggcatcttcacgtacaaggcattgtgagcctgcaagagctgctggaaagccatcccgacatgcatgctgtgggatcgtggctcttcaggaatctgtgctgcctttgtgaacagatggaagcatcctgccagcatgctgacgtcgccagggccatgctttctgattttgttcaaatgtttgttttgaggggatttcagaaaaactcagatctgagaagaactgtggagcctgaaaaaatgccgcaggtcgcggttgatgtactgcagagaatgctgatttttgcacttgacgctttggctgctggagtacaggaggagtcctccactcacaagatcgtgaggtgctggttcggagtgttcagtggacacacgcttggcagtgtaatttccacagatcctctgaagaggttcttcagtcataccctgactcagatactcactcacagccctgtgctgaaagcatctgatgctgttcagatgcagagagagtggagctttgcgcggacacaccctctgctcacctcactgtaccgcaggctctttgtgatgctgagtgcagaggagttggttggccatttgcaagaagttctggaaacgcaggaggttcactggcagagagtgctctcctttgtgtctgccctggttgtctgctttccagaagcgcagcagctgcttgaagactgggtggcgcgtttgatggcccaggcattcgagagctgccagctggacagcatggtcactgcgttcctggttgtgcgccaggcagcactggagggcccctctgcgttcctgtcatatgcagactggttcaaggtaagtgacctgccaatcggctacctaatacctgatcttcccagaaggcctgggagtggggaccatgctgtccccacctgattctctgtcatgtgagtgagcaaccttgccgtcagctttgccgagtggccttggcagatcttcctctgcgtgtgccgaggagcctgggttctccctgtcggggcctcggcggatcttcctctgcatgttccgaggagcctgggttctccctgtcggggcctcagctccttcccctggtttccgtctcacttagttgacggagcctcctgctgtcttttataagaaaattagcgaaatcaagcctggacaccatggtgaaacctcatctccaccaaaaa

SEQ ID NO: 368773 - DNA, 1807 bp, Homo sapiens
gggcgcagggagccgccgccggggctgtaggcgccaaggccatgtccgactcgtgggtcccgaactccgcctcgggccaggacccagggggccgccggagggcctgggccgagctgctggcgggaagggtcaagagggaaaaatataatcctgaaagggcacagaaattaaaggaatcagctgtgcgcctcctgcgaagccatcaggacctgaatgcccttttgcttgaggtagaaggtccactgtgtaaaaaattgtctctcagcaaagtgattgactgtgacagttctgaggcctatgctaatcattctagttcatttataggctctgctttgcaggatcaagcctcaaggctgggggttcccgtgggtattctctcagccgggatggttgcctctagcgtgggacagatctgcacggctccagcggagaccagtcaccctgtgctgctgactgtggagcagagaaagaagctgtcttccctgttagagtttgctcagtatttattggcacacagtatgttctcccgtctttccttctgtcaagaattatggaaaatacagagttctttgttgcttgaagcggtgtggcatcttcacgtacaaggcattgtgagcctgcaagagctgctggaaagccatcccgacatgcatgctgtgggatcgtggctcttcaggaatctgtgctgcctttgtgaacagatggaagcatcctgccagcatgctgacgtcgccagggccatgctttctgattttgttcaaatgtttgttttgaggggatttcagaaaaactcagatctgagaagaactgtggagcctgaaaaaatgccgcaggtcgcggttgatgtactgcagagaatgctgatttttgcacttgacgctttggctgctggagtacaggaggagtcctccactcacaagatcgtgaggtgctgagcttcagcagcccgctcctgagcacacttcctctgccagttacgataacgtgcgtgaggaggaggcgaccatgggaaagcccggggaacgctctggtcagccttttcctgtgaggatgaggtcggaaggtgcgcccactgcagtatcctgttccgcctctggaagtcctgcaccaatgtttgtcccactcactgtgacctcctcctgtgtggagtctccccttgctcctccttccctgggtgtggttcaggctctagagctggccctgcctctcagccccccacatttctagaacacactgtagctgtgcctctacagactcccgctgcctggcctccacagatcctgctcagattcaccagtaggcaaagcttggccctatttgctttttctctccatggctctgtggagatgtgcggagacccttacaggtcgggaggcggaagctgaggagtgggggctgggtggaaggtggacatcggggtttggtggaaatggggctctggggtttgcttccctctagtgtgggcaggggaccttgaagtgaagtcttgagaaaccagtagaatttgccactgtttccaggccttgtcaaccttttcattctttattttgctcctcatttcccatccctcacagtaactgtttaactgctcaattaaatgtgttgtaccgttcggtacttttactgaaaaaaaaaaaaaaaaaactcgagttttttttttttttttttttactgatatctctttaatactttcatcattcaagtttgttcagaacattacaagaggcatgaaagaaaaaataattccatttttaaaactctgtccaaagtataacatatgaccatgccattatctcttaggcgcttc

SEQ ID NO: 368774 - DNA, 333 bp, Homo sapiens
gctgccccgggaactgcagaagctacaagaaggccggcagtttgccagcgagtacgtgtgggtggtgagatggggtgtgcccgcccagatgcacttcgggacctgctcaaggtcatctcctaaacaccctggcttgcttgagagaagcggtgtgggcagcctctcgtgtgagcagggagaaaagaaccgagttctcgtggtggtgggcgcctgtaatcccaactactggggaggccgaggcaggagaatcagttgaacccaggaggtggagtttccagtgagccgagatcactccaacggccaatagagcaagactctgtccagaaaaaaaac

SEQ ID NO: 368775 - DNA, 1037 bp, Homo sapiens
gcggagctgggtgcgagcgccctaccgctttcgctttcccttcgcggtgcccactccactccttgtgcggcgctaggccccccgtcccggtcatggccatgctcagggtccagcccgaggcccaagccaaggtggatgtgtttcgtgaagacctctgtaccaagacagagaacctgctcgggagctatttccccaagaagatttctgagctggatgcatttttaaaggagccagctctcaatgaagccaacttgagcaatctgaaggccccattggacatcccagtgcctgatccagtcaaggagaaagagaaagaggagcggaagaaacagcaggagaaggaagacaaggatgaaaagaagaagggggaggatgaagacaaaggtcctccctgtggcccagtgaactgcaatgaaaagatcgtggtccttctgcagcgcttgaagcctgagatcaaggatgtcattgagcagctcaacctggtcaccacctggttgcagctgcagatacctcggattgaggatggtaacaattttggagtggctgtccaggagaaggtgtttgagctgatgaccagcctccacaccaagctagaaggcttccacactcaaatctctaagtatttctctgagcgtggtgatgcagtgactaaagcagccaagcagccccatgtgggtgattatcggcagctggtgcacgagctggatgaggcagagtaccgggacatccggctgatggtcatggagatccgcaatgcttatgctgtgttatatgacatcatcctgaagaacttcgagaagctcaagaagcccaggggagaaacaaagggaatgatctattgagagccctctctcccattctgtgatgagtacagcagagaccttcctgctttttactggggactccagattttccccaaacttgcttctgttgagatttttccctcaccttgcctctcaggcacaataaatatagttataccactgccatttagtcagcccaagtcctctttattggaaccgggccccgctggccct

SEQ ID NO: 368776 - DNA, 757 bp, Homo sapiens
gcggagctgggtgcgagcgccctaccgctttcgctttcccttcgcggtgcccactccactccttgtgcggcgctaggccccccgtcccggtcatggccatgctcagggtccagcccgaggcccaagccaaggtggatgtgtttcgtgaagacctctgtaccaagacagagaacctgctcgggagctatttccccaagaagatttctgagctggatgcatttttaaaggagccagctctcaatgaagccaacttgagcaatctgaaggccccattggacatcccagtgcctgatccagtcaaggagaaagagaaagaggagcggaagaaacagcaggagaaggaagacaaggatgaaaagaagaagggggaggatgaagacaaaggtcctccctgtggcccagtgaactgcaatgaaaagatcgtggtccttctgcagcgcttgaagcctgagatcaaggatgtcattgagcagctcaacctggtcaccacctggttgcagctgcagatacctcggattgaggatggtaacaattttggagtggctgtccagcagaagctgtttcgagttgtgaccagacttcacaccaagctagacgggttacacatcttttctaatcctttgtctatgcggtgtgatggcactgactcatggaaccatgcctgtcccttgatcgatgctatttggcaggcttcttctcaggctctactacgtattactaccagccttccgccttttcttcctctctggtccttccc

SEQ ID NO: 368777 - DNA, 663 bp, Homo sapiens
  misc_feature (573)..(573): n is a, c, g, or t
  misc_feature (575)..(575): n is a, c, g, or t
  misc_feature (577)..(578): n is a, c, g, or t
  misc_feature (580)..(580): n is a, c, g, or t
  misc_feature (586)..(586): n is a, c, g, or t
  misc_feature (591)..(592): n is a, c, g, or t
  misc_feature (598)..(598): n is a, c, g, or t
  misc_feature (602)..(602): n is a, c, g, or t
cagaaaataaactccttgagctttgctaggccccccgtacaaggacatggccatgctaagggtccaagcccgaggcccaagccaaggtgagatgtgtttcgagaagacctatgtaccaagacagagaacctgctcgggagctatttccccaagaagatttctgagctggatgcatttttaaaggagccagctctcaatgaagccaacttgagcaatctgaaggccccattggacatcccagtgcctgatccagtcaaggagaaagagaaagaggagcggaagaaacagcaggagaaggaagacaaggatgaaaagaagaagggggaggatgaagacaaaggtcctccctgtggcccagtgaactgcaatgaaaagatcggtcaccacctggttgcagctgcagatacctcggattgaggatggtaacaattttggagtggctgtccaggagaaggtgtttgagctgatgaccagcctccacaccaagctagaaggcttccacactcaaatctctaagtatttctctgagcgtggtgatgcagtgactaaagcagccaagcagccccatgtggntnannancggcanctggnncacganctgnatgacgcagcataccgcggacatccgactgaatagctacaaggaaagcacgcaagccgacg

SEQ ID NO: 368778 - DNA, 1074 bp, Homo sapiens
gcggagctgggtgcgagcgccctaccgctttcgctttcccttcgcggtgcccactccactccttgtgcggcgctaggccccccgtcccggtcatggccatgctcagggtccagcccgaggcccaagccaaggtcaggccctacataaccctaagggaactgtcctcaaatgaactggccttaaagccaagtttctgaagggatgcgtgtgccccacaggtggatgtgtttcgtgaagacctctgtaccaagacagagaacctgctcgggagctatttccccaagaagatttctgagctggatgcatttttaaaggagccagctctcaatgaagccaacttgagcaatctgaaggccccattggacatcccagtgcctgatccagtcaaggagaaagagaaagaggagcggaagaaacagcaggagaaggaagacaaggatgaaaagaagaagggggaggatgaagacaaaggtcctccctgtggcccagtgaactgcaatgaaaagatcgtggtccttctgcagcgcttgaagcctgagatcaaggatgtcattgagcagctcaacctggtcaccacctggttgcagctgcagatacctcggattgaggatggtaacaattttggagtggctgtccaggagaaggtgtttgagctgatgaccagcctccacaccaagctagaaggcttccacactcaaatctctaagtatttctctgagcgtggtgatgcagtgactaaagcagccaagcagccccatgtgggtgattatcggcagctggtgcacgagctggatgaggcagagtaccgggacatccggctgatggtcatggagatccgcaatgcttatgctgtgttatatgacatcatcctgaagaacttcgagaagctcaagaagcccaggggagaaacaaagggaatgatctattgagagccctctctcccattctgtgatgagtacagcagagaccttcctgctttttactggggactccagattttccccaaacttgcttctgttgagatttttccctcaccttgcctctcaggcacaataaatatagttataccactgc

SEQ ID NO: 368779 - DNA, 1162 bp, Homo sapiens
gcggagctgggtgcgagcgccctaccgctttcgctttcccttcgcggtgcccactccactccttgtgcggcgctaggccccccgtcccggtcatggccatgctcagggtccagcccgaggcccaagccaaggtggatgtgtttcgtgaagacctctgtaccaagacagagaacctgctcgggagctatttccccaagaagatttctgagctggatgcatttttaaaggagccagctctcaatgaagccaacttgagcaatctgaaggccccattggacatcccagtgcctgatccagtcaaggagaaagagaaagaggagcggaagaaacagcaggagaaggaagacaaggatgaaaagaagaagggggaggatgaagacaaaggtcctccctgtggcccagtgaactgcaatgaaaagatcgtggtccttctgcagcgcttgaagcctgagatcaaggatgtcattgagcagctcaacctggtcaccacctggttgcagctgcagatacctcggattgaggatggtaacaattttggagtggctgtccaggagaaggtgtttgagctgatgaccagcctccacaccaagctagaaggcttccacactcaaatctctaagtatttctctgagcgtggtgatgcagtgactaaagcagccaagcagccccatgtgggtgattatcggcagctggtgcacgagctggatgaggcagagtaccgggacatccggctgatggtcatggagatccgcaatgcttatgtgaggaggcaagggcagggcaggggtgggcagaggcagctttcccaggccacccactccctgaccctgcaggctaggggttaagggtgacaaagctcagcttctccacaaggctagaaatggggcacagagccactggaggcctctgactgacctctactccctggccctgtaggctgtgttatatgacatcatcctgaagaacttcgagaagctcaagaagcccaggggagaaacaaagggaatgatctattgagagccctctctcccattctgtgatgagtacagcagagaccttcctgctttttactggggactccagattttccccaaacttgcttctgttgagatttttccctcaccttgcctctcaggcacaataaatatagttataccactgc

SEQ ID NO: 368780 - DNA, 827 bp, Homo sapiens
ctacttttagctctcctggaagagataacttcgttctgttttgttaaataagtaactccatggttgttctcttttccaagatgcccgatgtttatggttttctacgaagtcagtgcttacttagctcactatcagcgctgctgttgtctgctgcagctgcagcagacaacagcaggagaaggaagacaaggatgaaaagaagaagggggaggatgaagacaaaggtcctccctgtggcccagtgaactgcaatgaaaagatcgtggtccttctgcagcgcttgaagcctgagatcaaggatgtcattgagcagctcaacctggtcaccacctggttgcagctgcagatacctcggattgaggatggtaacaattttggagtggctgtccaggagaaggtgtttgagctgatgaccagcctccacaccaagctagaaggcttccacactcaaatctctaagtatttctctgagcgtggtgatgcagtgactaaagcagccaagcagccccatgtgggtgattatcggcagctggtgcacgagctggatgaggcagagtaccgggacatccggctgatggtcatggagatccgcaatgcttatgctgtgttatatgacatcatcctgaagaacttcgagaagctcaagaagcccaggggagaaacaaagggaatgatctattgagagccctctctcccattctgtgatgagtacagcagagaccttcctgctttttactggggactccagattttccccaaacttgcttctgttgagatttttccctcaccttgcctctcaggcacaataaatatagttataccactgc

SEQ ID NO: 368781 - DNA, 1065 bp, Homo sapiens
gcggagctgggtgcgagcgccctaccgctttcgctttcccttcgcggtgcccactccactccttgtgcggcgctaggccccccgtcccggtcatggccatgctcagggtccagcccgaggcccaagccaaggtggatgtgtttcgtgaagacctctgtaccaagacagagaacctgctcgggagctatttccccaagaagatttctgagctggatgcatttttaaaggagccagctctcaatgaagccaacttgagcaatctgaaggccccattggacatcccagtgcctgatccagtcaaggagaaagagaaagaggagcggaagaaacagcaggagaaggaagacaaggatgaaaagaagaagggggaggatgaagacaaaggtcctccctgtggcccagtgaactgcaatgaaaagatcgtggtccttctgcagcgcttgaagcctgagatcaaggatgtcattgagcagctcaacctggtcaccacctggttgcagctgcagatacctcggattgaggatggtaacaattttggagtggctgtccaggtgagagcgctgccccacttccctgctcttttctagtccatgcttccttccactttcccccttgctttttttccctaggagaaggtgtttgagctgatgaccagcctccacaccaagctagaaggcttccacactcaaatctctaagtatttctctgagcgtggtgatgcagtgactaaagcagccaagcagccccatgtgggtgattatcggcagctggtgcacgagctggatgaggcagagtaccgggacatccggctgatggtcatggagatccgcaatgcttatgctgtgttatatgacatcatcctgaagaacttcgagaagctcaagaagcccaggggagaaacaaagggaatgatctattgagagccctctctcccattctgtgatgagtacagcagagaccttcctgctttttactggggactccagattttccccaaacttgcttctgttgagatttttccctcaccttgcctctcaggcacaataaatatagttataccactgc

SEQ ID NO: 368782 - DNA, 766 bp, Homo sapiens
  misc_feature (676)..(676): n is a, c, g, or t
  misc_feature (678)..(678): n is a, c, g, or t
  misc_feature (680)..(681): n is a, c, g, or t
  misc_feature (683)..(683): n is a, c, g, or t
  misc_feature (689)..(689): n is a, c, g, or t
  misc_feature (694)..(695): n is a, c, g, or t
  misc_feature (701)..(701): n is a, c, g, or t
  misc_feature (705)..(705): n is a, c, g, or t
gcggagctgggtgcgagcgccctaccgctttcgctttcccttcgcggtgcccactccactccttgtgcggcgctaggccccccgtcccggtcatggccatgctcagggtccagcccgaggcccaagccaaggtggatgtgtttcgtgaagacctctgtaccaagacagagaacctgctcgggagctatttccccaagaagatttctgagctggatgcatttttaaaggagccagctctcaatgaagccaacttgagcaatctgaaggccccattggacatcccagtgcctgatccagtcaaggagaaagagaaagaggagcggaagaaacagcaggagaaggaagacaaggatgaaaagaagaagggggaggatgaagacaaaggtcctccctgtggcccagtgaactgcaatgaaaagatcgtggtccttctgcagcgcttgaagcctgagatcaaggatgtcattgagcagctcaacctggtcaccacctggttgcagctgcagatacctcggattgaggatggtaacaattttggagtggctgtccaggagaaggtgtttgagctgatgaccagcctccacaccaagctagaaggcttccacactcaaatctctaagtatttctctgagcgtggtgatgcagtgactaaagcagccaagcagccccatgtggntnannancggcanctggnncacganctgnatgacgcagcataccgcggacatccgactgaatagctacaaggaaagcacgcaagccgacg

SEQ ID NO: 368783 - DNA, 661 bp, Homo sapiens
gcggagctgggtgcgagcgccctaccgctttcgctttcccttcgcggtgcccactccactccttgtgcggcgctaggccccccgtcccggtcatggccatgctcagggtccagcccgaggcccaagccaaggtggatgtgtttcgtgaagacctctgtaccaagacagagaacctgctcgggagctatttccccaagaagatttctgagctggatgcatttttaaaggagccagctctcaatgaagccaacttgagcaatctgaaggccccattggacatcccagtgcctgatccagtcaaggagaaagagaaagaggagcggaagaaacagcaggagaaggaagacaaggatgaaaagaagaagggggaggatgaagacaaaggtcctccctgtggcccagtgaactgcaatgaaaagatcgtggtccttctgcagcgcttgaagcctgagatcaaggatgtcattgagcagctcaacctggtcaccacctggttgcagctgcagatacctcggattgaggatggtaacaattttggagtggctgtccaggagaaggtgtttgagctgatgaccagcctccacaccaagctagaaggcttccacactcaaatctctaagcggatcagctagcggatcacttaagcggatcagcgggtcct

SEQ ID NO: 368784 - DNA, 707 bp, Homo sapiens
  misc_feature (659)..(659): n is a, c, g, or t
gcggagctgggtgcgagcgccctaccgctttcgctttcccttcgcggtgcccactccactccttgtgcggcgctaggccccccgtcccggtcatggccatgctcagggtccagcccgaggcccaagccaaggtggatgtgtttcgtgaagacctctgtaccaagacagagaacctgctcgggagctatttccccaagaagatttctgagctggatgcatttttaaaggagccagctctcaatgaagccaacttgagcaatctgaaggccccattggacatcccagtgcctgatccagtcaaggagaaagagaaagaggagcggaagaaacagcaggagaaggaagacaaggatgaaaagaagaagggggaggatgaagacaaaggtcctccctgtggcccagtgaactgcaatgaaaagatcgtggtccttctgcagcgcttgaagcctgagatcaaggatgtcattgagcagctcaacctggtcaccacctggttgcagctgcagatacctcggattgaggatggtaacaattttggagtggctgtccaggagaaggtgtttgagctgatgaccagcctccacaccaagctagaaggcttccacactcaaatctctaatatttctctgagcgtggtgatgcagtgactgattaggcanaataccggacaatccgctgatgggcattgagatccccatgcttattct

SEQ ID NO: 368785 - DNA, 633 bp, Homo sapiens
gctaggccccccgtcccggtcatggccatgctcagggtccagcccgaggcccaagccaaggtgagcgccgcggggtctagaaagggcccactggggaggcgtggctggagcggccgggggcatccccgacccgccccccaggctcccacgcgagtcgggggcagtcggccgagctggcgcgcccggagcacctgcgccccggggagggcggcgactgctgcctgcggggagaggcgaggcggccgtggttctgcggggtgaggtgaagcggagagctggcgtggaggggaactccgctggcctggggccggggccacacacagactgggtgcgggactgccccagctaccttctggcctttccctcagggagggtcccggggcccaccccatccctgtcctacttgcagaggactctcagcacccctcctcacacctgccaggcgaccccagagatctgttctcacgtgaacactggcccttcaccgccaggaatgttctcatcccccatatccagccccagggatacccactccactttccgtagatccaggtctgcagagatccaccttctccaccaccccaacccaccctacaggcatccatctcgctttcttcaggtctggccttagag

SEQ ID NO: 368786 - DNA, 335 bp, Homo sapiens
cctggttgcagctgcagatacctcggattgaggatggtaacaattttggagtggctgtccaggtgagagcgctgccccacttccctgctcttttctagtccatgcttccttccactttcccccttgctttttttccctaggagaaggtgtttgagctgatgaccagcctccacaccaagctagaaggcttccacactcaaatctctaagtgagtgaccacccatgtgcacactgtttttgttttgggagacctccttcttctactccatacacacttctccttccacaggtatttctctgagcgtggtgatgcagtgactaaagcagccaagcag

SEQ ID NO: 368787 - DNA, 161 bp, Homo sapiens
gtaggtgaggcccaggtcagggtgcatgggggaaggacacatgtaaggtcaggcctgacccgagcttcccacagggtgattatcggcagctggtgcacgagctggatgaggcagagtaccgggacatccggctgatggtcatggagatccgcaatgcttat

SEQ ID NO: 368788 - DNA, 987 bp, Homo sapiens
gcggagctgggtgcgagcgccctaccgctttcgctttcccttcgcggtgcccactccactccttgtgcggcgctaggccccccgtcccggtcatggccatgctcagggtccagcccgaggcccaagccaaggtggatgtgtttcgtgaagacctctgtaccaagacagagaacctgctcgggagctatttccccaagaagatttctgagctggatgcatttttaaaggagccagctctcaatgaagccaacttgagcaatctgaaggccccattggacatcccagtgcctgatccagtcaaggagaaagagaaagaggagcggaagaaacagcaggagaaggaagacaaggatgaaaagaagaagggggaggatgaagacaaaggtcctccctgtggcccagtgaactgcaatgaaaagatcgtggtccttctgcagcgcttgaagcctgagatcaaggatgtcattgagcagctcaacctggtcaccacctggttgcagctgcagatacctcggattgaggatggtaacaattttggagtggctgtccaggagaaggtgtttgagctgatgaccagcctccacaccaagctagaaggcttccacactcaaatctctaagtatttctctgagcgtggtgatgcagtgactaaagcagccaagcagccccatgtgggtgattatcggcagctggtgcacgagctggatgaggcagagtaccgggacatccggctgatggtcatggagatccgcaatgcttatgctgtgttatatgacatcatcctgaagaacttcgagaagctcaagaagcccaggggagaaacaaagggaatgatctattgagagccctctctcccattctgtgatgagtacagcagagaccttcctgctttttactggggactccagattttccccaaacttgcttctgttgagatttttccctcaccttgcctctcaggcacaataaatatagttataccactgc

SEQ ID NO: 368789 - DNA, 497 bp, Homo sapiens
gttaaaggcatatcgtcgacccacgcgctccgatggtaacaattttggagtggctgtccaggagaaggtgtttgagctgatgaccagcctccacaccaagctagaaggcttccacactcaaatctctaagtatttctctgagcgtggtgatgcagtgactaaagcagccaagcagccccatgtgggtgattatcggcagctggtgcacgagctggatgaggcagagtaccgggacatccggctgatggtcatggagatccgcaatgcttatgctgtgttatatgacatcatcctgaagaacttcgagaagctcaagaagcccaggggagaaacaaagggaatgatctattgagagccctctctcccattctgtgatgagtacagcagagaccttcctgctttttactggggactccagattttccccaaacttgcttctgttgagatttttccctcaccttgcctctcaggcacaataaatatagttataccactgc

SEQ ID NO: 368790 - DNA, 389 bp, Homo sapiens
gaacgagccggtaccagcaggctgggcccagattaagatgtcatggagcagctcaacctggtcaccacctggttgcagctgcagatacctcggattgaggatggtaacaattttggagtggctgtccaggagaaggtgtttgagctgatgaccagcctccacaccaagctagaaggcttccacactcaaatctctaagtatttctctgagcgtggtgatgcagtgactaaagcagccaagcagccccatgtgggtgattatcggcagctggtgcacgagctggatgaggcagagtaccgggacatccggctgatggtcatggagatccgcaatgcttatgctgtgttatatgacatcttaatctgggcccagcctgctggtccggctca

SEQ ID NO: 368791 - DNA, 679 bp, Homo sapiens
  misc_feature (657)..(657): n is a, c, g, or t
gttaaaggcatatcgtcgacccacgcgctccgatggtaacaattttggagtggctgtccaggagaaggtgtttgagctgatgaccagcctccacaccaagctagaaggcttccacactcaaatctctaagtatttctctgagcgtggtgatgcagtgactaaagcagccaagcagccccatgtgggtgattatcggcagctggtgcacgagctggatgaggcagagtaccgggacatccggctgatggtcatggagatccgcaatgcttatgctgtgttatatgacatcatcctgaagaacttcgagaagctcaagaagcccaggggagaaacaaagggaatgatctattgagagccctctctcccattctgtgatgagtacagcagagaccttcctgctttttactggggactccagattttccccaaacttgcttctgttgagatttttccctcaccttgcctctcaggcacaataaatatagttataccactgcaaaaaaaaaaaaaaaaaaaaaaaaaaaaaaaaaaaaaaaaaaaaaccttgtggcccgcttggcccaagcggcttttagactggaccaggttaatgcatgcgcccgaatttcgagttactggccttggccctatggggagcggattaccattcttgcccgncgttttacaccgtcgggcttgg

SEQ ID NO: 368792 - DNA, 1299 bp, Homo sapiens
  misc_feature (998)..(998): n is a, c, g, or t
  misc_feature (1000)..(1001): n is a, c, g, or t
  misc_feature (1008)..(1008): n is a, c, g, or t
  misc_feature (1011)..(1011): n is a, c, g, or t
  misc_feature (1026)..(1026): n is a, c, g, or t
  misc_feature (1107)..(1108): n is a, c, g, or t
  misc_feature (1110)..(1111): n is a, c, g, or t
  misc_feature (1120)..(1120): n is a, c, g, or t
gcggagctgggtgcgagcgccctaccgctttcgctttcccttcgcggtgcccactccactccttgtgcggcgctaggccccccgtcccggtcatggccatgctcagggtccagcccgaggcccaagccaaggtggatgtgtttcgtgaagacctctgtaccaagacagagaacctgctcgggagctatttccccaagaagatttctgagctggatgcatttttaaaggagccagctctcaatgaagccaacttgagcaatctgaaggccccattggacatcccagtgcctgatccagtcaaggagaaagagaaagaggagcggaagaaacagcaggagaaggaagacaaggatgaaaagaagaagggggaggatgaagacaaaggtcctccctgtggcccagtgaactgcaatgaaaagatcgtggtccttctgcagcgcttgaagcctgagatcaaggatgtcattgagcagctcaacctggtcaccacctggttgcagctgcagatacctcggattgaggatggtaacaattttggagtggctgtccaggagaaggtgtttgagctgatgaccagcctccacaccaagctagaaggcttccacactcaaatctctaagtatttctctgagcgtggtgatgcagtgactaaagcagccaagcagccccatgtgggtgattatcggcagctggtgcacgagctggatgaggcagagtaccgggacatccggctgatggtcatggagatccgcaatgcttatgctgtgttatatgacatcatcctgaagaacttcgagaagctcaagaagcccaggggagaaacaaagggaatgatctattgagagccctctctcccattctgtgatgagtacagcagagaccttcctgctttttactggggactccagattttccccaaacttgcttctgttgagatttttccctcaccttgcctctcaggcacaataaatatagttataccactgcaaaaaaaaaanannaaaaaanaanaaaaaaaaaaaaaanaaaaaaaaaaaaaaaaaaaaaaaaaaaaaaaaaaaaaaaaaaaaaagaaaaaaacaaaaaaaaaataaggaaaaaaaaaannannaaaaggaancccactgcccataaatcacatacacggggccgggaaaacccaacggtaacacatttaaacccttgcgattggaaactcccttggttccctacctaaacacttttaggcccttccctatttccattttgcccgtttcgtaactttttagaaattgggccttccaacttgaccacttctca

SEQ ID NO: 368793 - DNA, 1259 bp, Homo sapiens
atctgaaggcccattggacatcccagtgcctgatccagtcaaggagaaagagaaagaggagcggaagaaacagcaggagaaggtctgcagagatccaccttctccaccaccccaacccaccctacaggcatccatctcgctttcttcaggtctggccttagagggatcccctccacccttccccaggtcaggccctacataaccctaagggaactgtcctcaaatgaactggccttaaagccaagtttctgaagggatgcgtgtgccccacaggtggatgtgtttcgtgaagacctctgtaccaaggtaagacatgccccatcagcgtggccccacccctgcccaactcctactgctcaaccctgcctcactacctaggacgggcatttgatgctgactcccatcctcctccacccctcaccttccaccagcacagacagagaacctgctcgggagctatttccccaagaagatttctgagctggatgcatttttaaaggagccagctctcaatgaagccaacttgagcaatctgaaggccccattggacatcccagtgcctgatccagtcaaggagaaagagaaagaggagcggaagaaacagcaggagaaggaagacaaggatgaaaagaagaagggggaggatgaagacaaaggtcctccctgtggcccagtgaactgcaatgaaaagatcgtggtccttctgcagcgcttgaagcctgagatcaaggatgtcattgagcagctcaacctggtcaccacctggttgcagctgcagatacctcggattgaggatggtaacaattttggagtggctgtccaggagaaggtgtttgagctgatgaccagcctccacaccaagctagaaggcttccacactcaaatctctaagtatttctctgagcgtggtgatgcagtgactaaagcagccaagcagccccatgtgggtgattatcggcagctggtgcacgagctggatgaggcagagtaccgggacatccggctgatggtcatggagatccgcaatgcttatgctgtgttatatgacatcatcctgaagaacttcgagaagctcaagaagcccaggggagaaacaaagggaatgatctattgagagccctctctcccattctgtgatgagtacagcagagaccttcctgctttttactggggactccagattttccccaaacttgcttctgttgagatttttccctcaccttgcctctcaggcacaataaatatagttataccactgc

SEQ ID NO: 368794 - DNA, 928 bp, Homo sapiens
gcggagctgggtgcgagcgccctaccgctttcgctttcccttcgcggtgcccactccactccttgtgcggcgctaggccccccgtcccggtcatggccatgctcagggtccagcccgaggcccaagccaaggtggatgtgtttcgtgaagacctctgtaccaagacagagaacctgctcgggagctatttccccaagaagatttctgagctggatgcatttttaaaggagccagctctcaatgaagccaacttgagcaatctgaaggccccattggacatcccagtgcctgatccagtcaaggagaaagagaaagaggagcggaagaaacagcaggagaaggaagacaaggatgaaaagaagaagggggaggatgaagacaaaggtcctccctgtggcccagtgaactgcaatgaaaagatcggtcaccacctggttgcagctgcagatacctcggattgaggatggtaacaattttggagtggctgtccaggagaaggtgtttgagctgatgaccagcctccacaccaagctagaaggcttccacactcaaatctctaagtatttctctgagcgtggtgatgcagtgactaaagcagccaagcagccccatgtgggtgattatcggcagctggtgcacgagctggatgaggcagagtaccgggacatccggctgatggtcatggagatccgcaatgcttatgctgtgttatatgacatcatcctgaagaacttcgagaagctcaagaagcccaggggagaaacaaagggaatgatctattgagagccctctctcccattctgtgatgagtacagcagagaccttcctgctttttactggggactccagattttccccaaacttgcttctgttgagatttttccctcaccttgcctctcaggcacaataaatatagttataccactgc

SEQ ID NO: 368795 - DNA, 681 bp, Homo sapiens
accaagactcatattcttttgccaggcatccctaggcccctcccattcttattgaatacaagccgtgatcttacatctcctcagcatgaaaacaggtgaactgcaatgaaaagatcgtggtccttctgcagcgcttgaagcctgagatcaaggatgtcattgagcagctcaacctggtcaccacctggttgcagctgcagatacctcggattgaggatggtaacaattttggagtggctgtccaggagaaggtgtttgagctgatgaccagcctccacaccaagctagaaggcttccacactcaaatctctaagtatttctctgagcgtggtgatgcagtgactaaagcagccaagcagccccatgtgggtgattatcggcagctggtgcacgagctggatgaggcagagtaccgggacatccggctgatggtcatggagatccgcaatgcttatgctgtgttatatgacatcatcctgaagaacttcgagaagctcaagaagcccaggggagaaacaaagggaatgatctattgagagccctctctcccattctgtgatgagtacagcagagaccttcctgctttttactggggactccagattttccccaaacttgcttctgttgagatttttccctcaccttgcctctcaggcacaataaatatagttataccactgc

SEQ ID NO: 368796 - DNA, 1310 bp, Homo sapiens
gcggagctgggtgcgagcgccctaccgctttcgctttcccttcgcggtgcccactccactccttgtgcggcgctaggccccccgtcccggtcatggccatgctcagggtccagcccgaggcccaagccaaggtggatgtgtttcgtgaagacctctgtaccaaggtaagacatgccccatcagcgtggccccacccctgcccaactcctactgctcaaccctgcctcactacctaggacgggcatttgatgctgactcccatcctcctccacccctcaccttccaccagcacagacagagaacctgctcgggagctatttccccaagaagatttctgagctggatgcatttttaaaggtaccgcggctgggcagggagctagggagtaaaggccaagagaagagtctggaggctgtgagagtgaggtgagaggaactccctcacctccagccctcctcccaccctacaccaggagccagctctcaatgaagccaacttgagcaatctgaaggccccattggacatcccagtgcctgatccagtcaaggagaaagagaaagaggagcggaagaaacagcaggagaaggaagacaaggatgaaaagaagaagggggaggatgaagacaaaggtcctccctgtggcccagtgaactgcaatgaaaagatcgtggtccttctgcagcgcttgaagcctgagatcaaggatgtcattgagcagctcaacctggtcaccacctggttgcagctgcagatacctcggattgaggatggtaacaattttggagtggctgtccaggtgagagcgctgccccacttccctgctcttttctagtccatgcttccttccactttcccccttgctttttttccctaggagaaggtgtttgagctgatgaccagcctccacaccaagctagaaggcttccacactcaaatctctaagtatttctctgagcgtggtgatgcagtgactaaagcagccaagcagccccatgtgggtgattatcggcagctggtgcacgagctggatgaggcagagtaccgggacatccggctgatggtcatggagatccgcaatgcttatgctgtgttatatgacatcatcctgaagaacttcgagaagctcaagaagcccaggggagaaacaaagggaatgatctattgagagccctctctcccattctgtgatgagtacagcagagaccttcctgctttttactggggactccagattttccccaaacttgcttctgttgagatttttccctcaccttgcctctcaggcacaataaatatagttataccactgc

SEQ ID NO: 368797 - DNA, 620 bp, Homo sapiens
cacagtggcatgtggagacaacagtgtgtcccagtgacttttctttaccccccagctgtcggcagtactcagtggaagggtgatatgacactgatactgctattttgaaacctggaggatggaaaggtgcaaaaatctatcaccagcaacagaaggtgcagactgtgttggtggcggtaattttgtccatcaaatgaatatgtgtgaaaacattccctcctttggccctacaggtcagaatggcggcagcagagcatcgtcattcttcaggattgccctgctggccctacctcacagctgaaactttaaaaaacaggatgggccaccagccacctcctccaactcaacaacattctataactgataactccctgagcctcaagacacctgcggagtgtctgctctatccccttccaccctcagcggatgataatctcaagacacctccgagtgtctgctcactccccttccaccctcagctccaccctcagcggatgataatctcaagacacctcccaagtgtgtctgctcactccccttccaccctcagtggatgataatctgaagaaactaacgaagaataaataaataatataaaaataaaatgaatactgcagtcc

SEQ ID NO: 368798 - DNA, 459 bp, Homo sapiens
ctcatccctgtcctgagcaggtctgagctgccgcccgctgaccactgccctcgtcctgcaggtggctgggagcccgagccccacacctgccgggcagcaggtgctggacatcgacagctgcctggactcgtccgtgctggacagctccttcctcacgttctcaggcctccacgctgagtgaccttgaggaaccctgggagctcaggaaggaaggagcgcccagaagcagggacagggagctggttggggaggaccagaaatcaggttatcaatactctggctgaccatcgtcatcgtgggactgactttggtggaagtccttggttacttatcattactgtgtttctgagaagttataaatttgccatctccctctgcacaagttacctttgtgtgagtatactaactttctgtagaggtatacttgtaatcacaaataagagtaaattatatgaaaca

SEQ ID NO: 368799 - DNA, 550 bp, Homo sapiens
cacagtggcatgtggagacaacagtgtgtcccagtgacttttctttaccccccagctgtcggcagtactcagtggaagggtgatatgacactgatactgctattttgaaacctggaggatggaaaggtgcaaaaatctatcaccagcaacagaaggtgcagactgtgttggtggcggtaattttgtccatcaaatgaatatgtgtgaaaacattccctcctttggccctacaggtcagaatggcggcagcagagcatcgtcattcttcaggattgccctgctggccctacctcacagctgaaactttaaaaaacaggatgggccaccagccacctcctccaactcaacaacattctataactgataactccctgagcctcaagacacctgcggagtgtctgctctatccccttccaccctcagcggatgataatctcaagacctcccaagtgtgtctgctcactccccttccaccctcagtggatgataatctgaagaaactaacgaagaataaataaataatataaaaataaaatgaatactgcagtcc

SEQ ID NO: 368800 - DNA, 1233 bp, Homo sapiens
ggttcttcctgccatcctgccatcattgttttttatgttttgtcgccaaaagtgaccttgaggaaccctgggagctcaggaaggaaggagcgcccagaagcagggacagggagctggttggggtggaccagaaatcaggttatcaatactctggctgaccatcgtcatcgtgggactgactttggtggaagtccttggttacttatcattactgtgtttctgagaagttataaatttgccatctccctctgcacaacttacctttgggttatcaatactctggctgaccatcgtcatcgtgggactgactttggtggaagtccttggttacttatcattactgtgtttctgagaagttataaatttgccatctccctctgcacaagttacctttgtgtgtctttcctgaagactatcttcccgtctcaaaatggacatgatggatccacggatgtacagcagagagccaggaggtccaaccgccgtagacaggaaggaattaaaattgtcctggaagacatctttactttatggagacaggtggaaaccaaggttcgagctaaaatccgtaagatgaaggtgacaacaaaagtcaaccgtcatgacaaaatcaatggaaagaagaagaccgccaaagaacatctgaggaaactaagcatgaaagaacgtgagcacggagaaaaggagaggcaggtgtcagaggcagaggaaaacgggaaattggatatgaaagaaatacacacctacatggaaatgtttcaacgtgcgcaagcgttgcggcggcgggcagaggactactacagatgcaaaatcaccccttctgcaagaaagcctctttgcaaccgggtcagaatggcggcagcagagcatcgtcattcttcaggattgccctgctggccctacctcacagctgaaactttaaaaaacaggatgggccaccagccacctcctccaactcaacaacattctataactgataactccctgagcctcaagacacctgcggagtgtctgctctatccccttccaccctcagcggatgataatctcaagacacctccgagtgtctgctcactccccttccaccctcagctccaccctcagcggatgataatctcaagacacctcccaagtgtgtctgctcactccccttccaccctcagtggatgataatctgaagaaactaacgaagaataaataaataatataaaaataaaatgaatactgcagtcc

SEQ ID NO: 368801 - DNA, 1273 bp, Homo sapiens
ctcatccctgtcctgagcaggtctgagctgccgcccgctgaccactgccctcgtcctgcaggtggctgggagcccgagccccacacctgccgggcagcaggtgctggacatcgacagctgcctggactcgtccgtgctggacagctccttcctcacgttctcaggcctccacgctgaggttatcaatactctggctgaccatcgtcatcgtgggactgactttggtggaagtccttggttacttatcattactgtgtttctgagaagttataaatttgccatctccctctgcacaacttacctttgggttatcaatactctggctgaccatcgtcatcgtgggactgactttggtggaagtccttggttacttatcattactgtgtttctgagaagttataaatttgccatctccctctgcacaagttacctttgtgtgtctttcctgaagactatcttcccgtctcaaaatggacatgatggatccacggatgtacagcagagagccaggaggtccaaccgccgtagacaggaaggaattaaaattgtcctggaagacatctttactttatggagacaggtggaaaccaaggttcgagctaaaatccgtaagatgaaggtgacaacaaaagtcaaccgtcatgacaaaatcaatggaaagaagaagaccgccaaagaacatctgaggaaactaagcatgaaagaacgtgagcacggagaaaaggagaggcaggtgtcagaggcagaggaaaacgggaaattggatatgaaagaaatacacacctacatggaaatgtttcaacgtgcgcaagcgttgcggcggcgggcagaggactactacagatgcaaaatcaccccttctgcaagaaagcctctttgcaaccgggtcagaatggcggcagcagagcatcgtcattcttcaggattgccctgctggccctacctcacagctgaaactttaaaaaacaggatgggccaccagccacctcctccaactcaacaacattctataactgataactccctgagcctcaagacacctgcggagtgtctgctctatccccttccaccctcagcggatgataatctcaagacacctccgagtgtctgctcactccccttccaccctcagctccaccctcagcggatgataatctcaagacacctcccaagtgtgtctgctcactccccttccaccctcagtggatgataatctgaagaaactaacgaagaataaataaataatataaaaataaaatgaatactgcagtcc

SEQ ID NO: 368802 - DNA, 1351 bp, Homo sapiens
ctcatccctgtcctgagcaggtctgagctgccgcccgctgaccactgccctcgtcctgcaggtggctgggagcccgagccccacacctgccgggcagcaggtgctggacatcgacagctgcctggactcgtccgtgctggacagctccttcctcacgttctcaggcctccacgctgaggtgagggctctactgggggtcctgccgccttggcgcagcttggactcaagaccctgtgcacctctcagcaggcctttgctggacagatgaagagtgacttgtttctggatgattctaagagtgaccttgaggaaccctgggagctcaggaaggaaggagcgcccagaagcagggacagggagctggttggggaggaccagaaatcaggttatcaatactctggctgaccatcgtcatcgtgggactgactttggtggaagtccttggttacttatcattactgtgtttctgagaagttataaatttgccatctccctctgcacaagttacctttgtgtgtctttcctgaagactatcttcccgtctcaaaatggacatgatggatccacggatgtacagcagagagccaggaggtccaaccgccgtagacaggaaggaattaaaattgtcctggaagacatctttactttatggagacaggtggaaaccaaggttcgagctaaaatccgtaagatgaaggtgacaacaaaagtcaaccgtcatgacaaaatcaatggaaagaagaagaccgccaaagaacatctgaggaaactaagcatgaaagaacgtgagcacggagaaaaggagaggcaggtgtcagaggcagaggaaaacgggaaattggatatgaaagaaatacacacctacatggaaatgtttcaacgtgcgcaagcgttgcggcggcgggcagaggactactacagatgcaaaatcaccccttctgcaagaaagcctctttgcaaccgggtcagaatggcggcagcagagcatcgtcattcttcaggattgccctgctggccctacctcacagctgaaactttaaaaaacaggatgggccaccagccacctcctccaactcaacaacattctataactgataactccctgagcctcaagacacctgcggagtgtctgctctatccccttccaccctcagcggatgataatctcaagacacctccgagtgtctgctcactccccttccaccctcagctccaccctcagcggatgataatctcaagacacctcccaagtgtgtctgctcactccccttccaccctcagtggatgataatctgaagaaactaacgaagaataaataaataatataaaaataaaatgaatactgcagtcc

SEQ ID NO: 368803 - DNA, 1193 bp, Homo sapiens
gcctggccaaaatatataaccttaagtgttatcaatactctggctgaccatcgtcatcgtgggactgactttggtggaagtccttggttacttatcattactgtgtttctgagaagttataaatttgccatctccctctgcacaacttacctttgggttatcaatactctggctgaccatcgtcatcgtgggactgactttggtggaagtccttggttacttatcattactgtgtttctgagaagttataaatttgccatctccctctgcacaagttacctttgtgtgtctttcctgaagactatcttcccgtctcaaaatggacatgatggatccacggatgtacagcagagagccaggaggtccaaccgccgtagacaggaaggaattaaaattgtcctggaagacatctttactttatggagacaggtggaaaccaaggttcgagctaaaatccgtaagatgaaggtgacaacaaaagtcaaccgtcatgacaaaatcaatggaaagaagaagaccgccaaagaacatctgaggaaactaagcatgaaagaacgtgagcacggagaaaaggagaggcaggtgtcagaggcagaggaaaacgggaaattggatatgaaagaaatacacacctacatggaaatgtttcaacgtgcgcaagcgttgcggcggcgggcagaggactactacagatgcaaaatcaccccttctgcaagaaagcctctttgcaaccgggtcagaatggcggcagcagagcatcgtcattcttcaggattgccctgctggccctacctcacagctgaaactttaaaaaacaggatgggccaccagccacctcctccaactcaacaacattctataactgataactccctgagcctcaagacacctgcggagtgtctgctctatccccttccaccctcagcggatgataatctcaagacacctccgagtgtctgctcactccccttccaccctcagctccaccctcagcggatgataatctcaagacacctcccgagtgtgtctgctcactccccttccaccctcagctccaccctcagcggatgataatctcaagacacctcccaagtgtgtctgctcactccccttccaccctcagtggatgataatctgaagaaactaacgaagaataaataaataatataaaaataaaatgaatactgcagtcc

SEQ ID NO: 368804 - DNA, 1367 bp, Homo sapiens
gtcgacacagtcgctgttggcctggtgtccagcgtggttgtctatcccgtctacctggccatcctctttctcttccggatgtcccggagcaaggtggctgggagcccgagccccacacctgccgggcagcaggtgctggacatcgacagctgcctggactcgtccgtgctggacagctccttcctcacgttctcaggcctccacgctgaggtgagggctctactgggggtcctgccgccttggcgcagcttggactcaagaccctgtgcacctctcagcaggcctttgctggacagatgaagagtgacttgtttctggatgattctaagaggttatcaatactctggctgaccatcgtcatcgtgggactgactttggtggaagtccttggttacttatcattactgtgtttctgagaagttataaatttgccatctccctctgcacaagttacctttgtgtgtctttcctgaagactatcttcccgtctcaaaatggacatgatggatccacggatgtacagcagagagccaggaggtccaaccgccgtagacaggaaggaattaaaattgtcctggaagacatctttactttatggagacaggtggaaaccaaagttcgagctaaaatccgtaagatgaaggtgacaacaaaagtcaaccgtcatgacaaaatcaatggaaagaggaagaccgccaaagaacatctgaggaaactaagcatgaaagaacgtgagcacggagaaaaggagaggcaggtgtcagaggcagaggaaaacgggaaattggatatgaaagaaatacacacctacatggaaatgtttcaacgtgcgcaagcgttgcggcggcgggcagaggactactacagatgcaaaatcaccccttctgcaagaaagcctctttgcaaccggtgcacttacaatttggtattacctgggagtgaaaagaaatattacagccatgcctaactgacttcttgaggtcagaatggcggcagcagagcatcgtcattcttcaggattgccctgctggccctacctcacagctgaaactttaaaaaacaggatgggccaccagccacctcctccaactcaacaacattctataactgataactccctgagcctcaagacacctgcggagtgtctgctctatccccttccaccctcagcggatgataatctcaagacacctccgagtgtctgctcactccccttccaccctcagctccaccctcagcggatgataatctcaagacacctcccaagtgtgtctgctcactccccttccaccctcagtggatgataatctgaagaaactaacgaagaataaataaataatataaaaataaaatgaatactgcagtcc

SEQ ID NO: 368805 - DNA, 1422 bp, Homo sapiens
gtcgacacagtcgctgttggcctggtgtccagcgtggttgtctatcccgtctacctggccatcctctttctcttccggatgtcccggagcaaggtggctgggagcccgagccccacacctgccgggcagcaggtgctggacatcgacagctgcctggactcgtccgtgctggacagctccttcctcacgttctcaggcctccacgctgaggtgagggctctactgggggtcctgccgccttggcgcagcttggactcaagaccctgtgcacctctcagcaggcctttgctggacagatgaagagtgacttgtttctggatgattctaagaggttatcaatactctggctgaccatcgtcatcgtgggactgactttggtggaagtccttggttacttatcattactgtgtttctgagaagttataaatttgccatctccctctgcacaagttacctttgtgtgtctttcctgaagactatcttcccgtctcaaaatggacatgatggatccacggatgtacagcagagagccaggaggtccaaccgccgtagacaggaaggaattaaaattgtcctggaagacatctttactttatggagacaggtggaaaccaaagttcgagctaaaatccgtaagatgaaggtgacaacaaaagtcaaccgtcatgacaaaatcaatggaaagaggaagaccgccaaagaacatctgaggaaactaagcatgaaagaacgtgagcacggagaaaaggagaggcaggtgtcagaggcagaggaaaacgggaaattggatatgaaagaaatacacacctacatggaaatgtttcaacgtgcgcaagcgttgcggcggcgggcagaggactactacagatgcaaaatcaccccttctgcaagaaagcctctttgcaaccggtgcacttacaatttggtattacctgggagtgaaaagaaatattacagccatgcctaactgacttcttgaggtcagaatggcggcagtggagcatcgtcattcttcaggattgccctactggccctacctcacagctgaaactttaaaaaacaggatgggccaccagccacctcctccaactcaacaacattctataattgataactccctgagcctcaagacaccttccgagtgtctgctcactccccttccaccctcagctctaccctcagcggatgataatctcaagacacctgcggagtgtctgctctatccccttccaccctcagcggatgataatctcaagacacctcccgagtgtctgctcactccccttccaccctcagctccaccctcagtggatgataatctcaagacacctcccgagtgtgtctgctcactccccttccaccctcagcggatgataatctcaagaaactaaggaagaataaataaataatataaaaataaaa

SEQ ID NO: 368806 - DNA, 1011 bp, Homo sapiens
ggttcttcctgccatcctgccatcattgttttttatgttttgtcgccaaaagtgaccttgaggaaccctgggagctcaggaaggaaggagcgcccagaagcagggacagggagctggttggggtggaccagaaatcaggttatcaatactctggctgaccatcgtcatcgtgggactgactttggtggaagtccttggttacttatcattactgtgtttctgagaagttataaatttgccatctccctctgcacaacttacctttgggttatcaatactctggctgaccatcgtcatcgtgggactgactttggtggaagtccttggttacttatcattactgtgtttctgagaagttataaatttgccatctccctctgcacaagttacctttgtgtgtctttcctgaagactatcttcccgtctcaaaatggacatgatggatccacggatgtacagcagagagccaggaggtccaaccgccgtagacaggaaggaattaaaattgtcctggaagacatctttactttatggagacaggtggaaaccaaggttcgagctaaaatccgtaagatgaaggtgacaacaaaagtcaaccgtcatgacaaaatcaatggaaagaagaagaccgccaaagaacatctgaggaaactaagcatgaaagaacgtgagcacggagaaaaggagaggcaggtgtcagaggcagaggaaaacgggaaattggatatgaaagaaatacacacctacatggaaatgtttcaacgtgcgcaagcgttgcggcggcgggcagaggactactacagatgcaaaatcaccccttctgcaagaaagcctctttgcaaccgggtcagaatggcggcagcagagcatcgtcattcttcaggattgccctgctggccctacctcacagctgaaactttaaaaaacaggatgggccaccagccacctcctccaactcaacaacattctcccactcctgatttccaccttgccagggtacccgagctcgaa

SEQ ID NO: 368807 - DNA, 1479 bp, Homo sapiens
gtcgacacagtcgctgttggcctggtgtccagcgtggttgtctatcccgtctacctggccatcctctttctcttccggatgtcccggagcaaggtggctgggagcccgagccccacacctgccgggcagcaggtgctggacatcgacagctgcctggactcgtccgtgctggacagctccttcctcacgttctcaggcctccacgctgaggtgagggctctactgggggtcctgccgccttggcgcagcttggactcaagaccctgtgcacctctcagcaggcctttgctggacagatgaagagtgacttgtttctggatgattctaagaggttatcaatactctggctgaccatcgtcatcgtgggactgactttggtggaagtccttggttacttatcattactgtgtttctgagaagttataaatttgccatctccctctgcacaagttacctttgtgtgtctttcctgaagactatcttcccgtctcaaaatggacatgatggatccacggatgtacagcagagagccaggaggtccaaccgccgtagacaggaaggaattaaaattgtcctggaagacatctttactttatggagacaggtggaaaccaaagttcgagctaaaatccgtaagatgaaggtgacaacaaaagtcaaccgtcatgacaaaatcaatggaaagaggaagaccgccaaagaacatctgaggaaactaagcatgaaagaacgtgagcacggagaaaaggagaggcaggtgtcagaggcagaggaaaacgggaaattggatatgaaagaaatacacacctacatggaaatgtttcaacgtgcgcaagcgttgcggcggcgggcagaggactactacagatgcaaaatcaccccttctgcaagaaagcctctttgcaaccggtgcacttacaatttggtattacctgggagtgaaaagaaatattacagccatgcctaactgacttcttgaggtcagaatggcggcagtggagcatcgtcattcttcaggattgccctactggccctacctcacagctgaaactttaaaaaacaggatgggccaccagccacctcctccaactcaacaacattctataattgataactccctgagcctcaagacaccttccgagcgtctgctctatccccttccaccctcagcggatgataatctcaagacaccttccgagtgtctgctcactccccttccaccctcagctctaccctcagcggatgataatctcaagacacctgcggagtgtctgctctatccccttccaccctcagcggatgataatctcaagacacctcccgagtgtctgctcactccccttccaccctcagctccaccctcagtggatgataatctcaagacacctcccgagtgtgtctgctcactccccttccaccctcagcggatgataatctcaagaaactaaggaagaataaataaataatataaaaataaaa

SEQ ID NO: 368808 - DNA, 1297 bp, Homo sapiens
gtcgacacagtcgctgttggcctggtgtccagcgtggttgtctatcccgtctacctggccatcctctttctcttccggatgtcccggagcaaggtggctgggagcccgagccccacacctgccgggcagcaggtgctggacatcgacagctgcctggactcgtccgtgctggacagctccttcctcacgttctcaggcctccacgctgaggtgagggctctactgggggtcctgccgccttggcgcagcttggactcaagaccctgtgcacctctcagcaggcctttgctggacagatgaagagtgacttgtttctggatgattctaagaggttatcaatactctggctgaccatcgtcatcgtgggactgactttggtggaagtccttggttacttatcattactgtgtttctgagaagttataaatttgccatctccctctgcacaagttacctttgtgtgtctttcctgaagactatcttcccgtctcaaaatggacatgatggatccacggatgtacagcagagagccaggaggtccaaccgccgtagacaggaaggaattaaaattgtcctggaagacatctttactttatggagacaggtggaaaccaaagttcgagctaaaatccgtaagatgaaggtgacaacaaaagtcaaccgtcatgacaaaatcaatggaaagaggaagaccgccaaagaacatctgaggaaactaagcatgaaagaacgtgagcacggagaaaaggagaggcaggtgtcagaggcagaggaaaacgggaaattggatatgaaagaaatacacacctacatggaaatgtttcaacgtgcgcaagcgttgcggcggcgggcagaggactactacagatgcaaaatcaccccttctgcaagaaagcctctttgcaaccgggtcagaatggcggcagcagagcatcgtcattcttcaggattgccctgctggccctacctcacagctgaaactttaaaaaacaggatgggccaccagccacctcctccaactcaacaacattctataactgataactccctgagcctcaagacacctgcggagtgtctgctctatccccttccaccctcagcggatgataatctcaagacacctccgagtgtctgctcactccccttccaccctcagctccaccctcagcggatgataatctcaagacacctcccaagtgtgtctgctcactccccttccaccctcagtggatgataatctgaagaaactaacgaagaataaataaataatataaaaataaaatgaatactgcagtcc

SEQ ID NO: 368809 - DNA, 1171 bp, Homo sapiens
ggttcttcctgccatcctgccatcattgttttttatgttttgtcgccaaaagtgaccttgaggaaccctgggagctcaggaaggaaggagcgcccagaagcagggacagggagctggttggggtggaccagaaatcaggttatcaatactctggctgaccatcgtcatcgtgggactgactttggtggaagtccttggttacttatcattactgtgtttctgagaagttataaatttgccatctccctctgcacaacttacctttgggttatcaatactctggctgaccatcgtcatcgtgggactgactttggtggaagtccttggttacttatcattactgtgtttctgagaagttataaatttgccatctccctctgcacaagttacctttgtgtgtctttcctgaagactatcttcccgtctcaaaatggacatgatggatccacggatgtacagcagagagccaggaggtccaaccgccgtagacaggaaggaattaaaattgtcctggaagacatctttactttatggagacaggtggaaaccaaggttcgagctaaaatccgtaagatgaaggtgacaacaaaagtcaaccgtcatgacaaaatcaatggaaagaagaagaccgccaaagaacatctgaggaaactaagcatgaaagaacgtgagcacggagaaaaggagaggcaggtgtcagaggcagaggaaaacgggaaattggatatgaaagaaatacacacctacatggaaatgtttcaacgtgcgcaagcgttgcggcggcgggcagaggactactacagatgcaaaatcaccccttctgcaagaaagcctctttgcaaccgggtaagtttgcttgttttccttgcttttggacatagtctgccaggtcaggacatggatacatttttctccctacggctctgtgctcaagccctgcagagggagatggcagagaggaaggctgcctacaagcatcacagtcccatccctgttggtaaccgtgttgcgcaaaaacaccttcatccccacccagtggggcccccatctaatattctaagtgtcagaggttccgtatttgtaatagcaaatgggccctgactgtaaattagtgaagagtgactgtaacttattacccacagggacaattccaaatgagggccttaaatga

SEQ ID NO: 368810 - DNA, 480 bp, Homo sapiens
aggtcacgtcctatatcccaacatcataccttcccagattcattacttgtatcctaaaccaagcttcaggccaccagccacctcctccaactcaacaacattctataattgataactccctgagcctcaagacaccttccgagcgtctgctctatccccttccaccctcagcggatgataatctcaagacaccttccgagtgtctgctcactccccttccaccctcagctctaccctcagcggatgataatctcaagacacctgcggagtgtctgctctatccccttccaccctcagcggatgataatctcaagacacctcccgagtgtctgctcactccccttccaccctcagctccaccctcagtggatgataatctcaagacacctcccgagtgtgtctgctcactccccttccaccctcagcggatgataatctcaagaaactaaggaagaataaataaataatataaaaataaaa

SEQ ID NO: 368811 - DNA, 755 bp, Homo sapiens
cctacacgacattgagtaccgcaagaaatgggacagcaacgtcatcgagacttttgacatcgcccgcttgacagtcaacgctgacgtgggctattactcctgtgagcaggcgtagcacgctgatcccagtccccttggcctccatccaggcctcccaccaagcctccccttccaccctcagctctaccctcagcggatgataatctcaagacacctgcggagtgtctgctctatccccttccaccctcagcggatgataatctcaagacacctcccgagtgtctgctcactccccttccaccctcagctccaccctcagtggatgataatctcaagacacctcccgagtgtgtctgctcactccccttccaccctcagcggatgataatctcaagaaactaaggaagaataaataaataatataaaaataaaaaaaaaaaaaaaaaaaaaaaaaaaaaataaaaaataaaggaccgcactgctaattcctcgtgcaccggataactatgtcgccactctacaaaccctgatggccccacagtcatctttcaccatgtccgacagcatctacaggtcagcatcttttcgagctacaagcttccgcggaccctacttggcaattggctaatctgaaagcactatgtgctttataaatcagctaatatttcacgttacatccggtcatttttttgcgcttaaggccatctccttgcaatggcctttagtcgatgaaattccccttatatcggaggccg

SEQ ID NO: 368812 - DNA, 333 bp, Homo sapiens
tccctgagcctcaagacaccttccgagtgtctgctcactccccttccaccctcagctctaccctcagcggatgataatctcaagacacctgcggagtgtctgctctatccccttccaccctcagcggatgataatctcaagacacctcccgagtgtctgctcactccccttccaccctcagctccaccctcagtggatgataatctcaagacacctcccgagtgtgtctgctcactccccttccaccctcagcggatgataatctcaagaaactaaggaagaataaataaataatataaaaataaaatgaatactgcagtccttatgttattg

SEQ ID NO: 368813 - DNA, 1084 bp, Homo sapiens
atgttttgttgcttaggatatgaatggctgagcggaggctgtaaaacctggcactctgcttgggttatcaatactctggctgaccatcgtcatcgtgggactgactttggtggaagtccttggttacttatcattactgtgtttctgagaagttataaatttgccatctccctctgcacaagttacctttgtgtgtctttcctgaagactatcttcccgtctcaaaatggacatgatggatccacggatgtacagcagagagccaggaggtccaaccgccgtagacaggaaggaattaaaattgtcctggaagacatctttactttatggagacaggtggaaaccaaagttcgagctaaaatccgtaagatgaaggtgacaacaaaagtcaaccgtcatgacaaaatcaatggaaagaggaagaccgccaaagaacatctgaggaaactaagcatgaaagaacgtgagcacggagaaaaggagaggcaggtgtcagaggcagaggaaaacgggaaattggatatgaaagaaatacacacctacatggaaatgtttcaacgtgcgcaagcgttgcggcggcgggcagaggactactacagatgcaaaatcaccccttctgcaagaaagcctctttgcaaccgggtcagaatggcggcagtggagcatcgtcattcttcaggattgccctactggccctacctcacagctgaaactttaaaaaacaggatgggccaccagccacctcctccaactcaacaacattctataattgataactccctgagcctcaagacaccttccgagtgtctgctcactccccttccaccctcagctctaccctcagcggatgataatctcaagacacctgcggagtgtctgctctatccccttccaccctcagcggatgataatctcaagacacctcccgagtgtctgctcactccccttccaccctcagctccaccctcagtggatgataatctcaagacacctcccgagtgtgtctgctcactccccttccaccctcagcggatgataatctcaagaaactaaggaagaataaataaataatataaaaataaaa

SEQ ID NO: 368814 - DNA, 1122 bp, Homo sapiens
gcctggccaaaatatataaccttaagtgttatcaatactctggctgaccatcgtcatcgtgggactgactttggtggaagtccttggttacttatcattactgtgtttctgagaagttataaatttgccatctccctctgcacaacttacctttgggttatcaatactctggctgaccatcgtcatcgtgggactgactttggtggaagtccttggttacttatcattactgtgtttctgagaagttataaatttgccatctccctctgcacaagttacctttgtgtgtctttcctgaagactatcttcccgtctcaaaatggacatgatggatccacggatgtacagcagagagccaggaggtccaaccgccgtagacaggaaggaattaaaattgtcctggaagacatctttactttatggagacaggtggaaaccaaggttcgagctaaaatccgtaagatgaaggtgacaacaaaagtcaaccgtcatgacaaaatcaatggaaagaagaagaccgccaaagaacatctgaggaaactaagcatgaaagaacgtgagcacggagaaaaggagaggcaggtgtcagaggcagaggaaaacgggaaattggatatgaaagaaatacacacctacatggaaatgtttcaacgtgcgcaagcgttgcggcggcgggcagaggactactacagatgcaaaatcaccccttctgcaagaaagcctctttgcaaccgggtcagaatggcggcagcagagcatcgtcattcttcaggattgccctgctggccctacctcacagctgaaactttaaaaaacaggatgggccaccagccacctcctccaactcaacaacattctataactgataactccctgagcctcaagacacctgcggagtgtctgctctatccccttccaccctcagcggatgataatctcaagacacctccgagtgtctgctcactccccttccaccctcagctccaccctcagcggatgataatctcaagacacctcccaagtgtgtctgctcactccccttccaccctcagtggatgataatctgaagaaactaacgaagaataaataaataatataaaaataaaatgaatactgcagtcc

SEQ ID NO: 368815 - DNA, 1265 bp, Homo sapiens
ctcatccctgtcctgagcaggtctgagctgccgcccgctgaccactgccctcgtcctgcaggtggctgggagcccgagccccacacctgccgggcagcaggtgctggacatcgacagctgcctggactcgtccgtgctggacagctccttcctcacgttctcaggcctccacgctgaggtgagggctctactgggggtcctgccgccttggcgcagcttggactcaagaccctgtgcacctctcagcaggcctttgctggacagatgaagagtgacttgtttctggatgattctaagaggttatcaatactctggctgaccatcgtcatcgtgggactgactttggtggaagtccttggttacttatcattactgtgtttctgagaagttataaatttgccatctccctctgcacaagttacctttgtgtgtctttcctgaagactatcttcccgtctcaaaatggacatgatggatccacggatgtacagcagagagccaggaggtccaaccgccgtagacaggaaggaattaaaattgtcctggaagacatctttactttatggagacaggtggaaaccaaggttcgagctaaaatccgtaagatgaaggtgacaacaaaagtcaaccgtcatgacaaaatcaatggaaagaagaagaccgccaaagaacatctgaggaaactaagcatgaaagaacgtgagcacggagaaaaggagaggcaggtgtcagaggcagaggaaaacgggaaattggatatgaaagaaatacacacctacatggaaatgtttcaacgtgcgcaagcgttgcggcggcgggcagaggactactacagatgcaaaatcaccccttctgcaagaaagcctctttgcaaccgggtcagaatggcggcagcagagcatcgtcattcttcaggattgccctgctggccctacctcacagctgaaactttaaaaaacaggatgggccaccagccacctcctccaactcaacaacattctataactgataactccctgagcctcaagacacctgcggagtgtctgctctatccccttccaccctcagcggatgataatctcaagacacctccgagtgtctgctcactccccttccaccctcagctccaccctcagcggatgataatctcaagacacctcccaagtgtgtctgctcactccccttccaccctcagtggatgataatctgaagaaactaacgaagaataaataaataatataaaaataaaatgaatactgcagtcc

SEQ ID NO: 368816 - DNA, 1019 bp, Homo sapiens
gcctggccaaaatatataaccttaagtgttatcaatactctggctgaccatcgtcatcgtgggactgactttggtggaagtccttggttacttatcattactgtgtttctgagaagttataaatttgccatctccctctgcacaacttacctttgggttatcaatactctggctgaccatcgtcatcgtgggactgactttggtggaagtccttggttacttatcattactgtgtttctgagaagttataaatttgccatctccctctgcacaagttacctttgtgtgtctttcctgaagactatcttcccgtctcaaaatggacatgatggatccacggatgtacagcagagagccaggaggtccaaccgccgtagacaggaaggaattaaaattgtcctggaagacatctttactttatggagacaggtggaaaccaaggttcgagctaaaatccgtaagatgaaggtgacaacaaaagtcaaccgtcatgacaaaatcaatggaaagaagaagaccgccaaagaacatctgaggaaactaagcatgaaagaacgtgagcacggagaaaaggagaggcaggtgtcagaggcagaggaaaacgggaaattggatatgaaagaaatacacacctacatggaaatgtttcaacgtgcgcaagcgttgcggcggcgggcagaggactactacagatgcaaaatcaccccttctgcaagaaagcctctttgcaaccgggtcagaatggcggcagcagagcatcgtcattcttcaggattgccctgctggccctacctcacagctgaaactttaaaaaacaggatgggccaccagccacctcctccaactcaacaacattctataactgataactccctgagcctcaagacacctgcggagtgtctgctctatccccttccaccctcagcggatgataatctcaagacgagtgtcctcttgctcctctgccacactcagtggatgataatctgaagcagtgtcttctggtaacctcctgcgcg

SEQ ID NO: 368817 - DNA, 1453 bp, Homo sapiens
gtcgacacagtcgctgttggcctggtgtccagcgtggttgtctatcccgtctacctggccatcctctttctcttccggatgtcccggagcaaggtggctgggagcccgagccccacacctgccgggcagcaggtgctggacatcgacagctgcctggactcgtccgtgctggacagctccttcctcacgttctcaggcctccacgctgaggtgagggctctactgggggtcctgccgccttggcgcagcttggactcaagaccctgtgcacctctcagcaggcctttgctggacagatgaagagtgacttgtttctggatgattctaagagtgaccttgaggaaccctgggagctcaggaaggaaggagcgcccagaagcagggacagggagctggttggggaggaccagaaatcaggttatcaatactctggctgaccatcgtcatcgtgggactgactttggtggaagtccttggttacttatcattactgtgtttctgagaagttataaatttgccatctccctctgcacaagttacctttgtgtgtctttcctgaagactatcttcccgtctcaaaatggacatgatggatccacggatgtacagcagagagccaggaggtccaaccgccgtagacaggaaggaattaaaattgtcctggaagacatctttactttatggagacaggtggaaaccaaagttcgagctaaaatccgtaagatgaaggtgacaacaaaagtcaaccgtcatgacaaaatcaatggaaagaggaagaccgccaaagaacatctgaggaaactaagcatgaaagaacgtgagcacggagaaaaggagaggcaggtgtcagaggcagaggaaaacgggaaattggatatgaaagaaatacacacctacatggaaatgtttcaacgtgcgcaagcgttgcggcggcgggcagaggactactacagatgcaaaatcaccccttctgcaagaaagcctctttgcaaccggtgcacttacaatttggtattacctgggagtgaaaagaaatattacagccatgcctaactgacttcttgaggtcagaatggcggcagcagagcatcgtcattcttcaggattgccctgctggccctacctcacagctgaaactttaaaaaacaggatgggccaccagccacctcctccaactcaacaacattctataactgataactccctgagcctcaagacacctgcggagtgtctgctctatccccttccaccctcagcggatgataatctcaagacacctccgagtgtctgctcactccccttccaccctcagctccaccctcagcggatgataatctcaagacacctcccaagtgtgtctgctcactccccttccaccctcagtggatgataatctgaagaaactaacgaagaataaataaataatataaaaataaaatgaatactgcagtcc

SEQ ID NO: 368818 - DNA, 1104 bp, Homo sapiens
gaaacctatataggagcagatctctgactgggcagatgatgagtgactgtactggatgattctaagaggttatcaatactctggctgaccatcgtcatcgtgggactgactttggtggaagtccttggttacttatcattactgtgtttctgagaagttataaatttgccatctccctctgcacaagttacctttgtgtgtctttcctgaagactatcttcccgtctcaaaatggacatgatggatccacggatgtacagcagagagccaggaggtccaaccgccgtagacaggaaggaattaaaattgtcctggaagacatctttactttatggagacaggtggaaaccaaagttcgagctaaaatccgtaagatgaaggtgacaacaaaagtcaaccgtcatgacaaaatcaatggaaagaggaagaccgccaaagaacatctgaggaaactaagcatgaaagaacgtgagcacggagaaaaggagaggcaggtgtcagaggcagaggaaaacgggaaattggatatgaaagaaatacacacctacatggaaatgtttcaacgtgcgcaagcgttgcggcggcgggcagaggactactacagatgcaaaatcaccccttctgcaagaaagcctctttgcaaccggtgcacttacaatttggtattacctgggagtgaaaagaaatattacagccatgcctaactgacttcttgaggtcagaatggcggcagcagagcatcgtcattcttcaggattgccctgctggccctacctcacagctgaaactttaaaaaacaggatgggccaccagccacctcctccaactcaacaacattctataactgataactccctgagcctcaagacacctgcggagtgtctgctctatccccttccaccctcagcggatgataatctcaagacacctccgagtgtctgctcactccccttccaccctcagctccaccctcagcggatgataatctcaagacacctcccaagtgtgtctgctcactccccttccaccctcagtggatgataatctgaagaaactaacgaagaataaataaataatataaaaataaaatgaatactgcagtcc

SEQ ID NO: 368819 - DNA, 636 bp, Homo sapiens
gacagggtttcactgtattagccaggatggtctcaatctcctgacctcgtgatccatccacctcgccctcccagagtgctgggattacaggcatcagccaccgtgaccggctcagactgtactcttacagccatctgaaatacgttttctagggaaatgtttcaacgtgcgcaagcgttgcggcggcgggcagaggactactacagatgcaaaatcaccccttctgcaagaaagcctctttgcaaccgggtcagaatggcggcagcagagcatcgtcattcttcaggattgccctgctggccctacctcacagctgaaactttaaaaaacaggatgggccaccagccacctcctccaactcaacaacattctataactgataactccctgagcctcaagacacctgcggagtgtctgctctatccccttccaccctcagcggatgataatctcaagacacctccgagtgtctgctcactccccttccaccctcagctccaccctcagcggatgataatctcaagacacctcccaagtgtgtctgctcactccccttccaccctcagtggatgataatctgaagaaactaacgaagaataaataaataatataaaaataaaatgaatactgcagtcc

SEQ ID NO: 368820 - DNA, 1744 bp, Homo sapiens
gtcgacacagtcgctgttggcctggtgtccagcgtggttgtctatcccgtctacctggccatcctctttctcttccggatgtcccggagcaaggtggctgggagcccgagccccacacctgccgggcagcaggtgctggacatcgacagctgcctggactcgtccgtgctggacagctccttcctcacgttctcaggcctccacgctgaggtgagggctctactgggggtcctgccgccttggcgcagcttggactcaagaccctgtgcacctctcagcaggcctttgctggacagatgaagagtgacttgtttctggatgattctaagaggttatcaatactctggctgaccatcgtcatcgtgggactgactttggtggaagtccttggttacttatcattactgtgtttctgagaagttataaatttgccatctccctctgcacaagttacctttgtgtgtctttcctgaagactatcttcccgtctcaaaatggacatgatggatccacggatgtacagcagagagccaggaggtccaaccgccgtagacaggaaggaattaaaattgtcctggaagacatctttactttatggagacaggtggaaaccaaagttcgagctaaaatccgtaagatgaaggtgacaacaaaagtcaaccgtcatgacaaaatcaatggaaagaggaagaccgccaaagaacatctgaggaaactaagcatgaaagaacgtgagcacggagaaaaggagaggcaggtgtcagaggcagaggaaaacgggaaattggatatgaaagaaatacacacctacatggaaatgtttcaacgtgcgcaagcgttgcggcggcgggcagaggactactacagatgcaaaatcaccccttctgcaagaaagcctctttgcaaccggtgcacttacaatttggtattacctgggagtgaaaagaaatattacagccatgcctaactgacttcttgaggtcagaatggcggcagtggagcatcgtcattcttcaggattgccctactggccctacctcacagctgaaactttaaaaaacaggatgggccaccagccacctcctccaactcaacaacattctataattgataactccctgagcctcaagacaccttccgagtgtctgctcactccccttccaccctcagctctaccctcagcggatgataatctcaagacacctgcggagtgtctgctctatccccttccaccctcagcggatgataatctcaagacacctcccgagtgtctgctcactccccttccaccctcagctccaccctcagtggatgataatctcaagacacctcccgagtgtgtctgctcactccccttccaccctcagcggatgataatctcaagaaactaaggaagaataaataaataatataaaaataaaaaaaaaaaaaaaaaaaaaaaaaaaaaataaaaaataaaggaccgcactgctaattcctcgtgcaccggataactatgtcgccactctacaaaccctgatggccccacagtcatctttcaccatgtccgacagcatctacaggtcagcatcttttcgagctacaagcttccgcggaccctacttggcaattggctaatctgaaagcactatgtgctttataaatcagctaatatttcacgttacatccggtcatttttttgcgcttaaggccatctccttgcaatggcctttagtcgatgaaattccccttatatcggaggccg

SEQ ID NO: 368821 - DNA, 754 bp, Homo sapiens
gtcgacacagtcgctgttggcctggtgtccagcgtggttgtctatcccgtctacctggccatcctctttctcttccggatgtcccggagcaaggtggctgggagcccgagccccacacctgccgggcagcaggtgctggacatcgacagctgcctggactcgtccgtgctggacagctccttcctcacgttctcaggcctccacgctgaggtgagggctctactgggggtcctgccgccttggcgcagcttggactcaagaccctgtgcacctctcagcaggcctttgctggacagatgaagagtgacttgtttctggatgattctaagaggttatcaatactctggctgaccatcgtcatcgtgggactgactttggtggaagtccttggttacttatcattactgtgtttctgagaagttataaatttgccatctccctctgcacaagttacctttgtgtgtctttcctgaagactatcttcccgtctcaaaatggacatgatggatccacggatgtacagcagagagccaggaggtccaaccgccgtagacaggaaggaattaaaattgtcctggaagacatctttactttatggagacaggtggaaaccaaagttcgagctaaaatccgtaagatgaaggtgacaacaaaagtcaaccgtcatgacaaaatcaatggaaagaggaagaccgccaaagaacatctgtggtaatcagcgcatgctggtaagagcgtctctgcctggtatagc

SEQ ID NO: 368822 - DNA, 1862 bp, Homo sapiens
gggcgtctccgcagctcggctcccgcgcgctcagcaccgccagcggcggccagatgcaggcggagcgaggagctcggggaggccgtgggcggcggccaggccgcggccggcctggcggagatcgccacagcgagcggcccggagccgcagcggcggtagccagaggcggcggcggaggcggcggcggggacggaggcggacgccggggccgtggccgtggccggggcttccgcggcgctcgcggaggccgaggaggaggaggcgccccgcgaggcagccgccgggagccgggaggctggggcgcaggggccagcgcgccggttgaagatgacagcgatgcagagacctatggagaagagaatgatgaacagggaaattattctaaaagaaagattgtctctaactgggatcgatatcaagatattgaaaaagaggtcaataatgaaagtggagagtcacagaggggaacagatttcagtgtcctccttagctctgcaggggactcattctcacagttccggtttgctgaggagaaagaatgggatagtgaagcttcttgtccaaaacagaattcagcattttatgtggatagtgagttattggttcgagcccttcaagagctgcctctctgcctccgactcaacgttgctgccgaactggtccagggtacagttcctttagaggttcctcaggtgaaaccaaagagaactgatgatggcaagggattagggatgcagttaaaggggcccttggggcctggaggaagggggcccatctttgagctgaaatctgtggctgctggctgccctgtgttgctgggcaaagacaacccaagcccgggtccttcaagggattctcagaaacccacttccccactgcagtcagcaggagaccatttggaagaagaactagatctgttgcttaatttagatgcacctataaaagagggagataacatcttaccagatcagacgtctcaggacctgaaatccaaggaagatggggaggtggtccaagaggaagaagtttgtgcaaaaccatctgtgactgaagaaaaaaacatggaacctgagcaaccaagtacctccaaaaatgttaccgaggaagagctggaagactggttggacagcatgatttcctaaaaaggggaaaaaaagtgcctgaagcaaatcttggttgccttctaacggcaggtgggcataaggctgtccttcaggaccagccagtttacaagcatgtctcaagctagtgtgttccattatgctcacagcagtaaatgcctacctctgtgtttgacatctgaaagaatacattgaagcagcttgttgcatttgtttttctggcttagtaatctaatagatttccttaagggcaggagatagactctggcccttgtttctagcctccttccttgcagtgtttacaacatagccagtgtttacagcatagcagatgctgctgctgattaagagaatagatgcaaacaaggcatgcatttggccaaaataaacaaatgctggtctgtccagttttcctttcctttcttgtgtggggccctgggcaattcgtctcatgtcccctttcccagcagtcacagagtggttgtagaatcaaccagaagtggtacattccaagagtccagaccctggaggtattggtacgtattactttattgcagtgggcacttcattgtatttgaggagattcacctaaacagagcagctccactacttacaagggaccataaagcattactccattttggcataaggttgagattttttttctgaattttcagtacagtacttttcttctaataacagcagttgactgacagctgttactaaaaaaacttgtatgaa

SEQ ID NO: 368823 - DNA, 1262 bp, Homo sapiens
gggcgtctccgcagctcggctcccgcgcgctcagcaccgccagcggcggccagatgcaggcggagcgaggagctcggggaggccgtgggcggcggccaggccgcggccggcctggcggagatcgccacagcgagcggcccggagccgcagcggcggtagccagaggcggcggcggaggcggcggcggggacggaggcggacgccggggccgtggccgtggccggggcttccgcggcgctcgcggaggccgaggaggaggaggcgccccgcgaggcagccgccgggagccgggaggctggggcgcaggggccagcgcgccggttgaagatgacagcgatgcagagacctatggagaagagaatgatgaacagggaaattattctaaaagaaagattgtctctaactgggatcgatatcaagatattgaaaaagaggtcaataatgaaagtggagagtcacagaggggaacagatttcagtgtcctccttagctctgcaggggactcattctcacagttccggtttgctgaggagaaagaatgggatagtgaagcttcttgtccaaaacagaattcagcattttatgtggatagtgagttattggttcgagcccttcaagagctgcctctctgcctccgactcaacgttgctgccgaactggtccagatgcacctataaaagagggagataacatcttaccagatcagacgtctcaggacctgaaatccaaggaagatggggaggtggtccaagaggaagaagtttgtgcaaaaccatctgtgactgaagaaaaaaacatggaacctgagcaaccaagtacctccaaaaatgttaccgaggaagagctggaagactggttggacagcatgatttcctaaaaaggggaaaaaaagtgcctgaagcaaatcttggttgccttctaacggcaggtgggcataaggctgtccttcaggaccagccagtttacaagcatgtctcaagctagtgtgttccattatgctcacagcagtaaatgcctacctctgtgtttgacatctgaaagaatacattgaagcagcttgttgcatttgtttttctggcttagtaatctaatagatttccttaagggcaggagatagactctggcccttgtttctagcctccttccttgcagtgtttacaacatagccagtgtttacagcatagcagatgctgctgctgattaagagaatagatgcaaacaaggcatgcatttggccaaaataaacaaatgctggtctgtcc

SEQ ID NO: 368824 - DNA, 1411 bp, Homo sapiens
gggcgtctccgcagctcggctcccgcgcgctcagcaccgccagcggcggccagatgcaggcggagcgaggagctcggggaggccgtgggcggcggccaggccgcggccggcctggcggagatcgccacagcgagcggcccggagccgcagcggcggtagccagaggcggcggcggaggcggcggcggggacggaggcggacgccggggccgtggccgtggccggggcttccgcggcgctcgcggaggccgaggaggaggaggcgccccgcgaggcagccgccgggagccgggaggctggggcgcaggggccagcgcgccggttgaagatgacagcgatgcagagacctatggagaagagaatgatgaacagggaaattattctaaaagaaagattgtctctaactgggatcgatatcaagatattgaaaaagaggtcaataatgaaagtggagagtcacagaggggaacagatttcagtgtcctccttagctctgcaggggactcattctcacagttccggtttgctgaggagaaagaatgggatagtgaagcttcttgtccaaaacagaattcagcattttatgtggatagtgagttattggttcgagcccttcaagagctgcctctctgcctccgactcaacgttgctgccgaactggtccagggtacagttcctttagaggttcctcaggtgaaaccaaagagaactgatgatggcaagggattagggatgcagttaaaggggcccttggggcctggaggaagggggcccatctttgagctgaaatctgtggctgctggctgccctgtgttgctgggcaaagacaacccaagcccgggtccttcaagggattctcagaaacccacttccccactgcagtcagcaggagaccatttggaagaagaactagatctgttgcttaatttagatgcacctataaaagagggagataacatcttaccagatcagacgtctcaggacctgaaatccaaggaagatggggaggtggtccaagaggaagaaggcatgtgcaaagagatcaaacatcagaggcagccttgttttataacgataccctctcagtgtaactagttcagccccttgacagcaagaactcactctcatgtgaaaggcattaatccctcttaatgacctaatcaccttttaaaggcaccacttcccaataccactatattggagaccaagcctcaacatgagttttggtcaggacaaacgacatttaaaccataaaagtcagaggaaaagaacaaaatagaaggacaagcagcagaaatctgacaactagatagttgatcttctctgatgaaaaaaatagaagagtccagtccaaagccacttaagaatagggttttagggaactgcgaaccggtccgagctcgatcgtatca

SEQ ID NO: 368825 - DNA, 1527 bp, Homo sapiens
gggcgtctccgcagctcggctcccgcgcgctcagcaccgccagcggcggccagatgcaggcggagcgaggagctcggggaggccgtgggcggcggccaggccgcggccggcctggcggagatcgccacagcgagcggcccggagccgcagcggcggtagccagaggcggcggcggaggcggcggcggggacggaggcggacgccggggccgtggccgtggccggggcttccgcggcgctcgcggaggccgaggaggaggaggcgccccgcgaggcagccgccgggagccgggaggctggggcgcaggggccagcgcgccggttgaagatgacagcgatgcagagacctatggagaagagaatgatgaacagggaaattattctaaaagaaagattgtctctaactgggatcgatatcaagatattgaaaaagaggtcaataatgaaagtggagagtcacagaggggaacagatttcagtgtcctccttagctctgcaggggactcattctcacagttccggtttgctgaggagaaagaatgggatagtgaagcttcttgtccaaaacagaattcagcattttatgtggatagtgagttattggttcgagcccttcaagagctgcctctctgcctccgactcaacgttgctgccgaactggtccagggtacagttcctttagaggttcctcaggtgaaaccaaagagaactgatgatggcaagggattagggatgcagttaaaggggcccttggggcctggaggaagggggcccatctttgagctgaaatctgtggctgctggctgccctgtgttgctgggcaaagacaacccaagcccgggtccttcaagggattctcagaaacccacttccccactgcagtcagcaggagaccatttggaagaagaactagatctgttgcttaatttagatgcacctataaaagagggagataacatcttaccagatcagacgtctcaggacctgaaatccaaggaagatggggaggtggtccaagaggaagaagtttgtgcaaaaccatctgtgactgaagaaaaaaacatggaacctgagcaaccaagtacctccaaaaatgttaccgaggaagagctggaagactggttggacagcatgatttcctaaaaaggggaaaaaaagtgcctgaagcaaatcttggttgccttctaacggcaggtgggcataaggctgtccttcaggaccagccagtttacaagcatgtctcaagctagtgtgttccattatgctcacagcagtaaatgcctacctctgtgtttgacatctgaaagaatacattgaagcagcttgttgcatttgtttttctggcttagtaatctaatagatttccttaagggcaggagatagactctggcccttgtttctagcctccttccttgcagtgtttacaacatagccagtgtttacagcatagcagatgctgctgctgattaagagaatagatgcaaacaaggcatgcatttggccaaaataaacaaatgctggtctgtcc

SEQ ID NO: 368826 - DNA, 930 bp, Homo sapiens
gggcctcccacttggttgcggcctctcacttggtggcctcccacttggttgctgccgaactggtccagggtacagttcctttagaggttcctcaggtgaaaccaaagagaactgatgatggcaagggattagggatgcagttaaaggggcccttggggcctggaggaagggggcccatctttgagctgaaatctgtggctgctggctgccctgtgttgctgggcaaagacaacccaagcccgggtccttcaagggattctcagaaacccacttccccactgcagtcagcaggagaccatttggaagaagaactagatctgttgcttaatttagatgcacctataaaagagggagataacatcttaccagatcagacgtctcaggacctgaaatccaaggaagatggggaggtggtccaagaggaagaagtttgtgcaaaaccatctgtgactgaagaaaaaaacatggaacctgagcaaccaagtacctccaaaaatgttaccgaggaagagctggaagactggttggacagcatgatttcctaaaaaggggaaaaaaagtgcctgaagcaaatcttggttgccttctaacggcaggtgggcataaggctgtccttcaggaccagccagtttacaagcatgtctcaagctagtgtgttccattatgctcacagcagtaaatgcctacctctgtgtttgacatctgaaagaatacattgaagcagcttgttgcatttgtttttctggcttagtaatctaatagatttccttaagggcaggagatagactctggcccttgtttctagcctccttccttgcagtgtttacaacatagccagtgtttacagcatagcagatgctgctgctgattaagagaatagatgcaaacaaggcatgcatttggccaaaataaacaaatgctggtctgtcc

SEQ ID NO: 368827 - DNA, 3104 bp, Homo sapiens
tgggagaattcagctgagagacagaggtcagacatgccagcagggttggaaagaggcaggtacggaagctgagctgcagagttagccggcatctgacagaaaaatgtttgtctacagattttgagcgttcgaagttgacccctgactaagtatactttgctgctccctcagcctttgaaaaaatgtctgtcacatatgatgattccgttggagtagaagtgtccagcgacagcttctgggaggtcgggaactacaagcggactgtgaagcggatcgacgatggccaccgcctgtgcagcgacctcatgaactgcctgcatgagcgggcgcgcatcgagaaggcgtatgcgcagcagctcactgagtgggcccggcgctggaggcagcttgtggagaaagggccccagtacgggaccgtggagaaggcctggatggccttcatgtccgaggcagagagggtgagcgagctgcacctcgaggtgaaggcctcactgatgaacgatgacttcgagaagatcaagaactggcagaaggaagcctttcacaagcagatgatgggcggcttcaaggagaccaaggaagctgaggacggctttcggaaggcacagaagccctgggccaagaagctgaaagaggtagaagcagcaaagaaagcccaccatgcagcgtgcaaagaggagaagctggctatctcacgagaagccaacagcaaggcagacccatccctcaaccctgaacagctcaagaaattgcaagacaaaatagaaaagtgcaagcaagatgttcttaagaccaaagagaagtatgagaagtccctgaaggaactcgaccagggcacaccccagtacatggagaacatggagcaggtgtttgagcagtgccagcagttcgaggagaaacgccttcgcttcttccgggaggttctgctggaggttcagaagcacctagacctgtccaatgtggctggctacaaagccatttaccatgacctggagcagagcatcagagcagctgatgcagtggaggacctgaggtggttccgagccaatcacgggccaggcatggccatgaactggccgcagtttgaggagtggtccgcagacctgaatcgaaccctcagccggagagagaagaagaaggccactgacggcgtcaccctgacgggcatcaaccagacaggcgaccagtctctgccgagtaagcccagcagtgtgagcagctacgagaagacccagagctatcccaccgactggtcagacgatgagtctaacaaccccttctcctccacggatgccaatggggactcgaatccattcgacgacgacgccacctcggggacggaagtgcgagtccgggccctgtatgactatgaggggcaggagcatgatgagctgagcttcaaggctggggatgagctgaccaagatggaggacgaggatgagcagggctggtgcaagggacgcttggacaacgggcaagttggcctatacccggcaaattatgtggaggcgatccagtgatgagtcggggacaggccagcggggggacggaggcggcgggcccaggagcctcagccagccacgtgggcatccactccttttcctgcaagagatgatggttccattgctcttggcttcatggtgttcctggaaggcagatgagctggtcatttcgcctgggactcggcacctttccgagtgcagctggagggatctgagcgcaggaagacgcagaacaacagaaatagccgcccctccccgcccactgtgcctgttggcctatcatagatctctatgttcttgactttgtctctcctttccgagtcaatggtgggttacactgatcttgttccactgattactctctctgacgagtccatcacctgcaacttaaatgaacaagcttacatcccattttgagtgaagattttgaggtttttaatttaaaggctgtgtacagttatacttttttatacacctgttcatttctacttaaattatggcacagattgatgcgcaccagtcttgaggaaacgatctccctattcccttaccctgttactcagccacgccgtgtgtaggcttagcctcaggtggcagatgtttgaggaaaggaattatgccaggaaggtgggaccgggttatggtcgggtttctattgggaatgctctttgtgcttttgggcatctgaatggaagctttacatagaaccttaggtagaactcccccaaatcgccatatttaaaaattattttcactctattcttgcttaaaactgtactcttttgcaaattaacaattttatcactgattcagagttaaaaagaagactaacttttcaagcaaatgcatctgtaaagatgctttagattagactgtcatgtctcagtgtctatctgtatatattatttgatattcagagaatctaaagcactcgtctactgttttaatgagatttaacagcttttaacagtgagtttcgtttgtaaactgcttgaagtctgtggcattcaggcacacgtctggctggccggctgggtctcctcccgggctcagtgggcctggggcctctctgacgtggtgcctgctggagggaggctcgtcgtcaccagctgactgctggtccggcttctgaccggcctttgtcctggctccgtagcagaacactgtaaaagtgcccgcgtctttgcagtagttgcagatttcagtcgtcgtgttacttgtgcacaaacagaagctgggtcttacccgcagcacgagtgtctcgggctgcccggagtcgcccgggagcaggtgctgcagccagagttacgcgggggccacgcgggccggcgggggtggggggaacgtgggggaacctgtgtttcacgtgactcagcagtgcccgccgccgtcaccagctatgcattcactccgtttccagtgagcagatgtcttgcttggaaagtggacctgtgtctgtgtctgtcctgagaacttaccagcagaaatcctcatttctgtgctacggatttaccaaaaattgtcaagtctttttcagtttaacagttcctttacatgtgtagtatttgaggaaaaaaatcaataaacagttgatctcgtgca

SEQ ID NO: 368828 - DNA, 3274 bp, Homo sapiens
  misc_feature (3)..(3): n is a, c, g, or t
ggnagagctgtcccactgggcaggtgcctctgacggagaggaggcgtcgtcgggaagtatgtggccgtggctgctctggcatgatcctgaagactggcacgaaggggaatggagccgcacagagaatttcaggcatcagaggggaagcgcaggtttgtctacagattttgagcgttcgaagttgacccctgactaagtatactttgctgctccctcagcctttgaaaaaatgtctgtcacatatgatgattccgttggagtagaagtgtccagcgacagcttctgggaggtcgggaactacaagcggactgtgaagcggatcgacgatggccaccgcctgtgcagcgacctcatgaactgcctgcatgagcgggcgcgcatcgagaaggcgtatgcgcagcagctcactgagtgggcccggcgctggaggcagcttgtggagaaagggccccagtacgggaccgtggagaaggcctggatggccttcatgtccgaggcagagagggtgagcgagctgcacctcgaggtgaaggcctcactgatgaacgatgacttcgagaagatcaagaactggcagaaggaagcctttcacaagcagatgatgggcggcttcaaggagaccaaggaagctgaggacggctttcggaaggcacagaagccctgggccaagaagctgaaagaggtagaagcagcaaagaaagcccaccatgcagcgtgcaaagaggagaagctggctatctcacgagaagccaacagcaaggcagacccatccctcaaccctgaacagctcaagaaattgcaagacaaaatagaaaagtgcaagcaagatgttcttaagaccaaagagaagtatgagaagtccctgaaggaactcgaccagggcacaccccagtacatggagaacatggagcaggtgtttgagcagtgccagcagttcgaggagaaacgccttcgcttcttccgggaggttctgctggaggttcagaagcacctagacctgtccaatgtggctggctacaaagccatttaccatgacctggagcagagcatcagagcagctgatgcagtggaggacctgaggtggttccgagccaatcacgggccaggcatggccatgaactggccgcagtttgaggagtggtccgcagacctgaatcgaaccctcagccggagagagaagaagaaggccactgacggcgtcaccctgacgggcatcaaccagacaggcgaccagtctctgccgagtaagcccagcagcacccttaatgtcccgagcaaccccgcccagtctgcgcagtcacagtccagctacaaccccttcgaggatgaggacgacacgggcagcaccgtcagtgagaaggacgacactaaggccaaaaatgtgagcagctacgagaagacccagagctatcccaccgactggtcagacgatgagtctaacaaccccttctcctccacggatgccaatggggactcgaatccattcgacgacgacgccacctcggggacggaagtgcgagtccgggccctgtatgactatgaggggcaggagcatgatgagctgagcttcaaggctggggatgagctgaccaagatggaggacgaggatgagcagggctggtgcaagggacgcttggacaacgggcaagttggcctatacccggcaaattatgtggaggcgatccagtgatgagtcggggacaggccagcggggggacggaggcggcgggcccaggagcctcagccagccacgtgggcatccactccttttcctgcaagagatgatggttccattgctcttggcttcatggtgttcctggaaggcagatgagctggtcatttcgcctgggactcggcacctttccgagtgcagctggagggatctgagcgcaggaagacgcagaacaacagaaatagccgcccctccccgcccactgtgcctgttggcctatcatagatctctatgttcttgactttgtctctcctttccgagtcaatggtgggttacactgatcttgttccactgattactctctctgacgagtccatcacctgcaacttaaatgaacaagcttacatcccattttgagtgaagattttgaggtttttaatttaaaggctgtgtacagttatacttttttatacacctgttcatttctacttaaattatggcacagattgatgcgcaccagtcttgaggaaacgatctccctattcccttaccctgttactcagccacgccgtgtgtaggcttagcctcaggtggcagatgtttgaggaaaggaattatgccaggaaggtgggaccgggttatggtcgggtttctattgggaatgctctttgtgcttttgggcatctgaatggaagctttacatagaaccttaggtagaactcccccaaatcgccatatttaaaaattattttcactctattcttgcttaaaactgtactcttttgcaaattaacaattttatcactgattcagagttaaaaagaagactaacttttcaagcaaatgcatctgtaaagatgctttagattagactgtcatgtctcagtgtctatctgtatatattatttgatattcagagaatctaaagcactcgtctactgttttaatgagatttaacagcttttaacagtgagtttcgtttgtaaactgcttgaagtctgtggcattcaggcacacgtctggctggccggctgggtctcctcccgggctcagtgggcctggggcctctctgacgtggtgcctgctggagggaggctcgtcgtcaccagctgactgctggtccggcttctgaccggcctttgtcctggctccgtagcagaacactgtaaaagtgcccgcgtctttgcagtagttgcagatttcagtcgtcgtgttacttgtgcacaaacagaagctgggtcttacccgcagcacgagtgtctcgggctgcccggagtcgcccgggagcaggtgctgcagccagagttacgcgggggccacgcgggccggcgggggtggggggaacgtgggggaacctgtgtttcacgtgactcagcagtgcccgccgccgtcaccagctatgcattcactccgtttccagtgagcagatgtcttgcttggaaagtggacctgtgtctgtgtctgtcctgagaacttaccagcagaaatcctcatttctgtgctacggatttaccaaaaattgtcaagtctttttcagtttaacagttcctttacatgtgtagtatttgaggaaaaaaatcaataaacagttgatctcgtgca

SEQ ID NO: 368829 - DNA, 3541 bp, Homo sapiens
gagtcccttgggagaggaaactttctgaaagactgtaggattaccttccctgaacttccggtcaggtgcggtgctgccctgccgcgccctcttacccctggatgccgacgaaaccgcaaaactccagccccgggaagcgcgtctcaaggaccaccaccagcgagcggctttgggagagtgatctgcgccaccctcgcagcccattaaataggcactccccgtttgattgacaggagaagtcaccaatgcgcgtcctggggctttccctcgtcctcacgcggggtgagccgcctctctactcatctggcccaatcgggggcgccggggaggctgtggggcggggctcggtgtccggtagccaatggacagagcccagcgggagcggcgggggcggtgcggtcgcggctggcggcagaagcggccgcaggggtctgggcagggctgggcagtgctgccggagcaaaagcggtagcgggagcccggccggagctgggtctggagacgccgtggcagcctgaacggagtgtgcgacggattgggaggtttgtctacagattttgagcgttcgaagttgacccctgactaagtatactttgctgctccctcagcctttgaaaaaatgtctgtcacatatgatgattccgttggagtagaagtgtccagcgacagcttctgggaggtcgggaactacaagcggactgtgaagcggatcgacgatggccaccgcctgtgcagcgacctcatgaactgcctgcatgagcgggcgcgcatcgagaaggcgtatgcgcagcagctcactgagtgggcccggcgctggaggcagcttgtggagaaagggccccagtacgggaccgtggagaaggcctggatggccttcatgtccgaggcagagagggtgagcgagctgcacctcgaggtgaaggcctcactgatgaacgatgacttcgagaagatcaagaactggcagaaggaagcctttcacaagcagatgatgggcggcttcaaggagaccaaggaagctgaggacggctttcggaaggcacagaagccctgggccaagaagctgaaagaggtagaagcagcaaagaaagcccaccatgcagcgtgcaaagaggagaagctggctatctcacgagaagccaacagcaaggcagacccatccctcaaccctgaacagctcaagaaattgcaagacaaaatagaaaagtgcaagcaagatgttcttaagaccaaagagaagtatgagaagtccctgaaggaactcgaccagggcacaccccagtacatggagaacatggagcaggtgtttgagcagtgccagcagttcgaggagaaacgccttcgcttcttccgggaggttctgctggaggttcagaagcacctagacctgtccaatgtggctggctacaaagccatttaccatgacctggagcagagcatcagagcagctgatgcagtggaggacctgaggtggttccgagccaatcacgggccaggcatggccatgaactggccgcagtttgaggagtggtccgcagacctgaatcgaaccctcagccggagagagaagaagaaggccactgacggcgtcaccctgacgggcatcaaccagacaggcgaccagtctctgccgagtaagcccagcagtgtgagcagctacgagaagacccagagctatcccaccgactggtcagacgatgagtctaacaaccccttctcctccacggatgccaatggggactcgaatccattcgacgacgacgccacctcggggacggaagtgcgagtccgggccctgtatgactatgaggggcaggagcatgatgagctgagcttcaaggctggggatgagctgaccaagatggaggacgaggatgagcagggctggtgcaagggacgcttggacaacgggcaagttggcctatacccggcaaattatgtggaggcgatccagtgatgagtcggggacaggccagcggggggacggaggcggcgggcccaggagcctcagccagccacgtgggcatccactccttttcctgcaagagatgatggttccattgctcttggcttcatggtgttcctggaaggcagatgagctggtcatttcgcctgggactcggcacctttccgagtgcagctggagggatctgagcgcaggaagacgcagaacaacagaaatagccgcccctccccgcccactgtgcctgttggcctatcatagatctctatgttcttgactttgtctctcctttccgagtcaatggtgggttacactgatcttgttccactgattactctctctgacgagtccatcacctgcaacttaaatgaacaagcttacatcccattttgagtgaagattttgaggtttttaatttaaaggctgtgtacagttatacttttttatacacctgttcatttctacttaaattatggcacagattgatgcgcaccagtcttgaggaaacgatctccctattcccttaccctgttactcagccacgccgtgtgtaggcttagcctcaggtggcagatgtttgaggaaaggaattatgccaggaaggtgggaccgggttatggtcgggtttctattgggaatgctctttgtgcttttgggcatctgaatggaagctttacatagaaccttaggtagaactcccccaaatcgccatatttaaaaattattttcactctattcttgcttaaaactgtactcttttgcaaattaacaattttatcactgattcagagttaaaaagaagactaacttttcaagcaaatgcatctgtaaagatgctttagattagactgtcatgtctcagtgtctatctgtatatattatttgatattcagagaatctaaagcactcgtctactgttttaatgagatttaacagcttttaacagtgagtttcgtttgtaaactgcttgaagtctgtggcattcaggcacacgtctggctggccggctgggtctcctcccgggctcagtgggcctggggcctctctgacgtggtgcctgctggagggaggctcgtcgtcaccagctgactgctggtccggcttctgaccggcctttgtcctggctccgtagcagaacactgtaaaagtgcccgcgtctttgcagtagttgcagatttcagtcgtcgtgttacttgtgcacaaacagaagctgggtcttacccgcagcacgagtgtctcgggctgcccggagtcgcccgggagcaggtgctgcagccagagttacgcgggggccacgcgggccggcgggggtggggggaacgtgggggaacctgtgtttcacgtgactcagcagtgcccgccgccgtcaccagctatgcattcactccgtttccagtgagcagatgtcttgcttggaaagtggacctgtgtctgtgtctgtcctgagaacttaccagcagaaatcctcatttctgtgctacggatttaccaaaaattgtcaagtctttttcagtttaacagttcctttacatgtgtagtatttgaggaaaaaaatcaataaacagttgatctcgtgca

SEQ ID NO: 368830 - DNA, 3212 bp, Homo sapiens
tctttccagaagacattccaaccaccatggtagagtcacagtaatgtcatggagaatgaagggagtcggggactaaacaagtggctgcaggtttgtctacagattttgagcgttcgaagttgacccctgactaagtatactttgctgctccctcagcctttgaaaaaatgtctgtcacatatgatgattccgttggagtagaagtgtccagcgacagcttctgggaggtcgggaactacaagcggactgtgaagcggatcgacgatggccaccgcctgtgcagcgacctcatgaactgcctgcatgagcgggcgcgcatcgagaaggcgtatgcgcagcagctcactgagtgggcccggcgctggaggcagcttgtggagaaagggccccagtacgggaccgtggagaaggcctggatggccttcatgtccgaggcagagagggtgagcgagctgcacctcgaggtgaaggcctcactgatgaacgatgacttcgagaagatcaagaactggcagaaggaagcctttcacaagcagatgatgggcggcttcaaggagaccaaggaagctgaggacggctttcggaaggcacagaagccctgggccaagaagctgaaagaggtagaagcagcaaagaaagcccaccatgcagcgtgcaaagaggagaagctggctatctcacgagaagccaacagcaaggcagacccatccctcaaccctgaacagctcaagaaattgcaagacaaaatagaaaagtgcaagcaagatgttcttaagaccaaagagaagtatgagaagtccctgaaggaactcgaccagggcacaccccagtacatggagaacatggagcaggtgtttgagcagtgccagcagttcgaggagaaacgccttcgcttcttccgggaggttctgctggaggttcagaagcacctagacctgtccaatgtggctggctacaaagccatttaccatgacctggagcagagcatcagagcagctgatgcagtggaggacctgaggtggttccgagccaatcacgggccaggcatggccatgaactggccgcagtttgaggagtggtccgcagacctgaatcgaaccctcagccggagagagaagaagaaggccactgacggcgtcaccctgacgggcatcaaccagacaggcgaccagtctctgccgagtaagcccagcagcacccttaatgtcccgagcaaccccgcccagtctgcgcagtcacagtccagctacaaccccttcgaggatgaggacgacacgggcagcaccgtcagtgagaaggacgacactaaggccaaaaatgtgagcagctacgagaagacccagagctatcccaccgactggtcagacgatgagtctaacaaccccttctcctccacggatgccaatggggactcgaatccattcgacgacgacgccacctcggggacggaagtgcgagtccgggccctgtatgactatgaggggcaggagcatgatgagctgagcttcaaggctggggatgagctgaccaagatggaggacgaggatgagcagggctggtgcaagggacgcttggacaacgggcaagttggcctatacccggcaaattatgtggaggcgatccagtgatgagtcggggacaggccagcggggggacggaggcggcgggcccaggagcctcagccagccacgtgggcatccactccttttcctgcaagagatgatggttccattgctcttggcttcatggtgttcctggaaggcagatgagctggtcatttcgcctgggactcggcacctttccgagtgcagctggagggatctgagcgcaggaagacgcagaacaacagaaatagccgcccctccccgcccactgtgcctgttggcctatcatagatctctatgttcttgactttgtctctcctttccgagtcaatggtgggttacactgatcttgttccactgattactctctctgacgagtccatcacctgcaacttaaatgaacaagcttacatcccattttgagtgaagattttgaggtttttaatttaaaggctgtgtacagttatacttttttatacacctgttcatttctacttaaattatggcacagattgatgcgcaccagtcttgaggaaacgatctccctattcccttaccctgttactcagccacgccgtgtgtaggcttagcctcaggtggcagatgtttgaggaaaggaattatgccaggaaggtgggaccgggttatggtcgggtttctattgggaatgctctttgtgcttttgggcatctgaatggaagctttacatagaaccttaggtagaactcccccaaatcgccatatttaaaaattattttcactctattcttgcttaaaactgtactcttttgcaaattaacaattttatcactgattcagagttaaaaagaagactaacttttcaagcaaatgcatctgtaaagatgctttagattagactgtcatgtctcagtgtctatctgtatatattatttgatattcagagaatctaaagcactcgtctactgttttaatgagatttaacagcttttaacagtgagtttcgtttgtaaactgcttgaagtctgtggcattcaggcacacgtctggctggccggctgggtctcctcccgggctcagtgggcctggggcctctctgacgtggtgcctgctggagggaggctcgtcgtcaccagctgactgctggtccggcttctgaccggcctttgtcctggctccgtagcagaacactgtaaaagtgcccgcgtctttgcagtagttgcagatttcagtcgtcgtgttacttgtgcacaaacagaagctgggtcttacccgcagcacgagtgtctcgggctgcccggagtcgcccgggagcaggtgctgcagccagagttacgcgggggccacgcgggccggcgggggtggggggaacgtgggggaacctgtgtttcacgtgactcagcagtgcccgccgccgtcaccagctatgcattcactccgtttccagtgagcagatgtcttgcttggaaagtggacctgtgtctgtgtctgtcctgagaacttaccagcagaaatcctcatttctgtgctacggatttaccaaaaattgtcaagtctttttcagtttaacagttcctttacatgtgtagtatttgaggaaaaaaatcaataaacagttgatctcgtgca

SEQ ID NO: 368831 - DNA, 3527 bp, Homo sapiens
gagtcccttgggagaggaaactttctgaaagactgtaggattaccttccctgaacttccggtcaggtgcggtgctgccctgccgcgccctcttacccctggatgccgacgaaaccgcaaaactccagccccgggaagcgcgtctcaaggaccaccaccagcgagcggctttgggagagtgatctgcgccaccctcgcagcccattaaataggcactccccgtttgattgacaggagaagtcaccaatgcgcgtcctggggctttccctcgtcctcacgcggggtgagccgcctctctactcatctggcccaatcgggggcgccggggaggctgtggggcggggctcggtgtccggtagccaatggacagagcccagcgggagcggcgggggcggtgcggtcgcggctggcggcagaagcggccgcaggggtctgggcagggctgggcagtgctgccggagcaaaagcggtagcgggagcccggccggagctgggtctggagacgccgtggcagcctgaacggagtgtgcgacggattgggaggtcgggaactacaagcggactgtgaagcggatcgacgatggccaccgcctgtgcagcgacctcatgaactgcctgcatgagcgggcgcgcatcgagaaggcgtatgcgcagcagctcactgagtgggcccggcgctggaggcagcttgtggagaaagggccccagtacgggaccgtggagaaggcctggatggccttcatgtccgaggcagagagggtgagcgagctgcacctcgaggtgaaggcctcactgatgaacgatgacttcgagaagatcaagaactggcagaaggaagcctttcacaagcagatgatgggcggcttcaaggagaccaaggaagctgaggacggctttcggaaggcacagaagccctgggccaagaagctgaaagaggtagaagcagcaaagaaagcccaccatgcagcgtgcaaagaggagaagctggctatctcacgagaagccaacagcaaggcagacccatccctcaaccctgaacagctcaagaaattgcaagacaaaatagaaaagtgcaagcaagatgttcttaagaccaaagagaagtatgagaagtccctgaaggaactcgaccagggcacaccccagtacatggagaacatggagcaggtgtttgagcagtgccagcagttcgaggagaaacgccttcgcttcttccgggaggttctgctggaggttcagaagcacctagacctgtccaatgtggctggctacaaagccatttaccatgacctggagcagagcatcagagcagctgatgcagtggaggacctgaggtggttccgagccaatcacgggccaggcatggccatgaactggccgcagtttgaggagtggtccgcagacctgaatcgaaccctcagccggagagagaagaagaaggccactgacggcgtcaccctgacgggcatcaaccagacaggcgaccagtctctgccgagtaagcccagcagcacccttaatgtcccgagcaaccccgcccagtctgcgcagtcacagtccagctacaaccccttcgaggatgaggacgacacgggcagcaccgtcagtgagaaggacgacactaaggccaaaaatgtgagcagctacgagaagacccagagctatcccaccgactggtcagacgatgagtctaacaaccccttctcctccacggatgccaatggggactcgaatccattcgacgacgacgccacctcggggacggaagtgcgagtccgggccctgtatgactatgaggggcaggagcatgatgagctgagcttcaaggctggggatgagctgaccaagatggaggacgaggatgagcagggctggtgcaagggacgcttggacaacgggcaagttggcctatacccggcaaattatgtggaggcgatccagtgatgagtcggggacaggccagcggggggacggaggcggcgggcccaggagcctcagccagccacgtgggcatccactccttttcctgcaagagatgatggttccattgctcttggcttcatggtgttcctggaaggcagatgagctggtcatttcgcctgggactcggcacctttccgagtgcagctggagggatctgagcgcaggaagacgcagaacaacagaaatagccgcccctccccgcccactgtgcctgttggcctatcatagatctctatgttcttgactttgtctctcctttccgagtcaatggtgggttacactgatcttgttccactgattactctctctgacgagtccatcacctgcaacttaaatgaacaagcttacatcccattttgagtgaagattttgaggtttttaatttaaaggctgtgtacagttatacttttttatacacctgttcatttctacttaaattatggcacagattgatgcgcaccagtcttgaggaaacgatctccctattcccttaccctgttactcagccacgccgtgtgtaggcttagcctcaggtggcagatgtttgaggaaaggaattatgccaggaaggtgggaccgggttatggtcgggtttctattgggaatgctctttgtgcttttgggcatctgaatggaagctttacatagaaccttaggtagaactcccccaaatcgccatatttaaaaattattttcactctattcttgcttaaaactgtactcttttgcaaattaacaattttatcactgattcagagttaaaaagaagactaacttttcaagcaaatgcatctgtaaagatgctttagattagactgtcatgtctcagtgtctatctgtatatattatttgatattcagagaatctaaagcactcgtctactgttttaatgagatttaacagcttttaacagtgagtttcgtttgtaaactgcttgaagtctgtggcattcaggcacacgtctggctggccggctgggtctcctcccgggctcagtgggcctggggcctctctgacgtggtgcctgctggagggaggctcgtcgtcaccagctgactgctggtccggcttctgaccggcctttgtcctggctccgtagcagaacactgtaaaagtgcccgcgtctttgcagtagttgcagatttcagtcgtcgtgttacttgtgcacaaacagaagctgggtcttacccgcagcacgagtgtctcgggctgcccggagtcgcccgggagcaggtgctgcagccagagttacgcgggggccacgcgggccggcgggggtggggggaacgtgggggaacctgtgtttcacgtgactcagcagtgcccgccgccgtcaccagctatgcattcactccgtttccagtgagcagatgtcttgcttggaaagtggacctgtgtctgtgtctgtcctgagaacttaccagcagaaatcctcatttctgtgctacggatttaccaaaaattgtcaagtctttttcagtttaacagttcctttacatgtgtagtatttgaggaaaaaaatcaataaacagttgatctcgtgca

SEQ ID NO: 368832 - DNA, 3335 bp, Homo sapiens
cagccccagcccctcagtctgcgtgaggtgcccgtttaggcatcctcagccccaccccttcctgagccagtcagcctcccttcctgacccacagcccagtttctacttggtacccaacctaaagaacattgagaagcccccgttcactgatgtgtatgatcttattaataataaaaatagagaggctcattatctaactacacggagtgcctttcaaactcttggagaggggtgtggtaaacatgaccccaggggcgcatcagggcctggttggcatggaggccatttgtgccacagccaaggacaggctgccccaagccccctgcctcccagctggttctctctcctaggtcgggaactacaagcggactgtgaagcggatcgacgatggccaccgcctgtgcagcgacctcatgaactgcctgcatgagcgggcgcgcatcgagaaggcgtatgcgcagcagctcactgagtgggcccggcgctggaggcagcttgtggagaaagggccccagtacgggaccgtggagaaggcctggatggccttcatgtccgaggcagagagggtgagcgagctgcacctcgaggtgaaggcctcactgatgaacgatgacttcgagaagatcaagaactggcagaaggaagcctttcacaagcagatgatgggcggcttcaaggagaccaaggaagctgaggacggctttcggaaggcacagaagccctgggccaagaagctgaaagaggtagaagcagcaaagaaagcccaccatgcagcgtgcaaagaggagaagctggctatctcacgagaagccaacagcaaggcagacccatccctcaaccctgaacagctcaagaaattgcaagacaaaatagaaaagtgcaagcaagatgttcttaagaccaaagagaagtatgagaagtccctgaaggaactcgaccagggcacaccccagtacatggagaacatggagcaggtgtttgagcagtgccagcagttcgaggagaaacgccttcgcttcttccgggaggttctgctggaggttcagaagcacctagacctgtccaatgtggctggctacaaagccatttaccatgacctggagcagagcatcagagcagctgatgcagtggaggacctgaggtggttccgagccaatcacgggccaggcatggccatgaactggccgcagtttgaggagtggtccgcagacctgaatcgaaccctcagccggagagagaagaagaaggccactgacggcgtcaccctgacgggcatcaaccagacaggcgaccagtctctgccgagtaagcccagcagcacccttaatgtcccgagcaaccccgcccagtctgcgcagtcacagtccagctacaaccccttcgaggatgaggacgacacgggcagcaccgtcagtgagaaggacgacactaaggccaaaaatgtgagcagctacgagaagacccagagctatcccaccgactggtcagacgatgagtctaacaaccccttctcctccacggatgccaatggggactcgaatccattcgacgacgacgccacctcggggacggaagtgcgagtccgggccctgtatgactatgaggggcaggagcatgatgagctgagcttcaaggctggggatgagctgaccaagatggaggacgaggatgagcagggctggtgcaagggacgcttggacaacgggcaagttggcctatacccggcaaattatgtggaggcgatccagtgatgagtcggggacaggccagcggggggacggaggcggcgggcccaggagcctcagccagccacgtgggcatccactccttttcctgcaagagatgatggttccattgctcttggcttcatggtgttcctggaaggcagatgagctggtcatttcgcctgggactcggcacctttccgagtgcagctggagggatctgagcgcaggaagacgcagaacaacagaaatagccgcccctccccgcccactgtgcctgttggcctatcatagatctctatgttcttgactttgtctctcctttccgagtcaatggtgggttacactgatcttgttccactgattactctctctgacgagtccatcacctgcaacttaaatgaacaagcttacatcccattttgagtgaagattttgaggtttttaatttaaaggctgtgtacagttatacttttttatacacctgttcatttctacttaaattatggcacagattgatgcgcaccagtcttgaggaaacgatctccctattcccttaccctgttactcagccacgccgtgtgtaggcttagcctcaggtggcagatgtttgaggaaaggaattatgccaggaaggtgggaccgggttatggtcgggtttctattgggaatgctctttgtgcttttgggcatctgaatggaagctttacatagaaccttaggtagaactcccccaaatcgccatatttaaaaattattttcactctattcttgcttaaaactgtactcttttgcaaattaacaattttatcactgattcagagttaaaaagaagactaacttttcaagcaaatgcatctgtaaagatgctttagattagactgtcatgtctcagtgtctatctgtatatattatttgatattcagagaatctaaagcactcgtctactgttttaatgagatttaacagcttttaacagtgagtttcgtttgtaaactgcttgaagtctgtggcattcaggcacacgtctggctggccggctgggtctcctcccgggctcagtgggcctggggcctctctgacgtggtgcctgctggagggaggctcgtcgtcaccagctgactgctggtccggcttctgaccggcctttgtcctggctccgtagcagaacactgtaaaagtgcccgcgtctttgcagtagttgcagatttcagtcgtcgtgttacttgtgcacaaacagaagctgggtcttacccgcagcacgagtgtctcgggctgcccggagtcgcccgggagcaggtgctgcagccagagttacgcgggggccacgcgggccggcgggggtggggggaacgtgggggaacctgtgtttcacgtgactcagcagtgcccgccgccgtcaccagctatgcattcactccgtttccagtgagcagatgtcttgcttggaaagtggacctgtgtctgtgtctgtcctgagaacttaccagcagaaatcctcatttctgtgctacggatttaccaaaaattgtcaagtctttttcagtttaacagttcctttacatgtgtagtatttgaggaaaaaaatcaataaacagttgatctcgtgca

SEQ ID NO: 368833 - DNA, 4400 bp, Homo sapiens
gagtcccttgggagaggaaactttctgaaagactgtaggattaccttccctgaacttccggtcaggtgcggtgctgccctgccgcgccctcttacccctggatgccgacgaaaccgcaaaactccagccccgggaagcgcgtctcaaggaccaccaccagcgagcggctttgggagagtgatctgcgccaccctcgcagcccattaaataggcactccccgtttgattgacaggagaagtcaccaatgcgcgtcctggggctttccctcgtcctcacgcggggtgagccgcctctctactcatctggcccaatcgggggcgccggggaggctgtggggcggggctcggtgtccggtagccaatggacagagcccagcgggagcggcgggggcggtgcggtcgcggctggcggcagaagcggccgcaggggtctgggcagggctgggcagtgctgccggagcaaaagcggtagcgggagcccggccggagctgggtctggagacgccgtggcagcctgaacggagtgtgcgacggattgggaggtttgtctacagattttgagcgttcgaagttgacccctgactaagtatactttgctgctccctcagcctttgaaaaaatgtctgtcacatatgatgattccgttggagtagaagtgtccagcgacagcttctgggaggtcgggaactacaagcggactgtgaagcggatcgacgatggccaccgcctgtgcagcgacctcatgaactgcctgcatgagcgggcgcgcatcgagaaggcgtatgcgcagcagctcactgagtgggcccggcgctggaggcagcttgtggagaaagggccccagtacgggaccgtggagaaggcctggatggccttcatgtccgaggcagagagggtgagcgagctgcacctcgaggtgaaggcctcactgatgaacgatgacttcgagaagatcaagaactggcagaaggaagcctttcacaagcagatgatgggcggcttcaaggagaccaaggaagctgaggacggctttcggaaggcacagaagccctgggccaagaagctgaaagaggtagaagcagcaaagaaagcccaccatgcagcgtgcaaagaggagaagctggctatctcacgagaagccaacagcaaggcagacccatccctcaaccctgaacagctcaagaaattgcaagacaaaatagaaaagtgcaagcaagatgttcttaagaccaaagagaagtatgagaagtccctgaaggaactcgaccagggcacaccccagtacatggagaacatggagcaggtgtttgagcagtgccagcagttcgaggagaaacgccttcgcttcttccgggaggttctgctggaggttcagaagcacctagacctgtccaatgtggctggctacaaagccatttaccatgacctggagcagagcatcagagcagctgatgcagtggaggacctgaggtggttccgagccaatcacgggccaggcatggccatgaactggccgcagtttgaggagtggtccgcagacctgaatcgaaccctcagccggagagagaagaagaaggccactgacggcgtcaccctgacgggcatcaaccagacaggcgaccagtctctgccgagtaagcccagcagcacccttaatgtcccgagcaaccccgcccagtctgcgcagtcacagtccagctacaaccccttcgaggatgaggacgacacgggcagcaccgtcagtgagaaggacgacactaaggccaaaaatgtgagcagctacgagaagacccagagctatcccaccgactggtcagacgatgagtctaacaaccccttctcctccacggatgccaatggggactcgaatccattcgacgacgacgccacctcggggacggaagtgcgagtccgggccctgtatgactatgaggggcaggagcatgatgagctgagcttcaaggctggggatgagctgaccaagatggaggacgaggatgagcagggctggtgcaagggacgcttggacaacgggcaagttggcctatacccggcaaattatgtggaggcgatccagtgatgagtcggggacaggccagcggggggacggaggcggcgggcccaggagcctcagccagccacgtgggcatccactccttttcctgcaagagatgatggttccattgctcttggcttcatggtgttcctggaaggcagatgagctggtcatttcgcctgggactcggcacctttccgagtgcagctggagggatctgagcgcaggaagacgcagaacaacagaaatagccgcccctccccgcccactgtgcctgttggcctatcatagatctctatgttcttgactttgtctctcctttccgagtcaatggtgggttacactgatcttgttccactgattactctctctgacgagtccatcacctgcaacttaaatgaacaagcttacatcccattttgagtgaagattttgaggtttttaatttaaaggctgtgtacagttatacttttttatacacctgttcatttctacttaaattatggcacagattgatgcgcaccagtcttgaggaaacgatctccctattcccttaccctgttactcagccacgccgtgtgtaggcttagcctcaggtggcagatgtttgaggaaaggaattatgccaggaaggtgggaccgggttatggtcgggtttctattgggaatgctctttgtgcttttgggcatctgaatggaagctttacatagaaccttaggtagaactcccccaaatcgccatatttaaaaattattttcactctattcttgcttaaaactgtactcttttgcaaattaacaattttatcactgattcagagttaaaaagaagactaacttttcaagcaaatgcatctgtaaagatgctttagattagactgtcatgtctcagtgtctatctgtatatattatttgatattcagagaatctaaagcactcgtctactgttttaatgagatttaacagcttttaacagtgagtttcgtttgtaaactgcttgaagtctgtggcattcaggcacacgtctggctggccggctgggtctcctcccgggctcagtgggcctggggcctctctgacgtggtgcctgctggagggaggctcgtcgtcaccagctgactgctggtccggcttctgaccggcctttgtcctggctccgtagcagaacactgtaaaagtgcccgcgtctttgcagtagttgcagatttcagtcgtcgtgttacttgtgcacaaacagaagctgggtcttacccgcagcacgagtgtctcgggctgcccggagtcgcccgggagcaggtgctgcagccagagttacgcgggggccacgcgggccggcgggggtggggggaacgtgggggaacctgtgtttcacgtgactcagcagtgcccgccgccgtcaccagctatgcattcactccgtttccagtgagcagatgtcttgcttggaaagtggacctgtgtctgtgtctgtcctgagaacttaccagcagaaatcctcatttctgtgctacggatttaccaaaaattgtcaagtctttttcagtttaacagttcctttacatgtgtagtatttgaggaaaaaaatcaataaacagttgatctcgtgcaaaaaaaccaacgagaaaaaagaagatcagcaaacacacagaacagcgagaagaacgacaccgagccgacagagagaagcacgcgagagggagggagcgacagggcaggagggggtccgcccagcagcgcgccccagcgacgccgcaagacaacgcaggccaggcagagagcgccgagcgacggcgaccgcggaggggcgaccaaacagccagacgcgagacagagcaacgcaccaaagcggagggcgaggcgggcagacacaagcggagacggaccacgccaggccccagagaccagcgcgcagcgccacgacagcgcgagcccgccaccacgcgggaccaggacagcggaggcgccgcgaagacacaaccgaggcggcagaagaaacacaaccagaaagcgacgcagagcgcgagccacctagccgccgaagcacagcaagacacaaccgcaccagccgaccaggccaccggacgccgccgcacccgacagcacacgcgagcgcgcagcacagacgcgcagcacccggacagagaaagaacgagcacgtgcgccggcgcgccggagcagccggacaccgatcgccgaagcggaggcgacgaggccgggcgccgccggcggcaccagcacagcggcgcgagcgagcgctcgcgcgaggcagcgagccggccgcgggcaacggcccgcgggcggcggcggcgcgcgggcggacgggcgagggaggaagacggcaccc

SEQ ID NO: 368834 - DNA, 3610 bp, Homo sapiens
gagtcccttgggagaggaaactttctgaaagactgtaggattaccttccctgaacttccggtcaggtgcggtgctgccctgccgcgccctcttacccctggatgccgacgaaaccgcaaaactccagccccgggaagcgcgtctcaaggaccaccaccagcgagcggctttgggagagtgatctgcgccaccctcgcagcccattaaataggcactccccgtttgattgacaggagaagtcaccaatgcgcgtcctggggctttccctcgtcctcacgcggggtgagccgcctctctactcatctggcccaatcgggggcgccggggaggctgtggggcggggctcggtgtccggtagccaatggacagagcccagcgggagcggcgggggcggtgcggtcgcggctggcggcagaagcggccgcaggggtctgggcagggctgggcagtgctgccggagcaaaagcggtagcgggagcccggccggagctgggtctggagacgccgtggcagcctgaacggagtgtgcgacggattgggaggtttgtctacagattttgagcgttcgaagttgacccctgactaagtatactttgctgctccctcagcctttgaaaaaatgtctgtcacatatgatgattccgttggagtagaagtgtccagcgacagcttctgggaggtcgggaactacaagcggactgtgaagcggatcgacgatggccaccgcctgtgcagcgacctcatgaactgcctgcatgagcgggcgcgcatcgagaaggcgtatgcgcagcagctcactgagtgggcccggcgctggaggcagcttgtggagaaagggccccagtacgggaccgtggagaaggcctggatggccttcatgtccgaggcagagagggtgagcgagctgcacctcgaggtgaaggcctcactgatgaacgatgacttcgagaagatcaagaactggcagaaggaagcctttcacaagcagatgatgggcggcttcaaggagaccaaggaagctgaggacggctttcggaaggcacagaagccctgggccaagaagctgaaagaggtagaagcagcaaagaaagcccaccatgcagcgtgcaaagaggagaagctggctatctcacgagaagccaacagcaaggcagacccatccctcaaccctgaacagctcaagaaattgcaagacaaaatagaaaagtgcaagcaagatgttcttaagaccaaagagaagtatgagaagtccctgaaggaactcgaccagggcacaccccagtacatggagaacatggagcaggtgtttgagcagtgccagcagttcgaggagaaacgccttcgcttcttccgggaggttctgctggaggttcagaagcacctagacctgtccaatgtggctggctacaaagccatttaccatgacctggagcagagcatcagagcagctgatgcagtggaggacctgaggtggttccgagccaatcacgggccaggcatggccatgaactggccgcagtttgaggagtggtccgcagacctgaatcgaaccctcagccggagagagaagaagaaggccactgacggcgtcaccctgacgggcatcaaccagacaggcgaccagtctctgccgagtaagcccagcagcacccttaatgtcccgagcaaccccgcccagtctgcgcagtcacagtccagctacaaccccttcgaggatgaggacgacacgggcagcaccgtcagtgagaaggacgacactaaggccaaaaatgtgagcagctacgagaagacccagagctatcccaccgactggtcagacgatgagtctaacaaccccttctcctccacggatgccaatggggactcgaatccattcgacgacgacgccacctcggggacggaagtgcgagtccgggccctgtatgactatgaggggcaggagcatgatgagctgagcttcaaggctggggatgagctgaccaagatggaggacgaggatgagcagggctggtgcaagggacgcttggacaacgggcaagttggcctatacccggcaaattatgtggaggcgatccagtgatgagtcggggacaggccagcggggggacggaggcggcgggcccaggagcctcagccagccacgtgggcatccactccttttcctgcaagagatgatggttccattgctcttggcttcatggtgttcctggaaggcagatgagctggtcatttcgcctgggactcggcacctttccgagtgcagctggagggatctgagcgcaggaagacgcagaacaacagaaatagccgcccctccccgcccactgtgcctgttggcctatcatagatctctatgttcttgactttgtctctcctttccgagtcaatggtgggttacactgatcttgttccactgattactctctctgacgagtccatcacctgcaacttaaatgaacaagcttacatcccattttgagtgaagattttgaggtttttaatttaaaggctgtgtacagttatacttttttatacacctgttcatttctacttaaattatggcacagattgatgcgcaccagtcttgaggaaacgatctccctattcccttaccctgttactcagccacgccgtgtgtaggcttagcctcaggtggcagatgtttgaggaaaggaattatgccaggaaggtgggaccgggttatggtcgggtttctattgggaatgctctttgtgcttttgggcatctgaatggaagctttacatagaaccttaggtagaactcccccaaatcgccatatttaaaaattattttcactctattcttgcttaaaactgtactcttttgcaaattaacaattttatcactgattcagagttactgtcatgtctcagtgtctatctgtatatattatttgatattcagagaatctaaagcactcgtctactgttttaatgagatttaacagcttttaacagtgagtttcgtttgtaaactgcttgaagtctgtggcattcaggcacacgtctggctggccggctgggtctcctcccgggctcagtgggcctggggcctctctgacgtggtgcctgctggagggaggctcgtcgtcaccagctgactgctggtccggcttctgaccggcctttgtcctggctccgtagcagaacactgtaaaagtgcccgcgtctttgcagtagttgcagatttcagtcgtcgtgttacttgtgcacaaacagaagctgggtcttacccgcagcacgagtgtctcgggctgcccggagtcgcccgggagcaggtgctgcagccagagttacgcgggggccacgcgggccggcgggggtggggggaacgtgggggaacctgtgtttcacgtgactcagcagtgcccgccgccgtcaccagctatgcattcactccgtttccagtgagcagatgtcttgcttggaaagtggacctgtgtctgtgtctgtcctgagaacttaccagcagaaatcctcatttctgtgctacggatttaccaaaaattgtcaagtctttttcagtttaacagttcctttacatgtgtagtatttgaggaaaaaaatcaataaacagttgatctcgtgca

SEQ ID NO: 368835 - DNA, 2154 bp, Homo sapiens
gagtcccttgggagaggaaactttctgaaagactgtaggattaccttccctgaacttccggtcaggtgcggtgctgccctgccgcgccctcttacccctggatgccgacgaaaccgcaaaactccagccccgggaagcgcgtctcaaggaccaccaccagcgagcggctttgggagagtgatctgcgccaccctcgcagcccattaaataggcactccccgtttgattgacaggagaagtcaccaatgcgcgtcctggggctttccctcgtcctcacgcggggtgagccgcctctctactcatctggcccaatcgggggcgccggggaggctgtggggcggggctcggtgtccggtagccaatggacagagcccagcgggagcggcgggggcggtgcggtcgcggctggcggcagaagcggccgcaggggtctgggcagggctgggcagtgctgccggagcaaaagcggtagcgggagcccggccggagctgggtctggagacgccgtggcagcctgaacggagtgtgcgacggattgggaggtttgtctacagattttgagcgttcgaagttgacccctgactaagtatactttgctgctccctcagcctttgaaaaaatgtctgtcacatatgatgattccgttggagtagaagtgtccagcgacagcttctgggaggtcgggaactacaagcggactgtgaagcggatcgacgatggccaccgcctgtgcagcgacctcatgaactgcctgcatgagcgggcgcgcatcgagaaggcgtatgcgcagcagctcactgagtgggcccggcgctggaggcagcttgtggagaaagggccccagtacgggaccgtggagaaggcctggatggccttcatgtccgaggcagagagggtgagcgagctgcacctcgaggtgaaggcctcactgatgaacgatgacttcgagaagatcaagaactggcagaaggaagcctttcacaagcagatgatgggcggcttcaaggagaccaaggaagctgaggacggctttcggaaggcacagaagccctgggccaagaagctgaaagaggtagaagcagcaaagaaagcccaccatgcagcgtgcaaagaggagaagctggctatctcacgagaagccaacagcaaggcagacccatccctcaaccctgaacagctcaagaaattgcaagacaaaatagaaaagtgcaagcaagatgttcttaagaccaaagagaagtatgagaagtccctgaaggaactcgaccagggcacaccccagtacatggagaacatggagcaggtgtttgagcagtgccagcagttcgaggagaaacgccttcgcttcttccgggaggttctgctggaggttcagaagcacctagacctgtccaatgtggctggctacaaagccatttaccatgacctggagcagagcatcagagcagctgatgcagtggaggacctgaggtggttccgagccaatcacgggccaggcatggccatgaactggccgcagtttgaggagtggtccgcagacctgaatcgaaccctcagccggagagagaagaagaaggccactgacggcgtcaccctgacgggcatcaaccagacaggcgaccagtctctgccgagtaagcccagcagcacccttaatgtcccgagcaaccccgcccagtctgcgcagtcacagtccagctacaaccccttcgaggatgaggacgacacgggcagcaccgtcagtgagaaggacgacactaaggccaaaaatgtgagcagctacgagaagacccagagctatcccaccgactggtcagacgatgagtctaacaaccccttctcctccacggatgccaatggggactcgaatccattcgacgacgacgccacctcggggacggaagtgcgagtccgggccctgtatgactatgaggggcaggagcatgatgagctgagcttcaaggctggggatgagctgaccaagatggaggacgaggatgagcagggctggtgcaagggacgcttggacaacggtgcgttggcccaacgttgggccaacgcaccgtgttgggccagtgggtgacggttctgtggctgagggtgggcgactgtcttccatcatctttttcttgtgaaatattgtacaacacctaa

SEQ ID NO: 368836 - DNA, 1837 bp, Homo sapiens
gagtcccttgggagaggaaactttctgaaagactgtaggattaccttccctgaacttccggtcaggtgcggtgctgccctgccgcgccctcttacccctggatgccgacgaaaccgcaaaactccagccccgggaagcgcgtctcaaggaccaccaccagcgagcggctttgggagagtgatctgcgccaccctcgcagcccattaaataggcactccccgtttgattgacaggagaagtcaccaatgcgcgtcctggggctttccctcgtcctcacgcggggtgagccgcctctctactcatctggcccaatcgggggcgccggggaggctgtggggcggggctcggtgtccggtagccaatggacagagcccagcgggagcggcgggggcggtgcggtcgcggctggcggcagaagcggccgcaggggtctgggcagggctgggcagtgctgccggagcaaaagcggtagcgggagcccggccggagctgggtctggagacgccgtggcagcctgaacggagtgtgcgacggattgggaggtttgtctacagattttgagcgttcgaagttgacccctgactaagtatactttgctgctccctcagcctttgaaaaaatgtctgtcacatatgatgattccgttggagtagaagtgtccagcgacagcttctgggaggtcgggaactacaagcggactgtgaagcggatcgacgatggccaccgcctgtgcagcgacctcatgaactgcctgcatgagcgggcgcgcatcgagaaggcgtatgcgcagcagctcactgagtgggcccggcgctggaggcagcttgtggagaaagggccccagtacgggaccgtggagaaggcctggatggccttcatgtccgaggcagagagggtgagcgagctgcacctcgaggtgaaggcctcactgatgaacgatgacttcgagaagatcaagaactggcagaaggaagcctttcacaagcagatgatgggcggcttcaaggagaccaaggaagctgaggacggctttcggaaggcacagaagccctgggccaagaagctgaaagaggtagaagcagcaaagaaagcccaccatgcagcgtgcaaagaggagaagctggctatctcacgagaagccaacagcaaggcagacccatccctcaaccctgaacagctcaagaaattgcaagacaaaatagaaaagtgcaagcaagatgttcttaagaccaaagagaagtatgagaagtccctgaaggaactcgaccagggcacaccccagtacatggagaacatggagcaggtgtttgagcagtgccagcagttcgaggagaaacgccttcgcttcttccgggaggttctgctggaggttcagaagcacctagacctgtccaatgtggctggctacaaagccatttaccatgacctggagcagagcatcagagcagctgatgcagtggaggacctgaggtggttccgagccaatcacgggccaggcatggccatgaactggccgcagtttgaggagtggtccgcagacctgaatcgaaccctcagccggagagagaagaagaaggccactgacggcgtcaccctgacgggcatcaaccagacaggcgaccagtctctgccgagtaagcccagcagcacccttaatgtcccgagcaaccccgcccagtctgcgcagtcacagtccagctacaaccccttcgaggatgaggacgacacgggcagcaccgtcagtgagaaggacgacactaaggccaaaaatgtgagcagctacgagaagacccagagctatccaacccggacctcaatgcaacccggacctcaattt

SEQ ID NO: 368837 - DNA, 480 bp, Homo sapiens
tggagaatgaagggagtcggggactaaacaagtggctgcaggttagttaggacgttgttaaggattaggcaggaggcaatggtggccttagcgaaggtagctatcatcatggggacagagccaagtgggaggattcaagagatattgaagagctgatgtagtccggtcttggaagctgattgaatgtggtagtggtgaggggggttgggtgtgggaagaagaggagtttctggcttgagaagctgggtgaatgaatggtgggaccatttctgacgtagaaaacccaggaacaggagtgggctcatagggaaggggatagtttgcaaggactgtgtgatggccaagtggaggcatccagtaggcagagatgcgggtctgggccagacagcagatcagggggcttgaggttaaaggtggtttggtgtgtgggcacagaagacgtaagagagagggcctgggacagaacctggggagcgccag

SEQ ID NO: 368838 - DNA, 192 bp, Homo sapiens
ccaccgactggtcagacgatgagtctaacaaccccttctcctccacggatgccaatggggactcgaatccattcgacgacgacgccacctcggggacggaagtgcgagtccgggccctgtatgactatgaggggcaggagcatgatgagctgagcttcaaggctggtaggtgggctcccccagcatccaggg

SEQ ID NO: 368839 - DNA, 3664 bp, Homo sapiens
gagtcccttgggagaggaaactttctgaaagactgtaggattaccttccctgaacttccggtcaggtgcggtgctgccctgccgcgccctcttacccctggatgccgacgaaaccgcaaaactccagccccgggaagcgcgtctcaaggaccaccaccagcgagcggctttgggagagtgatctgcgccaccctcgcagcccattaaataggcactccccgtttgattgacaggagaagtcaccaatgcgcgtcctggggctttccctcgtcctcacgcggggtgagccgcctctctactcatctggcccaatcgggggcgccggggaggctgtggggcggggctcggtgtccggtagccaatggacagagcccagcgggagcggcgggggcggtgcggtcgcggctggcggcagaagcggccgcaggggtctgggcagggctgggcagtgctgccggagcaaaagcggtagcgggagcccggccggagctgggtctggagacgccgtggcagcctgaacggagtgtgcgacggattgggaggtttgtctacagattttgagcgttcgaagttgacccctgactaagtatactttgctgctccctcagcctttgaaaaaatgtctgtcacatatgatgattccgttggagtagaagtgtccagcgacagcttctgggaggtcgggaactacaagcggactgtgaagcggatcgacgatggccaccgcctgtgcagcgacctcatgaactgcctgcatgagcgggcgcgcatcgagaaggcgtatgcgcagcagctcactgagtgggcccggcgctggaggcagcttgtggagaaagggccccagtacgggaccgtggagaaggcctggatggccttcatgtccgaggcagagagggtgagcgagctgcacctcgaggtgaaggcctcactgatgaacgatgacttcgagaagatcaagaactggcagaaggaagcctttcacaagcagatgatgggcggcttcaaggagaccaaggaagctgaggacggctttcggaaggcacagaagccctgggccaagaagctgaaagaggtagaagcagcaaagaaagcccaccatgcagcgtgcaaagaggagaagctggctatctcacgagaagccaacagcaaggcagacccatccctcaaccctgaacagctcaagaaattgcaagacaaaatagaaaagtgcaagcaagatgttcttaagaccaaagagaagtatgagaagtccctgaaggaactcgaccagggcacaccccagtacatggagaacatggagcaggtgtttgagcagtgccagcagttcgaggagaaacgccttcgcttcttccgggaggttctgctggaggttcagaagcacctagacctgtccaatgtggctggctacaaagccatttaccatgacctggagcagagcatcagagcagctgatgcagtggaggacctgaggtggttccgagccaatcacgggccaggcatggccatgaactggccgcagtttgaggagtggtccgcagacctgaatcgaaccctcagccggagagagaagaagaaggccactgacggcgtcaccctgacgggcatcaaccagacaggcgaccagtctctgccgagtaagcccagcagcacccttaatgtcccgagcaaccccgcccagtctgcgcagtcacagtccagctacaaccccttcgaggatgaggacgacacgggcagcaccgtcagtgagaaggacgacactaaggccaaaaatgtgagcagctacgagaagacccagagctatcccaccgactggtcagacgatgagtctaacaaccccttctcctccacggatgccaatggggactcgaatccattcgacgacgacgccacctcggggacggaagtgcgagtccgggccctgtatgactatgaggggcaggagcatgatgagctgagcttcaaggctggggatgagctgaccaagatggaggacgaggatgagcagggctggtgcaagggacgcttggacaacgggcaagttggcctatacccggcaaattatgtggaggcgatccagtgatgagtcggggacaggccagcggggggacggaggcggcgggcccaggagcctcagccagccacgtgggcatccactccttttcctgcaagagatgatggttccattgctcttggcttcatggtgttcctggaaggcagatgagctggtcatttcgcctgggactcggcacctttccgagtgcagctggagggatctgagcgcaggaagacgcagaacaacagaaatagccgcccctccccgcccactgtgcctgttggcctatcatagatctctatgttcttgactttgtctctcctttccgagtcaatggtgggttacactgatcttgttccactgattactctctctgacgagtccatcacctgcaacttaaatgaacaagcttacatcccattttgagtgaagattttgaggtttttaatttaaaggctgtgtacagttatacttttttatacacctgttcatttctacttaaattatggcacagattgatgcgcaccagtcttgaggaaacgatctccctattcccttaccctgttactcagccacgccgtgtgtaggcttagcctcaggtggcagatgtttgaggaaaggaattatgccaggaaggtgggaccgggttatggtcgggtttctattgggaatgctctttgtgcttttgggcatctgaatggaagctttacatagaaccttaggtagaactcccccaaatcgccatatttaaaaattattttcactctattcttgcttaaaactgtactcttttgcaaattaacaattttatcactgattcagagttaaaaagaagactaacttttcaagcaaatgcatctgtaaagatgctttagattagactgtcatgtctcagtgtctatctgtatatattatttgatattcagagaatctaaagcactcgtctactgttttaatgagatttaacagcttttaacagtgagtttcgtttgtaaactgcttgaagtctgtggcattcaggcacacgtctggctggccggctgggtctcctcccgggctcagtgggcctggggcctctctgacgtggtgcctgctggagggaggctcgtcgtcaccagctgactgctggtccggcttctgaccggcctttgtcctggctccgtagcagaacactgtaaaagtgcccgcgtctttgcagtagttgcagatttcagtcgtcgtgttacttgtgcacaaacagaagctgggtcttacccgcagcacgagtgtctcgggctgcccggagtcgcccgggagcaggtgctgcagccagagttacgcgggggccacgcgggccggcgggggtggggggaacgtgggggaacctgtgtttcacgtgactcagcagtgcccgccgccgtcaccagctatgcattcactccgtttccagtgagcagatgtcttgcttggaaagtggacctgtgtctgtgtctgtcctgagaacttaccagcagaaatcctcatttctgtgctacggatttaccaaaaattgtcaagtctttttcagtttaacagttcctttacatgtgtagtatttgaggaaaaaaatcaataaacagttgatctcgtgca

SEQ ID NO: 368840 - DNA, 735 bp, Homo sapiens
cttggtggtgggctcaaggaacagagccccggacttgcatggtcctcgccacccccgctgtcctctgggaggtgggcagcatggcctgggggtggttgtagaggtgcaagcctccagatcccctgatgagcccctgctttgaacagtgaggaggggctcaggtcgtttgggttcataagtggggcatggggagcctgaggtcttctgggaaaccagggagagctggggccctgagtctacacatcagatgcacagagccaactgcaggctcgctgggcaggaactgaggacagacgtggcttccagcaagtagtgaacctttggtttctctccctcggcacctgttgcctaggagtggtccgcagacctgaatcgaaccctcagccggagagagaagaagaaggccactgacggcgtcaccctgacgggcatcaaccagacaggcgaccagtctctgccgagtaagcccagcaggtgagtgggcgccacctccatccaaaagaggccgttccatggtgggggccctgggcaatctgcatggtccagggcagccccggcctggacacctgggaggttcctgggctcctgagctctgtggccgtggcccagcctggacacctgggaggttcctgggctcttgagctctgtggccgtggcccaggggcatctccagggaaggtcgtcttcctgcctggtgccagagctgctgacagatccagagagggaggcttggcc

SEQ ID NO: 368841 - DNA, 3263 bp, Homo sapiens
tgggagaattcagctgagagacagaggtcagacatgccagcagggttggaaagaggcaggtacggaagctgagctgcagagttagccggcatctgacagaaaaatgtgagtgtgctgtggaaggcttgcatttcctttaaggtttgtctacagattttgagcgttcgaagttgacccctgactaagtatactttgctgctccctcagcctttgaaaaaatgtctgtcacatatgatgattccgttggagtagaagtgtccagcgacagcttctgggaggtcgggaactacaagcggactgtgaagcggatcgacgatggccaccgcctgtgcagcgacctcatgaactgcctgcatgagcgggcgcgcatcgagaaggcgtatgcgcagcagctcactgagtgggcccggcgctggaggcagcttgtggagaaagggccccagtacgggaccgtggagaaggcctggatggccttcatgtccgaggcagagagggtgagcgagctgcacctcgaggtgaaggcctcactgatgaacgatgacttcgagaagatcaagaactggcagaaggaagcctttcacaagcagatgatgggcggcttcaaggagaccaaggaagctgaggacggctttcggaaggcacagaagccctgggccaagaagctgaaagaggtagaagcagcaaagaaagcccaccatgcagcgtgcaaagaggagaagctggctatctcacgagaagccaacagcaaggcagacccatccctcaaccctgaacagctcaagaaattgcaagacaaaatagaaaagtgcaagcaagatgttcttaagaccaaagagaagtatgagaagtccctgaaggaactcgaccagggcacaccccagtacatggagaacatggagcaggtgtttgagcagtgccagcagttcgaggagaaacgccttcgcttcttccgggaggttctgctggaggttcagaagcacctagacctgtccaatgtggctggctacaaagccatttaccatgacctggagcagagcatcagagcagctgatgcagtggaggacctgaggtggttccgagccaatcacgggccaggcatggccatgaactggccgcagtttgaggagtggtccgcagacctgaatcgaaccctcagccggagagagaagaagaaggccactgacggcgtcaccctgacgggcatcaaccagacaggcgaccagtctctgccgagtaagcccagcagcacccttaatgtcccgagcaaccccgcccagtctgcgcagtcacagtccagctacaaccccttcgaggatgaggacgacacgggcagcaccgtcagtgagaaggacgacactaaggccaaaaatgtgagcagctacgagaagacccagagctatcccaccgactggtcagacgatgagtctaacaaccccttctcctccacggatgccaatggggactcgaatccattcgacgacgacgccacctcggggacggaagtgcgagtccgggccctgtatgactatgaggggcaggagcatgatgagctgagcttcaaggctggggatgagctgaccaagatggaggacgaggatgagcagggctggtgcaagggacgcttggacaacgggcaagttggcctatacccggcaaattatgtggaggcgatccagtgatgagtcggggacaggccagcggggggacggaggcggcgggcccaggagcctcagccagccacgtgggcatccactccttttcctgcaagagatgatggttccattgctcttggcttcatggtgttcctggaaggcagatgagctggtcatttcgcctgggactcggcacctttccgagtgcagctggagggatctgagcgcaggaagacgcagaacaacagaaatagccgcccctccccgcccactgtgcctgttggcctatcatagatctctatgttcttgactttgtctctcctttccgagtcaatggtgggttacactgatcttgttccactgattactctctctgacgagtccatcacctgcaacttaaatgaacaagcttacatcccattttgagtgaagattttgaggtttttaatttaaaggctgtgtacagttatacttttttatacacctgttcatttctacttaaattatggcacagattgatgcgcaccagtcttgaggaaacgatctccctattcccttaccctgttactcagccacgccgtgtgtaggcttagcctcaggtggcagatgtttgaggaaaggaattatgccaggaaggtgggaccgggttatggtcgggtttctattgggaatgctctttgtgcttttgggcatctgaatggaagctttacatagaaccttaggtagaactcccccaaatcgccatatttaaaaattattttcactctattcttgcttaaaactgtactcttttgcaaattaacaattttatcactgattcagagttaaaaagaagactaacttttcaagcaaatgcatctgtaaagatgctttagattagactgtcatgtctcagtgtctatctgtatatattatttgatattcagagaatctaaagcactcgtctactgttttaatgagatttaacagcttttaacagtgagtttcgtttgtaaactgcttgaagtctgtggcattcaggcacacgtctggctggccggctgggtctcctcccgggctcagtgggcctggggcctctctgacgtggtgcctgctggagggaggctcgtcgtcaccagctgactgctggtccggcttctgaccggcctttgtcctggctccgtagcagaacactgtaaaagtgcccgcgtctttgcagtagttgcagatttcagtcgtcgtgttacttgtgcacaaacagaagctgggtcttacccgcagcacgagtgtctcgggctgcccggagtcgcccgggagcaggtgctgcagccagagttacgcgggggccacgcgggccggcgggggtggggggaacgtgggggaacctgtgtttcacgtgactcagcagtgcccgccgccgtcaccagctatgcattcactccgtttccagtgagcagatgtcttgcttggaaagtggacctgtgtctgtgtctgtcctgagaacttaccagcagaaatcctcatttctgtgctacggatttaccaaaaattgtcaagtctttttcagtttaacagttcctttacatgtgtagtatttgaggaaaaaaatcaataaacagttgatctcgtgca

SEQ ID NO: 368842 - DNA, 3454 bp, Homo sapiens
tgggagaattcagctgagagacagaggtcagacatgccagcagggttggaaagaggcaggtacggaagctgagctgcagagttagccggcatctgacagaaaaatgtgagtgtgctgtggaaggcttgcatttcctttaaggtagacctctttgaaagtagaattttcacggaattgttttctttctcactgagtgactgatttaacagaactctcaccttctatgcaagcgcacctagttttagagctccgtgacggcaatgttcaattagttcattattaactgagcaatgcagaatgctttatccagggtgcttggagaagatgtcagagtttgtctacagattttgagcgttcgaagttgacccctgactaagtatactttgctgctccctcagcctttgaaaaaatgtctgtcacatatgatgattccgttggagtagaagtgtccagcgacagcttctgggaggtcgggaactacaagcggactgtgaagcggatcgacgatggccaccgcctgtgcagcgacctcatgaactgcctgcatgagcgggcgcgcatcgagaaggcgtatgcgcagcagctcactgagtgggcccggcgctggaggcagcttgtggagaaagggccccagtacgggaccgtggagaaggcctggatggccttcatgtccgaggcagagagggtgagcgagctgcacctcgaggtgaaggcctcactgatgaacgatgacttcgagaagatcaagaactggcagaaggaagcctttcacaagcagatgatgggcggcttcaaggagaccaaggaagctgaggacggctttcggaaggcacagaagccctgggccaagaagctgaaagaggtagaagcagcaaagaaagcccaccatgcagcgtgcaaagaggagaagctggctatctcacgagaagccaacagcaaggcagacccatccctcaaccctgaacagctcaagaaattgcaagacaaaatagaaaagtgcaagcaagatgttcttaagaccaaagagaagtatgagaagtccctgaaggaactcgaccagggcacaccccagtacatggagaacatggagcaggtgtttgagcagtgccagcagttcgaggagaaacgccttcgcttcttccgggaggttctgctggaggttcagaagcacctagacctgtccaatgtggctggctacaaagccatttaccatgacctggagcagagcatcagagcagctgatgcagtggaggacctgaggtggttccgagccaatcacgggccaggcatggccatgaactggccgcagtttgaggagtggtccgcagacctgaatcgaaccctcagccggagagagaagaagaaggccactgacggcgtcaccctgacgggcatcaaccagacaggcgaccagtctctgccgagtaagcccagcagcacccttaatgtcccgagcaaccccgcccagtctgcgcagtcacagtccagctacaaccccttcgaggatgaggacgacacgggcagcaccgtcagtgagaaggacgacactaaggccaaaaatgtgagcagctacgagaagacccagagctatcccaccgactggtcagacgatgagtctaacaaccccttctcctccacggatgccaatggggactcgaatccattcgacgacgacgccacctcggggacggaagtgcgagtccgggccctgtatgactatgaggggcaggagcatgatgagctgagcttcaaggctggggatgagctgaccaagatggaggacgaggatgagcagggctggtgcaagggacgcttggacaacgggcaagttggcctatacccggcaaattatgtggaggcgatccagtgatgagtcggggacaggccagcggggggacggaggcggcgggcccaggagcctcagccagccacgtgggcatccactccttttcctgcaagagatgatggttccattgctcttggcttcatggtgttcctggaaggcagatgagctggtcatttcgcctgggactcggcacctttccgagtgcagctggagggatctgagcgcaggaagacgcagaacaacagaaatagccgcccctccccgcccactgtgcctgttggcctatcatagatctctatgttcttgactttgtctctcctttccgagtcaatggtgggttacactgatcttgttccactgattactctctctgacgagtccatcacctgcaacttaaatgaacaagcttacatcccattttgagtgaagattttgaggtttttaatttaaaggctgtgtacagttatacttttttatacacctgttcatttctacttaaattatggcacagattgatgcgcaccagtcttgaggaaacgatctccctattcccttaccctgttactcagccacgccgtgtgtaggcttagcctcaggtggcagatgtttgaggaaaggaattatgccaggaaggtgggaccgggttatggtcgggtttctattgggaatgctctttgtgcttttgggcatctgaatggaagctttacatagaaccttaggtagaactcccccaaatcgccatatttaaaaattattttcactctattcttgcttaaaactgtactcttttgcaaattaacaattttatcactgattcagagttaaaaagaagactaacttttcaagcaaatgcatctgtaaagatgctttagattagactgtcatgtctcagtgtctatctgtatatattatttgatattcagagaatctaaagcactcgtctactgttttaatgagatttaacagcttttaacagtgagtttcgtttgtaaactgcttgaagtctgtggcattcaggcacacgtctggctggccggctgggtctcctcccgggctcagtgggcctggggcctctctgacgtggtgcctgctggagggaggctcgtcgtcaccagctgactgctggtccggcttctgaccggcctttgtcctggctccgtagcagaacactgtaaaagtgcccgcgtctttgcagtagttgcagatttcagtcgtcgtgttacttgtgcacaaacagaagctgggtcttacccgcagcacgagtgtctcgggctgcccggagtcgcccgggagcaggtgctgcagccagagttacgcgggggccacgcgggccggcgggggtggggggaacgtgggggaacctgtgtttcacgtgactcagcagtgcccgccgccgtcaccagctatgcattcactccgtttccagtgagcagatgtcttgcttggaaagtggacctgtgtctgtgtctgtcctgagaacttaccagcagaaatcctcatttctgtgctacggatttaccaaaaattgtcaagtctttttcagtttaacagttcctttacatgtgtagtatttgaggaaaaaaatcaataaacagttgatctcgtgca

SEQ ID NO: 368843 - DNA, 3241 bp, Homo sapiens
aaggaacgctgttttagaaaatccttactacttgatgattaatccttggagctaatgttccacgttcccaaggttgtgagtgcttatggccacattcctgcatcagctcagccatcgcggtttgtctacagattttgagcgttcgaagttgacccctgactaagtatactttgctgctccctcagcctttgaaaaaatgtctgtcacatatgatgattccgttggagtagaagtgtccagcgacagcttctgggaggtcgggaactacaagcggactgtgaagcggatcgacgatggccaccgcctgtgcagcgacctcatgaactgcctgcatgagcgggcgcgcatcgagaaggcgtatgcgcagcagctcactgagtgggcccggcgctggaggcagcttgtggagaaagggccccagtacgggaccgtggagaaggcctggatggccttcatgtccgaggcagagagggtgagcgagctgcacctcgaggtgaaggcctcactgatgaacgatgacttcgagaagatcaagaactggcagaaggaagcctttcacaagcagatgatgggcggcttcaaggagaccaaggaagctgaggacggctttcggaaggcacagaagccctgggccaagaagctgaaagaggtagaagcagcaaagaaagcccaccatgcagcgtgcaaagaggagaagctggctatctcacgagaagccaacagcaaggcagacccatccctcaaccctgaacagctcaagaaattgcaagacaaaatagaaaagtgcaagcaagatgttcttaagaccaaagagaagtatgagaagtccctgaaggaactcgaccagggcacaccccagtacatggagaacatggagcaggtgtttgagcagtgccagcagttcgaggagaaacgccttcgcttcttccgggaggttctgctggaggttcagaagcacctagacctgtccaatgtggctggctacaaagccatttaccatgacctggagcagagcatcagagcagctgatgcagtggaggacctgaggtggttccgagccaatcacgggccaggcatggccatgaactggccgcagtttgaggagtggtccgcagacctgaatcgaaccctcagccggagagagaagaagaaggccactgacggcgtcaccctgacgggcatcaaccagacaggcgaccagtctctgccgagtaagcccagcagcacccttaatgtcccgagcaaccccgcccagtctgcgcagtcacagtccagctacaaccccttcgaggatgaggacgacacgggcagcaccgtcagtgagaaggacgacactaaggccaaaaatgtgagcagctacgagaagacccagagctatcccaccgactggtcagacgatgagtctaacaaccccttctcctccacggatgccaatggggactcgaatccattcgacgacgacgccacctcggggacggaagtgcgagtccgggccctgtatgactatgaggggcaggagcatgatgagctgagcttcaaggctggggatgagctgaccaagatggaggacgaggatgagcagggctggtgcaagggacgcttggacaacgggcaagttggcctatacccggcaaattatgtggaggcgatccagtgatgagtcggggacaggccagcggggggacggaggcggcgggcccaggagcctcagccagccacgtgggcatccactccttttcctgcaagagatgatggttccattgctcttggcttcatggtgttcctggaaggcagatgagctggtcatttcgcctgggactcggcacctttccgagtgcagctggagggatctgagcgcaggaagacgcagaacaacagaaatagccgcccctccccgcccactgtgcctgttggcctatcatagatctctatgttcttgactttgtctctcctttccgagtcaatggtgggttacactgatcttgttccactgattactctctctgacgagtccatcacctgcaacttaaatgaacaagcttacatcccattttgagtgaagattttgaggtttttaatttaaaggctgtgtacagttatacttttttatacacctgttcatttctacttaaattatggcacagattgatgcgcaccagtcttgaggaaacgatctccctattcccttaccctgttactcagccacgccgtgtgtaggcttagcctcaggtggcagatgtttgaggaaaggaattatgccaggaaggtgggaccgggttatggtcgggtttctattgggaatgctctttgtgcttttgggcatctgaatggaagctttacatagaaccttaggtagaactcccccaaatcgccatatttaaaaattattttcactctattcttgcttaaaactgtactcttttgcaaattaacaattttatcactgattcagagttaaaaagaagactaacttttcaagcaaatgcatctgtaaagatgctttagattagactgtcatgtctcagtgtctatctgtatatattatttgatattcagagaatctaaagcactcgtctactgttttaatgagatttaacagcttttaacagtgagtttcgtttgtaaactgcttgaagtctgtggcattcaggcacacgtctggctggccggctgggtctcctcccgggctcagtgggcctggggcctctctgacgtggtgcctgctggagggaggctcgtcgtcaccagctgactgctggtccggcttctgaccggcctttgtcctggctccgtagcagaacactgtaaaagtgcccgcgtctttgcagtagttgcagatttcagtcgtcgtgttacttgtgcacaaacagaagctgggtcttacccgcagcacgagtgtctcgggctgcccggagtcgcccgggagcaggtgctgcagccagagttacgcgggggccacgcgggccggcgggggtggggggaacgtgggggaacctgtgtttcacgtgactcagcagtgcccgccgccgtcaccagctatgcattcactccgtttccagtgagcagatgtcttgcttggaaagtggacctgtgtctgtgtctgtcctgagaacttaccagcagaaatcctcatttctgtgctacggatttaccaaaaattgtcaagtctttttcagtttaacagttcctttacatgtgtagtatttgaggaaaaaaatcaataaacagttgatctcgtgca

SEQ ID NO: 368844 - DNA, 3329 bp, Homo sapiens
agaaacaagcggtacgcggcgatgcccgtgctcaggagactggtgtactgtgcaagagcgccgtgaggcagacctaggtagagcgtgcagttgttgccgagcgtggatcttggggacggatatgtgtactagcaagagtttccgatgccgttcgatggcttgaccccgcatagaatctaagggtagtaacatttgttgctagactcctcctccaggatcctgtgtgataatagagagtcgtcgtggttcgagcaatagttgatgtatgtccgcttgggtagtagtaaagttgctcccaagacgatcggtcctatcttggtgtaggtcggtgcgatatctatactaacgtcggtgacatggtgacagctgagtatctgacggatggccaccgcctgtgcagcgacctcatgaactgcctgcatgagcgggcgcgcatcgagaaggcgtatgcgcagcagctcactgagtgggcccggcgctggaggcagcttgtggagaaagggccccagtacgggaccgtggagaaggcctggatggccttcatgtccgaggcagagagggtgagcgagctgcacctcgaggtgaaggcctcactgatgaacgatgacttcgagaagatcaagaactggcagaaggaagcctttcacaagcagatgatgggcggcttcaaggagaccaaggaagctgaggacggctttcggaaggcacagaagccctgggccaagaagctgaaagaggtagaagcagcaaagaaagcccaccatgcagcgtgcaaagaggagaagctggctatctcacgagaagccaacagcaaggcagacccatccctcaaccctgaacagctcaagaaattgcaagacaaaatagaaaagtgcaagcaagatgttcttaagaccaaagagaagtatgagaagtccctgaaggaactcgaccagggcacaccccagtacatggagaacatggagcaggtgtttgagcagtgccagcagttcgaggagaaacgccttcgcttcttccgggaggttctgctggaggttcagaagcacctagacctgtccaatgtggctggctacaaagccatttaccatgacctggagcagagcatcagagcagctgatgcagtggaggacctgaggtggttccgagccaatcacgggccaggcatggccatgaactggccgcagtttgaggagtggtccgcagacctgaatcgaaccctcagccggagagagaagaagaaggccactgacggcgtcaccctgacgggcatcaaccagacaggcgaccagtctctgccgagtaagcccagcagcacccttaatgtcccgagcaaccccgcccagtctgcgcagtcacagtccagctacaaccccttcgaggatgaggacgacacgggcagcaccgtcagtgagaaggacgacactaaggccaaaaatgtgagcagctacgagaagacccagagctatcccaccgactggtcagacgatgagtctaacaaccccttctcctccacggatgccaatggggactcgaatccattcgacgacgacgccacctcggggacggaagtgcgagtccgggccctgtatgactatgaggggcaggagcatgatgagctgagcttcaaggctggggatgagctgaccaagatggaggacgaggatgagcagggctggtgcaagggacgcttggacaacgggcaagttggcctatacccggcaaattatgtggaggcgatccagtgatgagtcggggacaggccagcggggggacggaggcggcgggcccaggagcctcagccagccacgtgggcatccactccttttcctgcaagagatgatggttccattgctcttggcttcatggtgttcctggaaggcagatgagctggtcatttcgcctgggactcggcacctttccgagtgcagctggagggatctgagcgcaggaagacgcagaacaacagaaatagccgcccctccccgcccactgtgcctgttggcctatcatagatctctatgttcttgactttgtctctcctttccgagtcaatggtgggttacactgatcttgttccactgattactctctctgacgagtccatcacctgcaacttaaatgaacaagcttacatcccattttgagtgaagattttgaggtttttaatttaaaggctgtgtacagttatacttttttatacacctgttcatttctacttaaattatggcacagattgatgcgcaccagtcttgaggaaacgatctccctattcccttaccctgttactcagccacgccgtgtgtaggcttagcctcaggtggcagatgtttgaggaaaggaattatgccaggaaggtgggaccgggttatggtcgggtttctattgggaatgctctttgtgcttttgggcatctgaatggaagctttacatagaaccttaggtagaactcccccaaatcgccatatttaaaaattattttcactctattcttgcttaaaactgtactcttttgcaaattaacaattttatcactgattcagagttaaaaagaagactaacttttcaagcaaatgcatctgtaaagatgctttagattagactgtcatgtctcagtgtctatctgtatatattatttgatattcagagaatctaaagcactcgtctactgttttaatgagatttaacagcttttaacagtgagtttcgtttgtaaactgcttgaagtctgtggcattcaggcacacgtctggctggccggctgggtctcctcccgggctcagtgggcctggggcctctctgacgtggtgcctgctggagggaggctcgtcgtcaccagctgactgctggtccggcttctgaccggcctttgtcctggctccgtagcagaacactgtaaaagtgcccgcgtctttgcagtagttgcagatttcagtcgtcgtgttacttgtgcacaaacagaagctgggtcttacccgcagcacgagtgtctcgggctgcccggagtcgcccgggagcaggtgctgcagccagagttacgcgggggccacgcgggccggcgggggtggggggaacgtgggggaacctgtgtttcacgtgactcagcagtgcccgccgccgtcaccagctatgcattcactccgtttccagtgagcagatgtcttgcttggaaagtggacctgtgtctgtgtctgtcctgagaacttaccagcagaaatcctcatttctgtgctacggatttaccaaaaattgtcaagtctttttcagtttaacagttcctttacatgtgtagtatttgaggaaaaaaatcaataaacagttgatctcgtgca

SEQ ID NO: 368845 - DNA, 2368 bp, Homo sapiens
cttggtggtgggctcaaggaacagagccccggacttgcatggtcctcgccacccccgctgtcctctgggaggtgggcagcatggcctgggggtggttgtagaggtgcaagcctccagatcccctgatgagcccctgctttgaacagtgaggaggggctcaggtcgtttgggttcataagtggggcatggggagcctgaggtcttctgggaaaccagggagagctggggccctgagtctacacatcagatgcacagagccaactgcaggctcgctgggcaggaactgaggacagacgtggcttccagcaagtagtgaacctttggtttctctccctcggcacctgttgcctaggagtggtccgcagacctgaatcgaaccctcagccggagagagaagaagaaggccactgacggcgtcaccctgacgggcatcaaccagacaggcgaccagtctctgccgagtaagcccagcagtgtgagcagctacgagaagacccagagctatcccaccgactggtcagacgatgagtctaacaaccccttctcctccacggatgccaatggggactcgaatccattcgacgacgacgccacctcggggacggaagtgcgagtccgggccctgtatgactatgaggggcaggagcatgatgagctgagcttcaaggctggggatgagctgaccaagatggaggacgaggatgagcagggctggtgcaagggacgcttggacaacgggcaagttggcctatacccggcaaattatgtggaggcgatccagtgatgagtcggggacaggccagcggggggacggaggcggcgggcccaggagcctcagccagccacgtgggcatccactccttttcctgcaagagatgatggttccattgctcttggcttcatggtgttcctggaaggcagatgagctggtcatttcgcctgggactcggcacctttccgagtgcagctggagggatctgagcgcaggaagacgcagaacaacagaaatagccgcccctccccgcccactgtgcctgttggcctatcatagatctctatgttcttgactttgtctctcctttccgagtcaatggtgggttacactgatcttgttccactgattactctctctgacgagtccatcacctgcaacttaaatgaacaagcttacatcccattttgagtgaagattttgaggtttttaatttaaaggctgtgtacagttatacttttttatacacctgttcatttctacttaaattatggcacagattgatgcgcaccagtcttgaggaaacgatctccctattcccttaccctgttactcagccacgccgtgtgtaggcttagcctcaggtggcagatgtttgaggaaaggaattatgccaggaaggtgggaccgggttatggtcgggtttctattgggaatgctctttgtgcttttgggcatctgaatggaagctttacatagaaccttaggtagaactcccccaaatcgccatatttaaaaattattttcactctattcttgcttaaaactgtactcttttgcaaattaacaattttatcactgattcagagttaaaaagaagactaacttttcaagcaaatgcatctgtaaagatgctttagattagactgtcatgtctcagtgtctatctgtatatattatttgatattcagagaatctaaagcactcgtctactgttttaatgagatttaacagcttttaacagtgagtttcgtttgtaaactgcttgaagtctgtggcattcaggcacacgtctggctggccggctgggtctcctcccgggctcagtgggcctggggcctctctgacgtggtgcctgctggagggaggctcgtcgtcaccagctgactgctggtccggcttctgaccggcctttgtcctggctccgtagcagaacactgtaaaagtgcccgcgtctttgcagtagttgcagatttcagtcgtcgtgttacttgtgcacaaacagaagctgggtcttacccgcagcacgagtgtctcgggctgcccggagtcgcccgggagcaggtgctgcagccagagttacgcgggggccacgcgggccggcgggggtggggggaacgtgggggaacctgtgtttcacgtgactcagcagtgcccgccgccgtcaccagctatgcattcactccgtttccagtgagcagatgtcttgcttggaaagtggacctgtgtctgtgtctgtcctgagaacttaccagcagaaatcctcatttctgtgctacggatttaccaaaaattgtcaagtctttttcagtttaacagttcctttacatgtgtagtatttgaggaaaaaaatcaataaacagttgatctcgtgca

SEQ ID NO: 368846 - DNA, 2090 bp, Homo sapiens
gagtcccttgggagaggaaactttctgaaagactgtaggattaccttccctgaacttccggtcaggtgcggtgctgccctgccgcgccctcttacccctggatgccgacgaaaccgcaaaactccagccccgggaagcgcgtctcaaggaccaccaccagcgagcggctttgggagagtgatctgcgccaccctcgcagcccattaaataggcactccccgtttgattgacaggagaagtcaccaatgcgcgtcctggggctttccctcgtcctcacgcggggtgagccgcctctctactcatctggcccaatcgggggcgccggggaggctgtggggcggggctcggtgtccggtagccaatggacagagcccagcgggagcggcgggggcggtgcggtcgcggctggcggcagaagcggccgcaggggtctgggcagggctgggcagtgctgccggagcaaaagcggtagcgggagcccggccggagctgggtctggagacgccgtggcagcctgaacggagtgtgcgacggattgggaggtttgtctacagattttgagcgttcgaagttgacccctgactaagtatactttgctgctccctcagcctttgaaaaaatgtctgtcacatatgatgattccgttggagtagaagtgtccagcgacagcttctgggaggtcgggaactacaagcggactgtgaagcggatcgacgatggccaccgcctgtgcagcgacctcatgaactgcctgcatgagcgggcgcgcatcgagaaggcgtatgcgcagcagctcactgagtgggcccggcgctggaggcagcttgtggagaaagggccccagtacgggaccgtggagaaggcctggatggccttcatgtccgaggcagagagggtgagcgagctgcacctcgaggtgaaggcctcactgatgaacgatgacttcgagaagatcaagaactggcagaaggaagcctttcacaagcagatgatgggcggcttcaaggagaccaaggaagctgaggacggctttcggaaggcacagaagccctgggccaagaagctgaaagaggtagaagcagcaaagaaagcccaccatgcagcgtgcaaagaggagaagctggctatctcacgagaagccaacagcaaggcagacccatccctcaaccctgaacagctcaagaaattgcaagacaaaatagaaaagtgcaagcaagatgttcttaagaccaaagagaagtatgagaagtccctgaaggaactcgaccagggcacaccccagtacatggagaacatggagcaggtgtttgagcagtgccagcagttcgaggagaaacgccttcgcttcttccgggaggttctgctggaggttcagaagcacctagacctgtccaatgtggctggctacaaagccatttaccatgacctggagcagagcatcagagcagctgatgcagtggaggacctgaggtggttccgagccaatcacgggccaggcatggccatgaactggccgcagtttgaggagtggtccgcagacctgaatcgaaccctcagccggagagagaagaagaaggccactgacggcgtcaccctgacgggcatcaaccagacaggcgaccagtctctgccgagtaagcccagcagcacccttaatgtcccgagcaaccccgcccagtctgcgcagtcacagtccagctacaaccccttcgaggatgaggacgacacgggcagcaccgtcagtgagaaggacgacactaaggccaaaaatgtgagcagctacgagaagacccagagctatcccaccgactggtcagacgatgagtctaacaaccccttctcctccacggatgccaatggggactcgaatccattcgacgacgacgccacctcggggacggaagtgcgagtccgggccctgtatgactatgaggggcaggagcatgatgagctgagcttcaaggctggggatgagctgaccaagatggaggaacgaggctgacacaggtctgccagctcaggacgctgggacaccacggccagggccaagcgtggagcgcacgcaagccggactggagcaggaggcccac

SEQ ID NO: 368847 - DNA, 732 bp, Homo sapiens
attaataagattaccaacagcgtgttaattacaaagaacagtgaggagctagaggtggacgacccccggaaaccgaactgctttgaactttacatccccaacaacaaggggcagctcatcaaagcctgcaaaactgaggcggacggccgagtggtggagggaaaccacatggtgtaccggatctcggcccccacgcaggaggagaaggacgagtggatcaagtccatccaggcggctgtgagtgtggaccccttctatgagatgctggcagcgagaaagaagcggatttcagtcaagaagaagcaggagcagccctgaccccctgcccccaactccattatttattacggagctgccccgcctgggtggccggacccctgggccttggggctgtggatcctggttccctgtttggaaaattcaccacctctagctcctcactgttctttgtaattaacacgctgttggtaatcttattaattatttaaccacttggcctgctgaccccctcatttcttggggttgacagagtcgaggtgctccgtggagccagcctgtttccctggacaggggcctggacccgcctgtctctgggtgctgcctgggctgtcccggtgggtctgttctggtttcaccccgagcccagcaggagtggagtaaagggagaaggttaatatggtgggagtctggagttggaattggccggggacagagtttagaatgcagggattc

SEQ ID NO: 368848 - DNA, 539 bp, Homo sapiens
  misc_feature (111)..(111): n is a, c, g, or t
ttgatcactcgaccttctcatcctgcgtagagggccgagatccggtacaccatgtagtatccctccaccactcggacgtccgcctcagttatgcaggctttgatgagctgncccttgttgttggggatgtaaagttcaaagcagttcggtttccgggggtcgtccaaacagggaaccaggacccctgggccttggggctgtggatcctggttccctgtttggaaaattcaccacctctagctcctcactgttctttgtaattaacacgctgttggtaatcttattaattatttaaccacttggcctgctgaccccctcatttcttggggttgacagagtcgaggtgctccgtggagccagcctgtttccctggacaggggcctggacccgcctgtctctgggtgctgcctgggctgtcccggtgggtctgttctggtttcaccccgagcccagcaggagtggagtaaagggagaaggttaatatggtgggagtctggagttggaattggccggggacagagtttagaatgcagggattc

SEQ ID NO: 368849 - DNA, 681 bp, Homo sapiens
ctgcccctgcgcacccctccctgtgcccaccctgtttctgtcgcctgcggctcttgggggtgctccattctcccgccttcccttctcctgcacctggtcctgcctgctttctcgctgtctgccccaggagggggccgggtgaagacgtggaagcggcgctggtttatcctcacagacaactgcctctactactttgagtacaccacggacaaggagccccgaggaatcatccccctggagaatctgagcatccgagaggtggacgacccccggaaaccgaactccattatttattacggagctgccccgcctgggtggccggacccctgggccttggggctgtggatcctggttccctgtttggaaaattcaccacctctagctcctcactgttctttgtaattaacacgctgttggtaatcttattaattatttaaccacttggcctgctgaccccctcatttcttggggttgacagagtcgaggtgctccgtggagccagcctgtttccctggacaggggcctggacccgcctgtctctgggtgctgcctgggctgtcccggtgggtctgttctggtttcaccccgagcccagcaggagtggagtaaagggagaaggttaatatggtgggagtctggagttggaattggccggggacagagtttagaatgcagggattc

SEQ ID NO: 368850 - DNA, 1827 bp, Homo sapiens
gcagaggtggctgtaccgcgtggctccgcctccgcgcgacacttttccggggcttctcattggagagcaagcctgtcaagtgctttctgttgtttcggaggcggggcctgctgccctgcctgcactccgattggccccgcgggccgtctacctctggccggacatacctacaccggctttttgtacgactgttggccctggagaacgatcctttggtggcgagggcggggaggacgaaagcgcccactgtggattggacagtgtcaaaaagaggggcggtccctactgaaggggcggttgggcgacgaagggaagagtcttttcagcgctgaggactggcgctgaggaggcggcggtggctcccggggcgtttgagcgggctcacccgagcccgcgggccaacgcggatccaggcccgactggcgggaccgccccggattccccgcgggccttcctagccgccatggaggacggcgtctatgaacccccagacctgactccggaggagcggatggagctggagaacatccggcggcggaagcaggagctgctggtggagattcagcgcctgcgggaggagctcagtgaagccatgagcgaggtggaggggctggaggccaatgagggcagtaagaccttgcaacggaaccggaagatggcaatgggcaggaagaagttcaacatggaccccaagaaggggatccagttcttggtggagaatgaactgctgcagaacacacccgaggagatcgcccgcttcctgtacaagggcgaggggctgaacaagacagccatcggggactacctgggggagagggaagaactgaacctggcagtgctccatgcttttgtggatctgcatgagttcaccgacctcaatctggtgcaggccctcaggcagtttctatggagctttcgcctacccggagaggcccagaaaattgaccggatgatggaggccttcgcccagcgatactgcctgtgcaaccctggggttttccagtccacagacacgtgctatgtgctgtccttcgccgtcatcatgctcaacaccagtctccacaatcccaatgtccgggacaagccgggcctggagcgctttgtggccatgaaccggggcatcaacgagggcggggacctgcctgaggagctgctcaggaacctgtacgacagcatccgaaatgagcccttcaagattcctgaggatgacgggaatgacctgacccacaccttcttcaacccggaccgggagggctggctcctgaagctgggagggggccgggtgaagacgtggaagcggcgctggtttatcctcacagacaactgcctctactactttgagtacaccacggacaaggagccccgaggaatcatccccctggagaatctgagcatccgagaggtggacgacccccggaaaccgaactgctttgaactttacatccccaacaacaaggggcagctcatcaaagcctgcaaaactgaggcggacggccgagtggtggagggaaaccacatggtgtaccggatctcggcccccacgcaggaggagaaggacgagtggatcaagtccatccaggcggctgtgagtgtggaccccttctatgagatgctggcagcgagaaagaagcggatttcagtcaagaagaagcaggagcagccctgaccccctgcccccaactccattatttattacggagctgccccgcctgggtggccggacccctgggccttggggctgtggatcctggttccctgtttggaaaattcaccacctctagctcctcactgttctttgtaattaacacgctgttggtaatcttatta

SEQ ID NO: 368851 - DNA, 2042 bp, Homo sapiens
gcagaggtggctgtaccgcgtggctccgcctccgcgcgacacttttccggggcttctcattggagagcaagcctgtcaagtgctttctgttgtttcggaggcggggcctgctgccctgcctgcactccgattggccccgcgggccgtctacctctggccggacatacctacaccggctttttgtacgactgttggccctggagaacgatcctttggtggcgagggcggggaggacgaaagcgcccactgtggattggacagtgtcaaaaagaggggcggtccctactgaaggggcggttgggcgacgaagggaagagtcttttcagcgctgaggactggcgctgaggaggcggcggtggctcccggggcgtttgagcgggctcacccgagcccgcgggccaacgcggatccaggcccgactggcgggaccgccccggattccccgcgggccttcctagccgccatggaggacggcgtctatgaacccccagacctgactccggaggagcggatggagctggagaacatccggcggcggaagcaggagctgctggtggagattcagcgcctgcgggaggagctcagtgaagccatgagcgaggtggaggggctggaggccaatgagggcagtaagaccttgcaacggaaccggaagatggcaatgggcaggaagaagttcaacatggaccccaagaaggggatccagttcttggtggagaatgaactgctgcagaacacacccgaggagatcgcccgcttcctgtacaagggcgaggggctgaacaagacagccatcggggactacctgggggagagggaagaactgaacctggcagtgctccatgcttttgtggatctgcatgagttcaccgacctcaatctggtgcaggccctcaggcagtttctatggagctttcgcctacccggagaggcccagaaaattgaccggatgatggaggccttcgcccagcgatactgcctgtgcaaccctggggttttccagtccacagacacgtgctatgtgctgtccttcgccgtcatcatgctcaacaccagtctccacaatcccaatgtccgggacaagccgggcctggagcgctttgtggccatgaaccggggcatcaacgagggcggggacctgcctgaggagctgctcaggaacctgtacgacagcatccgaaatgagcccttcaagattcctgaggatgacgggaatgacctgacccacaccttcttcaacccggaccgggagggctggctcctgaagctgggagggggccgggtgaagacgtggaagcggcgctggtttatcctcacagacaactgcctctactactttgagtacaccacggacaaggagccccgaggaatcatccccctggagaatctgagcatccgagaggtggacgacccccggaaaccgaactgctttgaactttacatccccaacaacaaggggcagctcatcaaagcctgcaaaactgaggcggacggccgagtggtggagggaaaccacatggtgtaccggatctcggcccccggcggctgtgagtgtggaccccttctatgagatgctggcagcgagaaagaagcggatttcagtcaagaagaagcaggagcagccctgaccccctgcccccaactccattatttattacggagctgccccgcctgggtggccggacccctgggccttggggctgtggatcctggttccctgtttggaaaattcaccacctctagctcctcactgttctttgtaattaacacgctgttggtaatcttattaattatttaaccacttggcctgctgaccccctcatttcttggggttgacagagtcgaggtgctccgtggagccagcctgtttccctggacaggggcctggacccgcctgtctctgggtgctgcctgggctgtcccggtgggtctgttctggtttcaccccgagcccagcaggagtggagtaaagggagaaggttaatatggtgggagtctggagttggaattggccggggacagagtttagaatgcagggattc

SEQ ID NO: 368852 - DNA, 2002 bp, Homo sapiens
gcagaggtggctgtaccgcgtggctccgcctccgcgcgacacttttccggggcttctcattggagagcaagcctgtcaagtgctttctgttgtttcggaggcggggcctgctgccctgcctgcactccgattggccccgcgggccgtctacctctggccggacatacctacaccggctttttgtacgactgttggccctggagaacgatcctttggtggcgagggcggggaggacgaaagcgcccactgtggattggacagtgtcaaaaagaggggcggtccctactgaaggggcggttgggcgacgaagggaagagtcttttcagcgctgaggactggcgctgaggaggcggcggtggctcccggggcgtttgagcgggctcacccgagcccgcgggccaacgcggatccaggcccgactggcgggaccgccccggattccccgcgggccttcctagccgccatggaggacggcgtctatgaacccccagacctgactccggaggagcggatggagctggagaacatccggcggcggaagcaggagctgctggtggagattcagcgcctgcgggaggagctcagtgaagccatgagcgaggtggaggggctggaggccaatgagggcagtaagaccttgcaacggaaccggaagatggcaatgggcaggaagaagttcaacatggaccccaagaaggggatccagttcttggtggagaatgaactgctgcagaacacacccgaggagatcgcccgcttcctgtacaagggcgaggggctgaacaagacagccatcggggactacctgggggagagggaagaactgaacctggcagtgctccatgcttttgtggatctgcatgagttcaccgacctcaatctggtgcaggccctcaggcagtttctatggagctttcgcctacccggagaggcccagaaaattgaccggatgatggaggccttcgcccagcgatactgcctgtgcaaccctggggttttccagtccacagacacgtgctatgtgctgtccttcgccgtcatcatgctcaacaccagtctccacaatcccaatgtccgggacaagccgggcctggagcgctttgtggccatgaaccggggcatcaacgagggcggggacctgcctgaggagctgctcaggaacctgtacgacagcatccgaaatgagcccttcaagattcctgaggatgacgggaatgacctgacccacaccttcttcaacccggaccgggagggctggctcctgaagctgggagggggccgggtgaagacgtggaagcggcgctggtttatcctcacagacaactgcctctactactttgagtacaccacggacaaggagccccgaggaatcatccccctggagaatctgagcatccgagaggtggacgacccccggaaaccgaactgctttgaactttacatccccaacaacaaggggcagacgcaggaggagaaggacgagtggatcaagtccatccaggcggctgtgagtgtggaccccttctatgagatgctggcagcgagaaagaagcggatttcagtcaagaagaagcaggagcagccctgaccccctgcccccaactccattatttattacggagctgccccgcctgggtggccggacccctgggccttggggctgtggatcctggttccctgtttggaaaattcaccacctctagctcctcactgttctttgtaattaacacgctgttggtaatcttattaattatttaaccacttggcctgctgaccccctcatttcttggggttgacagagtcgaggtgctccgtggagccagcctgtttccctggacaggggcctggacccgcctgtctctgggtgctgcctgggctgtcccggtgggtctgttctggtttcaccccgagcccagcaggagtggagtaaagggagaaggttaatatggtgggagtctggagttggaattggccggggacagagtttagaatgcagggattc

SEQ ID NO: 368853 - DNA, 1511 bp, Homo sapiens
tttctcccaactgtacaaaggtctggcctaagcagggttcccaagccagatattcctcccaagagtgtgttctgagcatcccccaccctgggggcaggcctgtgtgggagtccagcaggaaacttcaccctcggcagtgggcagctgtggtgcagtagagggggcacgacttccccagggcattgccctttgcccattcctgccccatcctttccaaactgtatgtgtctttgtcccatccttccagggaagaactgaacctggcagtgctccatgcttttgtggatctgcatgagttcaccgacctcaatctggtgcaggccctcaggcagtttctatggagctttcgcctacccggagaggcccagaaaattgaccggatgatggaggccttcgcccagcgatactgcctgtgcaaccctggggttttccagtccacagacacgtgctatgtgctgtccttcgccgtcatcatgctcaacaccagtctccacaatcccaatgtccgggacaagccgggcctggagcgctttgtggccatgaaccggggcatcaacgagggcggggacctgcctgaggagctgctcaggaacctgtacgacagcatccgaaatgagcccttcaagattcctgaggatgacgggaatgacctgacccacaccttcttcaacccggaccgggagggctggctcctgaagctgggagggggccgggtgaagacgtggaagcggcgctggtttatcctcacagacaactgcctctactactttgagtacaccacggacaaggagccccgaggaatcatccccctggagaatctgagcatccgagaggtggacgacccccggaaaccgaactgctttgaactttacatccccaacaacaaggggcagctcatcaaagcctgcaaaactgaggcggacggccgagtggtggagggaaaccacatggtgtaccggatctcggcccccacgcaggaggagaaggacgagtggatcaagtccatccaggcggctgtgagtgtggaccccttctatgagatgctggcagcgagaaagaagcggatttcagtcaagaagaagcaggagcagccctgaccccctgcccccaactccattatttattacggagctgccccgcctgggtggccggacccctgggccttggggctgtggatcctggttccctgtttggaaaattcaccacctctagctcctcactgttctttgtaattaacacgctgttggtaatcttattaattatttaaccacttggcctgctgaccccctcatttcttggggttgacagagtcgaggtgctccgtggagccagcctgtttccctggacaggggcctggacccgcctgtctctgggtgctgcctgggctgtcccggtgggtctgttctggtttcaccccgagcccagcaggagtggagtaaagggagaaggttaatatggtgggagtctggagttggaattggccggggacagagtttagaatgcagggattc

SEQ ID NO: 368854 - DNA, 932 bp, Homo sapiens
cattctgggcgtcatgctgtggggataatggcgatctcctcgcacacgcgcttgttcgtgtggaagtcgttgcccaggcgcgtgtagtacttttctatgatgaccccccccggatgcatgcaggggggggccgggtgaagacgtggaagcggcgctggtttatcctcacagacaactgcctctactactttgagtacaccacggacaaggagccccgaggaatcatccccctggagaatctgagcatccgagaggtggacgacccccggaaaccgaactgctttgaactttacatccccaacaacaaggggcagctcatcaaagcctgcaaaactgaggcggacggccgagtggtggagggaaaccacatggtgtaccggatctcggcccccacgcaggaggagaaggacgagtggatcaagtccatccaggcggctgtgagtgtggaccccttctatgagatgctggcagcgagaaagaagcggatttcagtcaagaagaagcaggagcagccctgaccccctgcccccaactccattatttattacggagctgccccgcctgggtggccggacccctgggccttggggctgtggatcctggttccctgtttggaaaattcaccacctctagctcctcactgttctttgtaattaacacgctgttggtaatcttattaattatttaaccacttggcctgctgaccccctcatttcttggggttgacagagtcgaggtgctccgtggagccagcctgtttccctggacaggggcctggacccgcctgtctctgggtgctgcctgggctgtcccggtgggtctgttctggtttcaccccgagcccagcaggagtggagtaaagggagaaggttaatatggtgggagtctggagttggaattggccggggacagagtttagaatgcagggattc

SEQ ID NO: 368855 - DNA, 963 bp, Homo sapiens
agaggcatctcacctgaagtaccatcgagcacggcatcgtcaccaactgggacgacatggagaaaatctggcaccacaccttctacaatgagctgcgtgtggctcccggacagcaccccgtgctgctgaccgaggcccccctcctcctctgtgctgtggggccgggtgaagacgtggaagcggcgctggtttatcctcacagacaactgcctctactactttgagtacaccacggacaaggagccccgaggaatcatccccctggagaatctgagcatccgagaggtggacgacccccggaaaccgaactgctttgaactttacatccccaacaacaaggggcagctcatcaaagcctgcaaaactgaggcggacggccgagtggtggagggaaaccacatggtgtaccggatctcggcccccacgcaggaggagaaggacgagtggatcaagtccatccaggcggctgtgagtgtggaccccttctatgagatgctggcagcgagaaagaagcggatttcagtcaagaagaagcaggagcagccctgaccccctgcccccaactccattatttattacggagctgccccgcctgggtggccggacccctgggccttggggctgtggatcctggttccctgtttggaaaattcaccacctctagctcctcactgttctttgtaattaacacgctgttggtaatcttattaattatttaaccacttggcctgctgaccccctcatttcttggggttgacagagtcgaggtgctccgtggagccagcctgtttccctggacaggggcctggacccgcctgtctctgggtgctgcctgggctgtcccggtgggtctgttctggtttcaccccgagcccagcaggagtggagtaaagggagaaggttaatatggtgggagtctggagttggaattggccggggacagagtttagaatgcagggattc

SEQ ID NO: 368856 - DNA, 1105 bp, Homo sapiens
gcagaggtggctgtaccgcgtggctccgcctccgcgcgacacttttccggggcttctcattggagagcaagcctgtcaagtgctttctgttgtttcggaggcggggcctgctgccctgcctgcactccgattggccccgcgggccgtctacctctggccggacatacctacaccggctttttgtacgactgttggccctggagaacgatcctttggtggcgagggcggggaggacgaaagcgcccactgtggattggacagtgtcaaaaagaggggcggtccctactgaaggggcggttgggcgacgaagggaagagtcttttcagcgctgaggactggcgctgaggaggcggcggtggctcccggggcgtttgagcgggctcacccgagcccgcgggccaacgcggatccaggcccgactggcgggaccgccccggattccccgcgggccttcctagccgccatggaggacggcgtctatgaacccccagacctgactccggaggagcggatggagctggagaacatccggcggcggaagcaggagctgctggtggagattcagcgcctgcgggaggagctcagtgaagccatgagcgaggtggaggggctggaggccaatgagggcagtaagaccttgcaacggaaccggaagatggcaatgggcaggaagaagcaggagcagccctgaccccctgcccccaactccattatttattacggagctgccccgcctgggtggccggacccctgggccttggggctgtggatcctggttccctgtttggaaaattcaccacctctagctcctcactgttctttgtaattaacacgctgttggtaatcttattaattatttaaccacttggcctgctgaccccctcatttcttggggttgacagagtcgaggtgctccgtggagccagcctgtttccctggacaggggcctggacccgcctgtctctgggtgctgcctgggctgtcccggtgggtctgttctggtttcaccccgagcccagcaggagtggagtaaagggagaaggttaatatggtgggagtctggagttggaattggccggggacagagtttagaatgcagggattc

SEQ ID NO: 368857 - DNA, 598 bp, Homo sapiens
gcagaggtggctgtaccgcgtggctccgcctccgcgcgacacttttccggggcttctcattggagagcaagcctgtcaagtgctttctgttgtttcggaggcggggcctgctgccctgcctgcactccgattggccccgcgggccgtctacctctggccggacatacctacaccggctttttgtacgactgttggccctggagaacgatcctttggtggcgagggcggggaggacgaaagcgcccactgtggattggacagtgtcaaaaagaggggcggtccctactgaaggggcggttgggcgacgaagggaagagtcttttcagcgctgaggactggcgctgaggaggcggcggtggctcccggggcgtttgagcgggctcacccgagcccgcgggccaacgcggatccaggcccgactggcggggaacccgcccccggtaattccgcggcgctctacgcagagaggttatacccaacgatcgagacgatgatgaaatcggggacagacgtgtgaatcagctgggagactcgacagacagtgagctggcaagcaactgagacgaagagggaatcaagacaaggacctggataggaa

SEQ ID NO: 368858 - DNA, 783 bp, Homo sapiens
  misc_feature (63)..(63): n is a, c, g, or t
  misc_feature (72)..(72): n is a, c, g, or t
  misc_feature (95)..(95): n is a, c, g, or t
tggcctttttaattaactttgggagtaacaaccacgggacaaagggagccccgggagggattnaattccccnttgggaggaatttggagcattcnggaggaggtggaggaacccccgggaaaccggaactgctttgaactttacatccccaacaacaaggggcagctcatcaaagcctgcaaaactgaggcggacggccgagtggtggagggaaaccacatggtgtaccggatctcggcccccacgcaggaggagaaggacgagtggatcaagtccatccaggcggctgtgagtgtggaccccttctatgagatgctggcagcgagaaagaagcggatttcagtcaagaagaagcaggagcagccctgaccccctgcccccaactccattatttattacggagctgccccgcctgggtggccggacccctgggccttggggctgtggatcctggttccctgtttggaaaattcaccacctctagctcctcactgttctttgtaattaacacgctgttggtaatcttattaattatttaaccacttggcctgctgaccccctcatttcttggggttgacagagtcgaggtgctccgtggagccagcctgtttccctggacaggggcctggacccgcctgtctctgggtgctgcctgggctgtcccggtgggtctgttctggtttcaccccgagcccagcaggagtggagtaaagggagaaggttaatatggtgggagtctggagttggaattggccggggacagagtttagaatgcagggattc

SEQ ID NO: 368859 - DNA, 479 bp, Homo sapiens
attaataagattaccaacagcgtgttaattacaaagaacagtgaggagctagaggtggacgacccccggaaaccgaactgctttgaactttacatccccaacaacaaggggcagctcatcaaagcctgcaaaactgaggcggacggccgagtggtggagggaaaccacatggtgtaccggatctcggcccccacgcaggaggagaaggacgagtggatcaagtccatccaggcggctgtgagtgtggaccccttctatgagatgctggcagcgagaaagaagcggatttcagtcaagaagaagcaggagcagccctgaccccctgcccccaactccattatttattacggagctgccccgcctgggtggccggacccctgggccttggggctgtggatcctggttccctgtttggaaaattcaccacctctagctcctcactgttctttgtaattaacacgctgttggtaatcttatta

SEQ ID NO: 368860 - DNA, 2080 bp, Homo sapiens
gcagaggtggctgtaccgcgtggctccgcctccgcgcgacacttttccggggcttctcattggagagcaagcctgtcaagtgctttctgttgtttcggaggcggggcctgctgccctgcctgcactccgattggccccgcgggccgtctacctctggccggacatacctacaccggctttttgtacgactgttggccctggagaacgatcctttggtggcgagggcggggaggacgaaagcgcccactgtggattggacagtgtcaaaaagaggggcggtccctactgaaggggcggttgggcgacgaagggaagagtcttttcagcgctgaggactggcgctgaggaggcggcggtggctcccggggcgtttgagcgggctcacccgagcccgcgggccaacgcggatccaggcccgactggcgggaccgccccggattccccgcgggccttcctagccgccatggaggacggcgtctatgaacccccagacctgactccggaggagcggatggagctggagaacatccggcggcggaagcaggagctgctggtggagattcagcgcctgcgggaggagctcagtgaagccatgagcgaggtggaggggctggaggccaatgagggcagtaagaccttgcaacggaaccggaagatggcaatgggcaggaagaagttcaacatggaccccaagaaggggatccagttcttggtggagaatgaactgctgcagaacacacccgaggagatcgcccgcttcctgtacaagggcgaggggctgaacaagacagccatcggggactacctgggggagagggaagaactgaacctggcagtgctccatgcttttgtggatctgcatgagttcaccgacctcaatctggtgcaggccctcaggcagtttctatggagctttcgcctacccggagaggcccagaaaattgaccggatgatggaggccttcgcccagcgatactgcctgtgcaaccctggggttttccagtccacagacacgtgctatgtgctgtccttcgccgtcatcatgctcaacaccagtctccacaatcccaatgtccgggacaagccgggcctggagcgctttgtggccatgaaccggggcatcaacgagggcggggacctgcctgaggagctgctcaggaacctgtacgacagcatccgaaatgagcccttcaagattcctgaggatgacgggaatgacctgacccacaccttcttcaacccggaccgggagggctggctcctgaagctgggagggggccgggtgaagacgtggaagcggcgctggtttatcctcacagacaactgcctctactactttgagtacaccacggacaaggagccccgaggaatcatccccctggagaatctgagcatccgagaggtggacgacccccggaaaccgaactgctttgaactttacatccccaacaacaaggggcagctcatcaaagcctgcaaaactgaggcggacggccgagtggtggagggaaaccacatggtgtaccggatctcggcccccacgcaggaggagaaggacgagtggatcaagtccatccaggcggctgtgagtgtggaccccttctatgagatgctggcagcgagaaagaagcggatttcagtcaagaagaagcaggagcagccctgaccccctgcccccaactccattatttattacggagctgccccgcctgggtggccggacccctgggccttggggctgtggatcctggttccctgtttggaaaattcaccacctctagctcctcactgttctttgtaattaacacgctgttggtaatcttattaattatttaaccacttggcctgctgaccccctcatttcttggggttgacagagtcgaggtgctccgtggagccagcctgtttccctggacaggggcctggacccgcctgtctctgggtgctgcctgggctgtcccggtgggtctgttctggtttcaccccgagcccagcaggagtggagtaaagggagaaggttaatatggtgggagtctggagttggaattggccggggacagagtttagaatgcagggattc

SEQ ID NO: 368861 - DNA, 1869 bp, Homo sapiens
ggcgaggccggggcggaaccattcccgctggaggggcgggcgagcccagcgcctgccggggccggggaggggcgcttgggttgcggggaggggagaaatcttggggggcgggggccttcgatgtcccgccccaccttcccaactctcctgagctgtcatcagttcccccggctgtagtgacttttcatggacccagtagtccggataaccaggtccccagctacctcgccagtaatggagtcagaaaaccaaggcctcagtccccttccaaaacccccagacctgactccggaggagcggatggagctggagaacatccggcggcggaagcaggagctgctggtggagattcagcgcctgcgggaggagctcagtgaagccatgagcgaggtggaggggctggaggccaatgagggcagtaagaccttgcaacggaaccggaagatggcaatgggcaggaagaagttcaacatggaccccaagaaggggatccagttcttggtggagaatgaactgctgcagaacacacccgaggagatcgcccgcttcctgtacaagggcgaggggctgaacaagacagccatcggggactacctgggggagagggaagaactgaacctggcagtgctccatgcttttgtggatctgcatgagttcaccgacctcaatctggtgcaggccctcaggcagtttctatggagctttcgcctacccggagaggcccagaaaattgaccggatgatggaggccttcgcccagcgatactgcctgtgcaaccctggggttttccagtccacagacacgtgctatgtgctgtccttcgccgtcatcatgctcaacaccagtctccacaatcccaatgtccgggacaagccgggcctggagcgctttgtggccatgaaccggggcatcaacgagggcggggacctgcctgaggagctgctcaggaacctgtacgacagcatccgaaatgagcccttcaagattcctgaggatgacgggaatgacctgacccacaccttcttcaacccggaccgggagggctggctcctgaagctgggagggggccgggtgaagacgtggaagcggcgctggtttatcctcacagacaactgcctctactactttgagtacaccacggacaaggagccccgaggaatcatccccctggagaatctgagcatccgagaggtggacgacccccggaaaccgaactgctttgaactttacatccccaacaacaaggggcagctcatcaaagcctgcaaaactgaggcggacggccgagtggtggagggaaaccacatggtgtaccggatctcggcccccacgcaggaggagaaggacgagtggatcaagtccatccaggcggctgtgagtgtggaccccttctatgagatgctggcagcgagaaagaagcggatttcagtcaagaagaagcaggagcagccctgaccccctgcccccaactccattatttattacggagctgccccgcctgggtggccggacccctgggccttggggctgtggatcctggttccctgtttggaaaattcaccacctctagctcctcactgttctttgtaattaacacgctgttggtaatcttattaattatttaaccacttggcctgctgaccccctcatttcttggggttgacagagtcgaggtgctccgtggagccagcctgtttccctggacaggggcctggacccgcctgtctctgggtgctgcctgggctgtcccggtgggtctgttctggtttcaccccgagcccagcaggagtggagtaaagggagaaggttaatatggtgggagtctggagttggaattggccggggacagagtttagaatgcagggattc

SEQ ID NO: 368862 - DNA, 1719 bp, Homo sapiens
gtccattaccaaagcctggaagttctcatcacctccaggtggactgcttggcagtgctaggaggtggactcaggacttcagaagcaacatttctggcctgacctggaaggtgaaggtgaagaacccccagacctgactccggaggagcggatggagctggagaacatccggcggcggaagcaggagctgctggtggagattcagcgcctgcgggaggagctcagtgaagccatgagcgaggtggaggggctggaggccaatgagggcagtaagaccttgcaacggaaccggaagatggcaatgggcaggaagaagttcaacatggaccccaagaaggggatccagttcttggtggagaatgaactgctgcagaacacacccgaggagatcgcccgcttcctgtacaagggcgaggggctgaacaagacagccatcggggactacctgggggagagggaagaactgaacctggcagtgctccatgcttttgtggatctgcatgagttcaccgacctcaatctggtgcaggccctcaggcagtttctatggagctttcgcctacccggagaggcccagaaaattgaccggatgatggaggccttcgcccagcgatactgcctgtgcaaccctggggttttccagtccacagacacgtgctatgtgctgtccttcgccgtcatcatgctcaacaccagtctccacaatcccaatgtccgggacaagccgggcctggagcgctttgtggccatgaaccggggcatcaacgagggcggggacctgcctgaggagctgctcaggaacctgtacgacagcatccgaaatgagcccttcaagattcctgaggatgacgggaatgacctgacccacaccttcttcaacccggaccgggagggctggctcctgaagctgggagggggccgggtgaagacgtggaagcggcgctggtttatcctcacagacaactgcctctactactttgagtacaccacggacaaggagccccgaggaatcatccccctggagaatctgagcatccgagaggtggacgacccccggaaaccgaactgctttgaactttacatccccaacaacaaggggcagctcatcaaagcctgcaaaactgaggcggacggccgagtggtggagggaaaccacatggtgtaccggatctcggcccccacgcaggaggagaaggacgagtggatcaagtccatccaggcggctgtgagtgtggaccccttctatgagatgctggcagcgagaaagaagcggatttcagtcaagaagaagcaggagcagccctgaccccctgcccccaactccattatttattacggagctgccccgcctgggtggccggacccctgggccttggggctgtggatcctggttccctgtttggaaaattcaccacctctagctcctcactgttctttgtaattaacacgctgttggtaatcttattaattatttaaccacttggcctgctgaccccctcatttcttggggttgacagagtcgaggtgctccgtggagccagcctgtttccctggacaggggcctggacccgcctgtctctgggtgctgcctgggctgtcccggtgggtctgttctggtttcaccccgagcccagcaggagtggagtaaagggagaaggttaatatggtgggagtctggagttggaattggccggggacagagtttagaatgcagggattc

SEQ ID NO: 368863 - DNA, 1666 bp, Homo sapiens
gcagaggtggctgtaccgcgtggctccgcctccgcgcgacacttttccggggcttctcattggagagcaagcctgtcaagtgctttctgttgtttcggaggcggggcctgctgccctgcctgcactccgattggccccgcgggccgtctacctctggccggacatacctacaccggctttttgtacgactgttggccctggagaacgatcctttggtggcgagggcggggaggacgaaagcgcccactgtggattggacagtgtcaaaaagaggggcggtccctactgaaggggcggttgggcgacgaagggaagagtcttttcagcgctgaggactggcgctgaggaggcggcggtggctcccggggcgtttgagcgggctcacccgagcccgcgggccaacgcggatccaggcccgactggcgggaccgccccggattccccgcgggccttcctagccgccatggaggacggcgtctatgaacccccagacctgactccggaggagcggatggagctggagaacatccggcggcggaagcaggagctgctggtggagattcagcgcctgcgggaggagctcagtgaagccatgagcgaggtggaggggctggaggccaatgagggcagtaagaccttgcaacggaaccggaagatggcaatgggcaggaagaagttcaacatggaccccaagaaggggatccagttcttggtggagaatgaactgctgcagaacacacccgaggagatcgcccgcttcctgtacaagggcgaggggctgaacaagacagccatcggggactacctgggggagagggaagaactgaacctggcagtgctccatgcttttgtggatctgcatgagttcaccgacctcaatctggtgcaggccctcaggcagtttctatggagctttcgcctacccggagaggcccagaaaattgaccggatgatggaggccttcgcccagcgatactgcctgtgcaaccctggggttttccagtccacagacacgtgctatgtgctgtccttcgccgtcatcatgctcaacaccagtctccacaatcccaatgtccgggacaagccgggcctggagcgctttgtggccatgaaccggggcatcaacgagggcggggacctgcctgaggagctgctcaggaacctgtacgacagcatccgaaatgagcccttcaagattcctgaggatgacgggaatgacctgacccacaccttcttgcaggagcagccctgaccccctgcccccaactccattatttattacggagctgccccgcctgggtggccggacccctgggccttggggctgtggatcctggttccctgtttggaaaattcaccacctctagctcctcactgttctttgtaattaacacgctgttggtaatcttattaattatttaaccacttggcctgctgaccccctcatttcttggggttgacagagtcgaggtgctccgtggagccagcctgtttccctggacaggggcctggacccgcctgtctctgggtgctgcctgggctgtcccggtgggtctgttctggtttcaccccgagcccagcaggagtggagtaaagggagaaggttaatatggtgggagtctggagttggaattggccggggacagagtttagaatgcagggattc

SEQ ID NO: 368864 - DNA, 980 bp, Homo sapiens
ctgcccctgcgcacccctccctgtgcccaccctgtttctgtcgcctgcggctcttgggggtgctccattctcccgccttcccttctcctgcacctggtcctgcctgctttctcgctgtctgccccaggaggtaggtacacgacctgtctttgtctcccaccccttccctttcagggggccgggtgaagacgtggaagcggcgctggtttatcctcacagacaactgcctctactactttgagtacaccacggacaaggagccccgaggaatcatccccctggagaatctgagcatccgagaggtggacgacccccggaaaccgaactgctttgaactttacatccccaacaacaaggggcagctcatcaaagcctgcaaaactgaggcggacggccgagtggtggagggaaaccacatggtgtaccggatctcggcccccacgcaggaggagaaggacgagtggatcaagtccatccaggcggctgtgagtgtggaccccttctatgagatgctggcagcgagaaagaagcggatttcagtcaagaagaagcaggagcagccctgaccccctgcccccaactccattatttattacggagctgccccgcctgggtggccggacccctgggccttggggctgtggatcctggttccctgtttggaaaattcaccacctctagctcctcactgttctttgtaattaacacgctgttggtaatcttattaattatttaaccacttggcctgctgaccccctcatttcttggggttgacagagtcgaggtgctccgtggagccagcctgtttccctggacaggggcctggacccgcctgtctctgggtgctgcctgggctgtcccggtgggtctgttctggtttcaccccgagcccagcaggagtggagtaaagggagaaggttaatatggtgggagtctggagttggaattggccggggacagagtttagaatgcagggattc

SEQ ID NO: 368865 - DNA, 1032 bp, Homo sapiens
gcagaggtggctgtaccgcgtggctccgcctccgcgcgacacttttccggggcttctcattggagagcaagcctgtcaagtgctttctgttgtttcggaggcggggcctgctgccctgcctgcactccgattggccccgcgggccgtctacctctggccggacatacctacaccggctttttgtacgactgttggccctggagaacgatcctttggtggcgagggcggggaggacgaaagcgcccactgtggattggacagtgtcaaaaagaggggcggtccctactgaaggggcggttgggcgacgaagggaagagtcttttcagcgctgaggactggcgctgaggaggcggcggtggctcccggggcgtttgagcgggctcacccgagcccgcgggccaacgcggatccaggcccgactggcgggaccgccccggattccccgcgggccttcctagccgccatggaggacggcgtctatgaacccccagacctgactccggaggagcggatggagctggagaacatccggcggcggaagcaggagctgctggtggagattcagcgcctgcgggaggagctcagtgaagccatgagcgaggtggaggggctggaggccaatgagggcagtaagaccttgcaacggaaccggaagatggcaatgggcaggaagaagttcaacatggaccccaagaaggggatccagttcttggtggagaatgaactgctgcagaacacacccgaggagatcgcccgcttcctgtacaagggcgaggggctgaacaagacagccatcggggactacctgggggagagggaagaactgaacctggcagtgctccatgcttttgtggatctgcatgagttcaccgacctcaatctggtgcaggccctcagggattcacaacactcccgtggccaatgcccattggtgagactggatcatgtgaccatacctgaaacaactgctgaggccggaaggtcgggattcctcgtggaccagttcctaacacagggactgagagtggggac

SEQ ID NO: 368866 - DNA, 815 bp, Homo sapiens
ggacactaggctaggtacgaggctggtgttaatcggccgaggcgactcactttagtcctgtgggacggcccaggtggcaggatgtcctggtctggccttctccatggcctcaacacgtccctaacttgtggcccagctctggttccccggctctgggctacctgctccatggctaccctgaaccagatgcaccgcctggggccccccaagcggccgcctcggaagctgggccccacggaaggccggccgcagctgaagggtgtggtcctgtgcacgtttacccgcaagccgaagaagcccaactcagccaatcgcaagtgctgtcgagtgcggctcagcactggccgcgaggccgtctgcttcatccctggggagggccacaccctgcaggagcaccagattgtccttgtggagggcggccgcacccaggacctgccaggcgtcaagctcaccgttgtgcgtggcaagtacgactgtggccacgtgcagaagaagtgacggctgggggcacagtgggctgggcgcccctgcagaacatgaaccttccgctcctggctgccacagggtcctccgatgctggcctttgcgcctctagaggcagccactcatggattcaagtcctggctccgcctcttccatcaggaccactattaagccataggagtcctgggggtgcaaagggtgcccctctgtcaacacccttggctcctgtgtttagaggggtggcctgaaggaccttttctgctgggacaagacactgtactgccctctgctgggaaggggttttaataaacagaccctggcgcttgtgatgt

SEQ ID NO: 368867 - DNA, 1220 bp, Homo sapiens
ggacactaggctaggtacgaggctggtgttaatcggccgaggcgactcactttagtcctgtgggacggcccaggtggcaggatgtcctggtctggccttctccatggcctcaacacgtccctaacttgtggcccagctctggttccccggctctgggctacctgctccatggctaccctgaaccagatgcaccgcctggggccccccaagcggccgcctcggaagctgggccccacggaaggccggccgcagctgaagggtgtggtcctgtgcacgtttacccgcaagccgaagaagcccaactcagccaatcgcaagtgctgtcgagtgcggctcagcactggccgcgaggccgtctgcttcatccctggggagggccacaccctgcaggagcaccagattgtccttgtggagggcggccgcacccaggacctgccaggcgtcaagctcaccgttgtgcgtggcaagtacgactgtggccacgtgcagaagaagtgacggctgggggcacagtgggctgggcgcccctgcagaacatgaaccttccgctcctggctgccacagggtcctccgatgctggcctttgcgcctctagaggcagccactcatggattcaagtcctggctccgcctcttccatcaggaccactattaagccataggagtcctgggggtgcaaagggtgcccctctgtcaacacccttggctcctgtgtttagaggggtggcctgaaggaccttttctgctgggacaagacactgtactgccctctgctgggaaggggttttaataaacagaccctggcgcttgtgatgtcaaaaaaacaaaaaaaaaaaaaaaaaaaaaaaaaaaaaaaaaaaaacggggggcttttttgggggggggggaaaaaagggtttattaagggggggtgggcaagggttgttcgggacccttttttttggacagggggggaaacgggggggggccccaaaaggggggggcggtaaaatttgggaaaagccgcggttttccttcttatgttttcttcggaaacaggaaatgtagacactgacatcaactataaacaacataagcagtagatgttcaaaatatcacagtagtatgaagtacacaataagacagaaatcagagacaagagatacactaaataattacttatcataacaacaatgttaattcataaattcaagaacagaataagacgaacacaaagaaaat

SEQ ID NO: 368868 - DNA, 264 bp, Homo sapiens
gcggccgcctactactactactgctcgaattcaagcttctaacgatgtacgggctcatggattcaagtcctggctccgcctcttccatcaggaccactattaagccataggagtcctgggggtgcaaagggtgcccctctgtcaacacccttggctcctgtgtttagaggggtggcctgaaggaccttttctgctgggacaagacactgtactgccctctgctgggaaggggttttaataaacagaccctggcgcttgtgatgt

SEQ ID NO: 368869 - DNA, 1185 bp, Homo sapiens
tgagggagtgcgctgtagccctcgcgcgcatactcgtacaggaggttccggtttcgtttctctgtagtgaaacttctccttggactatcgttggagatgcagcctccccggggccggaacccccgacgagtcagcaaaggccacaagcgccgcgccatggacgcagccatcttggaccggggacaaggcggcacttcgtcccgcccactccgcgtttagaccaattgcaaggcagcgaacctgaccgtgacgagccaatcagatcctgaggaaagttgaccgcgatagagtccttcgtcgcccaatcgtcgtctgtgtcccgcctcttcagtgacgcgaggcagaaccagccaatccctgcacggatagcgcccggaagaggctagaagctggattcagcgtgtccgcgacctcacctttaggtcctgtgagggacggcccaggtggcaggatgtcctggtctggccttctccatggcctcaacacgtccctaacttgtggcccagctctggttccccggctctgggctacctgctccatggctaccctgaaccagatgcaccgcctggggccccccaagcggccgcctcggaagctgggccccacggaaggccggccgcagctgaagggtgtggtcctgtgcacgtttacccgcaagccgaagaagcccaactcagccaatcgcaagtgctgtcgagtgcggctcagcactggccgcgaggccgtctgcttcatccctggggagggccacaccctgcaggagcaccagattgtccttgtggagggcggccgcacccaggacctgccaggcgtcaagctcaccgttgtgcgtggcaagtacgactgtggccacgtgcagaagaagtgacggctgggggcacagtgggctgggcgcccctgcagaacatgaaccttccgctcctggctgccacagggtcctccgatgctggcctttgcgcctctagaggcagccactcatggattcaagtcctggctccgcctcttccatcaggaccactattaagccataggagtcctgggggtgcaaagggtgcccctctgtcaacacccttggctcctgtgtttagaggggtggcctgaaggaccttttctgctgggacaagacactgtactgccctctgctgggaaggggttttaataaacagaccctggcgcttgtgatgt

SEQ ID NO: 368870 - DNA, 1358 bp, Homo sapiens
tgagggagtgcgctgtagccctcgcgcgcatactcgtacaggaggttccggtttcgtttctctgtagtgaaacttctccttggactatcgttggagatgcagcctccccggggccggaacccccgacgagtcagcaaaggccacaagcgccgcgccatggacgcagccatcttggaccggggacaaggcggcacttcgtcccgcccactccgcgtttagaccaattgcaaggcagcgaacctgaccgtgacgagccaatcagatcctgaggaaagttgaccgcgatagagtccttcgtcgcccaatcgtcgtctgtgtcccgcctcttcagtgacgcgaggcagaaccagccaatccctgcacggatagcgcccggaagaggctagaagctggattcagcgtgtccgcgacctcacctttaggtcctgtgaggtcggtggaatcctggggtcctccaaatctaccaggccatctccccagtttcccagttcttcctgcgtgcgggcgagagtggttgggccctcgggaacccactcagagcgaggctaaatttacggagggactttctgttagcagcatgagggcctgtggttagacctatagagggacggcccaggtggcaggatgtcctggtctggccttctccatggcctcaacacgtccctaacttgtggcccagctctggttccccggctctgggctacctgctccatggctaccctgaaccagatgcaccgcctggggccccccaagcggccgcctcggaagctgggccccacggaaggccggccgcagctgaagggtgtggtcctgtgcacgtttacccgcaagccgaagaagcccaactcagccaatcgcaagtgctgtcgagtgcggctcagcactggccgcgaggccgtctgcttcatccctggggagggccacaccctgcaggagcaccagattgtccttgtggagggcggccgcacccaggacctgccaggcgtcaagctcaccgttgtgcgtggcaagtacgactgtggccacgtgcagaagaagtgacggctgggggcacagtgggctgggcgcccctgcagaacatgaaccttccgctcctggctgccacagggtcctccgatgctggcctttgcgcctctagaggcagccactcatggattcaagtcctggctccgcctcttccatcaggaccactattaagccataggagtcctgggggtgcaaagggtgcccctctgtcaacacccttggctcctgtgtttagaggggtggcctgaaggaccttttctgctgggacaagacactgtactgccctctgctgggaaggggttttaataaacagaccctggcgcttgtgatgt

SEQ ID NO: 368871 - DNA, 1497 bp, Homo sapiens
tgagggagtgcgctgtagccctcgcgcgcatactcgtacaggaggttccggtttcgtttctctgtagtgaaacttctccttggactatcgttggagatgcagcctccccggggccggaacccccgacgagtcagcaaaggccacaagcgccgcgccatggacgcagccatcttggaccggggacaaggcggcacttcgtcccgcccactccgcgtttagaccaattgcaaggcagcgaacctgaccgtgacgagccaatcagatcctgaggaaagttgaccgcgatagagtccttcgtcgcccaatcgtcgtctgtgtcccgcctcttcagtgacgcgaggcagaaccagccaatccctgcacggatagcgcccggaagaggctagaagctggattcagcgtgtccgcgacctcacctttaggtcctgtgaggtcggtggaatcctggggtcctccaaatctaccaggccatctccccagtttcccagttcttcctgcgtgcgggcgagagtggttgggccctcgggaacccactcagagcgaggctaaatttacggagggactttctgttagcagcatgagggcctgtggttagacctatagagggacggcccaggtggcaggatgtcctggtctggccttctccatggcctcaacacgtccctaacttgtggcccagctctggttccccggctctgggctacctgctccatggctaccctgaaccagatgcaccgcctggggccccccaagcggccgcctcggaagctgggccccacggaaggccggccgcagctgaagggtgtggtcctgtgcacgtttacccgcaagccgaagaagcccaactcagccaatcgcaagtgctgtcgagtgcggctcagcactggccgcgaggccgtctgcttcatccctggggagggccacaccctgcaggagcaccagattgtccttgtggagggcggccgcacccaggacctgccaggcgtcaagctcaccgttgtgcgtggcaagtacgactgtggccacgtgcagaagaagtgacggctgggggcacagtgggctgggcgcccctgcagaacatgaaccttccgctcctggctgccacagggtcctccgatgctggcctttgcgcctctagaggcagccactcatggattcaagtcctggctccgcctcttccatcaggaccactattaagccataggagtcctgggggtgcaaagggtgcccctctgtcaacacccttggctcctgtgtttagaggggtggcctgaaggaccttttctgctgggacaagacactgtactgccctctgctgggaaggggttttaataaacagaccctggcgcttgtgatgtaaatccccttgtggagtatttgccctctgtgtggctgtggcagtggacatctctgagcttcagtttcctccagaaaatagctccattggtggtatctcctttgtttggtttggtgaagattaaattcgatgctctatgt

SEQ ID NO: 368872 - DNA, 1763 bp, Homo sapiens
tgagggagtgcgctgtagccctcgcgcgcatactcgtacaggaggttccggtttcgtttctctgtagtgaaacttctccttggactatcgttggagatgcagcctccccggggccggaacccccgacgagtcagcaaaggccacaagcgccgcgccatggacgcagccatcttggaccggggacaaggcggcacttcgtcccgcccactccgcgtttagaccaattgcaaggcagcgaacctgaccgtgacgagccaatcagatcctgaggaaagttgaccgcgatagagtccttcgtcgcccaatcgtcgtctgtgtcccgcctcttcagtgacgcgaggcagaaccagccaatccctgcacggatagcgcccggaagaggctagaagctggattcagcgtgtccgcgacctcacctttaggtcctgtgaggtcggtggaatcctggggtcctccaaatctaccaggccatctccccagtttcccagttcttcctgcgtgcgggcgagagtggttgggccctcgggaacccactcagagcgaggctaaatttacggagggactttctgttagcagcatgagggcctgtggttagacctatagagggacggcccaggtggcaggatgtcctggtctggccttctccatggcctcaacacgtccctaacttgtggcccagctctggttccccggctctgggctacctgctccatggctaccctgaaccagatgcaccgcctggggccccccaagcggccgcctcggaagctgggccccacggaaggccggccgcagctgaagggtgtggtcctgtgcacgtttacccgcaagccgaagaagcccaactcagccaatcgcaagtgctgtcgagtgcggctcagcactggccgcgaggccgtctgcttcatccctggggagggccacaccctgcaggagcaccagattgtccttgtggagggcggccgcacccaggacctgccaggcgtcaagctcaccgttgtgcgtggcaagtacgactgtggccacgtgcagaagaagtgacggctgggggcacagtgggctgggcgcccctgcagaacatgaaccttccgctcctggctgccacagggtcctccgatgctggcctttgcgcctctagaggcagccactcatggattcaagtcctggctccgcctcttccatcaggaccactattaagccataggagtcctgggggtgcaaagggtgcccctctgtcaacacccttggctcctgtgtttagaggggtggcctgaaggaccttttctgctgggacaagacactgtactgccctctgctgggaaggggttttaataaacagaccctggcgcttgtgatgtcaaaaaaacaaaaaaaaaaaaaaaaaaaaaaaaaaaaaaaaaaaaacggggggcttttttgggggggggggaaaaaagggtttattaagggggggtgggcaagggttgttcgggacccttttttttggacagggggggaaacgggggggggccccaaaaggggggggcggtaaaatttgggaaaagccgcggttttccttcttatgttttcttcggaaacaggaaatgtagacactgacatcaactataaacaacataagcagtagatgttcaaaatatcacagtagtatgaagtacacaataagacagaaatcagagacaagagatacactaaataattacttatcataacaacaatgttaattcataaattcaagaacagaataagacgaacacaaagaaaat

SEQ ID NO: 368873 - DNA, 1475 bp, Homo sapiens
tgagggagtgcgctgtagccctcgcgcgcatactcgtacaggaggttccggtttcgtttctctgtagtgaaacttctccttggactatcgttggagatgcagcctccccggggccggaacccccgacgagtcagcaaaggccacaagcgccgcgccatggacgcagccatcttggaccggggacaaggcggcacttcgtcccgcccactccgcgtttagaccaattgcaaggcagcgaacctgaccgtgacgagccaatcagatcctgaggaaagttgaccgcgatagagtccttcgtcgcccaatcgtcgtctgtgtcccgcctcttcagtgacgcgaggcagaaccagccaatccctgcacggatagcgcccggaagaggctagaagctggattcagcgtgtccgcgacctcacctttaggtcctgtgaggtcggtggaatcctggggtcctccaaatctaccaggccatctccccagtttcccagttcttcctgcgtgcgggcgagagtggttgggccctcgggaacccactcagagcgaggctaaatttacggagggactttctgttagcagcatgagggcctgtggttagacctatagagggacggcccaggtggcaggatgtcctggtctggccttctccatggcctcaacacgtccctaacttgtggcccagctctggttccccggctctgggctacctgctccatggctaccctgaaccagatgcaccgcctggggccccccaagcggccgcctcggaagctgggccccacggaaggccggccgcagctgaagggtgtggtcctgtgcacgtttacccgcaagccgaagaagcccaactcagccaatcgcaagtgctgtcgagtgcggctcagcactggccgcgaggccgtctgcttcatccctggggagggccacaccctgcaggagcaccagattgtccttgtggagggcggccgcacccaggacctgccaggcgtcaagctcaccgttgtgcgtggcaagtacgactgtggccacgtgcagaagaagtgacggctgggggcacagtgggctgggcgcccctgcagaacatgaaccttccgctcctggctgccacagggtcctccgatgctggcctttgcgcctctagaggcagccactcatggattcaagtcctggctccgcctcttccatcaggaccactattaagccataggagtcctgggggtgcaaagggtgcccctctgtcaacacccttggctcctgtgtttagaggggtggcctgaaggaccttttctgctgggacaagacactgtactgccctctgctgggaaggggttttaataaacagaccctggcgcttgtgatgtacaacgacaaaggaaatgatcacaatatgacaactgaactagataacaaataaagtcacatataagatcacccggtcgcggactttcaagggactggcaacaaagcataggacaccg

SEQ ID NO: 368874 - DNA, 1331 bp, Homo sapiens
  misc_feature (1226)..(1227): n is a, c, g, or t
  misc_feature (1229)..(1229): n is a, c, g, or t
  misc_feature (1237)..(1237): n is a, c, g, or t
  misc_feature (1241)..(1241): n is a, c, g, or t
  misc_feature (1248)..(1248): n is a, c, g, or t
  misc_feature (1266)..(1266): n is a, c, g, or t
  misc_feature (1268)..(1268): n is a, c, g, or t
  misc_feature (1270)..(1270): n is a, c, g, or t
  misc_feature (1273)..(1273): n is a, c, g, or t
  misc_feature (1287)..(1287): n is a, c, g, or t
tgagggagtgcgctgtagccctcgcgcgcatactcgtacaggaggttccggtttcgtttctctgtagtgaaacttctccttggactatcgttggagatgcagcctccccggggccggaacccccgacgagtcagcaaaggccacaagcgccgcgccatggacgcagccatcttggaccggggacaaggcggcacttcgtcccgcccactccgcgtttagaccaattgcaaggcagcgaacctgaccgtgacgagccaatcagatcctgaggaaagttgaccgcgatagagtccttcgtcgcccaatcgtcgtctgtgtcccgcctcttcagtgacgcgaggcagaaccagccaatccctgcacggatagcgcccggaagaggctagaagctggattcagcgtgtccgcgacctcacctttaggtcctgtgaggtcggtggaatcctggggtcctccaaatctaccaggccatctccccagtttcccagttcttcctgcgtgcgggcgagagtggttgggccctcgggaacccactcagagcgaggctaaatttacggagggactttctgttagcagcatgagggcctgtggttagacctatagagggacggcccaggtggcaggatgtcctggtctggccttctccatggcctcaacacgtccctaacttgtggcccagctctggttccccggctctgggctacctgctccatggctaccctgaaccagatgcaccgcctggggccccccaagcggccgcctcggaagctgggccccacggaaggccggccgcagctgaagggtgtggtcctgtgcacgtttacccgcaagccgaagaagcccaactcagccaatcgcaagtgctgtcgagtgcggctcagcactggccgcgaggccgtctgcttcatccctggggagggccacaccctgcaggagcaccagattgtccttgtggagggcggccgcacccaggacctgccaggcgtcaagctcaccgttgtgcgtggcaagtacgactgtggccacgtgcagaagaagtgacggctgggggcacagtgggctgggcgcccctgcagaacatgaaccttccgctcctggctgccacagggtcctccgatgctggcctttgcgcctctagaggcagccactcatggattcaagtcctggctccgcctcttccatcaggaccactattaagccataggagtcctgggggtgggtgcctnngnaaactggnctgnttagggnggctgaggactttgtggnanantgntgctcgggagggtnaaaaaccgggtgttttaaaaaaaaaaaacccctttcggacgggg

SEQ ID NO: 368875 - DNA, 1265 bp, Homo sapiens
tgagggagtgcgctgtagccctcgcgcgcatactcgtacaggaggttccggtttcgtttctctgtagtgaaacttctccttggactatcgttggagatgcagcctccccggggccggaacccccgacgagtcagcaaaggccacaagcgccgcgccatggacgcagccatcttggaccggggacaaggcggcacttcgtcccgcccactccgcgtttagaccaattgcaaggcagcgaacctgaccgtgacgagccaatcagatcctgaggaaagttgaccgcgatagagtccttcgtcgcccaatcgtcgtctgtgtcccgcctcttcagtgacgcgaggcagaaccagccaatccctgcacggatagcgcccggaagaggctagaagctggattcagcgtgtccgcgacctcacctttaggtcctgtgaggtcggtggaatcctggggtcctccaaatctaccaggccatctccccagtttcccagttcttcctgcgtgcgggcgagagtggttgggccctcgggaacccactcagagcgaggctaaatttacggagggactttctgttagcagcatgagggcctgtggttagacctatagagggacggcccaggtggcaggatgtcctggtctggccttctccatggcctcaacacgtccctaacttgtggcccagctctggttccccggctctgggctacctgctccatggctaccctgaaccagatgcaccgcctggggccccccaagcggccgcctcggaagctgggccccacggaaggccggccgcagctgaagggtgtggtcctgtgcacgtttacccgcaagccgaagaagcccaactcagccaatcgcaagtgctgtcgagtgcggctcagcactggccgcgaggccgtctgcttcatccctggggagggccacaccctgcaggagcaccagattgtccttgtggagggcggccgcacccaggacctgccaggcgtcaagctcaccgttgtgcgtggcaagtacgactgtggccacgtgcagaagaagtgacggctgggggcacagtgggctgggcgcccctgcagaacatgaaccttccgctcctggctgccacagggtcctccgatgctggcctttgcgcctctagaggcagccaacccttggctcctgtgtttagaggggtggcctgaaggaccttttctgctgggacaagacactgtactgccctctgctgggaaggggttttaataaacagaccctggcgcttgtgatgt

SEQ ID NO: 368876 - DNA, 847 bp, Homo sapiens
ggacactaggctaggtacgaggctggtgttaatcggccgaggggctagaagctggattcagcgtgtccgcgacctcacctttaggtcctgtgagggacggcccaggtggcaggatgtcctggtctggccttctccatggcctcaacacgtccctaacttgtggcccagctctggttccccggctctgggctacctgctccatggctaccctgaaccagatgcaccgcctggggccccccaagcggccgcctcggaagctgggccccacggaaggccggccgcagctgaagggtgtggtcctgtgcacgtttacccgcaagccgaagaagcccaactcagccaatcgcaagtgctgtcgagtgcggctcagcactggccgcgaggccgtctgcttcatccctggggagggccacaccctgcaggagcaccagattgtccttgtggagggcggccgcacccaggacctgccaggcgtcaagctcaccgttgtgcgtggcaagtacgactgtggccacgtgcagaagaagtgacggctgggggcacagtgggctgggcgcccctgcagaacatgaaccttccgctcctggctgccacagggtcctccgatgctggcctttgcgcctctagaggcagccactcatggattcaagtcctggctccgcctcttccatcaggaccactattaagccataggagtcctgggggtgcaaagggtgcccctctgtcaacacccttggctcctgtgtttagaggggtggcctgaaggaccttttctgctgggacaagacactgtactgccctctgctgggaaggggttttaataaacagaccctggcgcttgtgatgt

SEQ ID NO: 368877 - DNA, 850 bp, Homo sapiens
cccaccacacaacacctatacagcccaactcataccaaacaacaaaaattgcatgatagcccgtggttaaatgaacgaggctcactatagtcatgtgggacggcccaggtggcaggatgtcctggtctggccttctccatggcctcaacacgtccctaacttgtggcccagctctggttccccggctctgggctacctgctccatggctaccctgaaccagatgcaccgcctggggccccccaagcggccgcctcggaagctgggccccacggaaggccggccgcagctgaagggtgtggtcctgtgcacgtttacccgcaagccgaagaagcccaactcagccaatcgcaagtgctgtcgagtgcggctcagcactggccgcgaggccgtctgcttcatccctggggagggccacaccctgcaggagcaccagattgtccttgtggagggcggccgcacccaggacctgccaggcgtcaagctcaccgttgtgcgtggcaagtacgactgtggccacgtgcagaagaagtgacggctgggggcacagtgggctgggcgcccctgcagaacatgaaccttccgctcctggctgccacagggtcctccgatgctggcctttgcgcctctagaggcagccactcatggattcaagtcctggctccgcctcttccatcaggaccactattaagccataggagtcctgggggtgcaaagggtgcccctctgtcaacacccttggctcctgtgtttagaggggtggcctgaaggaccttttctgctgggacaagacactgtactgccctctgctgggaaggggttttaataaacagaccctggcgcttgtgatgt

SEQ ID NO: 368878 - DNA, 545 bp, Homo sapiens
tgagggagtgcgctgtagccctcgcgcgcatactcgtacaggaggttccggtttcgtttctctgtagtgaaacttctccttggactatcgttggagatgcagcctccccggggccggaacccccgacgagtcagcaaaggccacaagcgccgcgccatggacgcagccatcttggaccggggacaaggcggcacttcgtcccgcccactccgcgtttagaccaattgcaaggcagcgaacctgaccgtgacgagccaatcagatcctgaggaaagttgaccgcgatagagtccttcgtcgcccaatcgtcgtctgtgtcccgcctcttcatcacgtgagccattctctctcaccctctgcacgcagtgtgatggtaagaggggaccacctggtttcagcgtgtaagggccggcacccttagatccagcaatcagtgttgcccggcgacatggggtggtggttagtcattgaccaaggcctcaagcagtgtctttatttttcctttagttctggaaggcccgatataatatacacgctcgaagggt

SEQ ID NO: 368879 - DNA, 1461 bp, Homo sapiens
tgagggagtgcgctgtagccctcgcgcgcatactcgtacaggaggttccggtttcgtttctctgtagtgaaacttctccttggactatcgttggagatgcagcctccccggggccggaacccccgacgagtcagcaaaggccacaagcgccgcgccatggacgcagccatcttggaccggggacaaggcggcacttcgtcccgcccactccgcgtttagaccaattgcaaggcagcgaacctgaccgtgacgagccaatcagatcctgaggaaagttgaccgcgatagagtccttcgtcgcccaatcgtcgtctgtgtcccgcctcttcagtgacgcgaggcagaaccagccaatccctgcacggatagcgcccggaagaggctagaagctggattcagcgtgtccgcgacctcacctttaggtcctgtgaggtcggtggaatcctggggtcctccaaatctaccaggccatctccccagtttcccagttcttcctgcgtgcgggcgagagtggttgggccctcgggaacccactcagagcgaggctaaatttacggagggactttctgttagcagcatgagggcctgtggttagacctatagaggtatttcctttgatttaagccagaaagtcctgagagcggatcggggagcatttgcggatcggtcactttttcctcctttctgagtctcttatcccctaccacaggacggcccaggtggcaggatgtcctggtctggccttctccatggcctcaacacgtccctaacttgtggcccagctctggttccccggctctgggctacctgctccatggctaccctgaaccagatgcaccgcctggggccccccaagcggccgcctcggaagctgggccccacggaaggccggccgcagctgaagggtgtggtcctgtgcacgtttacccgcaagccgaagaagcccaactcagccaatcgcaagtgctgtcgagtgcggctcagcactggccgcgaggccgtctgcttcatccctggggagggccacaccctgcaggagcaccagattgtccttgtggagggcggccgcacccaggacctgccaggcgtcaagctcaccgttgtgcgtggcaagtacgactgtggccacgtgcagaagaagtgacggctgggggcacagtgggctgggcgcccctgcagaacatgaaccttccgctcctggctgccacagggtcctccgatgctggcctttgcgcctctagaggcagccactcatggattcaagtcctggctccgcctcttccatcaggaccactattaagccataggagtcctgggggtgcaaagggtgcccctctgtcaacacccttggctcctgtgtttagaggggtggcctgaaggaccttttctgctgggacaagacactgtactgccctctgctgggaaggggttttaataaacagaccctggcgcttgtgatgt

SEQ ID NO: 368880 - DNA, 1324 bp, Homo sapiens
tgagggagtgcgctgtagccctcgcgcgcatactcgtacaggaggttccggtttcgtttctctgtagtgaaacttctccttggactatcgttggagatgcagcctccccggggccggaacccccgacgagtcagcaaaggccacaagcgccgcgccatggacgcagccatcttggaccggggacaaggcggcacttcgtcccgcccactccgcgtttagaccaattgcaaggcagcgaacctgaccgtgacgagccaatcagatcctgaggaaagttgaccgcgatagagtccttcgtcgcccaatcgtcgtctgtgtcccgcctcttcagtgacgcgaggcagaaccagccaatccctgcacggatagcgcccggaagaggctagaagctggattcagcgtgtccgcgacctcacctttaggtcctgtgagggacggcccaggtggcaggatgtcctggtctggccttctccatggcctcaacacgtccctaacttgtggcccagctctggttccccggctctgggctacctgctccatggctaccctgaaccagatgcaccgcctggggccccccaagcggccgcctcggaagctgggccccacggaaggccggccgcagctgaagggtgtggtcctgtgcacgtttacccgcaagccgaagaagcccaactcagccaatcgcaagtgctgtcgagtgcggctcagcactggccgcgaggccgtctgcttcatccctggggagggccacaccctgcaggagcaccagattgtccttgtggagggcggccgcacccaggacctgccaggcgtcaagctcaccgttgtgcgtggcaagtacgactgtggccacgtgcagaagaagtgacggctgggggcacagtgggctgggcgcccctgcagaacatgaaccttccgctcctggctgccacagggtcctccgatgctggcctttgcgcctctagaggcagccactcatggattcaagtcctggctccgcctcttccatcaggaccactattaagccataggagtcctgggggtgcaaagggtgcccctctgtcaacacccttggctcctgtgtttagaggggtggcctgaaggaccttttctgctgggacaagacactgtactgccctctgctgggaaggggttttaataaacagaccctggcgcttgtgatgtaaatccccttgtggagtatttgccctctgtgtggctgtggcagtggacatctctgagcttcagtttcctccagaaaatagctccattggtggtatctcctttgtttggtttggtgaagattaaattcgatgctctatgt

SEQ ID NO: 368881 - DNA, 1583 bp, Homo sapiens
tgagggagtgcgctgtagccctcgcgcgcatactcgtacaggaggttccggtttcgtttctctgtagtgaaacttctccttggactatcgttggagatgcagcctccccggggccggaacccccgacgagtcagcaaaggccacaagcgccgcgccatggacgcagccatcttggaccggggacaaggcggcacttcgtcccgcccactccgcgtttagaccaattgcaaggcagcgaacctgaccgtgacgagccaatcagatcctgaggaaagttgaccgcgatagagtccttcgtcgcccaatcgtcgtctgtgtcccgcctcttcagtgacgcgaggcagaaccagccaatccctgcacggatagcgcccggaagaggctagaagctggattcagcgtgtccgcgacctcacctttaggtcctgtgaggtcggtggaatcctggggtcctccaaatctaccaggccatctccccagtttcccagttcttcctgcgtgcgggcgagagtggttgggccctcgggaacccactcagagcgaggctaaatttacggagggactttctgttagcagcatgagggcctgtggttagacctatagagggacggcccaggtggcaggatgtcctggtctggccttctccatggcctcaacacgtccctaacttgtggcccagctctggttccccggctctgggctacctgctccatggctaccctgaaccagatgcaccgcctggggccccccaagcggccgcctcggaagctgggccccacggaaggccggccgcagctgaagggtgtggtcctgtgcacgtttacccgcaagccgaagaagcccaactcagccaatcgcaagtgctgtcgagtgcggctcagcactggccgcgaggccgtctgcttcatccctggggagggccacaccctgcaggagcaccagattgtccttgtggagggcggccgcacccaggacctgccaggcgtcaagctcaccgttgtgcgtggcaagtacgactgtggccacgtgcagaagaagtgacggctgggggcacagtgggctgggcgcccctgcagaacatgaaccttccgctcctggctgccacagggtcctccgatgctggcctttgcgcctctagaggcagccactcatggattcaagtcctggctccgcctcttccatcaggaccactattaagccataggagtcctgggggtgcaaagggtgcccctctgtcaacacccttggctcctgtgtttagaggggtggcctgaaggaccttttctgctgggacaagacactgtactgccctctgctgggaaggggttttaataaacagaccctggcgcttgtgatgtaaataaaaacaaaacaaaaacaaaaacaacaaatataatataaaaacaatcaaaaaaaagatccgaggcgacaatataatgcgacgcgcagagaaaaaagaagatcataaaattgcacgatgtcaataagatatttctcgtaacaaccatttttttttaaaaaaagcggaaaatacgcggagaccacaagaagcagagataaaatgcaaacacagatagaaacag

SEQ ID NO: 368882 - DNA, 1313 bp, Homo sapiens
tgagggagtgcgctgtagccctcgcgcgcatactcgtacaggaggttccggtttcgtttctctgtagtgaaacttctccttggactatcgttggagatgcagcctccccggggccggaacccccgacgagtcagcaaaggccacaagcgccgcgccatggacgcagccatcttggaccggggacaaggcggcacttcgtcccgcccactccgcgtttagaccaattgcaaggcagcgaacctgaccgtgacgagccaatcagatcctgaggaaagttgaccgcgatagagtccttcgtcgcccaatcgtcgtctgtgtcccgcctcttcagtgacgcgaggcagaaccagccaatccctgcacggatagcgcccggaagaggctagaagctggattcagcgtgtccgcgacctcacctttaggtcctgtgaggtcggtggaatcctggggtcctccaaatctaccaggccatctccccagtttcccagttcttcctgcgtgcgggcgagagtggttgggccctcgggaacccactcagagcgaggctaaatttacggagggactttctgttagcagcatgagggcctgtggttagacctatagagggacggcccaggtggcaggatgtcctggtctggccttctccatggcctcaacacgtccctaacttgtggcccagctctggttccccggctctgggctacctgctccatggctaccctgaaccagatgcaccgcctggggccccagctgaagggtgtggtcctgtgcacgtttacccgcaagccgaagaagcccaactcagccaatcgcaagtgctgtcgagtgcggctcagcactggccgcgaggccgtctgcttcatccctggggagggccacaccctgcaggagcaccagattgtccttgtggagggcggccgcacccaggacctgccaggcgtcaagctcaccgttgtgcgtggcaagtacgactgtggccacgtgcagaagaagtgacggctgggggcacagtgggctgggcgcccctgcagaacatgaaccttccgctcctggctgccacagggtcctccgatgctggcctttgcgcctctagaggcagccactcatggattcaagtcctggctccgcctcttccatcaggaccactattaagccataggagtcctgggggtgcaaagggtgcccctctgtcaacacccttggctcctgtgtttagaggggtggcctgaaggaccttttctgctgggacaagacactgtactgccctctgctgggaaggggttttaataaacagaccctggcgcttgtgatgt

SEQ ID NO: 368883 - DNA, 1119 bp, Homo sapiens
tgagggagtgcgctgtagccctcgcgcgcatactcgtacaggaggttccggtttcgtttctctgtagtgaaacttctccttggactatcgttggagatgcagcctccccggggccggaacccccgacgagtcagcaaaggccacaagcgccgcgccatggacgcagccatcttggaccggggacaaggcggcacttcgtcccgcccactccgcgtttagaccaattgcaaggcagcgaacctgaccgtgacgagccaatcagatcctgaggaaagttgaccgcgatagagtccttcgtcgcccaatcgtcgtctgtgtcccgcctcttcagtgacgcgaggcagaaccagccaatccctgcacggatagcgcccggaagaggctagaagctggattcagcgtgtccgcgacctcacctttaggtcctgtgagggacggcccaggtggcaggatgtcctggtctggccttctccatggcctcaacacgtccctaacttgtggtaagtgggggacttgggcttcagggacgaggctagagggggagggttattcgctcttggacttgtgtgcctccgtcggagccccgagggaaacgggggtggaaaaacacggtggggttttggcagagctagggctgctagagcaagaggtgggaagcagctgcatggagggctactgcgtgtcaagcggcgtttgggtcagttttattatttatttatttaagatctccctctgtcgcccaggctgaagtgcagcggtgtgatcacagctcactgcagtctcgacctcctgggctcaagtgatcctcccgcctcagcctcccaagtagctgggaccacaggcctgcagaaccacaaccagctaactttttgattctttgtagagagggaggtctccctgtgtcgcccagtctggccttaactcctgagctcaagtgaccctccacagcctccaaaagtgctaggattacatgcatgagccactgagcctactattattttaaacagcattaaaaataatgcttcctggccagccgtggtggctcacgcctgtaatcccagcactttgagaggccgaggtcaggagttcgagaccagcctgaccaacatggtgaaaccc

SEQ ID NO: 368884 - DNA, 5262 bp, Homo sapiens
  misc_feature (2114)..(2114): n is a, c, g, or t
  misc_feature (2860)..(2860): n is a, c, g, or t
ggcctcagaggactcaggtgcacacctgcatggcagaaccaggctctgggcccaggtgtctgacactgagtagctcgcctctcccaggggcgctggtgtgggccgatgcaagtgccaccatgggtgtgtgtgtggctccctgggccacctcactccaattaagcaggtccaggtgggacagcctgggaccagccctgcagcagcatgtgttaaccacaacagatggctgtagccaccaggcttgtccttggtgcagtcagcctgggggctgcgggggcttgtggaagcatgtgggaagacggtcccactggtcagcagagcagggtcctcaccgacccacagaggagcatgtcacaggacaggcaggcgtgtcagggaaggccaggctagtgccagccaagggcattgcctcccagactgcccttttcctcacactcccacgacacagccctcaaagcctgtgcccctgtgggtccctggccaaggagcaagggctgccctgcctgggccccccccgccagccccttggtcacctcatgctgtgtgccaggctgggggagtgtgcctgtgtgtatgtccaggtggcatttggatgaagacacaggtgtgtggtgaggctgtgcgggaggatgggcctatgcgtgcggtgggcaggtggtgtggaggcaggcgggcgggcgtgtggcagcgcgccggctgagcccctccacttccaggtcagccagagcagcctccccatgctgtcctcgccgtcaccgggccagcaggtgcagaccccgcagtcgatgccccctcccccccagccgtccccgcagcccggccagcccagctcacagcccaactccaacgtcaggtaggcctggcctggggtgcccctccccacctggccctcgaggctggccctgcctggaccccggctcacatgtttctctcacttggctgcagctctggccctgccccatctcccagtagcttcctgcccagcccctcaccgcagccctcccagagcccagtgacggcgcggaccccacagaacttcagtgtcccctcacctggacctttaaacacacctggtaagttgggcctgaggtgctaaggtcactcctcacctttatgaggcctcagctcatactgggtgtgcgagctctggggccctcagagctcaagttccccacccgagggtcgagggctgtggcctcacccgcctgtgtcctgcagtgaaccccagctctgtcatgagcccagctggctccagccaggctgaggagcagcagtacctggacaagctgaagcagctgtcgaagtacatcgagcccctgcgccgcatgatcaacaagatcgacaagaacgaagacagaaaaaaggacctgagtaagatgaagagccttctggacattctgacagacccctcgaagcggtgagctttgcccacagcccacggagggtccacaagggcacagatagcccagccatggatgggcacttggtgatgatgtgggtttaacaaaggcaccaggcagctctttggaccctggccagaggcctccaaggctccactctggtgtgtgctggggcttcaagcccaggcttcatcttggcccatgcccagcctttgccctattcctggctgctgctgtggccctcatgctgggccatcacagccagacctcatccagtcagcagccaggggcccagcttgcagtggcctgaccatcagctggcccagatgggcctgagcctgacctggagttctgcccctgacttgctggtgaccatgggcaggcgactgcatctcagttaccccatttgtagcccacgtgtgttgtcatgaaaatgaaacaaggtggcgctggtgagaagcaggtggaaggcagggctgctggccacaggctgctgtgaggatcagagctcgggcagtacctccaaactgcatgggcattggcatatacctccctttcacctcaactcaggctatcccccaacccctgtctagaagggtctctctgttctgcttgtctggatagaatgccagtcactattgggtggtcctccaggtcttcatgggttgatcctttgttagggttatagggatgagtggggcagggactggcctncatgacaatgaggcattcacagcctgatcaggggcctggccactgtcccttctcttgacccatcacctcactctgccaaccagggacaagcagctcctggggttgagggctgcctgccttcaactctgggtctgggaacagctggtcaactggtaggagctcctgcagaggtttctgatggctgaggcccagtggcagtagttgggatcctgagcctgagaactgccatgtcttccactctttcagcccaagtcctctctctctgcaggtgtcccctgaagaccttgcaaaagtgtgagatcgccctggagaaactcaagaatgacatggcggtggtgagtgggatgccagacacccctaggggaaccagggctctcctaagagctcctgggagtgccgctgagagggccttcaaggtcagggcatctgggcgggggccgggcctgaccttggaccctgcccacgaggcttcctggccaggtctgctgtgctgggtgggaacatgggagaagtcaccctctgtctacggcccccgtgggtgcctccttcacccatttcagaggaggcagggactgtagggaggataggctgtgggggtgggggattattcccaggatcagccaacattgtctgcacaagggtggaggctgtgagagaggcctcgggaatctgactgtgagtgaccatgggcctggggtgtgaaggccccctaaatggggaaccctcgggtcccgggctgctgaccntgcccatcctgtctccagcccactcccccaccgcccccggtgccaccgaccaaacagcagtacctatgccagccgctcctggatgccgtcctggccaacatccgctcacctgtcttcaaccattccctgtaccgcacattcgttccagccatgaccgccattcacggcccacccatcacgtatgtccagctgggctgggctttgcggagggcggccagccctgggccgcgtgtgccaggtgtggtcaccatgccgcctccccaggccccagtggtgtgcacccggaagcgcaggcttgaggatgatgagcggcagagcatccccagtgtgctccagggtgaggtggccaggctggaccccaagttcctggtaaacctggacccttctcactgcagcaacaatggcactgtccacctgatctgcaagctgggtgagtgtccagagggccgggactggtgtgggaaagcaggccctgaccgcagccccaggactctgccatccaagccagatggcacagcgcccagaacccaccctgtgttcacgccccgccaggctgtctgctctatcctcacacacaccgggctccagacagcctggccatgcctcagtccccactgccagagcccgcacactctcacctccccaacacagatgtggctttgcttgcctgggccctagggaggtggtaggcaggacctctgggcacccatcaatgcagagcactccaggcttcacgtttggaaatctgagagtcagagagacctcctccaggctttgccacaagcttcaccagaacctccctgggtgtggagtcctgttccagagcagggctgtgaggcagggcaggccggggcttgtccaggtcacagatagagccttctgtgttgcagatgacaaggacctcccaagtgtgccaccactggagctcagtgtgcccgctgactatcctgcccaaagcccgctgtggatagaccggcagtggcagtacgacgccaaccccttcctccagtcggtgcaccgctgcatgacctccaggctgctgcagctcccggacaagcactcggtcaccgccttgctcaacacctgggcccagagcgtccaccaggcctgcctctcagccgcctagccaagactgcagggatggcccgcagcctcatcggggccaaggacacacgcctcctgtcagacacttctaggtgttggcttccttagagagcctggggttaggttagctttcctgcttttatcttctgccttggggacctgccaaacgaaatcccacacctgtacagaactgggataggcgcagtggagcgggttgcttggggggcgttggccgacttcttagagaaggccctccatgtgacttcctcccaggagccagatgcgatcctcaggctgctctcaccgtggcctgtccacggtccaggtccatctcagcagcgtgagggtgcactcagggtgttgttagagcgtctcgtgtgtgctagacgcacccctactcgttcctatagaacacagaggacataggaaacccttaaaacacacatgggattctctggtcacagttttgggttcaggctatgctgctttgggcaggtggagcaccccccgaggaagcctgcaagtccagggcacaggctgccttttggagggagggctggcccataggtgctgctggctccccgccaccagctgggcctcagccctcacggcattcctgctgagcaccgtggggcacccagggagcaggggcgtcagggatcctgctgccggcacccctgtgccgctggcatgagggccgtgtccccactgtgaaggatgaagagcaaggccctcaggacccgtgtcctcagagcaccacacactgagcacccagagacagcgggcctggcagcgggccgggccatgcagggagcgcctccctatgttgcctgccactctgggcaccggccagcaccctctggtgagaagaggtcccccctttttatgtgcactaccccaccatctgtgattataataaatttattattcctgtgaaaacacacagaagaagagaacgagcaacacacgccagaaaaacagaacagaacagaacaagcagggcgggcgacacgcagagagagtacgcccagagcgggcagacacacgtagacacgcaaccaaggatatgtcgagaaacaaagggagcccccgagagaagagaagcgatgatgtatctatcagacacgctgtcgagacggcgagtgctgtgtattatcacggcgttggcagaggcggatacaaaggttaacgaggggaagaactttagttaggaggacgatacttgtattcggagaggagggaagaaaaatggggggacatgtacgtaaggaggaagtgtgacgctttaggtgagatat

SEQ ID NO: 368885 - DNA, 3245 bp, Homo sapiens
ccggcgcgacttgggcctggctctgtgactgaggcggcggcggtggcggccaagcgggatacgggcggcgggagctggggaacaggcatggacgtttccgggcaagagaccgactggcggagcaccgccttccggcagaagctggtcagtcaaatcgaggatgccatgaggaaagctggtgtggcacacagtaaatccagcaaggatatggagagccatgttttcctgaaggccaagacccgggacgaatacctttctctcgtggccaggctcattatccattttcgagacattcataacaagaaatctcaagcttccgtcagtgatcctatgaatgcactccagagcctgactggcggacctgctgcgggagccgctggaattggcatgcctcctcggggcccgggacagtctctgggcgggatgggtagccttggtgccatgggacagccaatgtctctctcagggcagccgcctcctgggacctcggggatggcccctcacagcatggctgtcgtgtctacggcaactccacagacccagctgcagctccagcaggtggcgctgcagcagcagcagcaacagcagcagttccagcagcagcagcaggcggcgctacagcagcagcagcagcagcagcaacagcagcagttccaggctcagcagagtgccatgcagcagcagttccaagcagtagtgcagcagcagcagcagctccagcagcagcagcagcagcagcagcatctaattaaattgcatcatcaaaatcagcaacagatacagcagcagcaacagcagctgcagcgaatagcacagctgcagctccaacaacagcaacagcagcagcagcagcagcagcagcagcagcagcaggctttgcaggcccagccaccaattcagcagccaccgatgcagcagccacagcctccgccctcccaggctctgccccagcagctgcagcagatgcatcacacacagcaccaccagccgccaccacagccccagcagcctccagttgctcagaaccaaccatcacaactcccgccacagtcgcagacccagcctttggtgtcacaggcgcaagctctccctggacaaatgttgtatacccaaccaccactgaaatttgtccgagctccgatggtggtgcagcagcccccagtgcagccccaggtgcagcagcagcagacagcagtacagacagctcaggctgcccagatggtggctcccggagtccaggtcagccagagcagcctccccatgctgtcctcgccgtcaccgggccagcaggtgcagaccccgcagtcgatgccccctcccccccagccgtccccgcagcccggccagcccagctcacagcccaactccaacgtcagctctggccctgccccatctcccagtagcttcctgcccagcccctcaccgcagccctcccagagcccagtgacggcgcggaccccacagaacttcagtgtcccctcacctggacctttaaacacacctgtgaaccccagctctgtcatgagcccagctggctccagccaggctgaggagcagcagtacctggacaagctgaagcagctgtcgaagtacatcgagcccctgcgccgcatgatcaacaagatcgacaagaacgaagacagaaaaaaggacctgagtaagatgaagagccttctggacattctgacagacccctcgaagcggtgtcccctgaagaccttgcaaaagtgtgagatcgccctggagaaactcaagaatgacatggcggtgcccactcccccaccgcccccggtgccaccgaccaaacagcagtacctatgccagccgctcctggatgccgtcctggccaacatccgctcacctgtcttcaaccattccctgtaccgcacattcgttccagccatgaccgccattcacggcccacccatcacggccccagtggtgtgcacccggaagcgcaggcttgaggatgatgagcggcagagcatccccagtgtgctccagggtgaggtggccaggctggaccccaagttcctggtaaacctggacccttctcactgcagcaacaatggcactgtccacctgatctgcaagctggatgacaaggacctcccaagtgtgccaccactggagctcagtgtgcccgctgactatcctgcccaaagcccgctgtggatagaccggcagtggcagtacgacgccaaccccttcctccagtcggtgcaccgctgcatgacctccaggctgctgcagctcccggacaagcactcggtcaccgccttgctcaacacctgggcccagagcgtccaccaggcctgcctctcagccgcctagccaagactgcagggatggcccgcagcctcatcggggccaaggacacacgcctcctgtcagacacttctaggtgttggcttccttagagagcctggggttaggttagctttcctgcttttatcttctgccttggggacctgccaaacgaaatcccacacctgtacagaactgggataggcgcagtggagcgggttgcttggggggcgttggccgacttcttagagaaggccctccatgtgacttcctcccaggagccagatgcgatcctcaggctgctctcaccgtggcctgtccacggtccaggtccatctcagcagcgtgagggtgcactcagggtgttgttagagcgtctcgtgtgtgctagacgcacccctactcgttcctatagaacacagaggacataggaaacccttaaaacacacatgggattctctggtcacagttttgggttcaggctatgctgctttgggcaggtggagcaccccccgaggaagcctgcaagtccagggcacaggctgccttttggagggagggctggcccataggtgctgctggctccccgccaccagctgggcctcagccctcacggcattcctgctgagcaccgtggggcacccagggagcaggggcgtcagggatcctgctgccggcacccctgtgccgctggcatgagggccgtgtccccactgtgaaggatgaagagcaaggccctcaggacccgtgtcctcagagcaccacacactgagcacccagagacagcgggcctggcagcgggccgggccatgcagggagcgcctccctatgttgcctgccactctgggcaccggccagcaccctctggtgagaagaggtcccccctttttatgtgcactaccccaccatctgtgattataataaatttattattcctg

SEQ ID NO: 368886 - DNA, 3359 bp, Homo sapiens
tgcagcccccgcaagacgggcagcccccgcaagacgctgggaccacagcgaggatgccatgaggaaagctggtgtggcacacagtaaatccagcaaggatatggagagccatgttttcctgaaggccaagacccgggacgaatacctttctctcgtggccaggctcattatccattttcgagacattcataacaagaaatctcaagcttccgtcagtgatcctatgaatgcactccagagcctgactggcggacctgctgcgggagccgctggaattggcatgcctcctcggggcccgggacagtctctgggcgggatgggtagccttggtgccatgggacagccaatgtctctctcagggcagccgcctcctgggacctcggggatggcccctcacagcatggctgtcgtgtctacggcaactccacagacccagctgcagctccagcaggtggcgctgcagcagcagcagcaacagcagcagttccagcagcagcagcaggctttgcaggcccagccaccaattcagcagccaccgatgcagcagccacagcctccgccctcccaggctctgccccagcagctgcagcagatgcatcacacacagcaccaccagccgccaccacagccccagcagcctccagttgctcagaaccaaccatcacaactcccgccacagtcgcagacccagcctttggtgtcacaggcgcaagctctccctggacaaatgttgtatacccaaccaccactgaaatttgtccgagctccgatggtggtgcagcagcccccagtgcagccccaggtgcagcagcagcagacagcagtacagacagctcaggctgcccagatggtggctcccggagtccagatgatcacggaagccttggcccaaggtgggatgcacataagagcccggttcccgcctaccaccgctgtgtccgccatcccgtcaagctccatccctttgggcagacagcccatggcacaggtcagccagagcagcctccccatgctgtcctcgccgtcaccgggccagcaggtgcagaccccgcagtcgatgccccctcccccccagccgtccccgcagcccggccagcccagctcacagcccaactccaacgtcagctctggccctgccccatctcccagtagcttcctgcccagcccctcaccgcagccctcccagagcccagtgacggcgcggaccccacagaacttcagtgtcccctcacctggacctttaaacacacctgtgaaccccagctctgtcatgagcccagctggctccagccaggctgaggagcagcagtacctggacaagctgaagcagctgtcgaagtacatcgagcccctgcgccgcatgatcaacaagatcgacaagaacgaagacagaaaaaaggacctgagtaagatgaagagccttctggacattctgacagacccctcgaagcggtgtcccctgaagaccttgcaaaagtgtgagatcgccctggagaaactcaagaatgacatggcggtgcccactcccccaccgcccccggtgccaccgaccaaacagcagtacctatgccagccgctcctggatgccgtcctggccaacatccgctcacctgtcttcaaccattccctgtaccgcacattcgttccagccatgaccgccattcacggcccacccatcacggccccagtggtgtgcacccggaagcgcaggcttgaggatgatgagcggcagagcatccccagtgtgctccagggtgaggtggccaggctggaccccaagttcctggtaaacctggacccttctcactgcagcaacaatggcactgtccacctgatctgcaagctggatgacaaggacctcccaagtgtgccaccactggagctcagtgtgcccgctgactatcctgcccaaagcccgctgtggatagaccggcagtggcagtacgacgccaaccccttcctccagtcggtgcaccgctgcatgacctccaggctgctgcagctcccggacaagcactcggtcaccgccttgctcaacacctgggcccagagcgtccaccaggcctgcctctcagccgcctagccaagactgcagggatggcccgcagcctcatcggggccaaggacacacgcctcctgtcagacacttctaggtgttggcttccttagagagcctggggttaggttagctttcctgcttttatcttctgccttggggacctgccaaacgaaatcccacacctgtacagaactgggataggcgcagtggagcgggttgcttggggggcgttggccgacttcttagagaaggccctccatgtgacttcctcccaggagccagatgcgatcctcaggctgctctcaccgtggcctgtccacggtccaggtccatctcagcagcgtgagggtgcactcagggtgttgttagagcgtctcgtgtgtgctagacgcacccctactcgttcctatagaacacagaggacataggaaacccttaaaacacacatgggattctctggtcacagttttgggttcaggctatgctgctttgggcaggtggagcaccccccgaggaagcctgcaagtccagggcacaggctgccttttggagggagggctggcccataggtgctgctggctccccgccaccagctgggcctcagccctcacggcattcctgctgagcaccgtggggcacccagggagcaggggcgtcagggatcctgctgccggcacccctgtgccgctggcatgagggccgtgtccccactgtgaaggatgaagagcaaggccctcaggacccgtgtcctcagagcaccacacactgagcacccagagacagcgggcctggcagcgggccgggccatgcagggagcgcctccctatgttgcctgccactctgggcaccggccagcaccctctggtgagaagaggtcccccctttttatgtgcactaccccaccatctgtgattataataaatttattattcctgtgaaaacacacagaagaagagaacgagcaacacacgccagaaaaacagaacagaacagaacaagcagggcgggcgacacgcagagagagtacgcccagagcgggcagacacacgtagacacgcaaccaaggatatgtcgagaaacaaagggagcccccgagagaagagaagcgatgatgtatctatcagacacgctgtcgagacggcgagtgctgtgtattatcacggcgttggcagaggcggatacaaaggttaacgaggggaagaactttagttaggaggacgatacttgtattcggagaggagggaagaaaaatggggggacatgtacgtaaggaggaagtgtgacgctttaggtgagatat

SEQ ID NO: 368887 - DNA, 3587 bp, Homo sapiens
tgcagcccccgcaagacgggcagcccccgcaagacgctgggaccacagcgaggatgccatgaggaaagctggtgtggcacacagtaaatccagcaaggatatggagagccatgttttcctgaaggccaagacccgggacgaatacctttctctcgtggccaggctcattatccattttcgagacattcataacaagaaatctcaagcttccgtcagtgatcctatgaatgcactccagagcctgactggcggacctgctgcgggagccgctggaattggcatgcctcctcggggcccgggacagtctctgggcgggatgggtagccttggtgccatgggacagccaatgtctctctcagggcagccgcctcctgggacctcggggatggcccctcacagcatggctgtcgtgtctacggcaactccacagacccagctgcagctccagcaggtggcgctgcagcagcagcagcaacagcagcagttccagcagcagcagcaggcggcgctacagcagcagcagcagcagcagcaacagcagcagttccaggctcagcagagtgccatgcagcagcagttccaagcagtagtgcagcagcagcagcagctccagcagcagcagcagcagcagcagcatctaattaaattgcatcatcaaaatcagcaacagatacagcagcagcaacagcagctgcagcgaatagcacagctgcagctccaacaacagcaacagcagcagcagcagcagcagcagcagcagcagcaggctttgcaggcccagccaccaattcagcagccaccgatgcagcagccacagcctccgccctcccaggctctgccccagcagctgcagcagatgcatcacacacagcaccaccagccgccaccacagccccagcagcctccagttgctcagaaccaaccatcacaactcccgccacagtcgcagacccagcctttggtgtcacaggcgcaagctctccctggacaaatgttgtatacccaaccaccactgaaatttgtccgagctccgatggtggtgcagcagcccccagtgcagccccaggtgcagcagcagcagacagcagtacagacagctcaggctgcccagatggtggctcccggagtccaggtcagccagagcagcctccccatgctgtcctcgccgtcaccgggccagcaggtgcagaccccgcagtcgatgccccctcccccccagccgtccccgcagcccggccagcccagctcacagcccaactccaacgtcagctctggccctgccccatctcccagtagcttcctgcccagcccctcaccgcagccctcccagagcccagtgacggcgcggaccccacagaacttcagtgtcccctcacctggacctttaaacacacctgtgaaccccagctctgtcatgagcccagctggctccagccaggctgaggagcagcagtacctggacaagctgaagcagctgtcgaagtacatcgagcccctgcgccgcatgatcaacaagatcgacaagaacgaagacagaaaaaaggacctgagtaagatgaagagccttctggacattctgacagacccctcgaagcggtgtcccctgaagaccttgcaaaagtgtgagatcgccctggagaaactcaagaatgacatggcggtgcccactcccccaccgcccccggtgccaccgaccaaacagcagtacctatgccagccgctcctggatgccgtcctggccaacatccgctcacctgtcttcaaccattccctgtaccgcacattcgttccagccatgaccgccattcacggcccacccatcacgtatgtccagctgggctgggctttgcggagggcggccagccctgggccgcgtgtgccaggtgtggtcaccatgccgcctccccaggccccagtggtgtgcacccggaagcgcaggcttgaggatgatgagcggcagagcatccccagtgtgctccagggtgaggtggccaggctggaccccaagttcctggtaaacctggacccttctcactgcagcaacaatggcactgtccacctgatctgcaagctggatgacaaggacctcccaagtgtgccaccactggagctcagtgtgcccgctgactatcctgcccaaagcccgctgtggatagaccggcagtggcagtacgacgccaaccccttcctccagtcggtgcaccgctgcatgacctccaggctgctgcagctcccggacaagcactcggtcaccgccttgctcaacacctgggcccagagcgtccaccaggcctgcctctcagccgcctagccaagactgcagggatggcccgcagcctcatcggggccaaggacacacgcctcctgtcagacacttctaggtgttggcttccttagagagcctggggttaggttagctttcctgcttttatcttctgccttggggacctgccaaacgaaatcccacacctgtacagaactgggataggcgcagtggagcgggttgcttggggggcgttggccgacttcttagagaaggccctccatgtgacttcctcccaggagccagatgcgatcctcaggctgctctcaccgtggcctgtccacggtccaggtccatctcagcagcgtgagggtgcactcagggtgttgttagagcgtctcgtgtgtgctagacgcacccctactcgttcctatagaacacagaggacataggaaacccttaaaacacacatgggattctctggtcacagttttgggttcaggctatgctgctttgggcaggtggagcaccccccgaggaagcctgcaagtccagggcacaggctgccttttggagggagggctggcccataggtgctgctggctccccgccaccagctgggcctcagccctcacggcattcctgctgagcaccgtggggcacccagggagcaggggcgtcagggatcctgctgccggcacccctgtgccgctggcatgagggccgtgtccccactgtgaaggatgaagagcaaggccctcaggacccgtgtcctcagagcaccacacactgagcacccagagacagcgggcctggcagcgggccgggccatgcagggagcgcctccctatgttgcctgccactctgggcaccggccagcaccctctggtgagaagaggtcccccctttttatgtgcactaccccaccatctgtgattataataaatttattattcctgtgaaaacacacagaagaagagaacgagcaacacacgccagaaaaacagaacagaacagaacaagcagggcgggcgacacgcagagagagtacgcccagagcgggcagacacacgtagacacgcaaccaaggatatgtcgagaaacaaagggagcccccgagagaagagaagcgatgatgtatctatcagacacgctgtcgagacggcgagtgctgtgtattatcacggcgttggcagaggcggatacaaaggttaacgaggggaagaactttagttaggaggacgatacttgtattcggagaggagggaagaaaaatggggggacatgtacgtaaggaggaagtgtgacgctttaggtgagatat

SEQ ID NO: 368888 - DNA, 3138 bp, Homo sapiens
tgcagcccccgcaagacgggcagcccccgcaagacgctgggaccacagcgaggatgccatgaggaaagctggtgtggcacacagtaaatccagcaaggatatggagagccatgttttcctgaaggccaagacccgggacgaatacctttctctcgtggccaggctcattatccattttcgagacattcataacaagaaatctcaagcttccgtcagtgatcctatgaatgcactccagagcctgactggcggacctgctgcgggagccgctggaattggcatgcctcctcggggcccgggacagtctctgggcgggatgggtagccttggtgccatgggacagccaatgtctctctcagggcagccgcctcctgggacctcggggatggcccctcacagcatggctgtcgtgtctacggcaactccacagacccagctgcagctccagcaggtggcgctgcagcagcagcagcaacagcagcagttccagcagcagcagcaggcggcgctacagcagcagcagcagcagcagcaacagcagcagttccaggctcagcagagtgccatgcagcagcagttccaagcagtagtgcagcagcagcagcagctccagcagcagcagcagcagcagcagcatctaattaaattgcatcatcaaaatcagcaacagatacagcagcagcaacagcagctgcagcgaatagcacagctgcagctccaacaacagcaacagcagcagcagcagcagcagcagcagcagcagcaggctttgcaggcccagccaccaattcagcagccaccgatgcagcagccacagcctccgccctcccaggctctgccccagcagctgcagcagatgcatcacacacagcaccaccagccgccaccacagccccagcagcctccagttgctcagaaccaaccatcacaactcccgccacagtcgcagacccagcctttggtgtcacaggcgcaagctctccctggacaaatgttgtatacccaaccaccactgaaatttgtccgagctccgatggtggtgcagcagcccccagtgcagccccaggtgcagcagcagcagacagcagtacagacagctcaggctgcccagatggtggctcccggagtccaggtcagccagagcagcctccccatgctgtcctcgccgtcaccgggccagcaggtgcagaccccgcagtcgatgccccctcccccccagccgtccccgcagcccggccagcccagctcacagcccaactccaacgtcagctctggccctgccccatctcccagtagcttcctgcccagcccctcaccgcagccctcccagagcccagtgacggcgcggaccccacagaacttcagtgtcccctcacctggacctttaaacacacctgtgaaccccagctctgtcatgagcccagctggctccagccaggctgaggagcagcagtacctggacaagctgaagcagctgtcgaagtacatcgagcccctgcgccgcatgatcaacaagatcgacaagaacgaagacagaaaaaaggacctgagtaagatgaagagccttctggacattctgacagacccctcgaagcggtgtcccctgaagaccttgcaaaagtgtgagatcgccctggagaaactcaagaatgacatggcggtgcccactcccccaccgcccccggtgccaccgaccaaacagcagtacctatgccagccgctcctggatgccgtcctggccaacatccgctcacctgtcttcaaccattccctgtaccgcacattcgttccagccatgaccgccattcacggcccacccatcacggccccagtggtgtgcacccggaagcgcaggcttgaggatgatgagcggcagagcatccccagtgtgctccagggtgaggtggccaggctggaccccaagttcctggtaaacctggacccttctcactgcagcaacaatggcactgtccacctgatctgcaagctggatgacaaggacctcccaagtgtgccaccactggagctcagtgtgcccgctgactatcctgcccaaagcccgctgtggatagaccggcagtggcagtacgacgccaaccccttcctccagtcggtgcaccgctgcatgacctccaggctgctgcagctcccggacaagcactcggtcaccgccttgctcaacacctgggcccagagcgtccaccaggcctgcctctcagccgcctagccaagactgcagggatggcccgcagcctcatcggggccaaggacacacgcctcctgtcagacacttctaggtgttggcttccttagagagcctggggttaggttagctttcctgcttttatcttctgccttggggacctgccaaacgaaatcccacacctgtacagaactgggataggcgcagtggagcgggttgcttggggggcgttggccgacttcttagagaaggccctccatgtgacttcctcccaggagccagatgcgatcctcaggctgctctcaccgtggcctgtccacggtccaggtccatctcagcagcgtgagggtgcactcagggtgttgttagagcgtctcgtgtgtgctagacgcacccctactcgttcctatagaacacagaggacataggaaacccttaaaacacacatgggattctctggtcacagttttgggttcaggctatgctgctttgggcaggtggagcaccccccgaggaagcctgcaagtccagggcacaggctgccttttggagggagggctggcccataggtgctgctggctccccgccaccagctgggcctcagccctcacggcattcctgctgagcaccgtggggcacccagggagcaggggcgtcagggatcctgctgccggcacccctgtgccgctggcatgagggccgtgtccccactgtgaaggatgaagagcaaggccctcaggacccgtgtcctcagagcaccacacactgagcacccagagacagcgggcctggcagcgggccgggccatgcagggagcgcctccctatgttgcctgccactctgggcaccggccagcaccctctggtgagaagaggtcccccctttttatgtgcactaccccaccatctgtgattataataaatttattattcctg

SEQ ID NO: 368889 - DNA, 3743 bp, Homo sapiens
tgcagcccccgcaagacgggcagcccccgcaagacgctgggaccacagcgaggatgccatgaggaaagctggtgtggcacacagtaaatccagcaaggatatggagagccatgttttcctgaaggccaagacccgggacgaatacctttctctcgtggccaggctcattatccattttcgagacattcataacaagaaatctcaagcttccgtcagtgatcctatgaatgcactccagagcctgactggcggacctgctgcgggagccgctggaattggcatgcctcctcggggcccgggacagtctctgggcgggatgggtagccttggtgccatgggacagccaatgtctctctcagggcagccgcctcctgggacctcggggatggcccctcacagcatggctgtcgtgtctacggcaactccacagacccagctgcagctccagcaggtggcgctgcagcagcagcagcaacagcagcagttccagcagcagcagcaggcggcgctacagcagcagcagcagcagcagcaacagcagcagttccaggctcagcagagtgccatgcagcagcagttccaagcagtagtgcagcagcagcagcagctccagcagcagcagcagcagcagcagcatctaattaaattgcatcatcaaaatcagcaacagatacagcagcagcaacagcagctgcagcgaatagcacagctgcagctccaacaacagcaacagcagcagcagcagcagcagcagcagcagcagcaggctttgcaggcccagccaccaattcagcagccaccgatgcagcagccacagcctccgccctcccaggctctgccccagcagctgcagcagatgcatcacacacagcaccaccagccgccaccacagccccagcagcctccagttgctcagaaccaaccatcacaactcccgccacagtcgcagacccagcctttggtgtcacaggcgcaagctctccctggacaaatgttgtatacccaaccaccactgaaatttgtccgagctccgatggtggtgcagcagcccccagtgcagccccaggtgcagcagcagcagacagcagtacagacagctcaggctgcccagatggtggctcccggagtccaggtcagccagagcagcctccccatgctgtcctcgccgtcaccgggccagcaggtgcagaccccgcagtcgatgccccctcccccccagccgtccccgcagcccggccagcccagctcacagcccaactccaacgtcagctctggccctgccccatctcccagtagcttcctgcccagcccctcaccgcagccctcccagagcccagtgacggcgcggaccccacagaacttcagtgtcccctcacctggacctttaaacacacctgtgaaccccagctctgtcatgagcccagctggctccagccaggctgaggagcagcagtacctggacaagctgaagcagctgtcgaagtacatcgagcccctgcgccgcatgatcaacaagatcgacaagaacgaagacagaaaaaaggacctgagtaagatgaagagccttctggacattctgacagacccctcgaagcggtgtcccctgaagaccttgcaaaagtgtgagatcgccctggagaaactcaagaatgacatggcggtgcccactcccccaccgcccccggtgccaccgaccaaacagcagtacctatgccagccgctcctggatgccgtcctggccaacatccgctcacctgtcttcaaccattccctgtaccgcacattcgttccagccatgaccgccattcacggcccacccatcacggccccagtggtgtgcacccggaagcgcaggcttgaggatgatgagcggcagagcatccccagtgtgctccagggtgaggtggccaggctggaccccaagttcctggtaaacctggacccttctcactgcagcaacaatggcactgtccacctgatctgcaagctggatgacaaggacctcccaagtgtgccaccactggagctcagtgtgcccgctgactatcctgcccaaagcccgctgtggatagaccggcagtggcagtacgacgccaaccccttcctccagtcggtgcaccgctgcatgacctccaggctgctgcagctcccggacaagcactcggtcaccgccttgctcaacacctgggcccagagcgtccaccaggcctgcctctcagccgcctagccaagactgcagggatggcccgcagcctcatcggggccaaggacacacgcctcctgtcagacacttctaggtgttggcttccttagagagcctggggttaggttagctttcctgcttttatcttctgccttggggacctgccaaacgaaatcccacacctgtacagaactgggataggcgcagtggagcgggttgcttggggggcgttggccgacttcttagagaaggccctccatgtgacttcctcccaggagccagatgcgatcctcaggctgctctcaccgtggcctgtccacggtccaggtccatctcagcagcgtgagggtgcactcagggtgttgttagagcgtctcgtgtgtgctagacgcacccctactcgttcctatagaacacagaggacataggaaacccttaaaacacacatgggattctctggtcacagttttgggttcaggctatgctgctttgggcaggtggagcaccccccgaggaagcctgcaagtccagggcacaggctgccttttggagggagggctggcccataggtgctgctggctccccgccaccagctgggcctcagccctcacggcattcctgctgagcaccgtggggcacccagggagcaggggcgtcagggatcctgctgccggcacccctgtgccgctggcatgagggccgtgtccccactgtgaaggatgaagagcaaggccctcaggacccgtgtcctcagagcaccacacactgagcacccagagacagcgggcctggcagcgggccgggccatgcagggagcgcctccctatgttgcctgccactctgggcaccggccagcaccctctggtgagaagaggtcccccctttttatgtgcactaccccaccatctgtgattataataaatttattattcctgtgttaaaaaaaaaaaaaaaaaaaaaaaaaaaaaaaaaaaaaaaaaaaaaaaaaaagaaaacaagaaaaaaaaagaagaggggcggcggcgccctcaagaagattcgtccgccggaggagagccaccaaatgtgcgacacgacccccatttttgttgtcaaagaggggcccccacaaagggaggccgctattaagaaggcggagcgaagggccgccgacgatttaaaacacagacggcccggacggggggaaagacaccggctcgcctccgggaggagaaccctccgaggagaaaggagggcacccctaccatctctgtgggcggggggcggccaacaactactggggcggcgcacaacatctcaccacccaccagagagcgatagtactactaaacgcccctctacaaggggagcgacatatatctatatcaacatatctttaccaaggcgagtgcatatataaatctgcgggcgcaaaacacacctcaagcgcagaagaattatcttgcctcgtcgccggcgtacgtagaagcaaattatactcttctcgctccaaccaacccggaggatacttcaatctcgtattgacagcacaaacattttt

SEQ ID NO: 368890 - DNA, 3449 bp, Homo sapiens
tgcagcccccgcaagacgggcagcccccgcaagacgctgggaccacagcgaggatgccatgaggaaagctggtgtggcacacagtaaatccagcaaggatatggagagccatgttttcctgaaggccaagacccgggacgaatacctttctctcgtggccaggctcattatccattttcgagacattcataacaagaaatctcaagcttccgtcagtgatcctatgaatgcactccagagcctgactggcggacctgctgcgggagccgctggaattggcatgcctcctcggggcccgggacagtctctgggcgggatgggtagccttggtgccatgggacagccaatgtctctctcagggcagccgcctcctgggacctcggggatggcccctcacagcatggctgtcgtgtctacggcaactccacagacccagctgcagctccagcaggtggcgctgcagcagcagcagcaacagcagcagttccagcagcagcagcaggcggcgctacagcagcagcagcagcagcagcaacagcagcagttccaggctcagcagagtgccatgcagcagcagttccaagcagtagtgcagcagcagcagcagctccagcagcagcagcagcagcagcagcatctaattaaattgcatcatcaaaatcagcaacagatacagcagcagcaacagcagctgcagcgaatagcacagctgcagctccaacaacagcaacagcagcagcagcagcagcagcagcagcagcagcaggctttgcaggcccagccaccaattcagcagccaccgatgcagcagccacagcctccgccctcccaggctctgccccagcagctgcagcagatgcatcacacacagcaccaccagccgccaccacagccccagcagcctccagttgctcagaaccaaccatcacaactcccgccacagtcgcagacccagcctttggtgtcacaggcgcaagctctccctggacaaatgttgtatacccaaccaccactgaaatttgtccgagctccgatggtggtgcagcagcccccagtgcagccccaggtgcagcagcagcagacagcagtacagacagctcaggctgcccagatggtggctcccggagtccaggtcagccagagcagcctccccatgctgtcctcgccgtcaccgggccagcaggtgcagaccccgcagtcgatgccccctcccccccagccgtccccgcagcccggccagcccagctcacagcccaactccaacgtcagctctggccctgccccatctcccagtagcttcctgcccagcccctcaccgcagccctcccagagcccagtgacggcgcggaccccacagaacttcagtgtcccctcacctggacctttaaacacacctgtgaaccccagctctgtcatgagcccagctggctccagccaggctgaggagcagcagtacctggacaagctgaagcagctgtcgaagtacatcgagcccctgcgccgcatgatcaacaagatcgacaagaacgaagacagaaaaaaggacctgagtaagatgaagagccttctggacattctgacagacccctcgaagcggtgtcccctgaagaccttgcaaaagtgtgagatcgccctggagaaactcaagaatgacatggcggtgcccactcccccaccgcccccggtgccaccgaccaaacagcagtacctatgccagccgctcctggatgccgtcctggccaacatccgctcacctgtcttcaaccattccctgtaccgcacattcgttccagccatgaccgccattcacggcccacccatcacggccccagtggtgtgcacccggaagcgcaggcttgaggatgatgagcggcagagcatccccagtgtgctccagggtgaggtggccaggctggaccccaagttcctggtaaacctggacccttctcactgcagcaacaatggcactgtccacctgatctgcaagctggatgacaaggacctcccaagtgtgccaccactggagctcagtgtgcccgctgactatcctgcccaaagcccgctgtggatagaccggcagtggcagtacgacgccaaccccttcctccagtcggtgcaccgctgcatgacctccaggctgctgcagctcccggacaagcactcggtcaccgccttgctcaacacctgggcccagagcgtccaccaggcctgcctctcagccgcctagcctcagacacttctaggtgttggcttccttagagagcctggggttaggttagctttcctgcttttatcttctgccttggggacctgccaaacgaaatcccacacctgtacagaactgggataggcgcagtggagcgggttgcttggggggcgttggccgacttcttagagaaggccctccatgtgacttcctcccaggagccagatgcgatcctcaggctgctctcaccgtggcctgtccacggtccaggtccatctcagcagcgtgagggtgcactcagggtgttgttagagcgtctcgtgtgtgctagacgcacccctactcgttcctatagaacacagaggacataggaaacccttaaaacacacatgggattctctggtcacagttttgggttcaggctatgctgctttgggcaggtggagcaccccccgaggaagcctgcaagtccagggcacaggctgccttttggagggagggctggcccataggtgctgctggctccccgccaccagctgggcctcagccctcacggcattcctgctgagcaccgtggggcacccagggagcaggggcgtcagggatcctgctgccggcacccctgtgccgctggcatgagggccgtgtccccactgtgaaggatgaagagcaaggccctcaggacccgtgtcctcagagcaccacacactgagcacccagagacagcgggcctggcagcgggccgggccatgcagggagcgcctccctatgttgcctgccactctgggcaccggccagcaccctctggtgagaagaggtcccccctttttatgtgcactaccccaccatctgtgattataataaatttattattcctgtgaaaacacacagaagaagagaacgagcaacacacgccagaaaaacagaacagaacagaacaagcagggcgggcgacacgcagagagagtacgcccagagcgggcagacacacgtagacacgcaaccaaggatatgtcgagaaacaaagggagcccccgagagaagagaagcgatgatgtatctatcagacacgctgtcgagacggcgagtgctgtgtattatcacggcgttggcagaggcggatacaaaggttaacgaggggaagaactttagttaggaggacgatacttgtattcggagaggagggaagaaaaatggggggacatgtacgtaaggaggaagtgtgacgctttaggtgagatat

SEQ ID NO: 368891 - DNA, 2887 bp, Homo sapiens
tgcagcccccgcaagacgggcagcccccgcaagacgctgggaccacagcgaggatgccatgaggaaagctggtgtggcacacagtaaatccagcaaggatatggagagccatgttttcctgaaggccaagacccgggacgaatacctttctctcgtggccaggctcattatccattttcgagacattcataacaagaaatctcaagcttccgtcagtgatcctatgaatgcactccagagcctgactggcggacctgctgcgggagccgctggaattggcatgcctcctcggggcccgggacagtctctgggcgggatgggtagccttggtgccatgggacagccaatgtctctctcagggcagccgcctcctgggacctcggggatggcccctcacagcatggctgtcgtgtctacggcaactccacagacccagctgcagctccagcaggtggcgctgcagcagcagcagcaacagcagcagttccagcagcagcagcaggcggcgctacagcagcagcagcagcagcagcaacagcagcagttccaggctcagcagagtgccatgcagcagcagttccaagcagtagtgcagcagcagcagcagctccagcagcagcagcagcagcagcagcatctaattaaattgcatcatcaaaatcagcaacagatacagcagcagcaacagcagctgcagcgaatagcacagctgcagctccaacaacagcaacagcagcagcagcagcagcagcagcagcagcagcaggctttgcaggcccagccaccaattcagcagccaccgatgcagcagccacagcctccgccctcccaggctctgccccagcagctgcagcagatgcatcacacacagcaccaccagccgccaccacagccccagcagcctccagttgctcagaaccaaccatcacaactcccgccacagtcgcagacccagcctttggtgtcacaggcgcaagctctccctggacaaatgttgtatacccaaccaccactgaaatttgtccgagctccgatggtggtgcagcagcccccagtgcagccccaggtgcagcagcagcagacagcagtaacctatgccagccgctcctggatgccgtcctggccaacatccgctcacctgtcttcaaccattccctgtaccgcacattcgttccagccatgaccgccattcacggcccacccatcacggccccagtggtgtgcacccggaagcgcaggcttgaggatgatgagcggcagagcatccccagtgtgctccagggtgaggtggccaggctggaccccaagttcctggtaaacctggacccttctcactgcagcaacaatggcactgtccacctgatctgcaagctggatgacaaggacctcccaagtgtgccaccactggagctcagtgtgcccgctgactatcctgcccaaagcccgctgtggatagaccggcagtggcagtacgacgccaaccccttcctccagtcggtgcaccgctgcatgacctccaggctgctgcagctcccggacaagcactcggtcaccgccttgctcaacacctgggcccagagcgtccaccaggcctgcctctcagccgcctagccaagactgcagggatggcccgcagcctcatcggggccaaggacacacgcctcctgtcagacacttctaggtgttggcttccttagagagcctggggttaggttagctttcctgcttttatcttctgccttggggacctgccaaacgaaatcccacacctgtacagaactgggataggcgcagtggagcgggttgcttggggggcgttggccgacttcttagagaaggccctccatgtgacttcctcccaggagccagatgcgatcctcaggctgctctcaccgtggcctgtccacggtccaggtccatctcagcagcgtgagggtgcactcagggtgttgttagagcgtctcgtgtgtgctagacgcacccctactcgttcctatagaacacagaggacataggaaacccttaaaacacacatgggattctctggtcacagttttgggttcaggctatgctgctttgggcaggtggagcaccccccgaggaagcctgcaagtccagggcacaggctgccttttggagggagggctggcccataggtgctgctggctccccgccaccagctgggcctcagccctcacggcattcctgctgagcaccgtggggcacccagggagcaggggcgtcagggatcctgctgccggcacccctgtgccgctggcatgagggccgtgtccccactgtgaaggatgaagagcaaggccctcaggacccgtgtcctcagagcaccacacactgagcacccagagacagcgggcctggcagcgggccgggccatgcagggagcgcctccctatgttgcctgccactctgggcaccggccagcaccctctggtgagaagaggtcccccctttttatgtgcactaccccaccatctgtgattataataaatttattattcctgtgaaaacacacagaagaagagaacgagcaacacacgccagaaaaacagaacagaacagaacaagcagggcgggcgacacgcagagagagtacgcccagagcgggcagacacacgtagacacgcaaccaaggatatgtcgagaaacaaagggagcccccgagagaagagaagcgatgatgtatctatcagacacgctgtcgagacggcgagtgctgtgtattatcacggcgttggcagaggcggatacaaaggttaacgaggggaagaactttagttaggaggacgatacttgtattcggagaggagggaagaaaaatggggggacatgtacgtaaggaggaagtgtgacgctttaggtgagatat

SEQ ID NO: 368892 - DNA, 3801 bp, Homo sapiens
tgcagcccccgcaagacgggcagcccccgcaagacgctgggaccacagcgaggatgccatgaggaaagctggtgtggcacacagtaaatccagcaaggatatggagagccatgttttcctgaaggccaagacccgggacgaatacctttctctcgtggccaggctcattatccattttcgagacattcataacaagaaatctcaagcttccgtcagtgatcctatgaatgcactccagagcctgactggcggacctgctgcgggagccgctggaattggcatgcctcctcggggcccgggacagtctctgggcgggatgggtagccttggtgccatgggacagccaatgtctctctcagggcagccgcctcctgggacctcggggatggcccctcacagcatggctgtcgtgtctacggcaactccacagacccagctgcagctccagcaggtggcgctgcagcagcagcagcaacagcagcagttccagcagcagcagcaggcggcgctacagcagcagcagcagcagcagcaacagcagcagttccaggctcagcagagtgccatgcagcagcagttccaagcagtagtgcagcagcagcagcagctccagcagcagcagcagcagcagcagcatctaattaaattgcatcatcaaaatcagcaacagatacagcagcagcaacagcagctgcagcgaatagcacagctgcagctccaacaacagcaacagcagcagcagcagcagcagcagcagcagcagcaggctttgcaggcccagccaccaattcagcagccaccgatgcagcagccacagcctccgccctcccaggctctgccccagcagctgcagcagatgcatcacacacagcaccaccagccgccaccacagccccagcagcctccagttgctcagaaccaaccatcacaactcccgccacagtcgcagacccagcctttggtgtcacaggcgcaagctctccctggacaaatgttgtatacccaaccaccactgaaatttgtccgagctccgatggtggtgcagcagcccccagtgcagccccaggtgcagcagcagcagacagcagtacagacagctcaggctgcccagatggtggctcccggagtccaggtcagccagagcagcctccccatgctgtcctcgccgtcaccgggccagcaggtgcagaccccgcagtcgatgccccctcccccccagccgtccccgcagcccggccagcccagctcacagcccaactccaacgtcagctctggccctgccccatctcccagtagcttcctgcccagcccctcaccgcagccctcccagagcccagtgacggcgcggaccccacagaacttcagtgtcccctcacctggacctttaaacacacctgtgaaccccagctctgtcatgagcccagctggctccagccaggctgaggagcagcagtacctggacaagctgaagcagctgtcgaagtacatcgagcccctgcgccgcatgatcaacaagatcgacaagaacgaagacagaaaaaaggacctgagtaagatgaagagccttctggacattctgacagacccctcgaagcggtgtcccctgaagaccttgcaaaagtgtgagatcgccctggagaaactcaagaatgacatggcggtggccccagtggtgtgcacccggaagcgcaggcttgaggatgatgagcggcagagcatccccagtgtgctccagggtgaggtggccaggctggaccccaagttcctggtaaacctggacccttctcactgcagcaacaatggcactgtccacctgatctgcaagctgggtgagtgtccagagggccgggactggtgtgggaaagcaggccctgaccgcagccccaggactctgccatccaagccagatggcacagcgcccagaacccaccctgtgttcacgccccgccaggctgtctgctctatcctcacacacaccgggctccagacagcctggccatgcctcagtccccactgccagagcccgcacactctcacctccccaacacagatgtggctttgcttgcctgggccctagggaggtggtaggcaggacctctgggcacccatcaatgcagagcactccaggcttcacgtttggaaatctgagagtcagagagacctcctccaggctttgccacaagcttcaccagaacctccctgggtgtggagtcctgttccagagcagggctgtgaggcagggcaggccggggcttgtccaggtcacagatagagccttctgtgttgcagatgacaaggacctcccaagtgtgccaccactggagctcagtgtgcccgctgactatcctgcccaaagcccgctgtggatagaccggcagtggcagtacgacgccaaccccttcctccagtcggtgcaccgctgcatgacctccaggctgctgcagctcccggacaagcactcggtcaccgccttgctcaacacctgggcccagagcgtccaccaggcctgcctctcagccgcctagccaagactgcagggatggcccgcagcctcatcggggccaaggacacacgcctcctgtcagacacttctaggtgttggcttccttagagagcctggggttaggttagctttcctgcttttatcttctgccttggggacctgccaaacgaaatcccacacctgtacagaactgggataggcgcagtggagcgggttgcttggggggcgttggccgacttcttagagaaggccctccatgtgacttcctcccaggagccagatgcgatcctcaggctgctctcaccgtggcctgtccacggtccaggtccatctcagcagcgtgagggtgcactcagggtgttgttagagcgtctcgtgtgtgctagacgcacccctactcgttcctatagaacacagaggacataggaaacccttaaaacacacatgggattctctggtcacagttttgggttcaggctatgctgctttgggcaggtggagcaccccccgaggaagcctgcaagtccagggcacaggctgccttttggagggagggctggcccataggtgctgctggctccccgccaccagctgggcctcagccctcacggcattcctgctgagcaccgtggggcacccagggagcaggggcgtcagggatcctgctgccggcacccctgtgccgctggcatgagggccgtgtccccactgtgaaggatgaagagcaaggccctcaggacccgtgtcctcagagcaccacacactgagcacccagagacagcgggcctggcagcgggccgggccatgcagggagcgcctccctatgttgcctgccactctgggcaccggccagcaccctctggtgagaagaggtcccccctttttatgtgcactaccccaccatctgtgattataataaatttattattcctgtgaaaacacacagaagaagagaacgagcaacacacgccagaaaaacagaacagaacagaacaagcagggcgggcgacacgcagagagagtacgcccagagcgggcagacacacgtagacacgcaaccaaggatatgtcgagaaacaaagggagcccccgagagaagagaagcgatgatgtatctatcagacacgctgtcgagacggcgagtgctgtgtattatcacggcgttggcagaggcggatacaaaggttaacgaggggaagaactttagttaggaggacgatacttgtattcggagaggagggaagaaaaatggggggacatgtacgtaaggaggaagtgtgacgctttaggtgagatat

SEQ ID NO: 368893 - DNA, 1253 bp, Homo sapiens
  misc_feature (1247)..(1247): n is a, c, g, or t
  misc_feature (1253)..(1253): n is a, c, g, or t
tgcagcccccgcaagacgggcagcccccgcaagacgctgggaccacagcgaggatgccatgaggaaagctggtgtggcacacagtaaatccagcaaggatatggagagccatgttttcctgaaggccaagacccgggacgaatacctttctctcgtggccaggctcattatccattttcgagacattcataacaagaaatctcaagcttccgtcagtgatcctatgaatgcactccagagcctgactggcggacctgctgcgggagccgctggaattggcatgcctcctcggggcccgggacagtctctgggcgggatgggtagccttggtgccatgggacagccaatgtctctctcagggcagccgcctcctgggacctcggggatggcccctcacagcatggctgtcgtgtctacggcaactccacagacccagctgcagctccagcaggtggcgctgcagcagcagcagcaacagcagcagttccagcagcagcagcaggcggcgctacagcagcagcagcagcagcagcaacagcagcagttccaggctcagcagagtgccatgcagcagcagttccaagcagtagtgcagcagcagcagcagctccagcagcagcagcagcagcagcagcatctaattaaattgcatcatcaaaatcagcaacagatacagcagcagcaacagcagctgcagcgaatagcacagctgcagctccaacaacagcaacagcagcagcagcagcagcagcagcagcagcagcaggctttgcaggcccagccaccaattcagcagccaccgatgcagcagccacagcctccgccctcccaggctctgccccagcagctgcagcagatgcatcacacacagcaccaccagccgccaccacagccccagcagcctccagttgctcagaaccaaccatcacaactcccgccacagtcgcagacccagcctttggtgtcacaggcgcaagctctccctggacaaatgttgtatacccaaccaccactgaaatttgtccgagctccgatggtggtgcagcagcccccagtgcagccccaggtgcagcagcagcagacagcagtacagacagctcaggctgcccagatggtggctcccggagtccaggtcagccagagcagcctccccatgctgtcctcgccgtcaccgggccagcaggtgcagaccccgcagtcgatgccccctccccccctgctcgctgttttcctgccagcttctcaangccggn

SEQ ID NO: 368894 - DNA, 1261 bp, Homo sapiens
tgcagcccccgcaagacgggcagcccccgcaagacgctgggaccacagcgaggatgccatgaggaaagctggtgtggcacacagtaaatccagcaaggatatggagagccatgttttcctgaaggccaagacccgggacgaatacctttctctcgtggccaggctcattatccattttcgagacattcataacaagaaatctcaagcttccgtcagtgatcctatgaatgcactccagagcctgactggcggacctgctgcgggagccgctggaattggcatgcctcctcggggcccgggacagtctctgggcgggatgggtagccttggtgccatgggacagccaatgtctctctcagggcagccgcctcctgggacctcggggatggcccctcacagcatggctgtcgtgtctacggcaactccacagacccagctgcagctccagcaggtggcgctgcagcagcagcagcaacagcagcagttccagcagcagcagcaggcggcgctacagcagcagcagcagcagcagcaacagcagcagttccaggctcagcagagtgccatgcagcagcagttccaagcagtagtgcagcagcagcagcagctccagcagcagcagcagcagcagcagcatctaattaaattgcatcatcaaaatcagcaacagatacagcagcagcaacagcagctgcagcgaatagcacagctgcagctccaacaacagcaacagcagcagcagcagcagcagcagcagcagcagcaggctttgcaggcccagccaccaattcagcagccaccgatgcagcagccacagcctccgccctcccaggctctgccccagcagctgcagcagatgcatcacacacagcaccaccagccgccaccacagccccagcagcctccagttgctcagaaccaaccatcacaactcccgccacagtcgcagacccagcctttggtgtcacaggcgcaagctctccctggacaaatgttgtatacccaaccaccactgaaatttgtccgagctccgatggtggtgcagcagcccccagtgcagccccaggtgcagcagcagcagacagcagtacagacagctcaggctgcccagatggtggctcccggagtccagatgatcacggaagccttggcccaaggtgggatgcacataagagcccggttcccgcctaccaccgctgtgtccgccatctcttaaagcaggcaacacctaggaccatcagttaccgaagtcacgagactc

SEQ ID NO: 368895 - DNA, 191 bp, Homo sapiens
ggggattgagcctgtaggtaggcgagatctgtgctctgtgagccttacgccctttgagccatggtcagtctggtaggccctttcctgagaagctctgcccttgtgttcccacagatcctatgaatgcactccagagcctgactggcggacctgctgcgggagccgctggaattggcatgcctcctcggggc

SEQ ID NO: 368896 - DNA, 2748 bp, Homo sapiens
ggcctcagaggactcaggtgcacacctgcatggcagaaccaggctctgggcccaggtgtctgacactgagtagctcgcctctcccaggggcgctggtgtgggccgatgcaagtgccaccatgggtgtgtgtgtggctccctgggccacctcactccaattaagcaggtccaggtgggacagcctgggaccagccctgcagcagcatgtgttaaccacaacagatggctgtagccaccaggcttgtccttggtgcagtcagcctgggggctgcgggggcttgtggaagcatgtgggaagacggtcccactggtcagcagagcagggtcctcaccgacccacagaggagcatgtcacaggacaggcaggcgtgtcagggaaggccaggctagtgccagccaagggcattgcctcccagactgcccttttcctcacactcccacgacacagccctcaaagcctgtgcccctgtgggtccctggccaaggagcaagggctgccctgcctgggccccccccgccagccccttggtcacctcatgctgtgtgccaggctgggggagtgtgcctgtgtgtatgtccaggtggcatttggatgaagacacaggtgtgtggtgaggctgtgcgggaggatgggcctatgcgtgcggtgggcaggtggtgtggaggcaggcgggcgggcgtgtggcagcgcgccggctgagcccctccacttccaggtcagccagagcagcctccccatgctgtcctcgccgtcaccgggccagcaggtgcagaccccgcagtcgatgccccctcccccccagccgtccccgcagcccggccagcccagctcacagcccaactccaacgtcagctctggccctgccccatctcccagtagcttcctgcccagcccctcaccgcagccctcccagagcccagtgacggcgcggaccccacagaacttcagtgtcccctcacctggacctttaaacacacctgtgaaccccagctctgtcatgagcccagctggctccagccaggctgaggagcagcagtacctggacaagctgaagcagctgtcgaagtacatcgagcccctgcgccgcatgatcaacaagatcgacaagaacgaagacagaaaaaaggacctgagtaagatgaagagccttctggacattctgacagacccctcgaagcggtgtcccctgaagaccttgcaaaagtgtgagatcgccctggagaaactcaagaatgacatggcggtgcccactcccccaccgcccccggtgccaccgaccaaacagcagtacctatgccagccgctcctggatgccgtcctggccaacatccgctcacctgtcttcaaccattccctgtaccgcacattcgttccagccatgaccgccattcacggcccacccatcacggccccagtggtgtgcacccggaagcgcaggcttgaggatgatgagcggcagagcatccccagtgtgctccagggtgaggtggccaggctggaccccaagttcctggtaaacctggacccttctcactgcagcaacaatggcactgtccacctgatctgcaagctggatgacaaggacctcccaagtgtgccaccactggagctcagtgtgcccgctgactatcctgcccaaagcccgctgtggatagaccggcagtggcagtacgacgccaaccccttcctccagtcggtgcaccgctgcatgacctccaggctgctgcagctcccggacaagcactcggtcaccgccttgctcaacacctgggcccagagcgtccaccaggcctgcctctcagccgcctagccaagactgcagggatggcccgcagcctcatcggggccaaggacacacgcctcctgtcagacacttctaggtgttggcttccttagagagcctggggttaggttagctttcctgcttttatcttctgccttggggacctgccaaacgaaatcccacacctgtacagaactgggataggcgcagtggagcgggttgcttggggggcgttggccgacttcttagagaaggccctccatgtgacttcctcccaggagccagatgcgatcctcaggctgctctcaccgtggcctgtccacggtccaggtccatctcagcagcgtgagggtgcactcagggtgttgttagagcgtctcgtgtgtgctagacgcacccctactcgttcctatagaacacagaggacataggaaacccttaaaacacacatgggattctctggtcacagttttgggttcaggctatgctgctttgggcaggtggagcaccccccgaggaagcctgcaagtccagggcacaggctgccttttggagggagggctggcccataggtgctgctggctccccgccaccagctgggcctcagccctcacggcattcctgctgagcaccgtggggcacccagggagcaggggcgtcagggatcctgctgccggcacccctgtgccgctggcatgagggccgtgtccccactgtgaaggatgaagagcaaggccctcaggacccgtgtcctcagagcaccacacactgagcacccagagacagcgggcctggcagcgggccgggccatgcagggagcgcctccctatgttgcctgccactctgggcaccggccagcaccctctggtgagaagaggtcccccctttttatgtgcactaccccaccatctgtgattataataaatttattattcctgtgtttgtcagttgttcaaaaaagtgt

SEQ ID NO: 368897 - DNA, 3623 bp, Homo sapiens
tgcagcccccgcaagacgggcagcccccgcaagacgctgggaccacagcgaggatgccatgaggaaagctggtgtggcacacagtaaatccagcaaggatatggagagccatgttttcctgaaggccaagacccgggacgaatacctttctctcgtggccaggctcattatccattttcgagacattcataacaagaaatctcaagcttccgtcagtgatcctatgaatgcactccagagcctgactggcggacctgctgcgggagccgctggaattggcatgcctcctcggggcccgggacagtctctgggcgggatgggtagccttggtgccatgggacagccaatgtctctctcagggcagccgcctcctgggacctcggggatggcccctcacagcatggctgtcgtgtctacggcaactccacagacccagctgcagctccagcaggtggcgctgcagcagcagcagcaacagcagcagttccagcagcagcagcaggcggcgctacagcagcagcagcagcagcagcaacagcagcagttccaggctcagcagagtgccatgcagcagcagttccaagcagtagtgcagcagcagcagcagctccagcagcagcagcagcagcagcagcatctaattaaattgcatcatcaaaatcagcaacagatacagcagcagcaacagcagctgcagcgaatagcacagctgcagctccaacaacagcaacagcagcagcagcagcagcagcagcagcagcagcaggctttgcaggcccagccaccaattcagcagccaccgatgcagcagccacagcctccgccctcccaggctctgccccagcagctgcagcagatgcatcacacacagcaccaccagccgccaccacagccccagcagcctccagttgctcagaaccaaccatcacaactcccgccacagtcgcagacccagcctttggtgtcacaggcgcaagctctccctggacaaatgttgtatacccaaccaccactgaaatttgtccgagctccgatggtggtgcagcagcccccagtgcagccccaggtgcagcagcagcagacagcagtacagacagctcaggctgcccagatggtggctcccggagtccagatgatcacggaagccttggcccaaggtgggatgcacataagagcccggttcccgcctaccaccgctgtgtccgccatcccgtcaagctccatccctttgggcagacagcccatggcacaggtcagccagagcagcctccccatgctgtcctcgccgtcaccgggccagcaggtgcagaccccgcagtcgatgccccctcccccccagccgtccccgcagcccggccagcccagctcacagcccaactccaacgtcagctctggccctgccccatctcccagtagcttcctgcccagcccctcaccgcagccctcccagagcccagtgacggcgcggaccccacagaacttcagtgtcccctcacctggacctttaaacacacctgtgaaccccagctctgtcatgagcccagctggctccagccaggctgaggagcagcagtacctggacaagctgaagcagctgtcgaagtacatcgagcccctgcgccgcatgatcaacaagatcgacaagaacgaagacagaaaaaaggacctgagtaagatgaagagccttctggacattctgacagacccctcgaagcggtgtcccctgaagaccttgcaaaagtgtgagatcgccctggagaaactcaagaatgacatggcggtgcccactcccccaccgcccccggtgccaccgaccaaacagcagtacctatgccagccgctcctggatgccgtcctggccaacatccgctcacctgtcttcaaccattccctgtaccgcacattcgttccagccatgaccgccattcacggcccacccatcacggccccagtggtgtgcacccggaagcgcaggcttgaggatgatgagcggcagagcatccccagtgtgctccagggtgaggtggccaggctggaccccaagttcctggtaaacctggacccttctcactgcagcaacaatggcactgtccacctgatctgcaagctggatgacaaggacctcccaagtgtgccaccactggagctcagtgtgcccgctgactatcctgcccaaagcccgctgtggatagaccggcagtggcagtacgacgccaaccccttcctccagtcggtgcaccgctgcatgacctccaggctgctgcagctcccggacaagcactcggtcaccgccttgctcaacacctgggcccagagcgtccaccaggcctgcctctcagccgcctagccaagactgcagggatggcccgcagcctcatcggggccaaggacacacgcctcctgtcagacacttctaggtgttggcttccttagagagcctggggttaggttagctttcctgcttttatcttctgccttggggacctgccaaacgaaatcccacacctgtacagaactgggataggcgcagtggagcgggttgcttggggggcgttggccgacttcttagagaaggccctccatgtgacttcctcccaggagccagatgcgatcctcaggctgctctcaccgtggcctgtccacggtccaggtccatctcagcagcgtgagggtgcactcagggtgttgttagagcgtctcgtgtgtgctagacgcacccctactcgttcctatagaacacagaggacataggaaacccttaaaacacacatgggattctctggtcacagttttgggttcaggctatgctgctttgggcaggtggagcaccccccgaggaagcctgcaagtccagggcacaggctgccttttggagggagggctggcccataggtgctgctggctccccgccaccagctgggcctcagccctcacggcattcctgctgagcaccgtggggcacccagggagcaggggcgtcagggatcctgctgccggcacccctgtgccgctggcatgagggccgtgtccccactgtgaaggatgaagagcaaggccctcaggacccgtgtcctcagagcaccacacactgagcacccagagacagcgggcctggcagcgggccgggccatgcagggagcgcctccctatgttgcctgccactctgggcaccggccagcaccctctggtgagaagaggtcccccctttttatgtgcactaccccaccatctgtgattataataaatttattattcctgtgaaaacacacagaagaagagaacgagcaacacacgccagaaaaacagaacagaacagaacaagcagggcgggcgacacgcagagagagtacgcccagagcgggcagacacacgtagacacgcaaccaaggatatgtcgagaaacaaagggagcccccgagagaagagaagcgatgatgtatctatcagacacgctgtcgagacggcgagtgctgtgtattatcacggcgttggcagaggcggatacaaaggttaacgaggggaagaactttagttaggaggacgatacttgtattcggagaggagggaagaaaaatggggggacatgtacgtaaggaggaagtgtgacgctttaggtgagatat

SEQ ID NO: 368898 - DNA, 3503 bp, Homo sapiens
tgcagcccccgcaagacgggcagcccccgcaagacgctgggaccacagcgaggatgccatgaggaaagctggtgtggcacacagtaaatccagcaaggatatggagagccatgttttcctgaaggccaagacccgggacgaatacctttctctcgtggccaggctcattatccattttcgagacattcataacaagaaatctcaagcttccgtcagtgatcctatgaatgcactccagagcctgactggcggacctgctgcgggagccgctggaattggcatgcctcctcggggcccgggacagtctctgggcgggatgggtagccttggtgccatgggacagccaatgtctctctcagggcagccgcctcctgggacctcggggatggcccctcacagcatggctgtcgtgtctacggcaactccacagacccagctgcagctccagcaggtggcgctgcagcagcagcagcaacagcagcagttccagcagcagcagcaggcggcgctacagcagcagcagcagcagcagcaacagcagcagttccaggctcagcagagtgccatgcagcagcagttccaagcagtagtgcagcagcagcagcagctccagcagcagcagcagcagcagcagcatctaattaaattgcatcatcaaaatcagcaacagatacagcagcagcaacagcagctgcagcgaatagcacagctgcagctccaacaacagcaacagcagcagcagcagcagcagcagcagcagcagcaggctttgcaggcccagccaccaattcagcagccaccgatgcagcagccacagcctccgccctcccaggctctgccccagcagctgcagcagatgcatcacacacagcaccaccagccgccaccacagccccagcagcctccagttgctcagaaccaaccatcacaactcccgccacagtcgcagacccagcctttggtgtcacaggcgcaagctctccctggacaaatgttgtatacccaaccaccactgaaatttgtccgagctccgatggtggtgcagcagcccccagtgcagccccaggtgcagcagcagcagacagcagtacagacagctcaggctgcccagatggtggctcccggagtccaggtcagccagagcagcctccccatgctgtcctcgccgtcaccgggccagcaggtgcagaccccgcagtcgatgccccctcccccccagccgtccccgcagcccggccagcccagctcacagcccaactccaacgtcagctctggccctgccccatctcccagtagcttcctgcccagcccctcaccgcagccctcccagagcccagtgacggcgcggaccccacagaacttcagtgtcccctcacctggacctttaaacacacctgtgaaccccagctctgtcatgagcccagctggctccagccaggctgaggagcagcagtacctggacaagctgaagcagctgtcgaagtacatcgagcccctgcgccgcatgatcaacaagatcgacaagaacgaagacagaaaaaaggacctgagtaagatgaagagccttctggacattctgacagacccctcgaagcggtgtcccctgaagaccttgcaaaagtgtgagatcgccctggagaaactcaagaatgacatggcggtgcccactcccccaccgcccccggtgccaccgaccaaacagcagtacctatgccagccgctcctggatgccgtcctggccaacatccgctcacctgtcttcaaccattccctgtaccgcacattcgttccagccatgaccgccattcacggcccacccatcacggccccagtggtgtgcacccggaagcgcaggcttgaggatgatgagcggcagagcatccccagtgtgctccagggtgaggtggccaggctggaccccaagttcctggtaaacctggacccttctcactgcagcaacaatggcactgtccacctgatctgcaagctggatgacaaggacctcccaagtgtgccaccactggagctcagtgtgcccgctgactatcctgcccaaagcccgctgtggatagaccggcagtggcagtacgacgccaaccccttcctccagtcggtgcaccgctgcatgacctccaggctgctgcagctcccggacaagcactcggtcaccgccttgctcaacacctgggcccagagcgtccaccaggcctgcctctcagccgcctagccaagactgcagggatggcccgcagcctcatcggggccaaggacacacgcctcctgtcagacacttctaggtgttggcttccttagagagcctggggttaggttagctttcctgcttttatcttctgccttggggacctgccaaacgaaatcccacacctgtacagaactgggataggcgcagtggagcgggttgcttggggggcgttggccgacttcttagagaaggccctccatgtgacttcctcccaggagccagatgcgatcctcaggctgctctcaccgtggcctgtccacggtccaggtccatctcagcagcgtgagggtgcactcagggtgttgttagagcgtctcgtgtgtgctagacgcacccctactcgttcctatagaacacagaggacataggaaacccttaaaacacacatgggattctctggtcacagttttgggttcaggctatgctgctttgggcaggtggagcaccccccgaggaagcctgcaagtccagggcacaggctgccttttggagggagggctggcccataggtgctgctggctccccgccaccagctgggcctcagccctcacggcattcctgctgagcaccgtggggcacccagggagcaggggcgtcagggatcctgctgccggcacccctgtgccgctggcatgagggccgtgtccccactgtgaaggatgaagagcaaggccctcaggacccgtgtcctcagagcaccacacactgagcacccagagacagcgggcctggcagcgggccgggccatgcagggagcgcctccctatgttgcctgccactctgggcaccggccagcaccctctggtgagaagaggtcccccctttttatgtgcactaccccaccatctgtgattataataaatttattattcctgtgaaaacacacagaagaagagaacgagcaacacacgccagaaaaacagaacagaacagaacaagcagggcgggcgacacgcagagagagtacgcccagagcgggcagacacacgtagacacgcaaccaaggatatgtcgagaaacaaagggagcccccgagagaagagaagcgatgatgtatctatcagacacgctgtcgagacggcgagtgctgtgtattatcacggcgttggcagaggcggatacaaaggttaacgaggggaagaactttagttaggaggacgatacttgtattcggagaggagggaagaaaaatggggggacatgtacgtaaggaggaagtgtgacgctttaggtgagatat

SEQ ID NO: 368899 - DNA, 3598 bp, Homo sapiens
tgcagcccccgcaagacgggcagcccccgcaagacgctgggaccacagcgaggatgccatgaggaaagctggtgtggcacacagtaaatccagcaaggatatggagagccatgttttcctgaaggccaagacccgggacgaatacctttctctcgtggccaggctcattatccattttcgagacattcataacaagaaatctcaagcttccgtcagtgatcctatgaatgcactccagagcctgactggcggacctgctgcgggagccgctggaattggcatgcctcctcggggcccgggacagtctctgggcgggatgggtagccttggtgccatgggacagccaatgtctctctcagggcagccgcctcctgggacctcggggatggcccctcacagcatggctgtcgtgtctacggcaactccacagacccagctgcagctccagcaggtggcgctgcagcagcagcagcaacagcagcagttccagcagcagcagcaggcggcgctacagcagcagcagcagcagcagcaacagcagcagttccaggctcagcagagtgccatgcagcagcagttccaagcagtagtgcagcagcagcagcagctccagcagcagcagcagcagcagcagcatctaattaaattgcatcatcaaaatcagcaacagatacagcagcagcaacagcagctgcagcgaatagcacagctgcagctccaacaacagcaacagcagcagcagcagcagcagcagcagcagcagcaggctttgcaggcccagccaccaattcagcagccaccgatgcagcagccacagcctccgccctcccaggctctgccccagcagctgcagcagatgcatcacacacagcaccaccagccgccaccacagccccagcagcctccagttgctcagaaccaaccatcacaactcccgccacagtcgcagacccagcctttggtgtcacaggcgcaagctctccctggacaaatgttgtatacccaaccaccactgaaatttgtccgagctccgatggtggtgcagcagcccccagtgcagccccaggtgcagcagcagcagacagcagtacagacagctcaggctgcccagatggtggctcccggagtccaggtcagccagagcagcctccccatgctgtcctcgccgtcaccgggccagcaggtgcagaccccgcagtcgatgccccctcccccccagccgtccccgcagcccggccagcccagctcacagcccaactccaacgtcagctctggccctgccccatctcccagtagcttcctgcccagcccctcaccgcagccctcccagagcccagtgacggcgcggaccccacagaacttcagtgtcccctcacctggacctttaaacacacctgtgaaccccagctctgtcatgagcccagctggctccagccaggctgaggagcagcagtacctggacaagctgaagcagctgtcgaagtacatcgagcccctgcgccgcatgatcaacaagatcgacaagaacgaagacagaaaaaaggacctgagtaagatgaagagccttctggacattctgacagacccctcgaagcggtgtcccctgaagaccttgcaaaagtgtgagatcgccctggagaaactcaagaatgacatggcggtgcccactcccccaccgcccccggtgccaccgaccaaacagcagtacctatgccagccgctcctggatgccgtcctggccaacatccgctcacctgtcttcaaccattccctgtaccgcacattcgttccagccatgaccgccattcacggcccacccatcacggccccagtggtgtgcacccggaagcgcaggcttgaggatgatgagcggcagagcatccccagtgtgctccagggtgaggtggccaggctggaccccaagttcctggtaaacctggacccttctcactgcagcaacaatggcactgtccacctgatctgcaagctggatgacaaggacctcccaagtgtgccaccactggagctcagtgtgcccgctgactatcctgcccaaagcccgctgtggatagaccggcagtggcagtacgacgccaaccccttcctccagtcggtgcaccgctgcatgacctccaggctgctgcagctcccggacaagcactcggtcaccgccttgctcaacacctgggcccagagcgtccaccaggcctgcctctcagccgcctagccaagactgcagggatggcccgcagcctcatcggggccaaggacacacgcctcctgtcagacacttctaggtgttggcttccttagagagcctggggttaggttagctttcctgcttttatcttctgccttggggacctgccaaacgaaatcccacacctgtacagaactgggataggcgcagtggagcgggttgcttggggggcgttggccgacttcttagagaaggccctccatgtgacttcctcccaggagccagatgcgatcctcaggctgctctcaccgtggcctgtccacggtccaggtccatctcagcagcgtgagggtgcactcagggtgttgttagagcgtctcgtgtgtgctagacgcacccctactcgttcctatagaacacagaggacataggaaacccttaaaacacacatgggattctctggtcacagttttgggttcaggctatgctgctttgggcaggtggagcaccccccgaggaagcctgcaagtccagggcacaggctgccttttggagggagggctggcccataggtgctgctggctccccgccaccagctgggcctcagccctcacggcattcctgctgagcaccgtggggcacccagggagcaggggcgtcagggatcctgctgccggcacccctgtgccgctggcatgagggccgtgtccccactgtgaaggatgaagagcaaggccctcaggacccgtgtcctcagagcaccacacactgagcacccagagacagcgggcctggcagcgggccgggccatgcagggagcgcctccctatgttgcctgccactctgggcaccggccagcaccctctggtgagaagaggtcccccctttttatgtgcactaccccaccatctgtgattataataaatttattattcctgtgttaaaaaaaaaaaaaaaaaaaaaaaaaaaaaaaaaaaaaaaaaaaaaaaaaaaaagggggggccatcccccggaggggcgcccaagttttagcggttcccccagttttttgtgtcaaaagggagcccccattgaggagagcactatttatatacaccagaggagcgggcccgctgttattaaaagggcctggtgaagtgtggaaaacgagttagacggtggacctcttgggggaggagaacccttaacttgctggtggggtggacacattatgtgggcccacacatccctaaagagaatatttaagagcccttaagagaaacaatataaaattctcgaagggttatcaatggtggattaacaccaagcggcgcatatagtctggccagctgagagaagttggcctccggagattattattggaacaatttttttctaccgggggctatggtgtaatac

SEQ ID NO: 368900 - DNA, 3164 bp, Homo sapiens
tgcagcccccgcaagacgggcagcccccgcaagacgctgggaccacagcgaggatgccatgaggaaagctggtgtggcacacagtaaatccagcaaggatatggagagccatgttttcctgaaggccaagacccgggacgaatacctttctctcgtggccaggctcattatccattttcgagacattcataacaagaaatctcaagcttccgtcagtgatcctatgaatgcactccagagcctgactggcggacctgctgcgggagccgctggaattggcatgcctcctcggggcccgggacagtctctgggcgggatgggtagccttggtgccatgggacagccaatgtctctctcagggcagccgcctcctgggacctcggggatggcccctcacagcatggctgtcgtgtctacggcaactccacagacccagctgcagctccagcaggtggcgctgcagcagcagcagcaacagcagcagttccagcagcagcagcaggcggcgctacagcagcagcagcagcagcagcaacagcagcagttccaggctcagcagagtgccatgcagcagcagttccaagcagtagtgcagcagcagcagcagctccagcagcagcagcagcagcagcagcatctaattaaattgcatcatcaaaatcagcaacagatacagcagcagcaacagcagctgcagcgaatagcacagctgcagctccaacaacagcaacagcagcagcagcagcagcagcagcagcagcagcaggctttgcaggcccagccaccaattcagcagccaccgatgcagcagccacagcctccgccctcccaggctctgccccagcagctgcagcagatgcatcacacacagcaccaccagccgccaccacagccccagcagcctccagttgctcagaaccaaccatcacaactcccgccacagtcgcagacccagcctttggtgtcacaggcgcaagctctccctggacaaatgttgtatacccaaccaccactgaaatttgtccgagctccgatggtggtgcagcagcccccagtgcagccccaggtgcagcagcagcagacagcagtacagacagctcaggctgcccagatggtggctcccggagtccaggtcagccagagcagcctccccatgctgtcctcgccgtcaccgggccagcaggtgcagaccccgcagtcgatgccccctcccccccagccgtccccgcagcccggccagcccagctcacagcccaactccaacgtcagctctggccctgccccatctcccagtagcttcctgcccagcccctcaccgcagccctcccagagcccagtgacggcgcggaccccacagaacttcagtgtcccctcacctggacctttaaacacacctgtgaaccccagctctgtcatgagcccagctggctccagccaggctgaggagcagcagtacctggacaagctgaagcagctgtcgaagtacatcgagcccctgcgccgcatgatcaacaagatcgacaagaacgaagacagaaaaaaggacctgagtaagatgaagagccttctggacattctgacagacccctcgaagcggtgtcccctgaagaccttgcaaaagtgtgagatcgccctggagaaactcaagaatgacatggcggtgcccactcccccaccgcccccggtgccaccgaccaaacagcagtacctatgccagccgctcctggatgccgtcctggccaacatccgctcacctgtcttcaaccattccctgtaccgcacattcgttccagccatgaccgccattcacggcccacccatcacggccccagtggtgtgcacccggaagcgcaggcttgaggatgatgagcggcagagcatccccagtgtgctccagggtgaggtggccaggctggaccccaagttcctggtaaacctggacccttctcactgcagcaacaatggcactgtccacctgatctgcaagctggatgacaaggacctcccaagtgtgccaccactggagctcagtgtgcccgctgactatcctgcccaaagcccgctgtggatagaccggcagtggcagtacgacgccaaccccttcctccagtcggtgcaccgctgcatgacctccaggctgctgcagctcccggacaagcactcggtcaccgccttgctcaacacctgggcccagagcgtccaccaggcctgcctctcagccgcctagccaagactgcagggatggcccgcagcctcatcggggccaaggacacacgcctcctgtcagacacttctaggtgttggcttccttagagagcctggggttaggttagctttcctgcttttatcttctgccttggggacctgccaaacgaaatcccacacctgtacagaactgggataggcgcagtggagcgggttgcttggggggcgttggccgacttcttagagaaggccctccatgtgacttcctcccaggagccagatgcgatcctcaggctgctctcaccgtggcctgtccacggtccaggtccatctcagcagcgtgagggtgcactcagggtgttgttagagcgtctcgtgtgtgctagacgcacccctactcgttcctatagaacacagaggacataggaaacccttaaaacacacatgggattctctggtcacagttttgggttcaggctatgctgctttgggcaggtggagcaccccccgaggaagcctgcaagtccagggcacaggctgccttttggagggagggctggcccataggtgctgctggctccccgccaccagctgggcctcagccctcacggcattcctgctgagcaccgtggggcacccagggagcaggggcgtcagggatcctgctgccggcacccctgtgccgctggcatgagggccgtgtccccactgtgaaggatgaagagcaaggccctcaggacccgtgtcctcagagcaccacacactgagcacccagagacagcgggcctggcagcgggccgggccatgcagggagcgcctccctatgttgcctgccactctgggcaccggccagcaccctctggtgagaagaggtcccccctttttatgtgcactaccccaccatctgtgattataataaatttattattcctgtgtttgtcagttgttcaaaaaagtgt

SEQ ID NO: 368901 - DNA, 3963 bp, Homo sapiens
tgcagcccccgcaagacgggcagcccccgcaagacgctgggaccacagcgaggatgccatgaggaaagctggtgtggcacacagtaaatccagcaaggatatggagagccatgttttcctgaaggccaagacccgggacgaatacctttctctcgtggccaggctcattatccattttcgagacattcataacaagaaatctcaagcttccgtcagtgatcctatgaatgcactccagagcctgactggcggacctgctgcgggagccgctggaattggcatgcctcctcggggcccgggacagtctctgggcgggatgggtagccttggtgccatgggacagccaatgtctctctcagggcagccgcctcctgggacctcggggatggcccctcacagcatggctgtcgtgtctacggcaactccacagacccagctgcagctccagcaggtggcgctgcagcagcagcagcaacagcagcagttccagcagcagcagcaggcggcgctacagcagcagcagcagcagcagcaacagcagcagttccaggctcagcagagtgccatgcagcagcagttccaagcagtagtgcagcagcagcagcagctccagcagcagcagcagcagcagcagcatctaattaaattgcatcatcaaaatcagcaacagatacagcagcagcaacagcagctgcagcgaatagcacagctgcagctccaacaacagcaacagcagcagcagcagcagcagcagcagcagcagcaggctttgcaggcccagccaccaattcagcagccaccgatgcagcagccacagcctccgccctcccaggctctgccccagcagctgcagcagatgcatcacacacagcaccaccagccgccaccacagccccagcagcctccagttgctcagaaccaaccatcacaactcccgccacagtcgcagacccagcctttggtgtcacaggcgcaagctctccctggacaaatgttgtatacccaaccaccactgaaatttgtccgagctccgatggtggtgcagcagcccccagtgcagccccaggtgcagcagcagcagacagcagtacagacagctcaggctgcccagatggtggctcccggagtccaggtcagccagagcagcctccccatgctgtcctcgccgtcaccgggccagcaggtgcagaccccgcagtcgatgccccctcccccccagccgtccccgcagcccggccagcccagctcacagcccaactccaacgtcagctctggccctgccccatctcccagtagcttcctgcccagcccctcaccgcagccctcccagagcccagtgacggcgcggaccccacagaacttcagtgtcccctcacctggacctttaaacacacctgtgaaccccagctctgtcatgagcccagctggctccagccaggctgaggagcagcagtacctggacaagctgaagcagctgtcgaagtacatcgagcccctgcgccgcatgatcaacaagatcgacaagaacgaagacagaaaaaaggacctgagtaagatgaagagccttctggacattctgacagacccctcgaagcggtgtcccctgaagaccttgcaaaagtgtgagatcgccctggagaaactcaagaatgacatggcggtgcccactcccccaccgcccccggtgccaccgaccaaacagcagtacctatgccagccgctcctggatgccgtcctggccaacatccgctcacctgtcttcaaccattccctgtaccgcacattcgttccagccatgaccgccattcacggcccacccatcacggccccagtggtgtgcacccggaagcgcaggcttgaggatgatgagcggcagagcatccccagtgtgctccagggtgaggtggccaggctggaccccaagttcctggtaaacctggacccttctcactgcagcaacaatggcactgtccacctgatctgcaagctgggtgagtgtccagagggccgggactggtgtgggaaagcaggccctgaccgcagccccaggactctgccatccaagccagatggcacagcgcccagaacccaccctgtgttcacgccccgccaggctgtctgctctatcctcacacacaccgggctccagacagcctggccatgcctcagtccccactgccagagcccgcacactctcacctccccaacacagatgtggctttgcttgcctgggccctagggaggtggtaggcaggacctctgggcacccatcaatgcagagcactccaggcttcacgtttggaaatctgagagtcagagagacctcctccaggctttgccacaagcttcaccagaacctccctgggtgtggagtcctgttccagagcagggctgtgaggcagggcaggccggggcttgtccaggtcacagatagagccttctgtgttgcagatgacaaggacctcccaagtgtgccaccactggagctcagtgtgcccgctgactatcctgcccaaagcccgctgtggatagaccggcagtggcagtacgacgccaaccccttcctccagtcggtgcaccgctgcatgacctccaggctgctgcagctcccggacaagcactcggtcaccgccttgctcaacacctgggcccagagcgtccaccaggcctgcctctcagccgcctagccaagactgcagggatggcccgcagcctcatcggggccaaggacacacgcctcctgtcagacacttctaggtgttggcttccttagagagcctggggttaggttagctttcctgcttttatcttctgccttggggacctgccaaacgaaatcccacacctgtacagaactgggataggcgcagtggagcgggttgcttggggggcgttggccgacttcttagagaaggccctccatgtgacttcctcccaggagccagatgcgatcctcaggctgctctcaccgtggcctgtccacggtccaggtccatctcagcagcgtgagggtgcactcagggtgttgttagagcgtctcgtgtgtgctagacgcacccctactcgttcctatagaacacagaggacataggaaacccttaaaacacacatgggattctctggtcacagttttgggttcaggctatgctgctttgggcaggtggagcaccccccgaggaagcctgcaagtccagggcacaggctgccttttggagggagggctggcccataggtgctgctggctccccgccaccagctgggcctcagccctcacggcattcctgctgagcaccgtggggcacccagggagcaggggcgtcagggatcctgctgccggcacccctgtgccgctggcatgagggccgtgtccccactgtgaaggatgaagagcaaggccctcaggacccgtgtcctcagagcaccacacactgagcacccagagacagcgggcctggcagcgggccgggccatgcagggagcgcctccctatgttgcctgccactctgggcaccggccagcaccctctggtgagaagaggtcccccctttttatgtgcactaccccaccatctgtgattataataaatttattattcctgtgaaaacacacagaagaagagaacgagcaacacacgccagaaaaacagaacagaacagaacaagcagggcgggcgacacgcagagagagtacgcccagagcgggcagacacacgtagacacgcaaccaaggatatgtcgagaaacaaagggagcccccgagagaagagaagcgatgatgtatctatcagacacgctgtcgagacggcgagtgctgtgtattatcacggcgttggcagaggcggatacaaaggttaacgaggggaagaactttagttaggaggacgatacttgtattcggagaggagggaagaaaaatggggggacatgtacgtaaggaggaagtgtgacgctttaggtgagatat

SEQ ID NO: 368902 - DNA, 3188 bp, Homo sapiens
tgcagcccccgcaagacgggcagcccccgcaagacgctgggaccacagcgaggatgccatgaggaaagctggtgtggcacacagtaaatccagcaaggatatggagagccatgttttcctgaaggccaagacccgggacgaatacctttctctcgtggccaggctcattatccattttcgagacattcataacaagaaatctcaagcttccgtcagtgatcctatgaatgcactccagagcctgactggcggacctgctgcgggagccgctggaattggcatgcctcctcggggcccgggacagtctctgggcgggatgggtagccttggtgccatgggacagccaatgtctctctcagggcagccgcctcctgggacctcggggatggcccctcacagcatggctgtcgtgtctacggcaactccacagacccagctgcagctccagcaggtggcgctgcagcagcagcagcaacagcagcagttccagcagcagcagcaggcggcgctacagcagcagcagcagcagcagcaacagcagcagttccaggctcagcagagtgccatgcagcagcagttccaagcagtagtgcagcagcagcagcagctccagcagcagcagcagcagcagcagcatctaattaaattgcatcatcaaaatcagcaacagatacagcagcagcaacagcagctgcagcgaatagcacagctgcagctccaacaacagcaacagcagcagcagcagcagcagcagcagcagcagcaggctttgcaggcccagccaccaattcagcagccaccgatgcagcagccacagcctccgccctcccaggctctgccccagcagctgcagcagatgcatcacacacagcaccaccagccgccaccacagccccagcagcctccagttgctcagaaccaaccatcacaactcccgccacagtcgcagacccagcctttggtgtcacaggcgcaagctctccctggacaaatgttgtatacccaaccaccactgaaatttgtccgagctccgatggtggtgcagcagcccccagtgcagccccaggtgcagcagcagcagacagcagtacagacagctcaggctgcccagatggtggctcccggagtccaggtcagccagagcagcctccccatgctgtcctcgccgtcaccgggccagcaggtgcagaccccgcagtcgatgccccctcccccccagccgtccccgcagcccggccagcccagctcacagcccaactccaacgtcagctctggccctgccccatctcccagtagcttcctgcccagcccctcaccgcagccctcccagagcccagtgacggcgcggaccccacagaacttcagtgtcccctcacctggacctttaaacacacctgtgaaccccagctctgtcatgagcccagctggctccagccaggctgaggagcagcagtacctggacaagctgaagcagctgtcgaagtacatcgagcccctgcgccgcatgatcaacaagatcgacaagaacgaagacagaaaaaaggacctgagtaagatgaagagccttctggacattctgacagacccctcgaagcggtgtcccctgaagaccttgcaaaagtgtgagatcgccctggagaaactcaagaatgacatggcggtgcccactcccccaccgcccccggtgccaccgaccaaacagcagtacctatgccagccgctcctggatgccgtcctggccaacatccgctcacctgtcttcaaccattccctgtaccgcacattcgttccagccatgaccgccattcacggcccacccatcacggccccagtggtgtgcacccggaagcgcaggcttgaggatgatgagcggcagagcatccccagtgtgctccagggtgaggtggccaggctggaccccaagttcctggtaaacctggacccttctcactgcagcaacaatggcactgtccacctgatctgcaagctggatgacaaggacctcccaagtgtgccaccactggagctcagtgtgcccgctgactatcctgcccaaagcccgctgtggatagaccggcagtggcagtacgacgccaaccccttcctccagtcggtgcaccgctgcatgacctccaggctgctgcagctcccggacaagcactcggtcaccgccttgctcaacacctgggcccagagcgtccaccaggcctgcctctcagccgcctagccaagactgcagggatggcccgcagcctcatcggggccaaggacacacgcctcctgtcagacacttctaggtgttggcttccttagagagcctggggttaggttagctttcctgcttttatcttctgcccactgtgaaggatgaagagcaaggccctcaggacccgtgtcctcagagcaccacacactgagcacccagagacagcgggcctggcagcgggccgggccatgcagggagcgcctccctatgttgcctgccactctgggcaccggccagcaccctctggtgagaagaggtcccccctttttatgtgcactaccccaccatctgtgattataataaatttattattcctgtgttaaaaaaaaaaaaaaaaaaaaaaaaaaaaaaaaaaaaaaaaaaaaaaaaaaagaaaacaagaaaaaaaaagaagaggggcggcggcgccctcaagaagattcgtccgccggaggagagccaccaaatgtgcgacacgacccccatttttgttgtcaaagaggggcccccacaaagggaggccgctattaagaaggcggagcgaagggccgccgacgatttaaaacacagacggcccggacggggggaaagacaccggctcgcctccgggaggagaaccctccgaggagaaaggagggcacccctaccatctctgtgggcggggggcggccaacaactactggggcggcgcacaacatctcaccacccaccagagagcgatagtactactaaacgcccctctacaaggggagcgacatatatctatatcaacatatctttaccaaggcgagtgcatatataaatctgcgggcgcaaaacacacctcaagcgcagaagaattatcttgcctcgtcgccggcgtacgtagaagcaaattatactcttctcgctccaaccaacccggaggatacttcaatctcgtattgacagcacaaacattttt

SEQ ID NO: 368903 - DNA, 1422 bp, Homo sapiens
tgcagcccccgcaagacgggcagcccccgcaagacgctgggaccacagcgaggatgccatgaggaaagctggtgtggcacacagtaaatccagcaaggatatggagagccatgttttcctgaaggccaagacccgggacgaatacctttctctcgtggccaggctcattatccattttcgagacattcataacaagaaatctcaagcttccgtcagtgatcctatgaatgcactccagagcctgactggcggacctgctgcgggagccgctggaattggcatgcctcctcggggcccgggacagtctctgggcgggatgggtagccttggtgccatgggacagccaatgtctctctcagggcagccgcctcctgggacctcggggatggcccctcacagcatggctgtcgtgtctacggcaactccacagacccagctgcagctccagcaggtggcgctgcagcagcagcagcaacagcagcagttccagcagcagcagcaggcggcgctacagcagcagcagcagcagcagcaacagcagcagttccaggctcagcagagtgccatgcagcagcagttccaagcagtagtgcagcagcagcagcagctccagcagcagcagcagcagcagcagcatctaattaaattgcatcatcaaaatcagcaacagatacagcagcagcaacagcagctgcagcgaatagcacagctgcagctccaacaacagcaacagcagcagcagcagcagcagcagcagcagcagcaggctttgcaggcccagccaccaattcagcagccaccgatgcagcagccacagcctccgccctcccaggctctgccccagcagctgcagcagatgcatcacacacagcaccaccagccgccaccacagccccagcagcctccagttgctcagaaccaaccatcacaactcccgccacagtcgcagacccagcctttggtgtcacaggcgcaagctctccctggacaaatgttgtatacccaaccaccactgaaatttgtccgagctccgatggtggtgcagcagcccccagtgcagccccaggtgcagcagcagcagacagcagtacagacagctcaggctgcccagatggtggctcccggagtccaggtgagggcctgggggtggagggctccatagtcatcagcaggtgcatgttcacctgcgcatgtagtgctacagtgagggttctggttggattaggggctgggggctaagttggtaaagcaggggcttctctcccccttgcactctgcaagacacccctggagtccttggggtgggcagctgtgcttggtcatgtctaggacccaccagccgcatagtgcgtgtcgtttccagctttgctcgggcatccttcattatccctcttccttgccactctgagtgactctgggaac

SEQ ID NO: 368904 - DNA, 548 bp, Homo sapiens
aaaataacacagaaaaactgataacatgccacgacatgggcgaactcgtaaatattatgctaaagaagctagtcacaaaagagcacatgttcgatgccattcgtacaaagagtccggaagtggccaatccatagagacagagaggagattactgattgccagagtctaggcttcttatttatccaaaagacttagttgtcccttttcttttgtctttggttattatagagtaactcatgataggaaatcccaaaatcaacacaaatgctacttcgtattctatctttctgtctgtggtaaatggaacgttcagattccagcggcagccgtggcagtggggcttttgctggctgttttgtcccttgctgtgcagccctgcagcgtttctgggaatctgccctgtggactgactggcgactctggtcttttctcagcccagctgcagctccagcaggtggcgctgcagcagcagcagcaacagcagcagttccagcagcagcagcaggcggcgctacagcagcagcagcagcagcagcaacagcagcagt

SEQ ID NO: 368905 - DNA, 502 bp, Homo sapiens
atccctgccattgatgagctctcaggacttacagttctgtgtatgttttggcttttgttatagttgtttgaatgcatatctgtctctcctgttaggttgccagcttcttgaagaataaaattttatcagcatattttatttatattatatggacaattatatttctatatttttttgctatgccccaccatatctaattttacatatgggacctgtaagattttgatccttctcctaaaatgtttttggtaaatgctgatctcctgtgagagccacctgagtgaggaatctcaatgtgtaggaaagtgagacattctttaatgagagactggaagagtttggttgttaagtgggctcagaaaatgtctgttgtggcaagcctgtggccccatctactcaggatactgaggttggaggatcacttggacccaggagattgaggctatagtgagccatgattgcacctctgcactctagcctgggtgaaaaagtgagactgtct

SEQ ID NO: 368906 - DNA, 486 bp, Homo sapiens
aaggccacctcattagtgctcctgacactgcggaacttttctttctcaaggctgttgtcactggggatggttgaaagtgactattttcctaagaaaacagctggaggggacatgggagcaagaaggtgcttgggagcgcatctcagtgttgaggctcaaaacaggcagcgccatggcagagtcattccgccgtcaccctgaataaaccccaaccccagctccttcctcagggtgtcgtagcacagggatgcttttggtctaattcaggagagcatcatgtgatatgcttttaaagtaatgagttaaaatgttagacaatatgaaactctattatgtgatatattagatttcatgtcattacattgtattatattatatttttaggtggtatgctatgtgacataggatgcgatgtgatattacatcccatgacactatgttacacagtgttggattaaatgcctgtgtctctggctagactgtgag

SEQ ID NO: 368907 - DNA, 540 bp, Homo sapiens
agcttaatggttatgagcagggactctggagtcctcgattcaagtcctgacatcgtaagtaagataactgatgtattatttaaccatcctgagccttagtttccttatctataagatagggataataatacctgtgtctcagaggtgttaaggctcaaggggaaacctatgtagtatgtaacacaggacgctcacaggaggtgttcagtatatcggctatcagattttacaggaccaaccagacggggggtcataaagctgggctgaatttgaagtgaatttgccaaaaacggaggctgctctgcagaagtatcatgggccagagcatattgtttcttgcagaaaacaatatggaaggttctgtgtatgtatctagaaggttaggtttatgtatcttgcaggagtcatttgtcactttctaggatgttattccttctggctttgttttagtttctttttaaatgagtaactggccacaatcatgtatacacacattcacaatgacttttctcaacttggtcaattaaattgcctcttcaa

SEQ ID NO: 368908 - DNA, 264 bp, Homo sapiens
attatatcactggtattctttttcatttaactatatgtgaacattttgccatttctttaaaaaatattcacaaacatcattttaatgcctgaatggtatttcatttagatacaaattagttaagtatgtatatattaataattctccattgtccgtttaggacatgtgacacatccatttaggaactcattttggtgtctttagtttcctgctattataaataatactgtgggccaggcgcagtggcttaggcctgtaatccca

SEQ ID NO: 368909 - DNA, 294 bp, Homo sapiens
gatactatgcttttcccatggtcttcacaacttgcaggccaggagattcccttgggtgcctatgccaccagggccctgagtttcaagcacaaaactgggcagccgtttgggcggacactgagctagctgcaagagttttctttttttcataacccagtggtgcctggaatgccagcgagacagaaccgttcactcccctggaaaggggctgaagccagggagccaagtgatctagctcagcgatcctacggatcctacgaccgcagagcccagcaagctaagatccattggctt

SEQ ID NO: 368910 - DNA, 412 bp, Homo sapiens
taacaaaattgaccatcttaaccatttaagtgtacagttcagtggtaattacactcacgttgttgtacaacccatctttagaacttccaacaggaatacttttgtccagtgatatttacaaacatctctgatatctccttggggtagcaggttcccagcagtggaattacaaaaagaagtacaaaataatgaaagtattgagtccctctataccccgcaaaagacaaccacttttgatggtcgctcctgctttgtttctatagtacgtaaccaacagtaacacatttgcccattcccccagcattggacaggtaagaggtcccctgttttctgctaaaaaataacattcttgtatattaagatttaaaggcatctctgatatttttatcagactatgaaagtgagtttactg

SEQ ID NO: 368911 - DNA, 150 bp, Homo sapiens
atgaataatcttttccctattataaaagtaatatgtgttttttctagaaaacctggaaaatacaaccagcaacaatgcagtcctcagaattaactgctattaatatattttcttctatggatattgaagaaaatatattgttttcaccta

SEQ ID NO: 368912 - DNA, 370 bp, Homo sapiens
gtaaaacttcatttctactaaaaacacaaaaatcagccaggtgtggtggcacgtgcctgtaatcccagctactcaggagactgaggcaggagaatcacttgaacccgggaggcagaggttgcagtgagctgagatcacaccactgcactccagcctgggcgacacagcaagactccacctcaaaaaaataaaaaataaataaataaataaaagacggaaaagctatgttcttaacatttttgaaatgataattcatactaaaaaatgttaccaatattaatgcacaaagcattttataagttttagactattaataaaagatactaaaactgaatttaagtatttgtagccataattaacactataagtt

SEQ ID NO: 368913 - DNA, 410 bp, Homo sapiens
ctcagcctcccaagtagctgggactacagacacctgccaccacacccggctaattttttgtatttttagtagagacagggtttcaccgtgttagtgaggatgatatcaatctcttgacctcgtgatccacccgcctcggcctcccaaagtgctgggattacaggcgtaagccaccgtgcccagcctccctggcctattttcttagagagagggtctcaccatgttgctcaggttggtctcaaactcctgccctttagtgatcctcttgcctcagcctcctgaatagctgggattatactcatgagctatagcactcagctggatcgggggggttaaacacaacctctaaccaatgactgaccaccaagctatgctgacccacagacaatccctactaggccaggttttac

SEQ ID NO: 368914 - DNA, 240 bp, Homo sapiens
tttacatttgactcattaaacaagtagagagatgttcacacatctcaactaatagtaataggtaatttttaaatgatgtttacttgtaagtaatgtgtcagtaagcatcagcaaaaaatgttactttagagatatttaatcatttagtttaatgccatcctttctcttctttcatgtactcagcaaaatcatattcagcagttactatgtggcaacactatgtggcaacaatggaaatct

SEQ ID NO: 368915 - DNA, 908 bp, Homo sapiens
attttagcagggagtttcagcagccaggcttgcagagaattacttacattcttgcagcaatgttatgtgccctgagtgctttttctctctggcctctcaactctgttttaatgggatatgacaagaataacccaatttgtgtaaacttccatagtgcaattattgtttacttctttgactagcctaactcttcattttgtgtagagaaccagacattttatttaggtgctttagataatgtctatcactttgtctcccatatagagcctatgtaatactttgcacatggagatatctcataagaacttggaaaatgtttcttcctttttgaaatgattctttatattttaatggtgcttgttagctacaaggaagtaaataatatttggctaatgatactgtggtctagagtagaagatatgtgtctgtgtgaatgctgtcaattatagatcttcctaatacctttgactctggggtgggacagcccatgtgcaaggagagatactgctaaggaagatactagcaacatctgtgtttaaaatgaagttgtcatctcatgtgtgtgtcaagcagatatgcatcctctatttaccactagagagcctgaaggacagaaaatgagagcaagtgggaatgcagcactaggtacctggagccagatggctgtggagttgaggaagtccctgaacatagcactttgttcctggcagcggggattattggggttaagtttaaatctcatcttgtctcttcttttagatcatgaattccttgaaaataaggataatgtgttacacttttttgtttcccaaatggcttgaaatagttctttaaacataggcacatattcaaccactattaaatgatttggcccttgtcttgtttgctacttttttctcttactctag

SEQ ID NO: 368916 - DNA, 1938 bp, Homo sapiens
ccgctttatttctctgcgagcatcactaaattctgctgtcatcaagagcagatatatagtagttgactcagtaagtgtaaatgctcagaataagttaaatatgtggttacagtttttgtttaacatccaggtacagctatggatgcacttaatagcatgcagaatttcttacggggtcgtcctaaaaccttcaagtctctggagaatgctattgaatggagtgtgaagagtggccagattcgaaatctggagtctgcccgtgtctcaatggttggccaagtcaaacagtgtgaaggaattacaagtccagaaggctcaaaatctatagtggaaggaatcatagaggaagaagaagaagatgaggaaggaagtgagtctataagcaagaggaaaaaggaagatgacatggagaccaagaaagaccatccatacacctggagaattgaactggcaaaaacagaaaaatactgggacggctggttccgaggcttatccaatctctttcttagttgtcccattcctaaattgctgctcttggctggtgttgatagattggataaagatctgaccattggccagatgcaagggaagttccagatgcaggtcctaccccagtgtggccatgcagtccatgaggatgcccctgacaaggtagctgaagctgttgccactttcctgatccggcacaggtttgcagaacccatcggtggattccagtgtgtgtttcctggctgttagtgacctgctgtccacccctcctcaacatcgagctctgttgtaaatacgtcgcaccagaggccactgtgatgccactgtctcctctccatcccgcccagccatgtgacactggctcccggtagacgggcaccccgagatgtaccaaccttttcatgtattctgccaaaagcattgttttccagggcccttgaccaacatcggcttccccagtccagggctcccctgctcctttcccttccctgtactggggtagctcctgcctgctctccctgcgttgcctagggtaaagcctccagatttgccatactgagcccctcttcctagcatcaggcgatacatctgagttcaaatgtcttcccaggctcagggacctccattccttgagattgtcttggcatggcccagccctgcctcatgggatggacaatgcatggggtggtctttatttttccctttcaaataaaacactagtcaggtaccgttttatcccagtcgtactcttccaggtttggaagacccagagaggccaagatcccatccttagccatagcgagcggtggtggtggatagcatcacaagaaacgagcctgaaaatcaggtccagccggtccaagcacatggcctcccatctgggagagcccactgtcccactcccacatgtctgggcacctgccctgggctgaggccaggctgctccaggggcctcctgcgccctcacctgccacagagcaacccaggttaaatacagcccatgcacaaagccacaggccaaagcctatggaattgtttttaatcatcaaatttaaccattttcataactggttcctggaggtgtgcagtgcccccttgcctcttcaaacctacagcttctctttgccatttgtggatttcacatcactccacacagaaacattacagcctggcatccccagtctttgccttcttccagctgcctcgacacagcactgtggcctgtccctattgcccaggcacgccatttccaagggcaggaaggggcagtgtcctgaagcccatcttttctgtgactgtcttaggtgatgtgtagccccctccacctttccactcaacaacctcccacccctgtcctgctgcatggtccggagtctgggacctactttgttttttgttatttatgaccttgtttaaagaaaataaatatctcccaacctttaaaaaaat

SEQ ID NO: 368917 - DNA, 1056 bp, Homo sapiens
attttagcagggagtttcagcagccaggcttgcagagaattacttacattcttgcagcaatgttatgtgccctgagtgctttttctctctggcctctcaactctgttttaatgggatatgacaagaataacccaatttgtgtaaacttccatagtgcaattattgtttacttctttgactagcctaactcttcattttgtgtagagaaccagacattttatttaggtgctttagataatgtctatcactttgtctcccatatagagcctatgtaatactttgcacatggagatatctcataagaacttggaaaatgtttcttcctttttgaaatgattctttatattttaatggtgcttgttagctacaaggaagtaaataatatttggctaatgatactgtggtctagagtagaagatatgtgtctgtgtgaatgctgtcaattatagatcttcctaatacctttgactctggggtgggacagcccatgtgcaaggagagatactgctaaggaagatactagcaacatctgtgtttaaaatgaagttgtcatctcatgtgtgtgtcaagcagatatgcatcctctatttaccactagagagcctgaaggacagaaaatgagagcaagtgggaatgcagcactaggtacctggagccagatggctgtggagttgaggaagtccctgaacatagcactttgttcctggcagcggggattattggggttaagtttaaatctcatcttgtctcttcttttagatcatgaattccttgaaaataaggataatgtgttacacttttttgtttcccaaatggcttgaaatagttctttaaacataggcacatattcaaccactattaaatgatttggcccttgtcttgtttgctacttttttctcttactctaggataaattgtgtgacttgtccataagtaccaggctctgtcatgtctctggaccagtactgtccaatagaaatagagtgcaaaccacgtatgtcattttaaatttcttagtagacactttaaatagataaaaagaaacaataaattaat

SEQ ID NO: 368918 - DNA, 717 bp, Homo sapiens
gtgaaagtcgtcgggttcccagccgggagtctgcggagttctcatactctgttacccagcttcctttgtatgagtgctgttgcgcacttccggtggaagcgctgaagcgagtgggtggagtttacggagccggtgggcggtaggcggtgctacgggtagctgggtgctgtccaaaggcgacagggcgtcgttaggggagcgagtcgtgaccggttgggccacactcaacgtgggacgaagcttcgcctactgtttgactacgtgcgtgcagcctcccctcgatgtcggccctcgaaaagagcatgcacctcggccgccttccctctcgcccacctctacccggcagcgggggcagtcagagcggagccaagatgcgaatgggccctggaagaaagcgggacttttcccctgttccttggagtcagtattttgagtccatggaagatgtagaagtagagaatgaaactggcaaggatacttttcgagtctacaagagtggttcagagggtccagtcctgctccttctgcatggaggaggtcattctgccctttcttgggctgtgttcacggataaattgtgtgacttgtccataagtaccaggctctgtcatgtctctggaccagtactgtccaatagaaatagagtgcaaaccacgtatgtcattttaaatttcttagtagacactttaaatagataaaaagaaacaataaattaat

SEQ ID NO: 368919 - DNA, 221 bp, Homo sapiens
caaatttcgttgaccccatttgagctaccccacaccatggaggtggggcctcaatttaaggccttccctgtagaagggggttgtggcaaaaacctccctttacgatcaacaacctcccacccctgtcctgctgcatggtccggagtctgggacctactttgttttttgttatttatgaccttgtttaaagaaaataaatatctcccaacctttaaaaaaat

SEQ ID NO: 368920 - DNA, 2642 bp, Homo sapiens
gtgaaagtcgtcgggttcccagccgggagtctgcggagttctcatactctgttacccagcttcctttgtatgagtgctgttgcgcacttccggtggaagcgctgaagcgagtgggtggagtttacggagccggtgggcggtaggcggtgctacgggtagctgggtgctgtccaaaggcgacagggcgtcgttaggggagcgagtcgtgaccggttgggccacactcaacgtgggacgaagcttcgcctactgtttgactacgtgcgtgcagcctcccctcgatgtcggccctcgaaaagagcatgcacctcggccgccttccctctcgcccacctctacccggcagcgggggcagtcagagcggagccaagatgcgaatgggccctggaagaaagcgggacttttcccctgttccttggagtcagtattttgagtccatggaagatgtagaagtagagaatgaaactggcaaggatacttttcgagtctacaagagtggttcagagggtccagtcctgctccttctgcatggaggaggtcattctgccctttcttgggctgtgttcacggcagcgattattagtagagttcagtgtaggattgtagctttggatctgcgaagtcatggtgaaacaaaggtcaagaatcctgaagatctgtctgcagaaacaatggcaaaagacgttggcaatgtggttgaagccatgtatggggaccttcctcctccaattatgctgattggacatagcatgggtggtgctattgcagtccacacagcatcatccaacctggtaccaagcctcttgggtctgtgcatgattgatgttgtagaaggtacagctatggatgcacttaatagcatgcagaatttcttacggggtcgtcctaaaaccttcaagtctctggagaatgctattgaatggagtgtgaagagtggccagattcgaaatctggagtctgcccgtgtctcaatggttggccaagtcaaacagtgtgaaggaattacaagtccagaaggctcaaaatctatagtggaaggaatcatagaggaagaagaagaagatgaggaaggaagtgagtctataagcaagaggaaaaaggaagatgacatggagaccaagaaagaccatccatacacctggagaattgaactggcaaaaacagaaaaatactgggacggctggttccgaggcttatccaatctctttcttagttgtcccattcctaaattgctgctcttggctggtgttgatagattggataaagatctgaccattggccagatgcaagggaagttccagatgcaggtcctaccccagtgtggccatgcagtccatgaggatgcccctgacaaggtagctgaagctgttgccactttcctgatccggcacaggtttgcagaacccatcggtggattccagtgtgtgtttcctggctgttagtgacctgctgtccacccctcctcaacatcgagctctgttgtaaatacgtcgcaccagaggccactgtgatgccactgtctcctctccatcccgcccagccatgtgacactggctcccggtagacgggcaccccgagatgtaccaaccttttcatgtattctgccaaaagcattgttttccagggcccttgaccaacatcggcttccccagtccagggctcccctgctcctttcccttccctgtactggggtagctcctgcctgctctccctgcgttgcctagggtaaagcctccagatttgccatactgagcccctcttcctagcatcaggcgatacatctgagttcaaatgtcttcccaggctcagggacctccattccttgagattgtcttggcatggcccagccctgcctcatgggatggacaatgcatggggtggtctttatttttccctttcaaataaaacactagtcaggtaccgttttatcccagtcgtactcttccaggtttggaagacccagagaggccaagatcccatccttagccatagcgagcggtggtggtggatagcatcacaagaaacgagcctgaaaatcaggtccagccggtccaagcacatggcctcccatctgggagagcccactgtcccactcccacatgtctgggcacctgccctgggctgaggccaggctgctccaggggcctcctgcgccctcacctgccacagagcaacccaggttaaatacagcccatgcacaaagccacaggccaaagcctatggaattgtttttaatcatcaaatttaaccattttcataactggttcctggaggtgtgcagtgcccccttgcctcttcaaacctacagcttctctttgccatttgtggatttcacatcactccacacagaaacattacagcctggcatccccagtctttgccttcttccagctgcctcgacacagcactgtggcctgtccctattgcccaggcacgccatttccaagggcaggaaggggcagtgtcctgaagcccatcttttctgtgactgtcttaggtgatgtgtagccccctccacctttccactcaacaacctcccacccctgtcctgctgcatggtccggagtctgggacctactttgttttttgttatttatgaccttgtttaaagaaaataaatatctcccaacctttaaaaaaat

SEQ ID NO: 368921 - DNA, 2655 bp, Homo sapiens
gtgaaagtcgtcgggttcccagccgggagtctgcggagttctcatactctgttacccagcttcctttgtatgagtgctgttgcgcacttccggtggaagcgctgaagcgagtgggtggagtttacggagccggtgggcggtaggcggtgctacgggtagctgggtgctgtccaaaggcgacagggcgtcgttaggggagcgagtcgtgaccggttgggccacactcaacgtgggacgaagcttcgcctactgtttgactacgtgcgtgcagcctcccctcgatgtcggccctcgaaaagagcatgcacctcggccgccttccctctcgcccacctctacccggcagcgggggcagtcagagcggagccaagatgcgaatgggccctggaagaaagcgggacttttcccctgttccttggagtcagtattttgagtccatggaagatgtagaagtagagaatgaaactggcaaggatacttttcgagtctacaagagtggttcagagggtccagtcctgctccttctgcatggaggaggtcattctgccctttcttgggctgtgttcacgcagcgacttatcagtacgagttcagtgtaggactcgtacgcttcggatctgcgacagctcatggtgaaacaaaggtccaacacctcctgccacgatctgcctgcacaaaccatggccacacgacgtctgcgcaccgcggctcgacgccatgtatggggaccttcctcctccaattatgctgattggacatagcatgggtggtgctattgcagtccacacagcatcatccaacctggtaccaagcctcttgggtctgtgcatgattgatgttgtagaaggtacagctatggatgcacttaatagcatgcagaatttcttacggggtcgtcctaaaaccttcaagtctctggagaatgctattgaatggagtgtgaagagtggccagattcgaaatctggagtctgcccgtgtctcaatggttggccaagtcaaacagtgtgaaggaattacaagtccagaaggctcaaaatctatagtggaaggaatcatagaggaagaagaagaagatgaggaaggaagtgagtctataagcaagaggaaaaaggaagatgacatggagaccaagaaagaccatccatacacctggagaattgaactggcaaaaacagaaaaatactgggacggctggttccgaggcttatccaatctctttcttagttgtcccattcctaaattgctgctcttggctggtgttgatagattggataaagatctgaccattggccagatgcaagggaagttccagatgcaggtcctaccccagtgtggccatgcagtccatgaggatgcccctgacaaggtagctgaagctgttgccactttcctgatccggcacaggtttgcagaacccatcggtggattccagtgtgtgtttcctggctgttagtgacctgctgtccacccctcctcaacatcgagctctgttgtaaatacgtcgcaccagaggccactgtgatgccactgtctcctctccatcccgcccagccatgtgacactggctcccggtagacgggcaccccgagatgtaccaaccttttcatgtattctgccaaaagcattgttttccagggcccttgaccaacatcggcttccccagtccagggctcccctgctcctttcccttccctgtactggggtagctcctgcctgctctccctgcgttgcctagggtaaagcctccagatttgccatactgagcccctcttcctagcatcaggcgatacatctgagttcaaatgtcttcccaggctcagggacctccattccttgagattgtcttggcatggcccagccctgcctcatgggatggacaatgcatggggtggtctttatttttccctttcaaataaaacactagtcaggtaccgttttatcccagtcgtactcttccaggtttggaagacccagagaggccaagatcccatccttagccatagcgagcggtggtggtggatagcatcacaagaaacgagcctgaaaatcaggtccagccggtccaagcacatggcctcccatctgggagagcccactgtcccactcccacatgtctgggcacctgccctgggctgaggccaggctgctccaggggcctcctgcgccctcacctgccacagagcaacccaggttaaatacagcccatgcacaaagccacaggccaaagcctatggaattgtttttaatcatcaaatttaaccattttcataactggttcctggaggtgtgcagtgcccccttgcctcttcaaacctacagcttctctttgccatttgtggatttcacatcactccacacagaaacattacagcctggcatccccagtctttgccttcttccagctgcctcgacacagcactgtggcctgtccctattgcccaggcacgccatttccaagggcaggaaggggcagtgtcctgaagcccatcttttctgtgactgtcttaggtgatgtgtagccccctccacctttccactcaacaacctcccacccctgtcctgctgcatggtccggagtctgggacctactttgttttttgttatttatgaccttgtttaaagaaaataaatatctcccaacctttaaaaaaat

SEQ ID NO: 368922 - DNA, 2589 bp, Homo sapiens
gtgaaagtcgtcgggttcccagccgggagtctgcggagttctcatactctgttacccagcttcctttgtatgagtgctgttgcgcacttccggtggaagcgctgaagcgagtgggtggagtttacggagccggtgggcggtaggcggtgctacgggtagctgggtgctgtccaaaggcgacagggcgtcgttaggggagcgagtcgtgaccggttgggccacactcaacgtgggacgaagcttcgcctactgtttgactacgtgcgtgcagcctcccctcgatgtcggccctcgaaaagagcatgcacctcggccgccttccctctcgcccacctctacccggcagcgggggcagtcagagcggagccaagatgcgaatgggccctggaagaaagcgggacttttcccctgttccttggagtcagtattttgagtccatggaagatgtagaagtagagaatgaaactggcaaggatacttttcgagtctacaagagtggttcagagggtccagtcctgctccttctgcatggaggaggtcattctgccctttcttgggctgtgttcacggcagcgattattagtagagttcagtgtaggattgtagctttggatctgcgaagtcatggtgaaacaaaggtcaagaatcctgaagatctgtctgcagaaacaatggcaaaagacgttggcaatgtggttgaagccatgtatggggaccttcctcctccaattatgctgattggacatagcatgggtggtgctattgcagtccacacagcatcatccaacctggtaccaagcctcttgggtctgtgcatgattgatgttgtagaaggtacagctatggatgcacttaatagcatgcagaatttcttacggggtcgtcctaaaaccttcaagtctctggagaatgctattgaatggagtgtgaagagtggccagattcgaaatctggagtctgcccgtgtctcaatggttggccaagtcaaacagtgtgaaggaattacaagtccagaaggctcaaaatctatagtggaaggaatcatagaggaagaagaagaagatgaggaaggaagtgagtctataagcaagaggaaaaaggaagatgacatggagaccaagaaagaccatccatacacctggagaattgaactggcaaaaacagaaaaatactgggacggctggttccgaggcttatccaatctctttcttagttgtcccattcctaaattgctgctcttggctggtgttgatagattggataaagatctgaccattggccagatgcaagggaagttccagatgcaggtcctaccccagtgtggccatgcagtccatgaggatgcccctgacaaggtagctgaagctgttgccactttcctgatccggcacaggtttgcagaacccatcggtggattccagtgtgtgtttcctggctgttagtgacctgctgtccacccctcctcaacatcgagctctgttgtaaatacgtcgcaccagaggccactgtgatgccactgtctcctctccatcccgcccagccatgtgacactggctcccggtagacgggcaccccgagatgtaccaaccttttcatgtattctgccaaaagcattgttttccagggcccttgaccaacatcggcttccccagtccagggctcccctgctcctttcccttccctgtactggggtagctcctgcctgctctccctgcgttgcctagggtaaagcctccagatttgccatactgagcccctcttcctagcatcaggcgatacatctgagttcaaatgtcttcccaggctcagggacctccattccttgagattgtcttggcatggcccagccctgcctcatgggatggacaatgcatggggtggtctttatttttccctttcaaataaaacactagtcaggtaccgttttatcccagtcgtactcttccaggtttggaagacccagagaggccaagatcccatccttagccatagcgagcggtggtggtggatagcatcacaagaaacgagcctgtgtcccactcccacatgtctgggcacctgccctgggctgaggccaggctgctccaggggcctcctgcgccctcacctgccacagagcaacccaggttaaatacagcccatgcacaaagccacaggccaaagcctatggaattgtttttaatcatcaaatttaaccattttcataactggttcctggaggtgtgcagtgcccccttgcctcttcaaacctacagcttctctttgccatttgtggatttcacatcactccacacagaaacattacagcctggcatccccagtctttgccttcttccagctgcctcgacacagcactgtggcctgtccctattgcccaggcacgccatttccaagggcaggaaggggcagtgtcctgaagcccatcttttctgtgactgtcttaggtgatgtgtagccccctccacctttccactcaacaacctcccacccctgtcctgctgcatggtccggagtctgggacctactttgttttttgttatttatgaccttgtttaaagaaaataaatatctcccaacctttaaaaaaat

SEQ ID NO: 368923 - DNA, 1608 bp, Homo sapiens
agggcctgggagatgagagtgacagggcagggtaagcactggagatgatggcaagaccttgggacagtgaaccacagaagcgacacccctatgctgagccatccctctaacaactgaccattcatggatcccaggaaccaacaataaagacttaatttctcttactaaacagtgtttggctggggcccttcgaccatttggagccttgggcaaatgagcagcacactgagagcagaccctgggtccagctctggtcagggctgtgaaatgggtcagatttgccagggccttggtggtcattagggagggcttcctggaggatacagataagcaagggaaagctattgatagttacatttgtttttccttctctttctgttcttccacagtgtgtttcctggctgttagtgacctgctgtccacccctcctcaacatcgagctctgttgtaaatacgtcgcaccagaggccactgtgatgccactgtctcctctccatcccgcccagccatgtgacactggctcccggtagacgggcaccccgagatgtaccaaccttttcatgtattctgccaaaagcattgttttccagggcccttgaccaacatcggcttccccagtccagggctcccctgctcctttcccttccctgtactggggtagctcctgcctgctctccctgcgttgcctagggtaaagcctccagatttgccatactgagcccctcttcctagcatcaggcgatacatctgagttcaaatgtcttcccaggctcagggacctccattccttgagattgtcttggcatggcccagccctgcctcatgggatggacaatgcatggggtggtctttatttttccctttcaaataaaacactagtcaggtaccgttttatcccagtcgtactcttccaggtttggaagacccagagaggccaagatcccatccttagccatagcgagcggtggtggtggatagcatcacaagaaacgagcctgaaaatcaggtccagccggtccaagcacatggcctcccatctgggagagcccactgtcccactcccacatgtctgggcacctgccctgggctgaggccaggctgctccaggggcctcctgcgccctcacctgccacagagcaacccaggttaaatacagcccatgcacaaagccacaggccaaagcctatggaattgtttttaatcatcaaatttaaccattttcataactggttcctggaggtgtgcagtgcccccttgcctcttcaaacctacagcttctctttgccatttgtggatttcacatcactccacacagaaacattacagcctggcatccccagtctttgccttcttccagctgcctcgacacagcactgtggcctgtccctattgcccaggcacgccatttccaagggcaggaaggggcagtgtcctgaagcccatcttttctgtgactgtcttaggtgatgtgtagccccctccacctttccactcaacaacctcccacccctgtcctgctgcatggtccggagtctgggacctactttgttttttgttatttatgaccttgtttaaagaaaataaatatctcccaacctttaaaaaaat

SEQ ID NO: 368924 - DNA, 1977 bp, Homo sapiens
gtgaaagtcgtcgggttcccagccgggagtctgcggagttctcatactctgttacccagcttcctttgtatgagtgctgttgcgcacttccggtggaagcgctgaagcgagtgggtggagtttacggagccggtgggcggtaggcggtgctacgggtagctgggtgctgtccaaaggcgacagggcgtcgttaggggagcgagtcgtgaccggttgggccacactcaacgtgggacgaagcttcgcctactgtttgactacgtgcgtgcagcctcccctcgatgtcggccctcgaaaagagcatgcacctcggccgccttccctctcgcccacctctacccggcagcgggggcagtcagagcggagccaagatgcgaatgggccctggaagaaagcgggacttttcccctgttccttggagtcagtattttgagtccatggaagatgtagaagtagagaatgaaactggcaaggatacttttcgagtctacaagagtggttcagagggtccagtcctgctccttctgcatggaggaggtcattctgccctttcttgggctgtgttcacggcagcgattattagtagagttcagtgtaggattgtagctttggatctgcgaagtcatggtgaaacaaaggtcaagaatcctgaagatctgtctgcagaaacaatggcaaaagacgttggcaatgtggttgaagccatgtatggggaccttcctcctccaattatgctgattggacatagcatgggtggtgctattgcagtccacacagcatcatccaacctggtaccaagcctcttgggtctgtgcatgattgatgttgtagaaggtacagctatggatgcacttaatagcatgcagaatttcttacggggtcgtcctaaaaccttcaagtctctggagaatgctattgaatggagtgtgaagagtggccagattcgaaatctggagtctgcccgtgtctcaatggttggccaagtcaaacagggctcccctgctcctttcccttccctgtactggggtagctcctgcctgctctccctgcgttgcctagggtaaagcctccagatttgccatactgagcccctcttcctagcatcaggcgatacatctgagttcaaatgtcttcccaggctcagggacctccattccttgagattgtcttggcatggcccagccctgcctcatgggatggacaatgcatggggtggtctttatttttccctttcaaataaaacactagtcaggtaccgttttatcccagtcgtactcttccaggtttggaagacccagagaggccaagatcccatccttagccatagcgagcggtggtggtggatagcatcacaagaaacgagcctgaaaatcaggtccagccggtccaagcacatggcctcccatctgggagagcccactgtcccactcccacatgtctgggcacctgccctgggctgaggccaggctgctccaggggcctcctgcgccctcacctgccacagagcaacccaggttaaatacagcccatgcacaaagccacaggccaaagcctatggaattgtttttaatcatcaaatttaaccattttcataactggttcctggaggtgtgcagtgcccccttgcctcttcaaacctacagcttctctttgccatttgtggatttcacatcactccacacagaaacattacagcctggcatccccagtctttgccttcttccagctgcctcgacacagcactgtggcctgtccctattgcccaggcacgccatttccaagggcaggaaggggcagtgtcctgaagcccatcttttctgtgactgtcttaggtgatgtgtagccccctccacctttccactcaacaacctcccacccctgtcctgctgcatggtccggagtctgggacctactttgttttttgttatttatgaccttgtttaaagaaaataaatatctcccaacctttaaaaaaat

SEQ ID NO: 368925 - DNA, 1634 bp, Homo sapiens
  misc_feature (1509)..(1509): n is a, c, g, or t
gtgaaagtcgtcgggttcccagccgggagtctgcggagttctcatactctgttacccagcttcctttgtatgagtgctgttgcgcacttccggtggaagcgctgaagcgagtgggtggagtttacggagccggtgggcggtaggcggtgctacgggtagctgggtgctgtccaaaggcgacagggcgtcgttaggggagcgagtcgtgaccggttgggccacactcaacgtgggacgaagcttcgcctactgtttgactacgtgcgtgcagcctcccctcgatgtcggccctcgaaaagagcatgcacctcggccgccttccctctcgcccacctctacccggcagcgggggcagtcagagcggagccaagatgcgaatgggccctggaagaaagcgggacttttcccctgttccttggagtcagtattttgagtccatggaagatgtagaagtagagaatgaaactggcaaggatacttttcgagtctacaagagtggttcagagggtccagtcctgctccttctgcatggaggaggtcattctgccctttcttgggctgtgttcacggcagcgattattagtagagttcagtgtaggattgtagctttggatctgcgaagtcatggtgaaacaaaggtcaagaatcctgaagatctgtctgcagaaacaatggcaaaagacgttggcaatgtggttgaagccatgtatggggaccttcctcctccaattatgctgattggacatagcatgggtggtgctattgcagtccacacagcatcatccaacctggtaccaagcctcttgggtctgtgcatgattgatgttgtagaaggtacagctatggatgcacttaatagcatgcagaatttcttacggggtcgtcctaaaaccttcaagtctctggagaatgctattgaatggagtgtgaagagtggccagattcgaaatctggagtctgcccgtgtctcaatggttggccaagtcaaacagtgtgaaggaattacaagtccagaaggctcaaaatctatagtggaaggaatcatagaggaagaagaagaagatgaggaaggaagtgagtctataagcaagaggaaaaaggaagatgacatggagaccaagaaagaccatccatacacctggagaattgaactggcaaaaacagaaaaatactgggacggctggttccgaggcttatccaatctctttcttagttgtcccattcctaaattgctgctcttggctggtgttgatagattggataaagatctgaccattggccagatgcaagggaagttccagatgcaggtcctaccccagtgtggccatgcagtccatgaggatgcccctgacaaggtagctgaagctgttgccactttcctgatccggcacaggtttgcagaacccatcggtggattccagtgtgtgttatccatgagctgcttaagtgacactgcttgttccaacccgctccgtacaagcatcggagactcatgtatgtacacatacngctcgcaaccaagaaggcacacgtggtgattgcacacttgttcatcactcttccatcgcgcgccgagcccatgttgaacacgtggactcacctggtcatgactggagcacctccaagaggcatgc

SEQ ID NO: 368926 - DNA, 995 bp, Homo sapiens
gtgaaagtcgtcgggttcccagccgggagtctgcggagttctcatactctgttacccagcttcctttgtatgagtgctgttgcgcacttccggtggaagcgctgaagcgagtgggtggagtttacggagccggtgggcggtaggcggtgctacgggtagctgggtgctgtccaaaggcgacagggcgtcgttaggggagcgagtcgtgaccggttgggccacactcaacgtgggacgaagcttcgcctactgtttgactacgtgcgtgcagcctcccctcgatgtcggccctcgaaaagagcatgcacctcggccgccttccctctcgcccacctctacccggcagcgggggcagtcagagcggagccaagatgcgaatgggccctggaagaaagcgggacttttcccctgttccttggagtcagtattttgagtccatggaagatgtagaagtagagaattgcttggacccgggaggcaaaggttgcagtgagtggagatcatgcatgccactgcactccagcctgggcgacaagagcaagattctgtctcaaacaaaacaaaacaaaacaaacaaaaaacttttaaccaggattttttaaaaaaatagtaaactctacctaacacagtatttctcattttaaccatgtggaaatgaacagttcagtggcattaattacattcacaaggctgtggaccacaccactatctataccccaactttttcatcatccccagcaagaactctgtacccattaagcaataactcctgcctgcgtccccaagctctattctgcttttggtctctgaatttgcctattttaggtagctcataggtggaatcctacaatatttattttgtgtctggcttatttcgtttagcataatgctttcaagtccatccatgttgtagtgtgtatcaaaattctgttccattttatggctgaatattttattaaatgcatattccatattttgtttagccattctcttga

SEQ ID NO: 368927 - DNA, 1084 bp, Homo sapiens
gtgaaagtcgtcgggttcccagccgggagtctgcggagttctcatactctgttacccagcttcctttgtatgagtgctgttgcgcacttccggtggaagcgctgaagcgagtgggtggagtttacggagccggtgggcggtaggcggtgctacgggtagctgggtgctgtccaaaggcgacagggcgtcgttaggggagcgagtcgtgaccggttgggccacactcaacgtgggacgaagcttcgcctactgtttgactacgtgcgtgcagcctcccctcgatgtcggccctcgaaaagagcatgcacctcggccgccttccctctcgcccacctctacccggcagcgggggcagtcagagcggagccaagatgcgaatggggtacgtgacccataccccttctccctatgggccaggccccagccgttggagaatggtatctctgggcgttcatagaggcacgggaaaggagtctactgataggagaaaatgttggcggcctggagatatttagatggagtagaaggcagattggggtactaggggaggcgccaagtcaatagaaattggaggaaaaataacgttgttgaagggagaggggaatgaggcaaaggttggggaagctgagagactaacataagggatctgagaatcacttccacaataaaggaggcttagaaaagggagtagaacggtgacaaaggtggaggagaatcggccagggaaggtggagggaagtggggaatgactgagagaaaagttgaggggaattgggccaacaactaaggaaaggtttgggaggagtagatattatcagagttctaatatctgcactgtgagaactagatactagaaaagctgaggggggtagaaaacactcgagacagggctggagaaggaaagaggagaactaggaagcagacgattctagagaattcccagaggtgtaaagacagattcagcgaatgagaggtgagattaggtctcttaagggagaatgagaaagtttagggagtaggcctaaggtaaggtggagaacatagccacgaagattgttaagggtagtaggaatgtgctgagaag

SEQ ID NO: 368928 - DNA, 2207 bp, Homo sapiens
cgacggcagtgaatctgtatcatggtctagcttgttgcctgggttgaagagcaggaggagctaccccagtccaggctctcctgctccttctgcatggaggaggtcattctgccctttcttgggctgtgttcacggcagcgattattagtagagttcagtgtaggattgtagctttggatctgcgaagtcatggtgaaacaaaggtcaagaatcctgaagatctgtctgcagaaacaatggcaaaagacgttggcaatgtggttgaagccatgtatggggaccttcctcctccaattatgctgattggacatagcatgggtggtgctattgcagtccacacagcatcatccaacctggtaccaagcctcttgggtctgtgcatgattgatgttgtagaaggtacagctatggatgcacttaatagcatgcagaatttcttacggggtcgtcctaaaaccttcaagtctctggagaatgctattgaatggagtgtgaagagtggccagattcgaaatctggagtctgcccgtgtctcaatggttggccaagtcaaacagtgtgaaggaattacaagtccagaaggctcaaaatctatagtggaaggaatcatagaggaagaagaagaagatgaggaaggaagtgagtctataagcaagaggaaaaaggaagatgacatggagaccaagaaagaccatccatacacctggagaattgaactggcaaaaacagaaaaatactgggacggctggttccgaggcttatccaatctctttcttagttgtcccattcctaaattgctgctcttggctggtgttgatagattggataaagatctgaccattggccagatgcaagggaagttccagatgcaggtcctaccccagtgtggccatgcagtccatgaggatgcccctgacaaggtagctgaagctgttgccactttcctgatccggcacaggtttgcagaacccatcggtggattccagtgtgtgtttcctggctgttagtgacctgctgtccacccctcctcaacatcgagctctgttgtaaatacgtcgcaccagaggccactgtgatgccactgtctcctctccatcccgcccagccatgtgacactggctcccggtagacgggcaccccgagatgtaccaaccttttcatgtattctgccaaaagcattgttttccagggcccttgaccaacatcggcttccccagtccagggctcccctgctcctttcccttccctgtactggggtagctcctgcctgctctccctgcgttgcctagggtaaagcctccagatttgccatactgagcccctcttcctagcatcaggcgatacatctgagttcaaatgtcttcccaggctcagggacctccattccttgagattgtcttggcatggcccagccctgcctcatgggatggacaatgcatggggtggtctttatttttccctttcaaataaaacactagtcaggtaccgttttatcccagtcgtactcttccaggtttggaagacccagagaggccaagatcccatccttagccatagcgagcggtggtggtggatagcatcacaagaaacgagcctgaaaatcaggtccagccggtccaagcacatggcctcccatctgggagagcccactgtcccactcccacatgtctgggcacctgccctgggctgaggccaggctgctccaggggcctcctgcgccctcacctgccacagagcaacccaggttaaatacagcccatgcacaaagccacaggccaaagcctatggaattgtttttaatcatcaaatttaaccattttcataactggttcctggaggtgtgcagtgcccccttgcctcttcaaacctacagcttctctttgccatttgtggatttcacatcactccacacagaaacattacagcctggcatccccagtctttgccttcttccagctgcctcgacacagcactgtggcctgtccctattgcccaggcacgccatttccaagggcaggaaggggcagtgtcctgaagcccatcttttctgtgactgtcttaggtgatgtgtagccccctccacctttccactcaacaacctcccacccctgtcctgctgcatggtccggagtctgggacctactttgttttttgttatttatgaccttgtttaaagaaaataaatatctcccaacctttaaaaaaat

SEQ ID NO: 368929 - DNA, 2498 bp, Homo sapiens
gtgaaagtcgtcgggttcccagccgggagtctgcggagttctcatactctgttacccagcttcctttgtatgagtgctgttgcgcacttccggtggaagcgctgaagcgagtgggtggagtttacggagccggtgggcggtaggcggtgctacgggtagctgggtgctgtccaaaggcgacagggcgtcgttaggggagcgagtcgtgaccggttgggccacactcaacgtgggacgaagcttcgcctactgtttgactacgtgcgtgcagcctcccctcgatgtcggccctcgaaaagagcatgcacctcggccgccttccctctcgcccacctctacccggcagcgggggcagtcagagcggagccaagatgcgaatgggccctggaagaaagcgggacttttcccctgttccttggagtcagtattttgagtccatggaagatgtagaagtagagaatgaaactggcaaggatacttttcgagtctacaagagtggttcagagggtccagtcctgctccttctgcatggaggaggtcattctgccctttcttgggctgtgttcacggcagcgattattagtagagttcagtgtaggattgtagctttggatctgcgaagtcatggtgaaacaaaggtcaagaatcctgaagatctgtctgcagaaacaatggcaaaagacgttggcaatgtggttgaagccatgtatggggaccttcctcctccaattatgctgattggacatagcatgggtggtgctattgcagtccacacagcatcatccaacctggtaccaagcctcttgggtctgtgcatgattgatgttgtagaaggtacagctatggatgcacttaatagcatgcagaatttcttacggggtcgtcctaaaaccttcaagtctctggagaatgctattgaatggagtgtgaagagtggccagattcgaaatctggagtctgcccgtgtctcaatggttggccaagtcaaacagtgtgaaggaattacaagtccagaaggctcaaaatctatagtggaaggaatcatagaggaagaagaagaagatgaggaaggaagtgagtctataagcaagaggaaaaaggaagatgacatggagaccaagaaagaccatccatacacctggagaattgaactggcaaaaacagaaaaatactgggacggctggttccgaggcttatccaatctctttcttagttgtcccattcctaaattgctgctcttggctggtgttgatagattggataaagatctgaccattggccagatgcaagggaagttccagatgcaggtcctaccccagtgtggccatgcagtccatgaggatgcccctgacaaggtagctgaagctgttgccactttcctgatccggcacaggtttgcagaacccatcggtggattccagtgtgtgtttcctggctgttagtgacctgctgtccacccctcctcaacatcgagctctgttgtaaatacgtcgcaccagaggccactgtgatgggctcccctgctcctttcccttccctgtactggggtagctcctgcctgctctccctgcgttgcctagggtaaagcctccagatttgccatactgagcccctcttcctagcatcaggcgatacatctgagttcaaatgtcttcccaggctcagggacctccattccttgagattgtcttggcatggcccagccctgcctcatgggatggacaatgcatggggtggtctttatttttccctttcaaataaaacactagtcaggtaccgttttatcccagtcgtactcttccaggtttggaagacccagagaggccaagatcccatccttagccatagcgagcggtggtggtggatagcatcacaagaaacgagcctgaaaatcaggtccagccggtccaagcacatggcctcccatctgggagagcccactgtcccactcccacatgtctgggcacctgccctgggctgaggccaggctgctccaggggcctcctgcgccctcacctgccacagagcaacccaggttaaatacagcccatgcacaaagccacaggccaaagcctatggaattgtttttaatcatcaaatttaaccattttcataactggttcctggaggtgtgcagtgcccccttgcctcttcaaacctacagcttctctttgccatttgtggatttcacatcactccacacagaaacattacagcctggcatccccagtctttgccttcttccagctgcctcgacacagcactgtggcctgtccctattgcccaggcacgccatttccaagggcaggaaggggcagtgtcctgaagcccatcttttctgtgactgtcttaggtgatgtgtagccccctccacctttccactcaacaacctcccacccctgtcctgctgcatggtccggagtctgggacctactttgttttttgttatttatgaccttgtttaaagaaaataaatatctcccaacctttaaaaaaat

SEQ ID NO: 368930 - DNA, 2636 bp, Homo sapiens
gtgaaagtcgtcgggttcccagccgggagtctgcggagttctcatactctgttacccagcttcctttgtatgagtgctgttgcgcacttccggtggaagcgctgaagcgagtgggtggagtttacggagccggtgggcggtaggcggtgctacgggtagctgggtgctgtccaaaggcgacagggcgtcgttaggggagcgagtcgtgaccggttgggccacactcaacgtgggacgaagcttcgcctactgtttgactacgtgcgtgcagcctcccctcgatgtcggccctcgaaaagagcatgcacctcggccgccttccctctcgcccacctctacccggcagcgggggcagtcagagcggagccaagatgcgaatgggccctggaagaaagcgggacttttcccctgttccttggagtcagtattttgagtccatggaagatgtagaagtagagaatgaaactggcaaggatacttttcgagtctacaagagtggttcagagggtccagtcctgctccttctgcatggaggaggtcattctgccctttcttgggctgtgttcacggcagcgattattagtagagttcagtgtaggattgtagctttggatctgcgaagtcatggtgaaacaaaggtcaagaatcctgaagatctgtctgcagaaacaatggcaaaagacgttggcaatgtggttgaagccatgtatggggaccttcctcctccaattatgctgattggacatagcatgggtggtgctattgcagtccacacagcatcatccaacctggtaccaagcctcttgggtctgtgcatgattgatgttgtagaaggtacagctatggatgcacttaatagcatgcagaatttcttacggggtcgtcctaaaaccttcaagtctctggagaatgctattgaatggagtgtgaagagtggccagattcgaaatctggagtctgcccgtgtctcaatggttggccaagtcaaacagtgtgaaggaattacaagtccagaaggctcaaaatctatagtggaaggaatcatagaggaagaagaagaagatgaggaaggaagtgagtctataagcaagaggaaaaaggaagatgacatggagaccaagaaagaccatccatacacctggagaattgaactggcaaaaacagaaaaatactgggacggctggttccgaggcttatccaatctctttcttagttgtcccattcctaaattgctgctcttggctggtgttgatagattggataaagatctgaccattggccagatgcaagggaagttccagatgcaggtcctaccccagtgtggccatgcagtccatgaggatgcccctgacaaggtagctgaagctgttgccactttcctgatccggcacaggtttgcagaacccatcggtggattccagtgtgtgtttcctggctgttagtgacctgctgtccacccctcctcaacatcgagctctgttgtaaatacgtcgcaccagaggccactgtgatgccactgtctcctctccatcccgcccagccatgtgacactggctcccggtagacgggcaccccgagatgtaccaaccttttcatgtattctgccaaaagcattgttttccagggcccttgaccaacatcggcttccccagtccagggctcccctgctcctttcccttccctgtactggggtagctcctgcctgctctccctgcgttgcctagggtaaagcctccagatttgccatactgagcccctcttcctagcatcaggcgatacatctgagttcaaatgtcttcccaggctcagggacctccattccttgagattgtcttggcatggcccagccctgcctcatgggatggacaatgcatggggtggtctttatttttccctttcaaataaaacactagtcaggtaccgttttatcccagtcgtactcttccaggtttggaagacccagagaggccaagatcccatccttagccatagcgagcggtggtggtggatagcatcacaagaaacgagcctgaaaatcaggtccagccggtccaagcacatggcctcccatctgggagagcccactgtcccactcccacatgtctgggcacctgccctgggctgaggccaggctgctccaggggcctcctgcgccctcacctgccacagagcaacccaggttaaatacagcccatgcacaaagccacaggccaaagcctatggaattgtttttaatcatcaaatttaaccattttcataactggttcctggaggtgtgcagtgcccccttgcctcttcaaacctacagcttctctttgccatttgtggatttcacatcactccacacagaaacattacagcctggcatccccagtctttgccttcttccagctgcctcgacacagcactgtggcctgtccctattgcccaggcacgccatttccaagggcaggaaggggcagtgtcctgaagcccatcttttctgtgactgtcttaggtgatgtgtagccccctccacctttccactcaacaacctcccacccctgtcctgccctatgccctcgtgctctcggcccgcagggggaaggagggaggttgtcaagccttgaataaaacacaagcctccgttaaccttt

SEQ ID NO: 368931 - DNA, 1305 bp, Homo sapiens
gtgaaagtcgtcgggttcccagccgggagtctgcggagttctcatactctgttacccagcttcctttgtatgagtgctgttgcgcacttccggtggaagcgctgaagcgagtgggtggagtttacggagccggtgggcggtaggcggtgctacgggtagctgggtgctgtccaaaggcgacagggcgtcgttaggggagcgagtcgtgaccggttgggccacactcaacgtgggacgaagcttcgcctactgtttgactacgtgcgtgcagcctcccctcgatgtcggccctcgaaaagagcatgcacctcggccgccttccctctcgcccacctctacccggcagcgggggcagtcagagcggagccaagatgcgaatgggccctggaagaaagcgggacttttcccctgttccttggagtcagtattttgagtccatggaagatgtagaagtagagaatgaaactggcaaggatacttttcgagtctacaagagtggttcagagggtccagtcctgctccttctgcatggaggaggtcattctgccctttcttgggctgtgttcacggcagcgattattagtagagttcagtgtaggattgtagctttggatctgcgaagtcatggtgaaacaaaggtcaagaatcctgaagatctgtctgcagaaacaatggcaaaagacgttggcaatgtggttgaagccatgtatggggaccttcctcctccaattatgctgattggacatagcatgggtggtgctattgcagtccacacagcatcatccaacctggtaccaagcctcttgggtctgtgcatgattgatgttgtagaaggtacagctatggatgcacttaatagcatgcagaatttcttacggggtcgtcctaaaaccttcaagtctctggagaatgctattgaatggagtgtgaagagtggccagattcgaaatctggagtctgcccgtgtctcaatggttggccaagtcaaacagtgtgaaggaattacaagtccagaaggctcaaaatctatagtggaaggaatcatagaggaagaagaagaagatgaggaaggaagtgagtctataagcaagaggaaaaaggaagatgacatggagcgtgccatgtgtctgatgctgctgagcgtggcccgagcattcttgtcgatggtggtccgcacataggaggtggcaggcttccgctggccggatctccgcttattgaccaccacgacacctttgccgtcggatgacgactcaacgcccacagtcttgcggtgaatcagtccggagtagcgaaaggaattgc

SEQ ID NO: 368932 - DNA, 6477 bp, Homo sapiens
agcggattgacccggtgtcgccgcagaaccgaggtcgccgagtgatgatgttgtgaagtcgcccgcctgtccctgccacgcccgggcggttgctggcagtgggagcagcggcagcagcttcggctgctgctttcaggctgccgctgcattaggggcttcctgaggaagcgcgggcggacgacagaggatgccgaaccactccagtcatgactgtccaaagtatgataatcacatgagagtgctcgttgctacggatgtcatttgactcatcagagaaaatctgtctaaaagaaaatatccatgtgaccaaatccatttcattattgaatggcttgatggatttcctttactctgattcataccaaagctgtccttctcaaccaaagcaagaaaggatcctgcatgagtcaatcccagaatgcaatttttacatcaccaacaggtgaagaaaacctcatgaatagcaatcacagagactcggagagcatcactgatgtctgctccaatgaggatctccctgaagttgagctggtgagtctgctagaagaacaactaccacagtataggctaaaagtagacactctctttctatatgaaaatcaagactggactcagtctccacaccagcggcagcatgcatctgatgctctctctccagtccttgctgaagagactttccgttacatgattctaggcacagacagggtggagcagatgaccaaaacttacaatgacatcgacatggttacacatctcctggcagagagggatcgtgatctggaactcgctgctcgaattggacaagctctcttaaagcggaaccatgtcttatctgagcagaacgaatccctggaggagcaattgggacaagcctttgatcaagttaatcagctgcagcatgagctatgcaagaaagatgagttacttcgaatcgtctccattgcttctgaagaaagtgaaactgattccagctgttctacacctcttcggttcaatgagtcctttagcttatctcaagggttgctgcagttggaaatgctgcaagaaaagctcaaggaactggaagaagagaatatggctcttcgatccaaggcttgtcacataaagacagaaactgttacctatgaagaaaaggaacaacagcttgtcagcgactgtgttaaagaacttcgtgaaacaaatgctcagatgtccagaatgactgaagaattgtcagggaagagtgatgagctgattcgataccaagaagagctttcctctcttttgtcacagattgtagaccttcagcataaacttaaagaacatgtgattgagaaggaagaactaaaacttcacctgcaagcttccaaagatgcccaacggcaactgacaatggagctgcacgagttacaagacaggaatatggagtgtctaggaatgttacatgaatcccaagaagaaataaaggaacttcgtagtagatctggccctactgctcatctctacttctcccaatcatatggagcttttactggggaatctttggcagctgagattgaggggactatgcgtaaaaagctgagtttggatgaggaatcttctctctttaaacaaaaagcccaacagaagcgggtatttgataccgtcaggattgccaatgacacacggggccgctctatctcattcccagctctgttacccattccaggctccaaccgttcaagtgtcatcatgacagcaaaaccttttgagtctggtcttcagcaaacagaggacaaatcactcctgaaccaggggagcagctcagaggaggttgcagggagctcccagaagatgggccaaccaggaccctcaggagatagtgatttggctacagcactgcatcgccttagcttgcgtcgacaaaactatttaagtgagaagcagttctttgctgaagaatggcagcggaagatccaggttctggcagaccagaaggaaggagttagtggctgtgtcaccccgacagagagccttgcctctctctgcaccacccagtcagagatcacagacctcagcagtgccagttgccttcgaggttttatgccagaaaaattacaaattgtcaagccccttgaaggatcacaaactctgtatcactggcagcagcttgctcaaccaaacttgggaaccatccttgatccacgaccaggtgtcattactaaaggctttacccagttgcccggggatgctatttatcacatctcagatttagaagaggatgaagaggagggtattacttttcaggttcagcaacctcttgaagtggaagagaaactttcaacatccaagccagtaacagggatcttcctgccacccattacttcagcaggtggaccagttacagttgcaaccgccaacccaggaaagtgcctgtcgtgcacaaactcaacattcactttcaccacctgtagaatattacatccctctgacatcactcaggttacccccagctctgggttcccttcattatcctgtggaagtagcggtagcagttcatccaacacggctgtgaattctcctgccttgtcctatagactcagcattggtgagtccatcaccaaccgacgagattccactacaaccttcagtagcaccatgagcttggccaaacttctacaagagcgaggcatctctgccaaagtgtaccacagcccaatttcagagaaccccctccagcctctccctaaatccctggctatcccttccacaccaccaaattcaccatctcactcaccttgcccttctcctttaccctttgagcctcgagtgcatctctctgaaaattttttggcctctcgaccagctgagacattcctccaggagatgtatggcttgagaccctcccggaaccctcctgatgttggccagttgaagatgaacttagtggacaggctgaagagactggggatagccagagtggtcaagaaccctggtgcccaagagaatggaagatgccaggaggcagaaattggtcctcaaaaaccagattctgctgtttatttaaattcaggtagcagtttattaggtggactaaggaggaatcagagtcttccagtcataatgggtagctttgctgccccagtttgcacatcctcacccaaaatgggtgtcctgaaggaggactgaggttcagcagttaactgaccttttatacaagttagcacatgaaggatagatatgcactgaaacatgtggtctggtctgacttgagagaaaaggaatgttgcacaagggttgtgaatgtgaaagggggaatggaggaatggaaataaaattgggatgagccctaatggaggaagtcgggcaaattgaaagtataaatgaatgggccatgagtgttcagagggagaaaagaaaggtttaatatactccttcagttgagttttcttgtcttgaacataaaaagtgaatacaaataaattcagtaatactaaaacatacagagatactgaacttgctggcacatttacttctggtaagcataaagcagagagaacccaggttagaaggatgggaagagaaaaggagcagttttattgcttatagaaagccgttctgaggggttggtggggtaagctcagtctattactgagacaatagtgagatggcttatatgtttcccctgttaatatctggttaaattatgtatccatcaaatggtatgctcgcagcattagcaaaattaggagtttcatctttttcattgaatcacaggtggagactcctattttcctttctgttttcaggcctttgagcccctgggagcccaaataccactcaattattttgtatttatgattaataaaagttcattttttaaatttgtatttttatacaacctccaaaaaaaaaaacaactgggtagagggtgggagggatttacttttaagaggcaaaatgtgagtaaattgaaaccaagaaaacttgtttttagaatatttcgtctgaataagtacagtagccaaggaatacaaacataattgcatgtttttaaaaattccttggaggctggaaggggttaagccagaagtgcaatcaataggaattagggaatgttgtatatttatatatgtaaactttttttgtaagaaaagttggtgacaactaaaccaactttttccaaagtgcgctatgcatatttttaatgaaagatgacatgtatttgcacaaaaattctcaggcacattaaattattgtaaactgaagtaaaacccgggtgcttgctttgagattgtggttttttcttcctaatgtaaaataaaataaaacacatctgccttcttgatatttatagaattagagaataaactttttaatgggggagtcaaagctttttctttttctctaaggttctttttttttattcaaactgtatgaaatggcaaagtgaggctctggggttagatttcagcattcagcagttgacacaggctaagaaatggaaagaagtagatctgttttttctcaatgttgctgagcaaagtctgcttctcatcagatgacgtggctttgtctagacagcacgcagttcagaaagaaatgtctttatacaaaagacatgatagagaaaagatgagagaggggactaattattttgtttatgaaaatggcaagtaaattacttgatctttttggtgcttaatttgcaaatgttttgttcctttgtcctgacttaaaggcagttttctgaagaactcttgactcttgctcctatggttcccataggcacacctattcccaggccaaggagagtccttcctctccccttttgaggcatccccgccatccccccacttagagctatgtgctcaaaaagccaacatgaatgcagtggtaaaaatttgttagtttcttatactttttagaatctctcaataaaatttttctaaataaattccacaaaaacaaagggtgaagatggtctctccctttcgttccccttcactcagttgtgctgaggtcaatagagtgtagagtttcagaaaggattccagcaggtttatatgtgaatataagtgtccctgaatggggcaggcattaaatagaagaatccctgctgtttaaatttcccgcatattccaattcacttttaaaaaataccatttgaatttgtatttcataaagtgactctggggtgcttactttagtcaattcttaaaattttttatttgttccctaagaaagtaattactgtttctgttgcctggacagttacagtttccaggaaacatcaggaagtaggaaactgtagggccagagagtagtacaacgttaaattgtccgatttatgtgtattacttaaagctataaattgaactagatcttgccgtgctctgtattgagtataatttgtatacttttttataattaatgactaaatgatcactttggaggcagggtggtgggggtgtattagcagccaaataagcacatctgatcaaaaagaaccaggcttagattttttttaagtacattgatgttgatgttccaccagaaacaccttaagtgtatactgttgtgtaatgtctctagaaaggaatcctgtcttaaaactgggttttgctgttttttgaagtttctacctaaaatcatttttggtatatcctgataatctctataatactagaattgtctgcaaaatatagtaagaagaattggagcctaatagctgattcctcccaatttatctgttatgttttgtcactattcacattttagtcttttctacgataaaaattgtatgtgtactttcatgccagtataggaaacctcaatcttttttttttttcgcctttaagaaggttttcagtgattatacctcaggtatttctgagtgtcctattgtctaataggagaaatatcttcccgagctcagaattaaaagttctcctaaattatgaagatcccaaatcttatgtaaataaccttaggcatgagtccttagggagaagttaatgaccattgttaaagtgcttttttagaaaatgttgtgctgtatgttcttgatttgacataaatgaatagactttggcaagggaggaaataagttaaaaggcagcttacaagagcctattccctataaagggtataattttacacagtactcaaagcttgttatcttttctgaccattttagtacagaattagtacttggtggttactaacatcaacttgtgacatctagaactagggctcttagtgtttagtgggccacttctctgatgtcagatgcatgcagacctgtactccacatgcaacccaacagcagtgcagtgtgataactgagcggtcgcatggcagaggacatccccctcagagtgggcacaagtgccctctagggcagccaggggaatactattgttcgatacctgggatttgactttgtcaaacagctctttgtgcccctatctttgttttgtcaaatgtagatcagttaataaacatgagtagcttgaa

SEQ ID NO: 368933 - DNA, 4599 bp, Homo sapiens
cacaccacctgagtcacaccacctgagtcacaccacctgagtcacaccacctgagtcacaccacctgagtcacaccacctgagtcacaccacctgagtcacaccacctgagtcacaccacctgagtcacaccacccagtcagagatcacagacctcagcagtgccagttgccttcgaggttttatgccagaaaaattacaaattgtcaagccccttgaaggatcacaaactctgtatcactggcagcagcttgctcaaccaaacttgggaaccatccttgatccacgaccaggtgtcattactaaaggctttacccagttgcccggggatgctatttatcacatctcagatttagaagaggatgaagaggagggtattacttttcaggttcagcaacctcttgaagtggaagagaaactttcaacatccaagccagtaacagggatcttcctgccacccattacttcagcaggtggaccagttacagttgcaaccgccaacccaggaaagtgcctgtcgtgcacaaactcaacattcactttcaccacctgtagaatattacatccctctgacatcactcaggttacccccagctctgggttcccttcattatcctgtggaagtagcggtagcagttcatccaacacggctgtgaattctcctgccttgtcctatagactcagcattggtgagtccatcaccaaccgacgagattccactacaaccttcagtagcaccatgagcttggccaaacttctacaagagcgaggcatctctgccaaagtgtaccacagcccaatttcagagaaccccctccagcctctccctaaatccctggctatcccttccacaccaccaaattcaccatctcactcaccttgcccttctcctttaccctttgagcctcgagtgcatctctctgaaaattttttggcctctcgaccagctgagacattcctccaggagatgtatggcttgagaccctcccggaaccctcctgatgttggccagttgaagatgaacttagtggacaggctgaagagactggggatagccagagtggtcaagaaccctggtgcccaagagaatggaagatgccaggaggcagaaattggtcctcaaaaaccagattctgctgtttatttaaattcaggtagcagtttattaggtggactaaggaggaatcagagtcttccagtcataatgggtagctttgctgccccagtttgcacatcctcacccaaaatgggtgtcctgaaggaggactgaggttcagcagttaactgaccttttatacaagttagcacatgaaggatagatatgcactgaaacatgtggtctggtctgacttgagagaaaaggaatgttgcacaagggttgtgaatgtgaaagggggaatggaggaatggaaataaaattgggatgagccctaatggaggaagtcgggcaaattgaaagtataaatgaatgggccatgagtgttcagagggagaaaagaaaggtttaatatactccttcagttgagttttcttgtcttgaacataaaaagtgaatacaaataaattcagtaatactaaaacatacagagatactgaacttgctggcacatttacttctggtaagcataaagcagagagaacccaggttagaaggatgggaagagaaaaggagcagttttattgcttatagaaagccgttctgaggggttggtggggtaagctcagtctattactgagacaatagtgagatggcttatatgtttcccctgttaatatctggttaaattatgtatccatcaaatggtatgctcgcagcattagcaaaattaggagtttcatctttttcattgaatcacaggtggagactcctattttcctttctgttttcaggcctttgagcccctgggagcccaaataccactcaattattttgtatttatgattaataaaagttcattttttaaatttgtatttttatacaacctccaaaaaaaaaaacaactgggtagagggtgggagggatttacttttaagaggcaaaatgtgagtaaattgaaaccaagaaaacttgtttttagaatatttcgtctgaataagtacagtagccaaggaatacaaacataattgcatgtttttaaaaattccttggaggctggaaggggttaagccagaagtgcaatcaataggaattagggaatgttgtatatttatatatgtaaactttttttgtaagaaaagttggtgacaactaaaccaactttttccaaagtgcgctatgcatatttttaatgaaagatgacatgtatttgcacaaaaattctcaggcacattaaattattgtaaactgaagtaaaacccgggtgcttgctttgagattgtggttttttcttcctaatgtaaaataaaataaaacacatctgccttcttgatatttatagaattagagaataaactttttaatgggggagtcaaagctttttctttttctctaaggttctttttttttattcaaactgtatgaaatggcaaagtgaggctctggggttagatttcagcattcagcagttgacacaggctaagaaatggaaagaagtagatctgttttttctcaatgttgctgagcaaagtctgcttctcatcagatgacgtggctttgtctagacagcacgcagttcagaaagaaatgtctttatacaaaagacatgatagagaaaagatgagagaggggactaattattttgtttatgaaaatggcaagtaaattacttgatctttttggtgcttaatttgcaaatgttttgttcctttgtcctgacttaaaggcagttttctgaagaactcttgactcttgctcctatggttcccataggcacacctattcccaggccaaggagagtccttcctctccccttttgaggcatccccgccatccccccacttagagctatgtgctcaaaaagccaacatgaatgcagtggtaaaaatttgttagtttcttatactttttagaatctctcaataaaatttttctaaataaattccacaaaaacaaagggtgaagatggtctctccctttcgttccccttcactcagttgtgctgaggtcaatagagtgtagagtttcagaaaggattccagcaggtttatatgtgaatataagtgtccctgaatggggcaggcattaaatagaagaatccctgctgtttaaatttcccgcatattccaattcacttttaaaaaataccatttgaatttgtatttcataaagtgactctggggtgcttactttagtcaattcttaaaattttttatttgttccctaagaaagtaattactgtttctgttgcctggacagttacagtttccaggaaacatcaggaagtaggaaactgtagggccagagagtagtacaacgttaaattgtccgatttatgtgtattacttaaagctataaattgaactagatcttgccgtgctctgtattgagtataatttgtatacttttttataattaatgactaaatgatcactttggaggcagggtggtgggggtgtattagcagccaaataagcacatctgatcaaaaagaaccaggcttagattttttttaagtacattgatgttgatgttccaccagaaacaccttaagtgtatactgttgtgtaatgtctctagaaaggaatcctgtcttaaaactgggttttgctgttttttgaagtttctacctaaaatcatttttggtatatcctgataatctctataatactagaattgtctgcaaaatatagtaagaagaattggagcctaatagctgattcctcccaatttatctgttatgttttgtcactattcacattttagtcttttctacgataaaaattgtatgtgtactttcatgccagtataggaaacctcaatcttttttttttttcgcctttaagaaggttttcagtgattatacctcaggtatttctgagtgtcctattgtctaataggagaaatatcttcccgagctcagaattaaaagttctcctaaattatgaagatcccaaatcttatgtaaataaccttaggcatgagtccttagggagaagttaatgaccattgttaaagtgcttttttagaaaatgttgtgctgtatgttcttgatttgacataaatgaatagactttggcaagggaggaaataagttaaaaggcagcttacaagagcctattccctataaagggtataattttacacagtactcaaagcttgttatcttttctgaccattttagtacagaattagtacttggtggttactaacatcaacttgtgacatctagaactagggctcttagtgtttagtgggccacttctctgatgtcagatgcatgcagacctgtactccacatgcaacccaacagcagtgcagtgtgataactgagcggtcgcatggcagaggacatccccctcagagtgggcacaagtgccctctagggcagccaggggaatactattgttcgatacctgggatttgactttgtcaaacagctctttgtgcccctatctttgttttgtcaaatgtagatcagttaataaacatgagtagcttgaa

SEQ ID NO: 368934 - DNA, 7171 bp, Homo sapiens
  misc_feature (6486)..(6486): n is a, c, g, or t
  misc_feature (6491)..(6491): n is a, c, g, or t
  misc_feature (6498)..(6498): n is a, c, g, or t
  misc_feature (6501)..(6501): n is a, c, g, or t
  misc_feature (6506)..(6507): n is a, c, g, or t
  misc_feature (6511)..(6511): n is a, c, g, or t
  misc_feature (6517)..(6517): n is a, c, g, or t
  misc_feature (6520)..(6520): n is a, c, g, or t
  misc_feature (6523)..(6523): n is a, c, g, or t
  misc_feature (6530)..(6532): n is a, c, g, or t
agcggattgacccggtgtcgccgcagaaccgaggtcgccgagtgatgatgttgtgaagtcgcccgcctgtccctgccacgcccgggcggttgctggcagtgggagcagcggcagcagcttcggctgctgctttcaggctgccgctgcattaggggcttcctgaggaagcgcgggcggacgacagaggatgccgaaccactccagtcatgactgtccaaagtatgataatcacatgagagtgctcgttgctacggatgtcatttgactcatcagagaaaatctgtctaaaagaaaatatccatgtgaccaaatccatttcattattgaatggcttgatggatttcctttactctgattcataccaaagctgtccttctcaaccaaagcaagaaaggatcctgcatgagtcaatcccagaatgcaatttttacatcaccaacaggtgaagaaaacctcatgaatagcaatcacagagactcggagagcatcactgatgtctgctccaatgaggatctccctgaagttgagctggtgagtctgctagaagaacaactaccacagtataggctaaaagtagacactctctttctatatgaaaatcaagactggactcagtctccacaccagcggcagcatgcatctgatgctctctctccagtccttgctgaagagactttccgttacatgattctaggcacagacagggtggagcagatgaccaaaacttacaatgacatcgacatggttacacatctcctggcagagagggatcgtgatctggaactcgctgctcgaattggacaagctctcttaaagcggaaccatgtcttatctgagcagaacgaatccctggaggagcaattgggacaagcctttgatcaagttaatcagctgcagcatgagctatgcaagaaagatgagttacttcgaatcgtctccattgcttctgaagaaagtgaaactgattccagctgttctacacctcttcggttcaatgagtcctttagcttatctcaagggttgctgcagttggaaatgctgcaagaaaagctcaaggaactggaagaagagaatatggctcttcgatccaaggcttgtcacataaagacagaaactgttacctatgaagaaaaggaacaacagcttgtcagcgactgtgttaaagaacttcgtgaaacaaatgctcagatgtccagaatgactgaagaattgtcagggaagagtgatgagctgattcgataccaagaagagctttcctctcttttgtcacagattgtagaccttcagcataaacttaaagaacatgtgattgagaaggaagaactaaaacttcacctgcaagcttccaaagatgcccaacggcaactgacaatggagctgcacgagttacaagacaggaatatggagtgtctaggaatgttacatgaatcccaagaagaaataaaggaacttcgtagtagatctggccctactgctcatctctacttctcccaatcatatggagcttttactggggaatctttggcagctgagattgaggggactatgcgtaaaaagctgagtttggatgaggaatcttctctctttaaacaaaaagcccaacagaagcgggtatttgataccgtcaggattgccaatgacacacggggccgctctatctcattcccagctctgttacccattccaggctccaaccgttcaagtgtcatcatgacagcaaaaccttttgagtctggtcttcagcaaacagaggacaaatcactcctgaaccaggggagcagctcagaggaggttgcagggagctcccagaagatgggccaaccaggaccctcaggagatagtgatttggctacagcactgcatcgccttagcttgcgtcgacaaaactatttaagtgagaagcagttctttgctgaagaatggcagcggaagatccaggttctggcagaccagaaggaaggagttagtggctgtgtcaccccgacagagagccttgcctctctctgcaccacccagtcagagatcacagacctcagcagtgccagttgccttcgaggttttatgccagaaaaattacaaattgtcaagccccttgaaggatcacaaactctgtatcactggcagcagcttgctcaaccaaacttgggaaccatccttgatccacgaccaggtgtcattactaaaggctttacccagttgcccggggatgctatttatcacatctcagatttagaagaggatgaagaggagggtattacttttcaggttcagcaacctcttgaagtggaagagaaactttcaacatccaagccagtaacagggatcttcctgccacccattacttcagcaggtggaccagttacagttgcaaccgccaacccaggaaagtgcctgtcgtgcacaaactcaacattcactttcaccacctgtagaatattacatccctctgacatcactcaggttacccccagctctgggttcccttcattatcctgtggaagtagcggtagcagttcatccaacacggctgtgaattctcctgccttgtcctatagactcagcattggtgagtccatcaccaaccgacgagattccactacaaccttcagtagcaccatgagcttggccaaacttctacaagagcgaggcatctctgccaaagtgtaccacagcccaatttcagagaaccccctccagcctctccctaaatccctggctatcccttccacaccaccaaattcaccatctcactcaccttgcccttctcctttaccctttgagcctcgagtgcatctctctgaaaattttttggcctctcgaccagctgagacattcctccaggagatgtatggcttgagaccctcccggaaccctcctgatgttggccagttgaagatgaacttagtggacaggctgaagagactggggatagccagagtggtcaagaaccctggtgcccaagagaatggaagatgccaggaggcagaaattggtcctcaaaaaccagattctgctgtttatttaaattcaggtagcagtttattaggtggactaaggaggaatcagagtcttccagtcataatgggtagctttgctgccccagtttgcacatcctcacccaaaatgggtgtcctgaaggaggactgaggttcagcagttaactgaccttttatacaagttagcacatgaaggatagatatgcactgaaacatgtggtctggtctgacttgagagaaaaggaatgttgcacaagggttgtgaatgtgaaagggggaatggaggaatggaaataaaattgggatgagccctaatggaggaagtcgggcaaattgaaagtataaatgaatgggccatgagtgttcagagggagaaaagaaaggtttaatatactccttcagttgagttttcttgtcttgaacataaaaagtgaatacaaataaattcagtaatactaaaacatacagagatactgaacttgctggcacatttacttctggtaagcataaagcagagagaacccaggttagaaggatgggaagagaaaaggagcagttttattgcttatagaaagccgttctgaggggttggtggggtaagctcagtctattactgagacaatagtgagatggcttatatgtttcccctgttaatatctggttaaattatgtatccatcaaatggtatgctcgcagcattagcaaaattaggagtttcatctttttcattgaatcacaggtggagactcctattttcctttctgttttcaggcctttgagcccctgggagcccaaataccactcaattattttgtatttatgattaataaaagttcattttttaaatttgtatttttatacaacctccaaaaaaaaaaacaactgggtagagggtgggagggatttacttttaagaggcaaaatgtgagtaaattgaaaccaagaaaacttgtttttagaatatttcgtctgaataagtacagtagccaaggaatacaaacataattgcatgtttttaaaaattccttggaggctggaaggggttaagccagaagtgcaatcaataggaattagggaatgttgtatatttatatatgtaaactttttttgtaagaaaagttggtgacaactaaaccaactttttccaaagtgcgctatgcatatttttaatgaaagatgacatgtatttgcacaaaaattctcaggcacattaaattattgtaaactgaagtaaaacccgggtgcttgctttgagattgtggttttttcttcctaatgtaaaataaaataaaacacatctgccttcttgatatttatagaattagagaataaactttttaatgggggagtcaaagctttttctttttctctaaggttctttttttttattcaaactgtatgaaatggcaaagtgaggctctggggttagatttcagcattcagcagttgacacaggctaagaaatggaaagaagtagatctgttttttctcaatgttgctgagcaaagtctgcttctcatcagatgacgtggctttgtctagacagcacgcagttcagaaagaaatgtctttatacaaaagacatgatagagaaaagatgagagaggggactaattattttgtttatgaaaatggcaagtaaattacttgatctttttggtgcttaatttgcaaatgttttgttcctttgtcctgacttaaaggcagttttctgaagaactcttgactcttgctcctatggttcccataggcacacctattcccaggccaaggagagtccttcctctccccttttgaggcatccccgccatccccccacttagagctatgtgctcaaaaagccaacatgaatgcagtggtaaaaatttgttagtttcttatactttttagaatctctcaataaaatttttctaaataaattccacaaaaacaaagggtgaagatggtctctccctttcgttccccttcactcagttgtgctgaggtcaatagagtgtagagtttcagaaaggattccagcaggtttatatgtgaatataagtgtccctgaatggggcaggcattaaatagaagaatccctgctgtttaaatttcccgcatattccaattcacttttaaaaaataccatttgaatttgtatttcataaagtgactctggggtgcttactttagtcaattcttaaaattttttatttgttccctaagaaagtaattactgtttctgttgcctggacagttacagtttccaggaaacatcaggaagtaggaaactgtagggccagagagtagtacaacgttaaattgtccgatttatgtgtattacttaaagctataaattgaactagatcttgccgtgctctgtattgagtataatttgtatacttttttataattaatgactaaatgatcactttggaggcagggtggtgggggtgtattagcagccaaataagcacatctgatcaaaaagaaccaggcttagattttttttaagtacattgatgttgatgttccaccagaaacaccttaagtgtatactgttgtgtaatgtctctagaaaggaatcctgtcttaaaactgggttttgctgttttttgaagtttctacctaaaatcatttttggtatatcctgataatctctataatactagaattgtctgcaaaatatagtaagaagaattggagcctaatagctgattcctcccaatttatctgttatgttttgtcactattcacattttagtcttttctacgataaaaattgtatgtgtactttcatgccagtataggaaacctcaatcttttttttttttcgcctttaagaaggttttcagtgattatacctcaggtatttctgagtgtcctattgtctaataggagaaatatcttcccgagctcagaattaaaagttctcctaaattatgaagatcccaaatcttatgtaaataaccttaggcatgagtccttagggagaagttaatgaccattgttaaagtgcttttttagaaaatgttgtgctgtatgttcttgatttgacataaatgaatagactttggcaagggaggaaataagttaaaaggcagcttacaagagcctattccctataaagggtataattttacacagtactcaaagcttgttatcttttctgaccattttagtacagaattagtacttggtggttactaacatcaacttgtgacatctagaactagggctcttagtgtttagtgggccacttctctgatgtcagatgcatgcagacctgtactccacatgcaacccaacagcagtgcagtgtgataactgagcggtcgcatggcagaggacatccccctcagagtgggcacaagtgccctctagggcagccaggggaatactattgttcgatacctgggatttgactttgtcaaacagctctttgtgcccctatctttgttttgtcaaatgtagatcagttaataaacatgagtagcttgaaaaaaaaaanaaaanaaaaaanaanaaaannaaanaaacanaanaanaaaaaannnaaaaaaacaaaaaagagagagagaggggagaaaaaaaagaataataaataaagagagaggcagcacaaaaaaaataaacaagaccagaggccgcggacagggggcgtgtcctctatataggtgagatgtgactatatcttctatatacaccaccgagggagtcggtggtggcagagttgtatatataaaccagcgtagaagggtgggagagcacatactgtgtggcctccatggtagagcaatatcgttgcgtcgaagaggaaaaagcactctgtctctgcgcgtaatcacaagagaacaaaatacatatgaccaaccactctctctccacacaaataatctttacgacactcccttaagcacggacatctactatcccatcatattccatcaaagacgtctctatctcagaatgaaaaatcacacaaacaagcaattatacactctacgccgggtgtagtacgcgtataacggcggatgtagcgggagaccctaatccatcgccacaagaaagaagtaataagtaaccaccaaaggagagtgataaatgaatggtcgacgttgtcgcaagatgaaaatagagcagtggcggcagcagatgctgacgagcgggctggactgcaagaggaaggggagatc

SEQ ID NO: 368935 - DNA, 2713 bp, Homo sapiens
agcggattgacccggtgtcgccgcagaaccgaggtcgccgagtgatgatgttgtgaagtcgcccgcctgtccctgccacgcccgggcggttgctggcagtgggagcagcggcagcagcttcggctgctgctttcaggctgccgctgcattaggggcttcctgaggaagcgcgggcggacgacagaggatgccgaaccactccagtcatgactgtccaaagtatgataatcacatgagagtgctcgttgctacggatgtcatttgactcatcagagaaaatctgtctaaaagaaaatatccatgtgaccaaatccatttcattattgaatggcttgatggatttcctttactctgattcataccaaagctgtccttctcaaccaaagcaagaaaggatcctgcatgagtcaatcccagaatgcaatttttacatcaccaacaggtgaagaaaacctcatgaatagcaatcacagagactcggagagcatcactgatgtctgctccaatgaggatctccctgaagttgagctggtgagtctgctagaagaacaactaccacagtataggctaaaagtagacactctctttctatatgaaaatcaagactggactcagtctccacaccagcggcagcatgcatctgatgctctctctccagtccttgctgaagagactttccgttacatgattctaggcacagacagggtggagcagatgaccaaaacttacaatgacatcgacatggttacacatctcctggcagagagggatcgtgatctggaactcgctgctcgaattggacaagctctcttaaagcggaaccatgtcttatctgagcagaacgaatccctggaggagcaattgggacaagcctttgatcaagttaatcagctgcagcatgagctatgcaagaaagatgagttacttcgaatcgtctccattgcttctgaagaaagtgaaactgattccagctgttctacacctcttcggttcaatgagtcctttagcttatctcaagggttgctgcagttggaaatgctgcaagaaaagctcaaggaactggaagaagagaatatggctcttcgatccaaggcttgtcacataaagacagaaactgttacctatgaagaaaaggaacaacagcttgtcagcgactgtgttaaagaacttcgtgaaacaaatgctcagatgtccagaatgactgaagaattgtcagggaagagtgatgagctgattcgataccaagaagagctttcctctcttttgtcacagattgtagaccttcagcataaacttaaagaacatgtgattgagaaggaagaactaaaacttcacctgcaagcttccaaagatgcccaacggcaactgacaatggagctgcacgagttacaagacaggaatatggagtgtctaggaatgttacatgaatcccaagaagaaataaaggaacttcgtagtagatctggccctactgctcatctctacttctcccaatcatatggagcttttactggggaatctttggcagctgagattgaggggactatgcgtaaaaagctgagtttggatgaggaatcttctctctttaaacaaaaagcccaacagaagcgggtatttgataccgtcaggattgccaatgacacacggggccgctctatctcattcccagctctgttacccattccaggctccaaccgttcaagtgtcatcatgacagcaaaaccttttgagtctggtcttcagcaaacagaggacaaatcactcctgaaccaggggagcagctcagaggaggttgcagggagctcccagaagatgggccaaccaggaccctcaggagatagtgatttggctacagcactgcatcgccttagcttgcgtcgacaaaactatttaagtgagaagcagttctttgctgaagaatggcagcggaagatccaggttctggcagaccagaaggaaggagttagtggctgtgtcaccccgacagagagccttgcctctctctgcaccacccagtcagagatcacagacctcagcagtgccagttgccttcgaggttttatgccagaaaaattacaaattgtcaagccccttgaaggatcacaaactctgtatcactggcagcagcttgctcaaccaaacttgggaaccatccttgatccacgaccaggtgtcattactaaaggctttacccagttgcccggggatgctatttatcacatctcagatttagaagaggatgaagaggagggtattacttttcaggttcagcaacctcttgaagtggaagagaaactttcaacatccaagccagtaacagggatcttcctgccacccattacttcagcaggtggaccagttacaggtgagaagagtgtctggttgaatatggtataataaccagaagtactttgcattctgacttactagacagtcagctggctacctctgctcactggagggtacttaatcttgcatatcagataatgaaaatctatagcattagtggcattcctaattctctccactttatcttagccagcctgcgttagtagattgggtagagagctggatgaattcaagtcagtggttcacaaaccttttgggctcagaaactctttatactctaaaaaatcattgagaattccagagagcctatctgtgcaggttatatctattgacatttaatatatcataaatcaaaactgaaaaa

SEQ ID NO: 368936 - DNA, 460 bp, Homo sapiens
ttttttaatgtattttttcagttttctcatttctaatctttgtttatgccttttgctttacagttttaaagtattggattcacctatatactaaccagttgatactagtacaatctttatgtatatttatttcatttccagatttggggatttttaatacaaaaggtacttgataaatgctatattattaataaataatgatgagctttttacattattaatctagtctttcaatcttgtatttgctccctaaaaatctatttcagttgcaaccgccaacccaggaaagtgcctgtcgtgcacaaactcaacattcactttcaccacctgtagaatattacatccctctgacatcactcaggttacccccaggtaagagtgcctgggaaatctggggcctcacttctttcctcagctatattttcatgaatttctttttaaaattaccttcattttaatt

SEQ ID NO: 368937 - DNA, 645 bp, Homo sapiens
acattagctcacatggtagatgatcatagatggttatgataatacagcagaattccaattaaattcctttataacagcataacccctcactgataccccttagtaactttaatttagattagactgtaaagcaatcagtaatttaatccattctcccagccaagattctcataagtgagtggccaaacttcctgtcttaccaggggaggaggagatagtcaagatgtgactgccttttgatcatttgatactttcttaattattgtgtggtatacacttcgtttgtaatgattggactatttcttgagtgtctaatacatgaaacatttcttttttttcacatatatttttattctcctgaatgactttttgtaaaaggctggggtttttgttgttgttatctctcaattcttattaatatttaaattttttcattattgctaaagcctataaatagttgtttttaactatattagttctaggcacagacagggtggagcagatgaccaaaacttacaatgacatcgacatggttacacatctcctggcagaggtaggaatatcttttctttctccagtacaaaaaggtaaaacttgaggatcatttggaatctatcaaatttgcacatcaaatggaaaatgttg

SEQ ID NO: 368938 - DNA, 4633 bp, Homo sapiens
tgcataacaataaagaagactagtacaacttggtgatattgccttgttttgtgctgaggagccatcaattttgccttccattgcttttgcaccagcagtgcaaatgtcaacccagtcaaaaagaaaaggcctctgtcttaccattactatgaaagtagctttgacatgtagactcccacagagtctgcagaccacactttgagaaccactagagtagataaatttggctgaatcatttggatactagatcttgatttttttaatgtattttttcagttttctcatttctaatctttgtttatgccttttgctttacagttttaaagtattggattcacctatatactaaccagttgatactagtacaatctttatgtatatttatttcatttccagatttggggatttttaatacaaaaggtacttgataaatgctatattattaataaataatgatgagctttttacattattaatctagtctttcaatcttgtatttgctccctaaaaatctatttcagttgcaaccgccaacccaggaaagtgcctgtcgtgcacaaactcaacattcactttcaccacctgtagaatattacatccctctgacatcactcaggttacccccagctctgggttcccttcattatcctgtggaagtagcggtagcagttcatccaacacggctgtgaattctcctgccttgtcctatagactcagcattggtgagtccatcaccaaccgacgagattccactacaaccttcagtagcaccatgagcttggccaaacttctacaagagcgaggcatctctgccaaagtgtaccacagcccaatttcagagaaccccctccagcctctccctaaatccctggctatcccttccacaccaccaaattcaccatctcactcaccttgcccttctcctttaccctttgagcctcgagtgcatctctctgaaaattttttggcctctcgaccagctgagacattcctccaggagatgtatggcttgagaccctcccggaaccctcctgatgttggccagttgaagatgaacttagtggacaggctgaagagactggggatagccagagtggtcaagaaccctggtgcccaagagaatggaagatgccaggaggcagaaattggtcctcaaaaaccagattctgctgtttatttaaattcaggtagcagtttattaggtggactaaggaggaatcagagtcttccagtcataatgggtagctttgctgccccagtttgcacatcctcacccaaaatgggtgtcctgaaggaggactgaggttcagcagttaactgaccttttatacaagttagcacatgaaggatagatatgcactgaaacatgtggtctggtctgacttgagagaaaaggaatgttgcacaagggttgtgaatgtgaaagggggaatggaggaatggaaataaaattgggatgagccctaatggaggaagtcgggcaaattgaaagtataaatgaatgggccatgagtgttcagagggagaaaagaaaggtttaatatactccttcagttgagttttcttgtcttgaacataaaaagtgaatacaaataaattcagtaatactaaaacatacagagatactgaacttgctggcacatttacttctggtaagcataaagcagagagaacccaggttagaaggatgggaagagaaaaggagcagttttattgcttatagaaagccgttctgaggggttggtggggtaagctcagtctattactgagacaatagtgagatggcttatatgtttcccctgttaatatctggttaaattatgtatccatcaaatggtatgctcgcagcattagcaaaattaggagtttcatctttttcattgaatcacaggtggagactcctattttcctttctgttttcaggcctttgagcccctgggagcccaaataccactcaattattttgtatttatgattaataaaagttcattttttaaatttgtatttttatacaacctccaaaaaaaaaaacaactgggtagagggtgggagggatttacttttaagaggcaaaatgtgagtaaattgaaaccaagaaaacttgtttttagaatatttcgtctgaataagtacagtagccaaggaatacaaacataattgcatgtttttaaaaattccttggaggctggaaggggttaagccagaagtgcaatcaataggaattagggaatgttgtatatttatatatgtaaactttttttgtaagaaaagttggtgacaactaaaccaactttttccaaagtgcgctatgcatatttttaatgaaagatgacatgtatttgcacaaaaattctcaggcacattaaattattgtaaactgaagtaaaacccgggtgcttgctttgagattgtggttttttcttcctaatgtaaaataaaataaaacacatctgccttcttgatatttatagaattagagaataaactttttaatgggggagtcaaagctttttctttttctctaaggttctttttttttattcaaactgtatgaaatggcaaagtgaggctctggggttagatttcagcattcagcagttgacacaggctaagaaatggaaagaagtagatctgttttttctcaatgttgctgagcaaagtctgcttctcatcagatgacgtggctttgtctagacagcacgcagttcagaaagaaatgtctttatacaaaagacatgatagagaaaagatgagagaggggactaattattttgtttatgaaaatggcaagtaaattacttgatctttttggtgcttaatttgcaaatgttttgttcctttgtcctgacttaaaggcagttttctgaagaactcttgactcttgctcctatggttcccataggcacacctattcccaggccaaggagagtccttcctctccccttttgaggcatccccgccatccccccacttagagctatgtgctcaaaaagccaacatgaatgcagtggtaaaaatttgttagtttcttatactttttagaatctctcaataaaatttttctaaataaattccacaaaaacaaagggtgaagatggtctctccctttcgttccccttcactcagttgtgctgaggtcaatagagtgtagagtttcagaaaggattccagcaggtttatatgtgaatataagtgtccctgaatggggcaggcattaaatagaagaatccctgctgtttaaatttcccgcatattccaattcacttttaaaaaataccatttgaatttgtatttcataaagtgactctggggtgcttactttagtcaattcttaaaattttttatttgttccctaagaaagtaattactgtttctgttgcctggacagttacagtttccaggaaacatcaggaagtaggaaactgtagggccagagagtagtacaacgttaaattgtccgatttatgtgtattacttaaagctataaattgaactagatcttgccgtgctctgtattgagtataatttgtatacttttttataattaatgactaaatgatcactttggaggcagggtggtgggggtgtattagcagccaaataagcacatctgatcaaaaagaaccaggcttagattttttttaagtacattgatgttgatgttccaccagaaacaccttaagtgtatactgttgtgtaatgtctctagaaaggaatcctgtcttaaaactgggttttgctgttttttgaagtttctacctaaaatcatttttggtatatcctgataatctctataatactagaattgtctgcaaaatatagtaagaagaattggagcctaatagctgattcctcccaatttatctgttatgttttgtcactattcacattttagtcttttctacgataaaaattgtatgtgtactttcatgccagtataggaaacctcaatcttttttttttttcgcctttaagaaggttttcagtgattatacctcaggtatttctgagtgtcctattgtctaataggagaaatatcttcccgagctcagaattaaaagttctcctaaattatgaagatcccaaatcttatgtaaataaccttaggcatgagtccttagggagaagttaatgaccattgttaaagtgcttttttagaaaatgttgtgctgtatgttcttgatttgacataaatgaatagactttggcaagggaggaaataagttaaaaggcagcttacaagagcctattccctataaagggtataattttacacagtactcaaagcttgttatcttttctgaccattttagtacagaattagtacttggtggttactaacatcaacttgtgacatctagaactagggctcttagtgtttagtgggccacttctctgatgtcagatgcatgcagacctgtactccacatgcaacccaacagcagtgcagtgtgataactgagcggtcgcatggcagaggacatccccctcagagtgggcacaagtgccctctagggcagccaggggaatactattgttcgatacctgggatttgactttgtcaaacagctctttgtgcccctatctttgttttgtcaaatgtagatcagttaataaacatgagtagcttgaa

SEQ ID NO: 368939 - DNA, 7119 bp, Homo sapiens
  misc_feature (6434)..(6434): n is a, c, g, or t
  misc_feature (6439)..(6439): n is a, c, g, or t
  misc_feature (6446)..(6446): n is a, c, g, or t
  misc_feature (6449)..(6449): n is a, c, g, or t
  misc_feature (6454)..(6455): n is a, c, g, or t
  misc_feature (6459)..(6459): n is a, c, g, or t
  misc_feature (6465)..(6465): n is a, c, g, or t
  misc_feature (6468)..(6468): n is a, c, g, or t
  misc_feature (6471)..(6471): n is a, c, g, or t
  misc_feature (6478)..(6480): n is a, c, g, or t
agcggattgacccggtgtcgccgcagaaccgaggtcgccgagtgatgatgttgtgaagtcgcccgcctgtccctgccacgcccgggcggttgctggcagtgggagcagcggcagcagcttcggctgctgctttcaggctgccgctgcattaggggcttcctgaggaagcgcgggcggacgacagaggatgccgaaccactccagtcatgactgtccaaagtatgataatcacatgagagtgctcgttgctacggatgtcatttgactcatcagagaaaatctgtctaaaagaaaatatccatgtgaccaaatccatttcattattgaatggcttgatggatttcctttactctgattcataccaaagctgtccttctcaaccaaagcaagaaaggatcctgcatgagtcaatcccagaatgcaatttttacatcaccaacaggtgaagaaaacctcatgaatagcaatcacagagactcggagagcatcactgatgtctgctccaatgaggatctccctgaagttgagctggtgagtctgctagaagaacaactaccacagtataggctaaaagtagacactctctttctatatgaaaatcaagactggactcagtctccacaccagcggcagcatgcatctgatgctctctctccagtccttgctgaagagactttccgttacatgattctaggcacagacagggtggagcagatgaccaaaacttacaatgacatcgacatggttacacatctcctggcagagagggatcgtgatctggaactcgctgctcgaattggacaagctctcttaaagcggaaccatgtcttatctgagcagaacgaatccctggaggagcaattgggacaagcctttgatcaagttaatcagctgcagcatgagctatgcaagaaagatgagttacttcgaatcgtctccattgcttctgaagaaagtgaaactgattccagctgttctacacctcttcggttcaatgagtcctttagcttatctcaagggttgctgcagttggaaatgctgcaagaaaagctcaaggaactggaagaagagaatatggctcttcgatccaaggcttgtcacataaagacagaaactgttacctatgaagaaaaggaacaacagcttgtcagcgactgtgttaaagaacttcgtgaaacaaatgctcagatgtccagaatgactgaagaattgtcagggaagagtgatgagctgattcgataccaagaagagctttcctctcttttgtcacagattgtagaccttcagcataaacttaaagaacatgtgattgagaaggaagaactaaaacttcacctgcaagcttccaaagatgcccaacggcaactgacaatggagctgcacgagttacaagacaggaatatggagtgtctaggaatgttacatgaatcccaagaagaaataaaggaacttcgtagtagatctggccctactgctcatctctacttctcccaatcatatggagcttttactggggaatctttggcagctgagattgaggggactatgcgtaaaaagctgagtttggatgaggaatcttctctctttaaacaaaaagcccaacagaagcgggtatttgataccgtcaggattgccaatgacacacggggccgctctatctcattcccagctctgttacccattccaggctccaaccgttcaagtgtcatcatgacagcaaaaccttttgagtctggtcttcagcaaacagaggacaaatcactcctgaaccaggggagcagctcagaggaggttgcagggagctcccagaagatgggccaaccaggaccctcaggagatagtgatttggctacagcactgcatcgccttagcttgcgtcgacaaaactatttaagtgagaagcagttctttgctgaagaatggcagcggaagatccaggttctggcagaccagaaggaaggagttagtggctgtgtcaccccgacagagagccttgcctctctctgcaccacccagtcagagatcacagacctcagcagtgccagttgccttcgaggttttatgccagaaaaattacaaattgtcaagccccttgaaggatcacaaactctgtatcactggcagcagcttgctcaaccaaacttgggaaccatccttgatccacgaccaggtgtcattactaaaggctttacccagttgcccggggatgctatttatcacatctcagatttagaagaggatgaagaggagggtattacttttcaggttcagcaacctcttgaagtggaagagaaactttcaacatccaagccagtaacagggatcttcctgccacccattacttcagcaggtggaccagttacagttgcaaccgccaacccaggaaagtgcctgtcgtgcacaaactcaacattcactttcaccacctgtagaatattacatccctctgacatcactcaggttacccccagctctgggttcccttcattatcctgtggaagtagcggtagcagttcatccaacacggctgtgaattctcctgccttgtcctatagactcagcattggtgagtccatcaccaaccgacgagattccactacaaccttcagtagcaccatgagcttggccaaacttctacaagagcgaggcatctctgccaaagtgtaccacagcccaatttcagagaaccccctccagcctctccctaaatccctggctatcccttccacaccaccaaattcaccatctcactcaccttgcccttctcctttaccctttgagcctcgagtgcatctctctgaaaattttttggcctctcgaccagctgagacattcctccaggagatgtatggcttgagaccctcccggaaccctcctgatgttggccagttgaagatgaacttagtggacaggctgaagagactggggatagccagagtggtcaagaaccctggtgcccaagagaatggaagatgccaggaggcagaaattggtcctcaaaaaccagattctgctgtttatttaaattcaggtagcagtttattaggtggactaaggaggaatcagagtcttccagtcataatgggtagctttgctgccccagtttgcacatcctcacccaaaatgggtgtcctgaaggaggactgaggttcagcagttaactgaccttttatacaagttagcacatgaaggatagatatgcactgaaacatgtggtctggtctgacttgagagaaaaggaatgttgcacaagggttgtgaatgtgaaagggggaatggaggaatggaaataaaattgggatgagccctaatggaggaagtcgggcaaattgaaagtataaatgaatgggccatgagtgttcagagggagaaaagaaaggtttaatatactccttcagttgagttttcttgtcttgaacataaaaagtgaatacaaataaattcagtaatactaaaacatacagagatactgaacttgctggcacatttacttctggtaagcataaagcagagagaacccaggttagaaggatgggaagagaaaaggagcagttttattgcttatagaaagccgttctgaggggttggtggggtaagctcagtctattactgagacaatagtgagatggcttatatgtttcccctgttaatatctggttaaattatgtatccatcaaatggtatgctcgcagcattagcaaaattaggagtttcatctttttcattgaatcacaggtggagactcctattttcctttctgttttcaggcctttgagcccctgggagcccaaataccactcaattattttgtatttatgattaataaaagttcattttttaaatttgtatttttatacaacctccaaaaaaaaaaacaactgggtagagggtgggagggatttacttttaagaggcaaaatgtgagtaaattgaaaccaagaaaacttgtttttagaatatttcgtctgaataagtacagtagccaaggaatacaaacataattgcatgtttttaaaaattccttggaggctggaaggggttaagccagaagtgcaatcaataggaattagggaatgttgtatatttatatatgtaaactttttttgtaagaaaagttggtgacaactaaaccaactttttccaaagtgcgctatgcatatttttaatgaaagatgacatgtatttgcacaaaaattctcaggcacattaaattattgtaaactgaagtaaaacccgggtgcttgctttgagattgtggttttttcttcctaatgtaaaataaaataaaacacatctgccttcttgatatttatagaattagagaataaactttttaatgggggagtcaaagctttttctttttctctaaggttctttttttttattcaaactgtatgaaatggcaaagtgaggctctggggttagatttcagcattcagcagttgacacaggctaagaaatggaaagaagtagatctgttttttctcaatgttgctgagcaaagtctgcttctcatcagatgacgtggctttgtctagacagcacgcagttcagaaagaaatgtctttatacaaaagacatgatagagaaaagatgagagaggggactaattattttgtttatgaaaatggcaagtaaattacttgatctttttggtgcttaatttgcaaatgttttgttcctttgtcctgacttaaaggcagttttctgaagaactcttgactcttgctcctatggttcccataggcacacctattcccaggccaaggagagtccttcctctccccttttgaggcatccccgccatccccccacttagagctatgtgctcaaaaagccaacatgaatgcagtggtaaaaatttgttagtttcttatactttttagaatctctcaataaaatttttctaaataaattccacaaaaacaaagggtgaagatggtctctccctttcgttccccttcactcagttgtgctgaggtcaatagagtgtagagtttcagaaaggattccagcaggtttatatgtgaatataagtgtccctgaatggggcaggcattaaatagaagaatccctgctgtttaaatttcccgcatattccaattcacttttaaaaaataccatttgaatttgtatttcataaagtgactctggggtgcttactttagtcaattcttaaaattttttatttgttccctaagaaagtaattactgtttctgttgcctggacagttacagtttccaggaaacatcaggaagtaggaaactgtagggccagagagtagtacaacgttaaattgtccgatttatgtgtattacttaaagctataaattgaactagatcttgccgtgctctgtattgagtataatttgtatacttttttataattaatgactaaatgatcactttggaggcagggtggtgggggtgtattagcagccaaataagcacatctgatcaaaaagaaccaggcttagattttttttaagtacattgatgttgatgttccaccagaaacaccttaagtgtatactgttgtgtaatgtctctagaaaggaatcctgtcttaaaactgggttttgctgttttttgaagtttctacctaaaatcatttttggtatatcctgataatctctataatactagaattgtctgcaaaatatagtaagaagaattggagcctaatagctgattcctcccaatttatctgttatgttttgtcactattcacattttagtcttttctacgataaaaattgtatgtgtactttcatgccagtataggaaacctcaatcttttttttttttcgcctttaagaaggttttcagtgattatacctcaggtatttctgagtgtcctattgtctaataggagaaatatcttcccgagctcagaattaaaagttctcctaaattatgaagatcccaaatcttatgtaaataaccttaggcatgagtccttagggagaagttaatgaccattgttaaagtgcttttttagaaaatgttgtgctgtatgttcttgatttgacataaatgaatagactttggcaagggaggaaataagttaaaaggcagcttacaagagcctattccctataaagggtataattttacacagtactcaaagcttgttatcttttctgaccattttagtacagaattagtacttggtggttactaacatcaacttgtgacatctagaactagggctcttagtgtttagtgggccacttctctgatgtcagatgcatgcagacctgtactccacatgcaacccaacagcagtgcagtgtgataactgagcggtcgcatggcagaggacatccccctcagagtgggcacaagtgccctctagggcagccaggggaatactattgttcgatacctgggatttgactttgtcaaacagctctttgtgcccaaaaaaaanaaaanaaaaaanaanaaaannaaanaaacanaanaanaaaaaannnaaaaaaacaaaaaagagagagagaggggagaaaaaaaagaataataaataaagagagaggcagcacaaaaaaaataaacaagaccagaggccgcggacagggggcgtgtcctctatataggtgagatgtgactatatcttctatatacaccaccgagggagtcggtggtggcagagttgtatatataaaccagcgtagaagggtgggagagcacatactgtgtggcctccatggtagagcaatatcgttgcgtcgaagaggaaaaagcactctgtctctgcgcgtaatcacaagagaacaaaatacatatgaccaaccactctctctccacacaaataatctttacgacactcccttaagcacggacatctactatcccatcatattccatcaaagacgtctctatctcagaatgaaaaatcacacaaacaagcaattatacactctacgccgggtgtagtacgcgtataacggcggatgtagcgggagaccctaatccatcgccacaagaaagaagtaataagtaaccaccaaaggagagtgataaatgaatggtcgacgttgtcgcaagatgaaaatagagcagtggcggcagcagatgctgacgagcgggctggactgcaagaggaaggggagatc

SEQ ID NO: 368940 - DNA, 3604 bp, Homo sapiens
tcggtacccatattggttggcgaggagcaagcgggggatctttttccagagttggtgagggcaccgggctgcaggaaggcagcaacaactcatctccagtggattttgtaaataacaagaggacagacttatcttcagaacatttcagtcattcctcaaagtggctagaaacttgtcagcatgaatcagatgagcagcctctagatccaattccccaaattagctctactcctaaaacgtctgaggaagcagtagacccactgggcaattatatggttaaaaccatcgtccttgtaccatctccactggggcagcaacaagacatgatatttgaggcccgtttagataccatggcagagacaaacagcatatctttaaatggacctttgagaacagacgatctggtgagagaggaggtggcaccctgcatgggagacaggttttcagaagttgctgctgtatctgagaaacctatctttcaggaatctccgtcccatctcttagaggagtctccaccaaatccctgttctgaacaactacattgctccaaggaaagcctgagcagtagaactgaggctgtgcgtgaggacttagtaccttctgaaagtaacgccttcttgccttcctctgttctctggctttccccttcaactgccttggcagcagatttccgtgtcaatcatgtggacccagaggaggaaattgtagagcatggagctatggaggaaagagaaatgaggtttcccacacatcctaaggagtctgaaacagaagatcaagcacttgtctcaagtgtggaagatattctgtccacatgcctgacaccaaatctagtagaaatggaatcccaagaagctccaggcccagcagtagaagatgttggtaggattcttggctctgatacagagtcttggatgtccccactggcctggctggaaaaaggtgtaaatacctccgtcatgctggaaaatctccgccaaagcttatcccttccctcgatgcttcgggatgctgcaattggcactacccctttctctacttgctcggtggggacttggtttactccttcagcaccacaggaaaagagtacaaacacatcccagacaggcctggttggcaccaagcacagtacttctgagacagagcagctcctgtgtggccggcctccagatctgactgccttgtctcgacatgacttggaagataacctgctgagctctcttgtcattctggaggttctctcccgccagcttcgggactggaagagccagctggctgtccctcacccagaaacccaggacagtagcacacagactgacacatctcacagtgggataactaataaacttcagcatcttaaggagagccatgagatgggacaggccctacagcaggccagaaatgtcatgcaatcatgggtgcttatctctaaagagctgatatccttgcttcacctatccctgttgcatttagaagaagataagactactgtgagtcaggagtctcggcgtgcagaaacattggtctgttgctgttttgatttgctgaagaaattgagggcaaagctccagagcctcaaagcagaaagggaggaggcaaggcacagagaggaaatggctctcagaggcaaggatgcggcagagatagtgttggaggctttctgtgcacacgccagccagcgcatcagccagctggaacaggacctagcatccatgcgggaattcagaggccttctgaaggatgcccagacccaactggtagggcttcatgccaagcaagaagagctggttcagcagacagtgagtcttacttctaccttgcaacaagactggaggtccatgcaactggattatacaacatggacagctttgctgagtcggtcccgacaactcacagagaaactcacagtcaagagccagcaagccctgcaggaacgtgatgtggcaattgaggaaaagcaggaggtttctagggtgctggaacaagtctctgcccagttagaggagtgcaaaggccaaacagaacaactggagttggaaaacagtcgtctagcaacagatctccgggctcagttgcagattctggccaacatggacagccagctaaaagagctacagagtcagcatacccattgtgcccaggacctggctatgaaggatgagttactctgccagcttacccagagcaatgaggagcaggctgctcaatggcaaaaggaagagatggcactaaaacacatgcaggcagaactgcagcagcaacaagctgtcctggccaaagaggtgcgggacctgaaagagaccttggagtttgcagaccaggagaatcaggttgctcacctggagctgggtcaggttgagtgtcaattgaaaaccacactggaagtgctccgggagcgcagcttgcagtgtgagaacctcaaggacactgtagagaacctaacggctaaactggccagcaccatagcagataaccaggagcaagatctggagaaaacacggcagtactctcaaaagctagggctgctgactgagcaactacagagcctgactctctttctacagacaaaactaaaggagaagactgaacaagagacccttctgctgagtacagcctgtcctcccacccaggaacaccctctgcctaatgacaggaccttcctgggaagcatcttgacagcagtggcagatgaagagccagaatcaactcctgtgcccttgcttggaagtgacaagagtgctttcacccgagtagcatcaatggtttcccttcagcccgcagagaccccaggcatggaggagagcctggcagaaatgagtattatgactactgagcttcagagtctttgttccctgctacaagagtctaaagaagaagccatcaggactctgcagcgaaaaatttgtgagctgcaagctaggctgcaggcccaggaagaacagcatcaggaagtccagaaggcaaaagaagcagacatagagaagctgaaccaggccttgtgcttgcgctacaagaatgaaaaggagctccaggaagtgatacagcagcagaatgagaagatcctagaacagatagacaagagtggcgagctcataagccttagagaggaggtgacccaccttacccgctcacttcggcgtgcggagacagagaccaaagtgctccaggaggccctggcaggccagctggactccaactgccagcctatggccaccaattggatccaggagaaagtgtggctctctcaggaggtggacaaactgagagtgatgttcctggagatgaaaaatgagaaggaaaaactcatgatcaagttccagagccatagaaatatcctagaggagaaccttcggcgctctgacaaggagttagaaaaactagatgacattgttcagcatatttataagaccctgctctctattccagaggtggtgaggggatgcaaagaactacagggattgctggaatttctgagctaagaaactgaaagccagaatctgcttcacctctttttacctgcaatacccccttaccccaataccaagaccaactggcatagagccaactgagataaatgctatttaaataaagtgtatttaatgaa

SEQ ID NO: 368941 - DNA, 4085 bp, Homo sapiens
  misc_feature (2538)..(2538): n is a, c, g, or t
caggagggatggactcctggactctccagctacctgcgtggtcctccccggtgtgaggacagaagaccggtcctggaccgggcccgcatccagccctaccgccggtgtctgaggtgagggctccgtcagcggaaaacgctcgacaacggaggggcaggcagggccgggggcgtggtcaacgcgggccccgccccccgggctctacccccgagcgtacgcgcgcgcctgaagcagccaaccaggaagcgcagagcaggttcaaacacagacggcgggtgaacatggcgtcctcgacttggtctgagacgtgataggcctgccttctggttgaagatgtggcgagtgaaaaaactgagcctcagcctgtcgccttcgccccagacgggaaaaccatctatgagaactcctctccgtgaacttaccctgcagcccggtgccctcaccaactctggaaaaagatcccccgcttgctcctcgctgaccccatcactgtgcaagctggggctgcaggaaggcagcaacaactcatctccagtggattttgtaaataacaagaggacagacttatcttcagaacatttcagtcattcctcaaagtggctagaaacttgtcagcatgaatcagatgagcagcctctagatccaattccccaaattagctctactcctaaaacgtctgaggaagcagtagacccactgggcaattatatggttaaaaccatcgtccttgtaccatctccactggggcagcaacaagacatgatatttgaggcccgtttagataccatggcagagacaaacagcatatctttaaatggacctttgagaacagacgatctggtgagagaggaggtggcaccctgcatgggagacaggttttcagaagttgctgctgtatctgagaaacctatctttcaggaatctccgtcccatctcttagaggagtctccaccaaatccctgttctgaacaactacattgctccaaggaaagcctgagcagtagaactgaggctgtgcgtgaggacttagtaccttctgaaagtaacgccttcttgccttcctctgttctctggctttccccttcaactgccttggcagcagatttccgtgtcaatcatgtggacccagaggaggaaattgtagagcatggagctatggaggaaagagaaatgaggtttcccacacatcctaaggagtctgaaacagaagatcaagcacttgtctcaagtgtggaagatattctgtccacatgcctgacaccaaatctagtagaaatggaatcccaagaagctccaggcccagcagtagaagatgttggtaggattcttggctctgatacagagtcttggatgtccccactggcctggctggaaaaaggtgtaaatacctccgtcatgctggaaaatctccgccaaagcttatcccttccctcgatgcttcgggatgctgcaattggcactacccctttctctacttgctcggtggggacttggtttactccttcagcaccacaggaaaagagtacaaacacatcccagacaggcctggttggcaccaagcacagtacttctgagacagagcagctcctgtgtggccggcctccagatctgactgccttgtctcgacatgacttggaagataacctgctgagctctcttgtcattctggaggttctctcccgccagcttcgggactggaagagccagctggctgtccctcacccagaaacccaggacagtagcacacagactgacacatctcacagtgggataactaataaacttcagcatcttaaggagagccatgagatgggacaggccctacagcaggccagaaatgtcatgcaatcatgggtgcttatctctaaagagctgatatccttgcttcacctatccctgttgcatttagaagaagataagactactgtgagtcaggagtctcggcgtgcagaaacattggtctgttgctgttttgatttgctgaagaaattgagggcaaagctccagagcctcaaagcagaaagggaggaggcaaggcacagagaggaaatggctctcagaggcaaggatgcggcagagatagtgttggaggctttctgtgcacacgccagccagcgcatcagccagctggaacaggacctagcatccatgcgggaattcagaggccttctgaaggatgcccagacccaactggtagggcttcatgccaagcaagaagagctggttcagcagacagtgagtcttacttctaccttgcaacaagactggaggtccatgcaactggattatacaacatggacagctttgctgagtcggtcccgacaactcacagagaaactcacagtcaagagccagcaagccctgcaggaacgtgatgtggcaattgaggaaaagcaggaggtttctagggtgctggaacaagtctctgcccagttagaggagtgcaaaggccaaacagaacaactggagttggaaaacagtcgtctagcaacagatctccgggctcagttgcagattctggcccggagatctgcaacngatctccgggctcagttgcagattctggccaacatggacagccagctaaaagagctacagagtcagcatacccattgtgcccaggacctggctatgaaggatgagttactctgccagcttacccagagcaatgaggagcaggctgctcaatggcaaaaggaagagatggcactaaaacacatgcaggcagaactgcagcagcaacaagctgtcctggccaaagaggtgcgggacctgaaagagaccttggagtttgcagaccaggagaatcaggttgctcacctggagctgggtcaggttgagtgtcaattgaaaaccacactggaagtgctccgggagcgcagcttgcagtgtgagaacctcaaggacactgtagagaacctaacggctaaactggccagcaccatagcagataaccaggagcaagatctggagaaaacacggcagtactctcaaaagctagggctgctgactgagcaactacagagcctgactctctttctacagacaaaactaaaggagaagactgaacaagagacccttctgctgagtacagcctgtcctcccacccaggaacaccctctgcctaatgacaggaccttcctgggaagcatcttgacagcagtggcagatgaagagccagaatcaactcctgtgcccttgcttggaagtgacaagagtgctttcacccgagtagcatcaatggtttcccttcagcccgcagagaccccaggcatggaggagagcctggcagaaatgagtattatgactactgagcttcagagtctttgttccctgctacaagagtctaaagaagaagccatcaggactctgcagcgaaaaatttgtgagctgcaagctaggctgcaggcccaggaagaacagcatcaggaagtccagaaggcaaaagaagcagacatagagaagctgaaccaggccttgtgcttgcgctacaagaatgaaaaggagctccaggaagtgatacagcagcagaatgagaagatcctagaacagatagacaagagtggcgagctcataagccttagagaggaggtgacccaccttacccgctcacttcggcgtgcggagacagagaccaaagtgctccaggaggccctggcaggccagctggactccaactgccagcctatggccaccaattggatccaggagaaagtgtggctctctcaggaggtggacaaactgagagtgatgttcctggagatgaaaaatgagaaggaaaaactcatgatcaagttccagagccatagaaatatcctagaggagaaccttcggcgctctgacaaggagttagaaaaactagatgacattgttcagcatatttataagaccctgctctctattccagaggtggtgaggggatgcaaagaactacagggattgctggaatttctgagctaagaaactgaaagccagaatctgcttcacctctttttacctgcaatacccccttaccccaataccaagaccaactggcatagagccaactgagataaatgctatttaaataaagtgtatttaatgaa

SEQ ID NO: 368942 - DNA, 4424 bp, Homo sapiens
  misc_feature (4044)..(4044): n is a, c, g, or t
caggagggatggactcctggactctccagctacctgcgtggtcctccccggtgtgaggacagaagaccggtcctggaccgggcccgcatccagccctaccgccggtgtctgaggtgagggctccgtcagcggaaaacgctcgacaacggaggggcaggcagggccgggggcgtggtcaacgcgggccccgccccccgggctctacccccgagcgtacgcgcgcgcctgaagcagccaaccaggaagcgcagagcaggttcaaacacagacggcgggtgaacatggcgtcctcgacttggtctgagacgtgataggcctgccttctggttgaagatgtggcgagtgaaaaaactgagcctcagcctgtcgccttcgccccagacgggaaaaccatctatgagaactcctctccgtgaacttaccctgcagcccggtgccctcaccaactctggaaaaagatcccccgcttgctcctcgctgaccccatcactgtgcaagctggggctgcaggaaggcagcaacaactcatctccagtggattttgtaaataacaagaggacagacttatcttcagaacatttcagtcattcctcaaagtggctagaaacttgtcagcatgaatcagatgagcagcctctagatccaattccccaaattagctctactcctaaaacgtctgaggaagcagtagacccactgggcaattatatggttaaaaccatcgtccttgtaccatctccactggggcagcaacaagacatgatatttgaggcccgtttagataccatggcagagacaaacagcatatctttaaatggacctttgagaacagacgatctggtgagagaggaggtggcaccctgcatgggagacaggttttcagaagttgctgctgtatctgagaaacctatctttcaggaatctccgtcccatctcttagaggagtctccaccaaatccctgttctgaacaactacattgctccaaggaaagcctgagcagtagaactgaggctgtgcgtgaggacttagtaccttctgaaagtaacgccttcttgccttcctctgttctctggctttccccttcaactgccttggcagcagatttccgtgtcaatcatgtggacccagaggaggaaattgtagagcatggagctatggaggaaagagaaatgaggtttcccacacatcctaaggagtctgaaacagaagatcaagcacttgtctcaagtgtggaagatattctgtccacatgcctgacaccaaatctagtagaaatggaatcccaagaagctccaggcccagcagtagaagatgttggtaggattcttggctctgatacagagtcttggatgtccccactggcctggctggaaaaaggtgtaaatacctccgtcatgctggaaaatctccgccaaagcttatcccttccctcgatgcttcgggatgctgcaattggcactacccctttctctacttgctcggtggggacttggtttactccttcagcaccacaggaaaagagtacaaacacatcccagacaggcctggttggcaccaagcacagtacttctgagacagagcagctcctgtgtggccggcctccagatctgactgccttgtctcgacatgacttggaagataacctgctgagctctcttgtcattctggaggttctctcccgccagcttcgggactggaagagccagctggctgtccctcacccagaaacccaggacagtagcacacagactgacacatctcacagtgggataactaataaacttcagcatcttaaggagagccatgagatgggacaggccctacagcaggccagaaatgtcatgcaatcatgggtgcttatctctaaagagctgatatccttgcttcacctatccctgttgcatttagaagaagataagactactgtgagtcaggagtctcggcgtgcagaaacattggtctgttgctgttttgatttgctgaagaaattgagggcaaagctccagagcctcaaagcagaaagggaggaggcaaggcacagagaggaaatggctctcagaggcaaggatgcggcagagatagtgttggaggctttctgtgcacacgccagccagcgcatcagccagctggaacaggacctagcatccatgcgggaattcagaggccttctgaaggatgcccagacccaactggtagggcttcatgccaagcaagaagagctggttcagcagacagtgagtcttacttctaccttgcaacaagactggaggtccatgcaactggattatacaacatggacagctttgctgagtcggtcccgacaactcacagagaaactcacagtcaagagccagcaagccctgcaggaacgtgatgtggcaattgaggaaaagcaggaggtttctagggtgctggaacaagtctctgcccagttagaggagtgcaaaggccaaacagaacaactggagttggaaaacagtcgtctagcaacagatctccgggctcagttgcagattctggccaacatggacagccagctaaaagagctacagagtcagcatacccattgtgcccaggacctggctatgaaggatgagttactctgccagcttacccagagcaatgaggagcaggctgctcaatggcaaaaggaagagatggcactaaaacacatgcaggcagaactgcagcagcaacaagctgtcctggccaaagaggtgcgggacctgaaagagaccttggagtttgcagaccaggagaatcaggttgctcacctggagctgggtcaggttgagtgtcaattgaaaaccacactggaagtgctccgggagcgcagcttgcagtgtgagaacctcaaggacactgtagagaacctaacggctaaactggccagcaccatagcagataaccaggagcaagatctggagaaaacacggcagtactctcaaaagctagggctgctgactgagcaactacagagcctgactctctttctacagacaaaactaaaggagaagactgaacaagagacccttctgctgagtacagcctgtcctcccacccaggaacaccctctgcctaatgacaggaccttcctgggaagcatcttgacagcagtggcagatgaagagccagaatcaactcctgtgcccttgcttggaagtgacaagagtgctttcacccgagtagcatcaatggtttcccttcagcccgcagagaccccaggcatggaggagagcctggcagaaatgagtattatgactactgagcttcagagtctttgttccctgctacaagagtctaaagaagaagccatcaggactctgcagcgaaaaatttgtgagctgcaagctaggctgcaggcccaggaagaacagcatcaggaagtccagaaggcaaaagaagcagacatagagaagctgaaccaggccttgtgcttgcgctacaagaatgaaaaggagctccaggaagtgatacagcagcagaatgagaagatcctagaacagatagacaagagtggcgagctcataagccttagagaggaggtgacccaccttacccgctcacttcggcgtgcggagacagagaccaaagtgctccaggaggccctggcaggccagctggactccaactgccagcctatggccaccaattggatccaggagaaagtgtggctctctcaggaggtggacaaactgagagtgatgttcctggagatgaaaaatgagaaggaaaaactcatgatcaagttccagagccatagaaatatcctagaggagaaccttcggcgctctgacaaggagttagaaaaactagatgacattgttcagcatatttataagaccctgctctctattccagaggtggtgaggggatgcaaagaactacagggattgctggaatttctgagctaagaaactgaaagccagaatctgcttcacctctttttacctgcaatacccccttaccccaataccaagaccaactggcatagagccaactgagataaatgctatttaaataaagtgtatttaatgaaaaanaaaaaaacaaaaaaaaaacaaaaaaaaaaaaaaaaagagaagacaaccacaacaagaaaaaaacacacaaaggagacgaaaaaagaagcgggggggcggccccgaaaaaatactccacgccgagggggggggcccacaaaacaaagtaggagcaccaccctgatgtgtatgatagaaacagcggggggccgcccaataagagaaggggagtctataattatgaaaaaaaacaagggcgggcgcggcagggttaaaaacaaggaagcgagacggggtaggaaacaagaaggggcgcgcagcagtagtgctcggcgagaaaagcaaacccacacactagtaggggggggagcaaacaagctatgggaagacagccccccgag

SEQ ID NO: 368943 - DNA, 4279 bp, Homo sapiens
caggagggatggactcctggactctccagctacctgcgtggtcctccccggtgtgaggacagaagaccggtcctggaccgggcccgcatccagccctaccgccggtgtctgaggtgagggctccgtcagcggaaaacgctcgacaacggaggggcaggcagggccgggggcgtggtcaacgcgggccccgccccccgggctctacccccgagcgtacgcgcgcgcctgaagcagccaaccaggaagcgcagagcaggttcaaacacagacggcgggtgaacatggcgtcctcgacttggtctgagacgtgataggcctgccttctggttgaagatgtggcgagtgaaaaaactgagcctcagcctgtcgccttcgccccagacgggaaaaccatctatgagaactcctctccgtgaacttaccctgcagcccggtgccctcaccaactctggaaaaagatcccccgcttgctcctcgctgaccccatcactgtgcaagctggggctgcaggaaggcagcaacaactcatctccagtggattttgtaaataacaagaggacagacttatcttcagaacatttcagtcattcctcaaagtggctagaaacttgtcagcatgaatcagatgagcagcctctagatccaattccccaaattagctctactcctaaaacgtctgaggaagcagtagacccactgggcaattatatggttaaaaccatcgtccttgtaccatctccactggggcagcaacaagacatgatatttgaggcccgtttagataccatggcagagacaaacagcatatctttaaatggacctttgagaacagacgatctggtgagagaggaggtggcaccctgcatgggagacaggttttcagaagttgctgctgtatctgagaaacctatctttcaggaatctccgtcccatctcttagaggagtctccaccaaatccctgttctgaacaactacattgctccaaggaaagcctgagcagtagaactgaggctgtgcgtgaggacttagtaccttctgaaagtaacgccttcttgccttcctctgttctctggctttccccttcaactgccttggcagcagatttccgtgtcaatcatgtggacccagaggaggaaattgtagagcatggagctatggaggaaagagaaatgaggtttcccacacatcctaaggagtctgaaacagaagatcaagcacttgtctcaagtgtggaagatattctgtccacatgcctgacaccaaatctagtagaaatggaatcccaagaagctccaggcccagcagtagaagatgttggtaggattcttggctctgatacagagtcttggatgtccccactggcctggctggaaaaaggtgtaaatacctccgtcatgctggaaaatctccgccaaagcttatcccttccctcgatgcttcgggatgctgcaattggcactacccctttctctacttgctcggtggggacttggtttactccttcagcaccacaggaaaagagtacaaacacatcccagacaggcctggttggcaccaagcacagtacttctgagacagagcagctcctgtgtggccggcctccagatctgactgccttgtctcgacatgacttggaagataacctgctgagctctcttgtcattctggaggttctctcccgccagcttcgggactggaagagccagctggctgtccctcacccagaaacccaggacagtagcacacagactgacacatctcacagtgggataactaataaacttcagcatcttaaggagagccatgagatgggacaggccctacagcaggccagaaatgtcatgcaatcatgggtgcttatctctaaagagctgatatccttgcttcacctatccctgttgcatttagaagaagataagactactgtgagtcaggagtctcggcgtgcagaaacattggtctgttgctgttttgatttgctgaagaaattgagggcaaagctccagagcctcaaagcagaaagggaggaggcaaggcacagagaggaaatggctctcagaggcaaggatgcggcagagatagtgttggaggctttctgtgcacacgccagccagcgcatcagccagctggaacaggacctagcatccatgcgggaattcagaggccttctgaaggatgcccagacccaactggtagggcttcatgccaagcaagaagagctggttcagcagacagtgagtcttacttctaccttgcaacaagactggaggtccatgcaactggattatacaacatggacagctttgctgagtcggtcccgacaactcacagagaaactcacagtcaagagccagcaagccctgcaggaacgtgatgtggcaattgaggaaaagcaggaggtttctagggtgctggaacaagtctctgcccagttagaggagtgcaaaggccaaacagaacaactggagttggaaaacagtcgtctagcaacagatctccgggctcagttgcagattctggccaacatggacagccagctaaaagagctacagagtcagcatacccattgtgcccaggacctggctatgaaggatgagttactctgccagcttacccagagcaatgaggagcaggctgctcaatggcaaaaggaagagatggcactaaaacacatgcaggcagaactgcagcagcaacaagctgtcctggccaaagaggtgcgggacctgaaagagaccttggagtttgcagaccaggagaatcaggttgctcacctggagctgggtcaggttgagtgtcaattgaaaaccacactggaagtgctccgggagcgcagcttgcagtgtgagaacctcaaggacactgtagagaacctaacggctaaactggccagcaccatagcagataaccaggagcaagatctggagaaaacacggcagtactctcaaaagctagggctgctgactgagcaactacagagcctgactctctttctacagacaaaactaaaggagaagactgaacaagagacccttctgctgagtacagcctgtcctcccacccaggaacaccctctgcctaatgacaggaccttcctgggaagcatcttgacagcagtggcagatgaagagccagaatcaactcctgtgcccttgcttggaagtgacaagagtgctttcacccgagtagcatcaatggtttcccttcagcccgcagagaccccaggcatggaggagagcctggcagaaatgagtattatgactactgagcttcagagtctttgttccctgctacaagagtctaaagaagaagccatcaggactctgcagcgaaaaatttgtgagctgcaagctaggctgcaggcccaggaagaacagcatcaggaagtccagaaggcaaaagaagcagacatagagaagctgaaccaggccttgtgcttgcgctacaagaatgaaaaggagctccaggaagtgatacagcagcagaatgagaagatcctagaacagatagacaagagtggcgagctcataagccttagagaggaggtgacccaccttacccgctcacttcggcgtgcggagacagagaccaaagtgctccaggaggccctggcaggccagctggactccaactgccagcctatggccaccaattggatccaggagaaagtgtggctctctcaggaggtggacaaactgagagtgatgttcctggagatgaaaaatgagaaggaaaaactcatgatcaagttccagagccatagaaatatcctagaggagaaccttcggcgctctgacaaggagttagaaaaactagatgacattgttcagcatatttataaggtataggcaggagggaggtgatatcactaatgaacctggtacaaggcctggccccaggaggtactaatgagcacagatctggttcccagcctgtgctgagagctgggcctgaatcactattgcaggcttctctgtggtgtctgttttctcccctctaattcagcggctgcctcctggggctgggagccctgggccttaagtctgtggtcctgagctgcgttttctgcctctcttcccagaccctgctctctattccagaggtggtgaggggatgcaaagaactacagggattgctggaatttctgagctaagaaactgaaagccagaatctgcttcacctctttttacctgcaatacccccttaccccaataccaagaccaactggcatagagccaactgagataaatgctatttaaataaagtgtatttaatgaa

SEQ ID NO: 368944 - DNA, 4359 bp, Homo sapiens
caggagggatggactcctggactctccagctacctgcgtggtcctccccggtgtgaggacagaagaccggtcctggaccgggcccgcatccagccctaccgccggtgtctgaggtgagggctccgtcagcggaaaacgctcgacaacggaggggcaggcagggccgggggcgtggtcaacgcgggccccgccccccgggctctacccccgagcgtacgcgcgcgcctgaagcagccaaccaggaagcgcagagcaggttcaaacacagacggcgggtgaacatggcgtcctcgacttggtctgagacgtgataggcctgccttctggttgaagatgtggcgagtgaaaaaactgagcctcagcctgtcgccttcgccccagacgggaaaaccatctatgagaactcctctccgtgaacttaccctgcagcccggtgccctcaccaactctggaaaaagatcccccgcttgctcctcgctgaccccatcactgtgcaagctggggctgcaggaaggcagcaacaactcatctccagtggattttgtaaataacaagaggacagacttatcttcagaacatttcagtcattcctcaaagtggctagaaacttgtcagcatgaatcagatgagcagcctctagatccaattccccaaattagctctactcctaaaacgtctgaggaagcagtagacccactgggcaattatatggttaaaaccatcgtccttgtaccatctccactggggcagcaacaagacatgatatttgaggcccgtttagataccatggcagagacaaacagcatatctttaaatggacctttgagaacagacgatctggtgagagaggaggtggcaccctgcatgggagacaggttttcagaagttgctgctgtatctgagaaacctatctttcaggaatctccgtcccatctcttagaggagtctccaccaaatccctgttctgaacaactacattgctccaaggaaagcctgagcagtagaactgaggctgtgcgtgaggacttagtaccttctgaaagtaacgccttcttgccttcctctgttctctggctttccccttcaactgccttggcagcagatttccgtgtcaatcatgtggacccagaggaggaaattgtagagcatggagctatggaggaaagagaaatgaggtttcccacacatcctaaggagtctgaaacagaagatcaagcacttgtctcaagtgtggaagatattctgtccacatgcctgacaccaaatctagtagaaatggaatcccaagaagctccaggcccagcagtagaagatgttggtaggattcttggctctgatacagagtcttggatgtccccactggcctggctggaaaaaggtgtaaatacctccgtcatgctggaaaatctccgccaaagcttatcccttccctcgatgcttcgggatgctgcaattggcactacccctttctctacttgctcggtggggacttggtttactccttcagcaccacaggaaaagagtacaaacacatcccagacaggcctggttggcaccaagcacagtacttctgagacagagcagctcctgtgtggccggcctccagatctgactgccttgtctcgacatgacttggaagataacctgctgagctctcttgtcattctggaggttctctcccgccagcttcgggactggaagagccagctggctgtccctcacccagaaacccaggacagtagcacacagactgacacatctcacagtgggataactaataaacttcagcatcttaaggagagccatgagatgggacaggccctacagcaggccagaaatgtcatgcaatcatgggtgcttatctctaaagagctgatatccttgcttcacctatccctgttgcatttagaagaagataagactactgtgagtcaggagtctcggcgtgcagaaacattggtctgttgctgttttgatttgctgaagaaattgagggcaaagctccagagcctcaaagcagaaagggaggaggcaaggcacagagaggaaatggctctcagaggcaaggatgcggcagagatagtgttggaggctttctgtgcacacgccagccagcgcatcagccagctggaacaggacctagcatccatgcgggaattcagaggccttctgaaggatgcccagacccaactggtagggcttcatgccaagcaagaagagctggttcagcagacagtgagtcttacttctaccttgcaacaagactggaggtccatgcaactggattatacaacatggacagctttgctgagtcggtcccgacaactcacagagaaactcacagtcaagagccagcaagccctgcaggaacgtgatgtggcaattgaggaaaagcaggaggtttctagggtgctggaacaagtctctgcccagttagaggagtgcaaaggccaaacagaacaactggagttggaaaacagtcgtctagcaacagatctccgggctcagttgcagattctggccaacatggacagccagctaaaagagctacagagtcagcatacccattgtgcccaggacctggctatgaaggatgagttactctgccagcttacccagagcaatgaggagcaggctgctcaatggcaaaaggaagagatggcactaaaacacatgcaggcagaactgcagcagcaacaagctgtcctggccaaagaggtgcgggacctgaaagagaccttggagtttgcagaccaggagaatcaggttgctcacctggagctgggtcaggttgagtgtcaattgaaaaccacactggaagtgctccgggagcgcagcttgcagtgtgagaacctcaaggacactgtagagaacctaacggctaaactggccagcaccatagcagataaccaggagcaagatctggagaaaacacggcagtactctcaaaagctagggctgctgactgagcaactacagagcctgactctctttctacagacaaaactaaaggagaagactgaacaagagacccttctgctgagtacagcctgtcctcccacccaggaacaccctctgcctaatgacaggaccttcctgggaagcatcttgacagcagtggcagatgaagagccagaatcaactcctgtgcccttgcttggaagtgacaagagtgctttcacccgagtagcatcaatggtttcccttcagcccgcagagaccccaggcatggaggagagcctggcagaaatgagtattatgactactgagcttcagagtctttgttccctgctacaagagtctaaagaagaagccatcaggactctgcagcgaaaaatttgtgagctgcaagctaggctgcaggcccaggaagaacagcatcaggaagtccagaaggcaaaagaagcagacatagagaagctgaaccaggccttgtgcttgcgctacaagaatgaaaaggagctccaggaagtgatacagcagcagaatgagaagatcctagaacagatagacaagagtggcgagctcataagccttagagaggaggtgacccaccttacccgctcacttcggcgtgcggagacagagaccaaagtgctccaggaggccctggcaggccagctggactccaactgccagcctatggccaccaattggatccaggagaaagtgtggctctctcaggaggtgactcagagttaacagaggagctggacagcaggtggggaccccaggctgtacccctgttgatctggacatatttctaggtggacaaactgagagtgatgttcctggagatgaaaaatgagaaggaaaaactcatgatcaagttccagagccatagaaatatcctagaggagaaccttcggcgctctgacaaggagttagaaaaactagatgacattgttcagcatatttataaggtataggcaggagggaggtgatatcactaatgaacctggtacaaggcctggccccaggaggtactaatgagcacagatctggttcccagcctgtgctgagagctgggcctgaatcactattgcaggcttctctgtggtgtctgttttctcccctctaattcagcggctgcctcctggggctgggagccctgggccttaagtctgtggtcctgagctgcgttttctgcctctcttcccagaccctgctctctattccagaggtggtgaggggatgcaaagaactacagggattgctggaatttctgagctaagaaactgaaagccagaatctgcttcacctctttttacctgcaatacccccttaccccaataccaagaccaactggcatagagccaactgagataaatgctatttaaataaagtgtatttaatgaa

SEQ ID NO: 368945 - DNA, 4486 bp, Homo sapiens
caggagggatggactcctggactctccagctacctgcgtggtcctccccggtgtgaggacagaagaccggtcctggaccgggcccgcatccagccctaccgccggtgtctgaggtgagggctccgtcagcggaaaacgctcgacaacggaggggcaggcagggccgggggcgtggtcaacgcgggccccgccccccgggctctacccccgagcgtacgcgcgcgcctgaagcagccaaccaggaagcgcagagcaggttcaaacacagacggcgggtgaacatggcgtcctcgacttggtctgagacgtgataggcctgccttctggttgaagatgtggcgagtgaaaaaactgagcctcagcctgtcgccttcgccccagacgggaaaaccatctatgagaactcctctccgtgaacttaccctgcagcccggtgccctcaccaactctggaaaaagatcccccgcttgctcctcgctgaccccatcactgtgcaagctggggctgcaggaaggcagcaacaactcatctccagtggattttgtaaataacaagaggacagacttatcttcagaacatttcagtcattcctcaaagtggctagaaacttgtcagcatgaatcagatgagcagcctctagatccaattccccaaattagctctactcctaaaacgtctgaggaagcagtagacccactgggcaattatatggttaaaaccatcgtccttgtaccatctccactggggcagcaacaagacatgatatttgaggcccgtttagataccatggcagagacaaacagcatatctttaaatggacctttgagaacagacgatctggtgagagaggaggtggcaccctgcatgggagacaggttttcagaagttgctgctgtatctgagaaacctatctttcaggaatctccgtcccatctcttagaggagtctccaccaaatccctgttctgaacaactacattgctccaaggaaagcctgagcagtagaactgaggctgtgcgtgaggacttagtaccttctgaaagtaacgccttcttgccttcctctgttctctggctttccccttcaactgccttggcagcagatttccgtgtcaatcatgtggacccagaggaggaaattgtagagcatggagctatggaggaaagagaaatgaggtttcccacacatcctaaggagtctgaaacagaagatcaagcacttgtctcaagtgtggaagatattctgtccacatgcctgacaccaaatctagtagaaatggaatcccaagaagctccaggcccagcagtagaagatgttggtaggattcttggctctgatacagagtcttggatgtccccactggcctggctggaaaaaggtgtaaatacctccgtcatgctggaaaatctccgccaaagcttatcccttccctcgatgcttcgggatgctgcaattggcactacccctttctctacttgctcggtggggacttggtttactccttcagcaccacaggaaaagagtacaaacacatcccagacaggcctggttggcaccaagcacagtacttctgagacagagcagctcctgtgtggccggcctccagatctgactgccttgtctcgacatgacttggaagataacctgctgagctctcttgtcattctggaggttctctcccgccagcttcgggactggaagagccagctggctgtccctcacccagaaacccaggacagtagcacacagactgacacatctcacagtgggataactaataaacttcagcatcttaaggagagccatgagatgggacaggccctacagcaggccagaaatgtcatgcaatcatgggtgcttatctctaaagagctgatatccttgcttcacctatccctgttgcatttagaagaagataagactactgtgagtcaggagtctcggcgtgcagaaacattggtctgttgctgttttgatttgctgaagaaattgagggcaaagctccagagcctcaaagcagaaagggaggaggcaaggcacagagaggaaatggctctcagaggcaaggatgcggcagagatagtgttggaggctttctgtgcacacgccagccagcgcatcagccagctggaacaggacctagcatccatgcgggaattcagaggccttctgaaggatgcccagacccaactggtagggcttcatgccaagcaagaagagctggttcagcagacagtgagtcttacttctaccttgcaacaagactggaggtccatgcaactggattatacaacatggacagctttgctgagtcggtcccgacaactcacagagaaactcacagtcaagagccagcaagccctgcaggaacgtgatgtggcaattgaggaaaagcaggaggtttctagggtgctggaacaagtctctgcccagttagaggagtgcaaaggccaaacagaacaactggagttggaaaacagtcgtctagcaacagatctccgggctcagttgcagattctggccaacatggacagccagctaaaagagctacagagtcagcatacccattgtgcccaggacctggctatgaaggatgagttactctgccagcttacccagagcaatgaggagcaggctgctcaatggcaaaaggaagagatggcactaaaacacatgcaggcagaactgcagcagcaacaagctgtcctggccaaagaggtgcgggacctgaaagagaccttggagtttgcagaccaggagaatcaggttgctcacctggagctgggtcaggttgagtgtcaattgaaaaccacactggaagtgctccgggagcgcagcttgcagtgtgagaacctcaaggacactgtagagaacctaacggctaaactggccagcaccatagcagataaccaggagcaagatctggagaaaacacggcagtactctcaaaagctagggctgctgactgagcaactacagagcctgactctctttctacagacaaaactaaaggagaagactgaacaagagacccttctgctgagtacagcctgtcctcccacccaggaacaccctctgcctaatgacaggaccttcctgggaagcatcttgacagcagtggcagatgaagagccagaatcaactcctgtgcccttgcttggaagtgacaagagtgctttcacccgagtagcatcaatggtttcccttcagcccgcagagaccccaggcatggaggagagcctggcagaaatgagtattatgactactgagcttcagagtctttgttccctgctacaagagtctaaagaagaagccatcaggactctgcagcgaaaaatttgtgagctgcaagctaggctgcaggcccaggaagaacagcatcaggaagtccagaaggcaaaagaagcagacatagagaagctgaaccaggccttgtgcttgcgctacaagaatgaaaaggagctccaggaagtgatacagcagcagaatgagaagatcctagaacagatagacaagagtggcgagctcataagccttagagaggaggtgacccaccttacccgctcacttcggcgtgcggagacagagaccaaagtgctccaggaggccctggcaggccagctggactccaactgccagcctatggccaccaattggatccaggagaaagtgtggctctctcaggaggtgactcagagttaacagaggagctggacagcaggtggggaccccaggctgtacccctgttgatctggacatatttctaggtggacaaactgagagtgatgttcctggagatgaaaaatgagaaggaaaaactcatgatcaagttccagagccatgtaagaatgtccatgccattccagggccatttcctaccatcgttaacaaatgccccgccatgtttcccctgtcctaccaagtttgctcttttatgcataggacttataaaatctgtttgctttctagagaaatatcctagaggagaaccttcggcgctctgacaaggagttagaaaaactagatgacattgttcagcatatttataaggtataggcaggagggaggtgatatcactaatgaacctggtacaaggcctggccccaggaggtactaatgagcacagatctggttcccagcctgtgctgagagctgggcctgaatcactattgcaggcttctctgtggtgtctgttttctcccctctaattcagcggctgcctcctggggctgggagccctgggccttaagtctgtggtcctgagctgcgttttctgcctctcttcccagaccctgctctctattccagaggtggtgaggggatgcaaagaactacagggattgctggaatttctgagctaagaaactgaaagccagaatctgcttcacctctttttacctgcaatacccccttaccccaataccaagaccaactggcatagagccaactgagataaatgctatttaaataaagtgtatttaatgaa

SEQ ID NO: 368946 - DNA, 3454 bp, Homo sapiens
caggagggatggactcctggactctccagctacctgcgtggtcctccccggtgtgaggacagaagaccggtcctggaccgggcccgcatccagccctaccgccggtgtctgaggtgagggctccgtcagcggaaaacgctcgacaacggaggggcaggcagggccgggggcgtggtcaacgcgggccccgccccccgggctctacccccgagcgtacgcgcgcgcctgaagcagccaaccaggaagcgcagagcaggttcaaacacagacggcgggtgaacatggcgtcctcgacttggtctgagacgtgataggcctgccttctggttgaagatgtggcgagtgaaaaaactgagcctcagcctgtcgccttcgccccagacgggaaaaccatctatgagaactcctctccgtgaacttaccctgcagcccggtgccctcaccaactctggaaaaagatcccccgcttgctcctcgctgaccccatcactgtgcaagctggggctgcagcagcagatttccgtgtcaatcatgtggacccagaggaggaaattgtagagcatggagctatggaggaaagagaaatgaggtttcccacacatcctaaggagtctgaaacagaagatcaagcacttgtctcaagtgtggaagatattctgtccacatgcctgacaccaaatctagtagaaatggaatcccaagaagctccaggcccagcagtagaagatgttggtaggattcttggctctgatacagagtcttggatgtccccactggcctggctggaaaaaggtgtaaatacctccgtcatgctggaaaatctccgccaaagcttatcccttccctcgatgcttcgggatgctgcaattggcactacccctttctctacttgctcggtggggacttggtttactccttcagcaccacaggaaaagagtacaaacacatcccagacaggcctggttggcaccaagcacagtacttctgagacagagcagctcctgtgtggccggcctccagatctgactgccttgtctcgacatgacttggaagataacctgctgagctctcttgtcattctggaggttctctcccgccagcttcgggactggaagagccagctggctgtccctcacccagaaacccaggacagtagcacacagactgacacatctcacagtgggataactaataaacttcagcatcttaaggagagccatgagatgggacaggccctacagcaggccagaaatgtcatgcaatcatgggtgcttatctctaaagagctgatatccttgcttcacctatccctgttgcatttagaagaagataagactactgtgagtcaggagtctcggcgtgcagaaacattggtctgttgctgttttgatttgctgaagaaattgagggcaaagctccagagcctcaaagcagaaagggaggaggcaaggcacagagaggaaatggctctcagaggcaaggatgcggcagagatagtgttggaggctttctgtgcacacgccagccagcgcatcagccagctggaacaggacctagcatccatgcgggaattcagaggccttctgaaggatgcccagacccaactggtagggcttcatgccaagcaagaagagctggttcagcagacagtgagtcttacttctaccttgcaacaagactggaggtccatgcaactggattatacaacatggacagctttgctgagtcggtcccgacaactcacagagaaactcacagtcaagagccagcaagccctgcaggaacgtgatgtggcaattgaggaaaagcaggaggtttctagggtgctggaacaagtctctgcccagttagaggagtgcaaaggccaaacagaacaactggagttggaaaacagtcgtctagcaacagatctccgggctcagttgcagattctggccaacatggacagccagctaaaagagctacagagtcagcatacccattgtgcccaggacctggctatgaaggatgagttactctgccagcttacccagagcaatgaggagcaggctgctcaatggcaaaaggaagagatggcactaaaacacatgcaggcagaactgcagcagcaacaagctgtcctggccaaagaggtgcgggacctgaaagagaccttggagtttgcagaccaggagaatcaggttgctcacctggagctgggtcaggttgagtgtcaattgaaaaccacactggaagtgctccgggagcgcagcttgcagtgtgagaacctcaaggacactgtagagaacctaacggctaaactggccagcaccatagcagataaccaggagcaagatctggagaaaacacggcagtactctcaaaagctagggctgctgactgagcaactacagagcctgactctctttctacagacaaaactaaaggagaagactgaacaagagacccttctgctgagtacagcctgtcctcccacccaggaacaccctctgcctaatgacaggaccttcctgggaagcatcttgacagcagtggcagatgaagagccagaatcaactcctgtgcccttgcttggaagtgacaagagtgctttcacccgagtagcatcaatggtttcccttcagcccgcagagaccccaggcatggaggagagcctggcagaaatgagtattatgactactgagcttcagagtctttgttccctgctacaagagtctaaagaagaagccatcaggactctgcagcgaaaaatttgtgagctgcaagctaggctgcaggcccaggaagaacagcatcaggaagtccagaaggcaaaagaagcagacatagagaagctgaaccaggccttgtgcttgcgctacaagaatgaaaaggagctccaggaagtgatacagcagcagaatgagaagatcctagaacagatagacaagagtggcgagctcataagccttagagaggaggtgacccaccttacccgctcacttcggcgtgcggagacagagaccaaagtgctccaggaggccctggcaggccagctggactccaactgccagcctatggccaccaattggatccaggagaaagtgtggctctctcaggaggtggacaaactgagagtgatgttcctggagatgaaaaatgagaaggaaaaactcatgatcaagttccagagccatagaaatatcctagaggagaaccttcggcgctctgacaaggagttagaaaaactagatgacattgttcagcatatttataagaccctgctctctattccagaggtggtgaggggatgcaaagaactacagggattgctggaatttctgagctaagaaactgaaagccagaatctgcttcacctctttttacctgcaatacccccttaccccaataccaagaccaactggcatagagccaactgagataaatgctatttaaataaagtgtatttaatgaa

SEQ ID NO: 368947 - DNA, 3379 bp, Homo sapiens
caggagggatggactcctggactctccagctacctgcgtggtcctccccggtgtgaggacagaagaccggtcctggaccgggcccgcatccagccctaccgccggtgtctgaggtgagggctccgtcagcggaaaacgctcgacaacggaggggcaggcagggccgggggcgtggtcaacgcgggccccgccccccgggctctacccccgagcgtacgcgcgcgcctgaagcagccaaccaggaagcgcagagcaggttcaaacacagacggcgggtgaacatggcgtcctcgacttggtctgagacgtgataggcctgccttctggttgaagatgtggcgagtgaaaaaactgagcctcagcctgtcgccttcgccccagacgggaaaaccatctatgagaactcctctccgtgaacttaccctgcagcccggtgccctcaccaactctggaaaaagatcccccgcttgctcctcgctgaccccatcactgtgcaagctggggctgcagcagcagatttccgtgtcaatcatgtggacccagaggaggaaattgtagagcatggagctatggaggaaagagaaatgaggtttcccacacatcctaaggagtctgaaacagaagatcaagcacttgtctcaagtgtggaagatattctgtccacatgcctgacaccaaatctagtagaaatggaatcccaagaagctccaggcccagcagtagaagatgttggtaggattcttggctctgatacagagtcttggatgtccccactggcctggctggaaaaaggtgtaaatacctccgtcatgctggaaaatctccgccaaagcttatcccttccctcgatgcttcgggatgctgcaattggcactacccctttctctacttgctcggtggggacttggtttactccttcagcaccacaggaaaagagtacaaacacatcccagacaggcctggttggcaccaagcacagtacttctgagacagagcagctcctgtgtggccggcctccagatctgactgccttgtctcgacatgacttggaagataacctgctgagctctcttgtcattctggaggttctctcccgccagcttcgggactggaagagccagctggctgtccctcacccagaaacccaggacagtagcacacagactgacacatctcacagtgggcaatcatgggtgcttatctctaaagagctgatatccttgcttcacctatccctgttgcatttagaagaagataagactactgtgagtcaggagtctcggcgtgcagaaacattggtctgttgctgttttgatttgctgaagaaattgagggcaaagctccagagcctcaaagcagaaagggaggaggcaaggcacagagaggaaatggctctcagaggcaaggatgcggcagagatagtgttggaggctttctgtgcacacgccagccagcgcatcagccagctggaacaggacctagcatccatgcgggaattcagaggccttctgaaggatgcccagacccaactggtagggcttcatgccaagcaagaagagctggttcagcagacagtgagtcttacttctaccttgcaacaagactggaggtccatgcaactggattatacaacatggacagctttgctgagtcggtcccgacaactcacagagaaactcacagtcaagagccagcaagccctgcaggaacgtgatgtggcaattgaggaaaagcaggaggtttctagggtgctggaacaagtctctgcccagttagaggagtgcaaaggccaaacagaacaactggagttggaaaacagtcgtctagcaacagatctccgggctcagttgcagattctggccaacatggacagccagctaaaagagctacagagtcagcatacccattgtgcccaggacctggctatgaaggatgagttactctgccagcttacccagagcaatgaggagcaggctgctcaatggcaaaaggaagagatggcactaaaacacatgcaggcagaactgcagcagcaacaagctgtcctggccaaagaggtgcgggacctgaaagagaccttggagtttgcagaccaggagaatcaggttgctcacctggagctgggtcaggttgagtgtcaattgaaaaccacactggaagtgctccgggagcgcagcttgcagtgtgagaacctcaaggacactgtagagaacctaacggctaaactggccagcaccatagcagataaccaggagcaagatctggagaaaacacggcagtactctcaaaagctagggctgctgactgagcaactacagagcctgactctctttctacagacaaaactaaaggagaagactgaacaagagacccttctgctgagtacagcctgtcctcccacccaggaacaccctctgcctaatgacaggaccttcctgggaagcatcttgacagcagtggcagatgaagagccagaatcaactcctgtgcccttgcttggaagtgacaagagtgctttcacccgagtagcatcaatggtttcccttcagcccgcagagaccccaggcatggaggagagcctggcagaaatgagtattatgactactgagcttcagagtctttgttccctgctacaagagtctaaagaagaagccatcaggactctgcagcgaaaaatttgtgagctgcaagctaggctgcaggcccaggaagaacagcatcaggaagtccagaaggcaaaagaagcagacatagagaagctgaaccaggccttgtgcttgcgctacaagaatgaaaaggagctccaggaagtgatacagcagcagaatgagaagatcctagaacagatagacaagagtggcgagctcataagccttagagaggaggtgacccaccttacccgctcacttcggcgtgcggagacagagaccaaagtgctccaggaggccctggcaggccagctggactccaactgccagcctatggccaccaattggatccaggagaaagtgtggctctctcaggaggtggacaaactgagagtgatgttcctggagatgaaaaatgagaaggaaaaactcatgatcaagttccagagccatagaaatatcctagaggagaaccttcggcgctctgacaaggagttagaaaaactagatgacattgttcagcatatttataagaccctgctctctattccagaggtggtgaggggatgcaaagaactacagggattgctggaatttctgagctaagaaactgaaagccagaatctgcttcacctctttttacctgcaatacccccttaccccaataccaagaccaactggcatagagccaactgagataaatgctatttaaataaagtgtatttaatgaa

SEQ ID NO: 368948 - DNA, 1905 bp, Homo sapiens
caggagggatggactcctggactctccagctacctgcgtggtcctccccggtgtgaggacagaagaccggtcctggaccgggcccgcatccagccctaccgccggtgtctgaggtgagggctccgtcagcggaaaacgctcgacaacggaggggcaggcagggccgggggcgtggtcaacgcgggccccgccccccgggctctacccccgagcgtacgcgcgcgcctgaagcagccaaccaggaagcgcagagcaggttcaaacacagacggcgggtgaacatggcgtcctcgacttggtctgagacgtgataggcctgccttctggttgaagatgtggcgagtgaaaaaactgagcctcagcctgtcgccttcgccccagacgggaaaaccatctatgagaactcctctccgtgaacttaccctgcagcccggtgccctcaccaactctggaaaaagatcccccgcttgctcctcgctgaccccatcactgtgcaagctggggctgcaggaaggcagcaacaactcatctccagtggattttgtaaataacaagaggacagacttatcttcagaacatttcagtcattcctcaaagtggctagaaacttgtcagcatgaatcagatgagcagcctctagatccaattccccaaattagctctactcctaaaacgtctgaggaagcagtagacccactgggcaattatatggttaaaaccatcgtccttgtaccatctccactggggcagcaacaagacatgatatttgaggcccgtttagataccatggcagagacaaacagcatatctttaaatggacctttgagaacagacgatctggtgagagaggaggtggcaccctgcatgggagacaggttttcagaagttgctgctgtatctgagaaacctatctttcaggaatctccgtcccatctcttagaggagtctccaccaaatccctgttctgaacaactacattgctccaaggaaagcctgagcagtagaactgaggctgtgcgtgaggacttagtaccttctgaaagtaacgccttcttgccttcctctgttctctggctttccccttcaactgccttggcagcagatttccgtgtcaatcatgtggacccagaggaggaaattgtagagcatggagctatggaggaaagagaaatgaggtttcccacacatcctaaggagtctgaaacagaagatcaagcacttgtctcaagtgtggaagatattctgtccacatgcctgacaccaaatctagtagaaatggaatcccaagaagctccaggcccagcagtagaagatgttggtaggattcttggctctgatacagagtcttggatgtccccactggcctggctggaaaaaggtgtaaatacctccgtcatgctggaaaatctccgccaaagcttatcccttccctcgatgcttcgggatgctgcaattggcactacccctttctctacttgctcggtggggacttggtttactccttcagcaccacaggaaaagagtacaaacacatcccagacaggcctggttggcaccaagcacagtacttctgagacagagcagctcctgtgtggccggcctccagatctgactgccttgtctcgacatgacttggaagataacctgctgagctctcttgtcattctggaggttctctcccgccagcttcgggactggaagagccagctggctgtccctcacccagaaacccaggacagtagcacacagactgacacatctcacagtgggctaataaacttcagccttcctaaggctcctggactccagaggccagcggggagcctttcctggctccctctgttttctctcactgtagaccaaagagccgcttgtgtgatattaaagccactttaaaaagcaaaa

SEQ ID NO: 368949 - DNA, 1185 bp, Homo sapiens
caggagggatggactcctggactctccagctacctgcgtggtcctccccggtgtgaggacagaagaccggtcctggaccgggcccgcatccagccctaccgccggtgtctgaggtgagggctccgtcagcggaaaacgctcgacaacggaggggcaggcagggccgggggcgtggtcaacgcgggccccgccccccgggctctacccccgagcgtacgcgcgcgcctgaagcagccaaccaggaagcgcagagcaggttcaaacacagacggcgggtgaacatggcgtcctcgacttggtctgagacgtgataggcctgccttctggttgaagatgtggcgagtgaaaaaactgagcctcagcctgtcgccttcgccccagacgggaaaaccatctatgagaactcctctccgtgaacttaccctgcagcccggtgccctcaccaactctggaaaaagatcccccgcttgctcctcgctgaccccatcactgtgcaagctggggctgcaggaaggcagcaacaactcatctccagtggattttgtaaataacaagaggacagacttatcttcagaacatttcagtcattcctcaaagtggctagaaacttgtcagcatgaatcagatgagcagcctctagatccaattccccaaattagctctactcctaaaacgtctgaggaagcagtagacccactgggcaattatatggttaaaaccatcgtccttgtaccatctccactggggcagcaacaagacatgatatttgaggcccgtttagataccatggcagagacaaacagcatatctttaaatggacctttgagaacagacgatctggtgagagaggaggtggcaccctgcatgggagacaggttttcagaagttgctgctgtatctgagaaacctatctttcaggaatctccgtcccatctcttagaggagtctccaccaaatccctgttctgaacaactacattgctccaaggaaagcctgagcagtagaactgaggctgtgcgtgaggacttagtaccttctgaaagtaacgccttcttgccttcctctgttctctggctttccccttcaactgccttggcagcagatttccgtgtcaatcatgtggacccagaggcgagaacgcacgacgaggatctctctagacatcgacccgcagaattcaagctt

SEQ ID NO: 368950 - DNA, 1304 bp, Homo sapiens
caggagggatggactcctggactctccagctacctgcgtggtcctccccggtgtgaggacagaagaccggtcctggaccgggcccgcatccagccctaccgccggtgtctgaggtgagggctccgtcagcggaaaacgctcgacaacggaggggcaggcagggccgggggcgtggtcaacgcgggccccgccccccgggctctacccccgagcgtacgcgcgcgcctgaagcagccaaccaggaagcgcagagcaggttcaaacacagacggcgggtgaacatggcgtcctcgacttggtctgagacgtgataggcctgccttctggttgaagatgtggcgagtgaaaaaactgagcctcagcctgtcgccttcgccccagacgggaaaaccatctatgagaactcctctccgtgaacttaccctgcagcccggtgccctcaccaactctggaaaaagatcccccgcttgctcctcgctgaccccatcactgtgcaagctggggctgcaggaaggcagcaacaactcatctccagtggattttgtaaataacaagaggacagacttatcttcagaacatttcagtcattcctcaaagtggctagaaacttgtcagcatgaatcagatgagcagcctctagatccaattccccaaattagctctactcctaaaacgtctgaggaagcagtagacccactgggcaattatatggttaaaaccatcgtccttgtaccatctccactggggcagcaacaagacatgatatttgaggcccgtgtaaatacctccgtcatgctggaaaatctccgccaaagcttatcccttccctcgatgcttcgggatgctgcaattggcactacccctttctctacttgctcggtggggacttggtttactccttcagcaccacaggaaaagagtacaaacacatcccagacaggcctggttggcaccaagcacagtacttctgagacagagcagctcctgtgtggccggcctccagatctgactgccttgtctcgacatgacttggaagataacctgctgagctctcttgtcattctggaggttctctcccgccagcttcgggactggaagagccagctggctgtccctcacccaccaccgtaggcaagtagaacaaaggttggcacatgggccagtgggaagattgataaccgtcagcctccttaaggatgttggattacataggcgagcggggagctcttcctgggtccatcgggtttagttcatggccgtccaaacatccgagggagggagataaaagccactagataaagcga

SEQ ID NO: 368951 - DNA, 732 bp, Homo sapiens
taagtcccaggaaaagcccagaaactctggagacattacagcccaggtcgagaaccacggcccgggccgtcccggacgcgggcccaccaagcctagggaagccgctcggcaccgcttcggcttctagactccctggccggctctttcccgtcaaggctgcggctggagaggactgagggagacctagggagaggattcctcttctccatccacggagacaacttggatatgaacaccatggatgtgaggaggtccgctggaagcaggagggatggactcctggactctccagctacctgcgtggtcctccccggtgtgaggacagaagaccggtcctggaccgggcccgcatccagccctaccgccggtgtctgaggtgagggctccgtcagcggaaaacgctcgacaacggaggggcaggcagggccgggggcgtggtcaacgcgggccccgccccccgggctctacccccgagcgtacgcgcgcgcctgaagcagccaaccaggaagcgcagagcaggttcaaacacagacggcgggtgaacatggcgtcctcgacttggtctgagacgtgataggcctgccttctggttgaagatgtggcgagtgaaaaaactgagcctcagcctgtcgccttcgccccagacggtaagcgggagatctctggcggagagaactgggccgggctgctgtcgcgggggcaccggccgtgtctactgtcctggaaagttgg

SEQ ID NO: 368952 - DNA, 4040 bp, Homo sapiens
caggagggatggactcctggactctccagctacctgcgtggtcctccccggtgtgaggacagaagaccggtcctggaccgggcccgcatccagccctaccgccggtgtctgaggtgagggctccgtcagcggaaaacgctcgacaacggaggggcaggcagggccgggggcgtggtcaacgcgggccccgccccccgggctctacccccgagcgtacgcgcgcgcctgaagcagccaaccaggaagcgcagagcaggttcaaacacagacggcgggtgaacatggcgtcctcgacttggtctgagacgtgataggcctgccttctggttgaagatgtggcgagtgaaaaaactgagcctcagcctgtcgccttcgccccagacgggaaaaccatctatgagaactcctctccgtgaacttaccctgcagcccggtgccctcaccaactctggaaaaagatcccccgcttgctcctcgctgaccccatcactgtgcaagctggggctgcaggaaggcagcaacaactcatctccagtggattttgtaaataacaagaggacagacttatcttcagaacatttcagtcattcctcaaagtggctagaaacttgtcagcatgaatcagatgagcagcctctagatccaattccccaaattagctctactcctaaaacgtctgaggaagcagtagacccactgggcaattatatggttaaaaccatcgtccttgtaccatctccactggggcagcaacaagacatgatatttgaggcccgtttagataccatggcagagacaaacagcatatctttaaatggacctttgagaacagacgatctggtgagagaggaggtggcaccctgcatgggagacaggttttcagaagttgctgctgtatctgagaaacctatctttcaggaatctccgtcccatctcttagaggagtctccaccaaatccctgttctgaacaactacattgctccaaggaaagcctgagcagtagaactgaggctgtgcgtgaggacttagtaccttctgaaagtaacgccttcttgccttcctctgttctctggctttccccttcaactgccttggcagcagatttccgtgtcaatcatgtggacccagaggaggaaattgtagagcatggagctatggaggaaagagaaatgaggtttcccacacatcctaaggagtctgaaacagaagatcaagcacttgtctcaagtgtggaagatattctgtccacatgcctgacaccaaatctagtagaaatggaatcccaagaagctccaggcccagcagtagaagatgttggtaggattcttggctctgatacagagtcttggatgtccccactggcctggctggaaaaaggtgtaaatacctccgtcatgctggaaaatctccgccaaagcttatcccttccctcgatgcttcgggatgctgcaattggcactacccctttctctacttgctcggtggggacttggtttactccttcagcaccacaggaaaagagtacaaacacatcccagacaggcctggttggcaccaagcacagtacttctgagacagagcagctcctgtgtggccggcctccagatctgactgccttgtctcgacatgacttggaagataacctgctgagctctcttgtcattctggaggttctctcccgccagcttcgggactggaagagccagctggctgtccctcacccagaaacccaggacagtagcacacagactgacacatctcacagtgggataactaataaacttcagcatcttaaggagagccatgagatgggacaggccctacagcaggccagaaatgtcatgcaatcatgggtgcttatctctaaagagctgatatccttgcttcacctatccctgttgcatttagaagaagataagactactgtgagtcaggagtctcggcgtgcagaaacattggtctgttgctgttttgatttgctgaagaaattgagggcaaagctccagagcctcaaagcagaaagggaggaggcaaggcacagagaggaaatggctctcagaggcaaggatgcggcagagatagtgttggaggctttctgtgcacacgccagccagcgcatcagccagctggaacaggacctagcatccatgcgggaattcagaggccttctgaaggatgcccagacccaactggtagggcttcatgccaagcaagaagagctggttcagcagacagtgagtcttacttctaccttgcaacaagactggaggtccatgcaactggattatacaacatggacagctttgctgagtcggtcccgacaactcacagagaaactcacagtcaagagccagcaagccctgcaggaacgtgatgtggcaattgaggaaaagcaggaggtttctagggtgctggaacaagtctctgcccagttagaggagtgcaaaggccaaacagaacaactggagttggaaaacagtcgtctagcaacagatctccgggctcagttgcagattctggccaacatggacagccagctaaaagagctacagagtcagcatacccattgtgcccaggacctggctatgaaggatgagttactctgccagcttacccagagcaatgaggagcaggctgctcaatggcaaaaggaagagatggcactaaaacacatgcaggcagaactgcagcagcaacaagctgtcctggccaaagaggtgcgggacctgaaagagaccttggagtttgcagaccaggagaatcaggttgctcacctggagctgggtcaggttgagtgtcaattgaaaaccacactggaagtgctccgggagcgcagcttgcagtgtgagaacctcaaggacactgtagagaacctaacggctaaactggccagcaccatagcagataaccaggagcaagatctggagaaaacacggcagtactctcaaaagctagggctgctgactgagcaactacagagcctgactctctttctacagacaaaactaaaggagaagactgaacaagagacccttctgctgagtacagcctgtcctcccacccaggaacaccctctgcctaatgacaggaccttcctgggaagcatcttgacagcagtggcagatgaagagccagaatcaactcctgtgcccttgcttggaagtgacaagagtgctttcacccgagtagcatcaatggtttcccttcagcccgcagagaccccaggcatggaggagagcctggcagaaatgagtattatgactactgagcttcagagtctttgttccctgctacaagagtctaaagaagaagccatcaggactctgcagcgaaaaatttgtgagctgcaagctaggctgcaggcccaggaagaacagcatcaggaagtccagaaggcaaaagaagcagacatagagaagctgaaccaggccttgtgcttgcgctacaagaatgaaaaggagctccaggaagtgatacagcagcagaatgagaagatcctagaacagatagacaagagtggcgagctcataagccttagagaggaggtgacccaccttacccgctcacttcggcgtgcggagacagagaccaaagtgctccaggaggccctggcaggccagctggactccaactgccagcctatggccaccaattggatccaggagaaagtgtggctctctcaggaggtggacaaactgagagtgatgttcctggagatgaaaaatgagaaggaaaaactcatgatcaagttccagagccatagaaatatcctagaggagaaccttcggcgctctgacaaggagttagaaaaactagatgacattgttcagcatatttataagaccctgctctctattccagaggtggtgaggggatgcaaagaactacagggattgctggaatttctgagctaagaaactgaaagccagaatctgcttcacctctttttacctgcaatacccccttaccccaataccaagaccaactggcatagagccaactgagataaatgctatttaaataaagtgtatttaatgaa

SEQ ID NO: 368953 - DNA, 3770 bp, Homo sapiens
aggcgagctcagggaggacagaaacctcccgtgggacgtgataggcctgccttctggttgaagatgtggcgagtgaaaaaactgagcctcagcctgtcgccttcgccccagacgggaaaaccatctatgagaactcctctccgtgaacttaccctgcagcccggtgccctcaccaactctggaaaaagatcccccgcttgctcctcgctgaccccatcactgtgcaagctggggctgcaggaaggcagcaacaactcatctccagtggattttgtaaataacaagaggacagacttatcttcagaacatttcagtcattcctcaaagtggctagaaacttgtcagcatgaatcagatgagcagcctctagatccaattccccaaattagctctactcctaaaacgtctgaggaagcagtagacccactgggcaattatatggttaaaaccatcgtccttgtaccatctccactggggcagcaacaagacatgatatttgaggcccgtttagataccatggcagagacaaacagcatatctttaaatggacctttgagaacagacgatctggtgagagaggaggtggcaccctgcatgggagacaggttttcagaagttgctgctgtatctgagaaacctatctttcaggaatctccgtcccatctcttagaggagtctccaccaaatccctgttctgaacaactacattgctccaaggaaagcctgagcagtagaactgaggctgtgcgtgaggacttagtaccttctgaaagtaacgccttcttgccttcctctgttctctggctttccccttcaactgccttggcagcagatttccgtgtcaatcatgtggacccagaggaggaaattgtagagcatggagctatggaggaaagagaaatgaggtttcccacacatcctaaggagtctgaaacagaagatcaagcacttgtctcaagtgtggaagatattctgtccacatgcctgacaccaaatctagtagaaatggaatcccaagaagctccaggcccagcagtagaagatgttggtaggattcttggctctgatacagagtcttggatgtccccactggcctggctggaaaaaggtgtaaatacctccgtcatgctggaaaatctccgccaaagcttatcccttccctcgatgcttcgggatgctgcaattggcactacccctttctctacttgctcggtggggacttggtttactccttcagcaccacaggaaaagagtacaaacacatcccagacaggcctggttggcaccaagcacagtacttctgagacagagcagctcctgtgtggccggcctccagatctgactgccttgtctcgacatgacttggaagataacctgctgagctctcttgtcattctggaggttctctcccgccagcttcgggactggaagagccagctggctgtccctcacccagaaacccaggacagtagcacacagactgacacatctcacagtgggataactaataaacttcagcatcttaaggagagccatgagatgggacaggccctacagcaggccagaaatgtcatgcaatcatgggtgcttatctctaaagagctgatatccttgcttcacctatccctgttgcatttagaagaagataagactactgtgagtcaggagtctcggcgtgcagaaacattggtctgttgctgttttgatttgctgaagaaattgagggcaaagctccagagcctcaaagcagaaagggaggaggcaaggcacagagaggaaatggctctcagaggcaaggatgcggcagagatagtgttggaggctttctgtgcacacgccagccagcgcatcagccagctggaacaggacctagcatccatgcgggaattcagaggccttctgaaggatgcccagacccaactggtagggcttcatgccaagcaagaagagctggttcagcagacagtgagtcttacttctaccttgcaacaagactggaggtccatgcaactggattatacaacatggacagctttgctgagtcggtcccgacaactcacagagaaactcacagtcaagagccagcaagccctgcaggaacgtgatgtggcaattgaggaaaagcaggaggtttctagggtgctggaacaagtctctgcccagttagaggagtgcaaaggccaaacagaacaactggagttggaaaacagtcgtctagcaacagatctccgggctcagttgcagattctggccaacatggacagccagctaaaagagctacagagtcagcatacccattgtgcccaggacctggctatgaaggatgagttactctgccagcttacccagagcaatgaggagcaggctgctcaatggcaaaaggaagagatggcactaaaacacatgcaggcagaactgcagcagcaacaagctgtcctggccaaagaggtgcgggacctgaaagagaccttggagtttgcagaccaggagaatcaggttgctcacctggagctgggtcaggttgagtgtcaattgaaaaccacactggaagtgctccgggagcgcagcttgcagtgtgagaacctcaaggacactgtagagaacctaacggctaaactggccagcaccatagcagataaccaggagcaagatctggagaaaacacggcagtactctcaaaagctagggctgctgactgagcaactacagagcctgactctctttctacagacaaaactaaaggagaagactgaacaagagacccttctgctgagtacagcctgtcctcccacccaggaacaccctctgcctaatgacaggaccttcctgggaagcatcttgacagcagtggcagatgaagagccagaatcaactcctgtgcccttgcttggaagtgacaagagtgctttcacccgagtagcatcaatggtttcccttcagcccgcagagaccccaggcatggaggagagcctggcagaaatgagtattatgactactgagcttcagagtctttgttccctgctacaagagtctaaagaagaagccatcaggactctgcagcgaaaaatttgtgagctgcaagctaggctgcaggcccaggaagaacagcatcaggaagtccagaaggcaaaagaagcagacatagagaagctgaaccaggccttgtgcttgcgctacaagaatgaaaaggagctccaggaagtgatacagcagcagaatgagaagatcctagaacagatagacaagagtggcgagctcataagccttagagaggaggtgacccaccttacccgctcacttcggcgtgcggagacagagaccaaagtgctccaggaggccctggcaggccagctggactccaactgccagcctatggccaccaattggatccaggagaaagtgtggctctctcaggaggtggacaaactgagagtgatgttcctggagatgaaaaatgagaaggaaaaactcatgatcaagttccagagccatagaaatatcctagaggagaaccttcggcgctctgacaaggagttagaaaaactagatgacattgttcagcatatttataagaccctgctctctattccagaggtggtgaggggatgcaaagaactacagggattgctggaatttctgagctaagaaactgaaagccagaatctgcttcacctctttttacctgcaatacccccttaccccaataccaagaccaactggcatagagccaactgagataaatgctatttaaataaagtgtatttaatgaa

SEQ ID NO: 368954 - DNA, 4133 bp, Homo sapiens
caggagggatggactcctggactctccagctacctgcgtggtcctccccggtgtgaggacagaagaccggtcctggaccgggcccgcatccagccctaccgccggtgtctgaggtgagggctccgtcagcggaaaacgctcgacaacggaggggcaggcagggccgggggcgtggtcaacgcgggccccgccccccgggctctacccccgagcgtacgcgcgcgcctgaagcagccaaccaggaagcgcagagcaggttcaaacacagacggcgggtgaacatggcgtcctcgacttggtctgagacgtgataggcctgccttctggttgaagatgtggcgagtgaaaaaactgagcctcagcctgtcgccttcgccccagacgggaaaaccatctatgagaactcctctccgtgaacttaccctgcagcccggtgccctcaccaactctggaaaaagatcccccgcttgctcctcgctgaccccatcactgtgcaagctggggctgcaggaaggcagcaacaactcatctccagtggattttgtaaataacaagaggacagacttatcttcagaacatttcagtcattcctcaaagtggctagaaacttgtcagcatgaatcagatgagcagcctctagatccaattccccaaattagctctactcctaaaacgtctgaggaagcagtagacccactgggcaattatatggttaaaaccatcgtccttgtaccatctccactggggcagcaacaagacatgatatttgaggcccgtttagataccatggcagagacaaacagcatatctttaaatggacctttgagaacagacgatctggtgagagaggaggtggcaccctgcatgggagacaggttttcagaagttgctgctgtatctgagaaacctatctttcaggaatctccgtcccatctcttagaggagtctccaccaaatccctgttctgaacaactacattgctccaaggaaagcctgagcagtagaactgaggctgtgcgtgaggacttagtaccttctgaaagtaacgccttcttgccttcctctgttctctggctttccccttcaactgccttggcagcagatttccgtgtcaatcatgtggacccagaggaggaaattgtagagcatggagctatggaggaaagagaaatgaggtttcccacacatcctaaggagtctgaaacagaagatcaagcacttgtctcaagtgtggaagatattctgtccacatgcctgacaccaaatctagtagaaatggaatcccaagaagctccaggcccagcagtagaagatgttggtaggattcttggctctgatacagagtcttggatgtccccactggcctggctggaaaaaggtgtaaatacctccgtcatgctggaaaatctccgccaaagcttatcccttccctcgatgcttcgggatgctgcaattggcactacccctttctctacttgctcggtggggacttggtttactccttcagcaccacaggaaaagagtacaaacacatcccagacaggcctggttggcaccaagcacagtacttctgagacagagcagctcctgtgtggccggcctccagatctgactgccttgtctcgacatgacttggaagataacctgctgagctctcttgtcattctggaggttctctcccgccagcttcgggactggaagagccagctggctgtccctcacccagaaacccaggacagtagcacacagactgacacatctcacagtgggataactaataaacttcagcatcttaaggagagccatgagatgggacaggccctacagcaggccagaaatgtcatgcaatcatgggtgcttatctctaaagagctgatatccttgcttcacctatccctgttgcatttagaagaagataagactactgtgagtcaggagtctcggcgtgcagaaacattggtctgttgctgttttgatttgctgaagaaattgagggcaaagctccagagcctcaaagcagaaagggaggaggcaaggcacagagaggaaatggctctcagaggcaaggatgcggcagagatagtgttggaggctttctgtgcacacgccagccagcgcatcagccagctggaacaggacctagcatccatgcgggaattcagaggccttctgaaggatgcccagacccaactggtagggcttcatgccaagcaagaagagctggttcagcagacagtgagtcttacttctaccttgcaacaagactggaggtccatgcaactggattatacaacatggacagctttgctgagtcggtcccgacaactcacagagaaactcacagtcaagagccagcaagccctgcaggaacgtgatgtggcaattgaggaaaagcaggaggtttctagggtgctggaacaagtctctgcccagttagaggagtgcaaaggccaaacagaacaactggagttggaaaacagtcgtctagcaacagatctccgggctcagttgcagattctggccaacatggacagccagctaaaagagctacagagtcagcatacccattgtgcccaggacctggctatgaaggatgagttactctgccagcttacccagagcaatgaggagcaggctgctcaatggcaaaaggaagagatggcactaaaacacatgcaggcagaactgcagcagcaacaagctgtcctggccaaagaggtgcgggacctgaaagagaccttggagtttgcagaccaggagaatcaggttgctcacctggagctgggtcaggttgagtgtcaattgaaaaccacactggaagtgctccgggagcgcagcttgcagtgtgagaacctcaaggacactgtagagaacctaacggctaaactggccagcaccatagcagataaccaggagcaagatctggagaaaacacggcagtactctcaaaagctagggctgctgactgagcaactacagagcctgactctctttctacagacaaaactaaaggagaagactatgtttcaagaaagcagaaatatagccttctttggcctccctgcagtgtgcactaaacaataaatggttgacatcattcagaatacaaagactgaacaagagacccttctgctgagtacagcctgtcctcccacccaggaacaccctctgcctaatgacaggaccttcctgggaagcatcttgacagcagtggcagatgaagagccagaatcaactcctgtgcccttgcttggaagtgacaagagtgctttcacccgagtagcatcaatggtttcccttcagcccgcagagaccccaggcatggaggagagcctggcagaaatgagtattatgactactgagcttcagagtctttgttccctgctacaagagtctaaagaagaagccatcaggactctgcagcgaaaaatttgtgagctgcaagctaggctgcaggcccaggaagaacagcatcaggaagtccagaaggcaaaagaagcagacatagagaagctgaaccaggccttgtgcttgcgctacaagaatgaaaaggagctccaggaagtgatacagcagcagaatgagaagatcctagaacagatagacaagagtggcgagctcataagccttagagaggaggtgacccaccttacccgctcacttcggcgtgcggagacagagaccaaagtgctccaggaggccctggcaggccagctggactccaactgccagcctatggccaccaattggatccaggagaaagtgtggctctctcaggaggtggacaaactgagagtgatgttcctggagatgaaaaatgagaaggaaaaactcatgatcaagttccagagccatagaaatatcctagaggagaaccttcggcgctctgacaaggagttagaaaaactagatgacattgttcagcatatttataagaccctgctctctattccagaggtggtgaggggatgcaaagaactacagggattgctggaatttctgagctaagaaactgaaagccagaatctgcttcacctctttttacctgcaatacccccttaccccaataccaagaccaactggcatagagccaactgagataaatgctatttaaataaagtgtatttaatgaa

SEQ ID NO: 368955 - DNA, 4021 bp, Homo sapiens
caggagggatggactcctggactctccagctacctgcgtggtcctccccggtgtgaggacagaagaccggtcctggaccgggcccgcatccagccctaccgccggtgtctgaggtgagggctccgtcagcggaaaacgctcgacaacggaggggcaggcagggccgggggcgtggtcaacgcgggccccgccccccgggctctacccccgagcgtacgcgcgcgcctgaagcagccaaccaggaagcgcagagcaggttcaaacacagacggcgggtgaacatggcgtcctcgacttggtctgagacgtgataggcctgccttctggttgaagatgtggcgagtgaaaaaactgagcctcagcctgtcgccttcgccccagacgggaaaaccatctatgagaactcctctccgtgaacttaccctgcagcccggtgccctcaccaactctggaaaaagatcccccgcttgctcctcgctgaccccatcactgtgcaagctggggctgcaggaaggcagcaacaactcatctccagtggattttgtaaataacaagaggacagacttatcttcagaacatttcagtcattcctcaaagtggctagaaacttgtcagcatgaatcagatgagcagcctctagatccaattccccaaattagctctactcctaaaacgtctgaggaagcagtagacccactgggcaattatatggttaaaaccatcgtccttgtaccatctccactggggcagcaacaagacatgatatttgaggcccgtttagataccatggcagagacaaacagcatatctttaaatggacctttgagaacagacgatctggtgagagaggaggtggcaccctgcatgggagacaggttttcagaagttgctgctgtatctgagaaacctatctttcaggaatctccgtcccatctcttagaggagtctccaccaaatccctgttctgaacaactacattgctccaaggaaagcctgagcagtagaactgaggctgtgcgtgaggacttagtaccttctgaaagtaacgccttcttgccttcctctgttctctggctttccccttcaactgccttggcagcagatttccgtgtcaatcatgtggacccagaggaggaaattgtagagcatggagctatggaggaaagagaaatgaggtttcccacacatcctaaggagtctgaaacagaagatcaagcacttgtctcaagtgtggaagatattctgtccacatgcctgacaccaaatctagtagaaatggaatcccaagaagctccaggcccagcagtagaagatgttggtaggattcttggctctgatacagagtcttggatgtccccactggcctggctggaaaaaggtgtaaatacctccgtcatgctggaaaatctccgccaaagcttatcccttccctcgatgcttcgggatgctgcaattggcactacccctttctctacttgctcggtggggacttggtttactccttcagcaccacaggaaaagagtacaaacacatcccagacaggcctggttggcaccaagcacagtacttctgagacagagcagctcctgtgtggccggcctccagatctgactgccttgtctcgacatgacttggaagataacctgctgagctctcttgtcattctggaggttctctcccgccagcttcgggactggaagagccagctggctgtccctcacccagaaacccaggacagtagcacacagactgacacatctcacagtgggataactaataaacttcagcatcttaaggagagccatgagatgggacaggccctacagcaggccagaaatgtcatgcaatcatgggtgcttatctctaaagagctgatatccttgcttcacctatccctgttgcatttagaagaagataagactactgtgagtcaggagtctcggcgtgcagaaacattggtctgttgctgttttgatttgctgaagaaattgagggcaaagctccagagcctcaaagcagaaagggaggaggcaaggcacagagaggaaatggctctcagaggcaaggatgcggcagagatagtgttggaggctttctgtgcacacgccagccagcgcatcagccagctggaacaggacctagcatccatgcgggaattcagaggccttctgaaggatgcccagacccaactggtagggcttcatgccaagcaagaagagctggttcagcagacagtgagtcttacttctaccttgcaacaagactggaggtccatgcaactggattatacaacatggacagctttgctgagtcggtcccgacaactcacagagaaactcacagtcaagagccagcaagccctgcaggaacgtgatgtggcaattgaggaaaagcaggaggtttctagggtgctggaacaagtctctgcccagttagaggagtgcaaaggccaaacagaacaactggagttggaaaacagtcgtctagcaacagatctccgggctcagttgcagattctggccaacatggacagccagctaaaagagctacagagtcagcatacccattgtgcccaggacctggctatgaaggatgagttactctgccagcttacccagagcaatgaggagcaggctgctcaatggcaaaaggaagagatggcactaaaacacatgcaggcagaactgcagcagcaacaagctgtcctggccaaagaggtgcgggacctgaaagagaccttggagtttgcagaccaggagaatcaggttgctcacctggagctgggtcaggttgagtgtcaattgaaaaccacactggaagtgctccgggagcgcagcttgcagtgtgagaacctcaaggacactgtagagaacctaacggctaaactggccagcaccatagcagataaccaggagcaagatctggagaaaacacggcagtactctcaaaagctagggctgctgactgagcaactacagagcctgactctctttctacagacaaaactaaaggagaagactgaacaagagacccttctgctgagtacagcctgtcctcccacccaggaacaccctctgcctaatgacaggaccttcctgggaagcatcttgacagcagtggcagatgaagagccagaatcaactcctgtgcccttgcttggaagtgacaagagtgctttcacccgagtagcatcaatggtttcccttcagcccgcagagaccccaggcatggaggagagcctggcagaaatgagtattatgactactgagcttcagagtctttgttccctgctacaagagtctaaagaagaagccatcaggactctgcagcgaaaaatttgtgagctgcaagctaggctgcaggcccaggaagaacagcatcaggaagtccagaaggcaaaagaagcagacatagagaagctgaaccaggccttgtgcttgcgctacaagaatgaaaaggagctccaggaagtgatacagcagcagaatgagaagatcctagaacagatagacaagagtggcgagctcataagccttagagaggaggtgacccaccttacccgctcacttcggcgtgcggagacagagaccaaagtgctccaggaggccctggcaggccagctggactccaactgccagcctatggccaccaattggatccaggagaaagtgtggctctctcaggaggtggacaaactgagagtgatgttcctggagatgaaaaatgagaaggaaaaactcatgatcaagttccagagccatagaaatatcctagaggagaaccttcggcgctctgacaaggagttagaaaaactagatgacattgttcagcatatttataagaggtggtgaggggatgcaaagaactacagggattgctggaatttctgagctaagaaactgaaagccagaatctgcttcacctctttttacctgcaatacccccttaccccaataccaagaccaactggcatagagccaactgagataaatgctatttaaataaagtgtatttaatgaa

SEQ ID NO: 368956 - DNA, 4247 bp, Homo sapiens
caggagggatggactcctggactctccagctacctgcgtggtcctccccggtgtgaggacagaagaccggtcctggaccgggcccgcatccagccctaccgccggtgtctgaggtgagggctccgtcagcggaaaacgctcgacaacggaggggcaggcagggccgggggcgtggtcaacgcgggccccgccccccgggctctacccccgagcgtacgcgcgcgcctgaagcagccaaccaggaagcgcagagcaggttcaaacacagacggcgggtgaacatggcgtcctcgacttggtctgagacgtgataggcctgccttctggttgaagatgtggcgagtgaaaaaactgagcctcagcctgtcgccttcgccccagacgggaaaaccatctatgagaactcctctccgtgaacttaccctgcagcccggtgccctcaccaactctggaaaaagatcccccgcttgctcctcgctgaccccatcactgtgcaagctggggctgcaggaaggcagcaacaactcatctccagtggattttgtaaataacaagaggacagacttatcttcagaacatttcagtcattcctcaaagtggctagaaacttgtcagcatgaatcagatgagcagcctctagatccaattccccaaattagctctactcctaaaacgtctgaggaagcagtagacccactgggcaattatatggttaaaaccatcgtccttgtaccatctccactggggcagcaacaagacatgatatttgaggcccgtttagataccatggcagagacaaacagcatatctttaaatggacctttgagaacagacgatctggtgagagaggaggtggcaccctgcatgggagacaggttttcagaagttgctgctgtatctgagaaacctatctttcaggaatctccgtcccatctcttagaggagtctccaccaaatccctgttctgaacaactacattgctccaaggaaagcctgagcagtagaactgaggctgtgcgtgaggacttagtaccttctgaaagtaacgccttcttgccttcctctgttctctggctttccccttcaactgccttggcagcagatttccgtgtcaatcatgtggacccagaggaggaaattgtagagcatggagctatggaggaaagagaaatgaggtttcccacacatcctaaggagtctgaaacagaagatcaagcacttgtctcaagtgtggaagatattctgtccacatgcctgacaccaaatctagtagaaatggaatcccaagaagctccaggcccagcagtagaagatgttggtaggattcttggctctgatacagagtcttggatgtccccactggcctggctggaaaaaggtgtaaatacctccgtcatgctggaaaatctccgccaaagcttatcccttccctcgatgcttcgggatgctgcaattggcactacccctttctctacttgctcggtggggacttggtttactccttcagcaccacaggaaaagagtacaaacacatcccagacaggcctggttggcaccaagcacagtacttctgagacagagcagctcctgtgtggccggcctccagatctgactgccttgtctcgacatgacttggaagataacctgctgagctctcttgtcattctggaggttctctcccgccagcttcgggactggaagagccagctggctgtccctcacccagaaacccaggacagtagcacacagactgacacatctcacagtgggataactaataaacttcagcatcttaaggagagccatgagatgggacaggccctacagcaggccagaaatgtcatgcaatcatgggtgcttatctctaaagagctgatatccttgcttcacctatccctgttgcatttagaagaagataagactactgtgagtcaggagtctcggcgtgcagaaacattggtctgttgctgttttgatttgctgaagaaattgagggcaaagctccagagcctcaaagcagaaagggaggaggcaaggcacagagaggaaatggctctcagaggcaaggatgcggcagagatagtgttggaggctttctgtgcacacgccagccagcgcatcagccagctggaacaggacctagcatccatgcgggaattcagaggccttctgaaggatgcccagacccaactggtagggcttcatgccaagcaagaagagctggttcagcagacagtgagtcttacttctaccttgcaacaagactggaggtccatgcaactggattatacaacatggacagctttgctgagtcggtcccgacaactcacagagaaactcacagtcaagagccagcaagccctgcaggaacgtgatgtggcaattgaggaaaagcaggaggtttctagggtgctggaacaagtctctgcccagttagaggagtgcaaaggccaaacagaacaactggagttggaaaacagtcgtctagcaacagatctccgggctcagttgcagattctggccaacatggacagccagctaaaagagctacagagtcagcatacccattgtgcccaggacctggctatgaaggatgagttactctgccagcttacccagagcaatgaggagcaggctgctcaatggcaaaaggaagagatggcactaaaacacatgcaggcagaactgcagcagcaacaagctgtcctggccaaagaggtgcgggacctgaaagagaccttggagtttgcagaccaggagaatcaggttgctcacctggagctgggtcaggttgagtgtcaattgaaaaccacactggaagtgctccgggagcgcagcttgcagtgtgagaacctcaaggacactgtagagaacctaacggctaaactggccagcaccatagcagataaccaggagcaagatctggagaaaacacggcagtactctcaaaagctagggctgctgactgagcaactacagagcctgactctctttctacagacaaaactaaaggagaagactgaacaagagacccttctgctgagtacagcctgtcctcccacccaggaacaccctctgcctaatgacaggaccttcctgggaagcatcttgacagcagtggcagatgaagagccagaatcaactcctgtgcccttgcttggaagtgacaagagtgctttcacccgagtagcatcaatggtttcccttcagcccgcagagaccccaggcatggaggagagcctggcagaaatgagtattatgactactgagcttcagagtctttgttccctgctacaagagtctaaagaagaagccatcaggactctgcagcgaaaaatttgtgagctgcaagctaggctgcaggcccaggaagaacagcatcaggaagtccagaaggcaaaagaagcagacatagagaagctgaaccaggccttgtgcttgcgctacaagaatgaaaaggagctccaggaagtgatacagcagcagaatgagaagatcctagaacagatagacaagagtggcgagctcataagccttagagaggaggtgacccaccttacccgctcacttcggcgtgcggagacagagaccaaagtgctccaggaggccctggcaggccagctggactccaactgccagcctatggccaccaattggatccaggagaaagtgtggctctctcaggaggtgactcagagttaacagaggagctggacagcaggtggggaccccaggctgtacccctgttgatctggacatatttctaggtggacaaactgagagtgatgttcctggagatgaaaaatgagaaggaaaaactcatgatcaagttccagagccatgtaagaatgtccatgccattccagggccatttcctaccatcgttaacaaatgccccgccatgtttcccctgtcctaccaagtttgctcttttatgcataggacttataaaatctgtttgctttctagagaaatatcctagaggagaaccttcggcgctctgacaaggagttagaaaaactagatgacattgttcagcatatttataagaccctgctctctattccagaggtggtgaggggatgcaaagaactacagggattgctggaatttctgagctaagaaactgaaagccagaatctgcttcacctctttttacctgcaatacccccttaccccaataccaagaccaactggcatagagccaactgagataaatgctatttaaataaagtgtatttaatgaa

SEQ ID NO: 368957 - DNA, 4109 bp, Homo sapiens
  misc_feature (2538)..(2538): n is a, c, g, or t
caggagggatggactcctggactctccagctacctgcgtggtcctccccggtgtgaggacagaagaccggtcctggaccgggcccgcatccagccctaccgccggtgtctgaggtgagggctccgtcagcggaaaacgctcgacaacggaggggcaggcagggccgggggcgtggtcaacgcgggccccgccccccgggctctacccccgagcgtacgcgcgcgcctgaagcagccaaccaggaagcgcagagcaggttcaaacacagacggcgggtgaacatggcgtcctcgacttggtctgagacgtgataggcctgccttctggttgaagatgtggcgagtgaaaaaactgagcctcagcctgtcgccttcgccccagacgggaaaaccatctatgagaactcctctccgtgaacttaccctgcagcccggtgccctcaccaactctggaaaaagatcccccgcttgctcctcgctgaccccatcactgtgcaagctggggctgcaggaaggcagcaacaactcatctccagtggattttgtaaataacaagaggacagacttatcttcagaacatttcagtcattcctcaaagtggctagaaacttgtcagcatgaatcagatgagcagcctctagatccaattccccaaattagctctactcctaaaacgtctgaggaagcagtagacccactgggcaattatatggttaaaaccatcgtccttgtaccatctccactggggcagcaacaagacatgatatttgaggcccgtttagataccatggcagagacaaacagcatatctttaaatggacctttgagaacagacgatctggtgagagaggaggtggcaccctgcatgggagacaggttttcagaagttgctgctgtatctgagaaacctatctttcaggaatctccgtcccatctcttagaggagtctccaccaaatccctgttctgaacaactacattgctccaaggaaagcctgagcagtagaactgaggctgtgcgtgaggacttagtaccttctgaaagtaacgccttcttgccttcctctgttctctggctttccccttcaactgccttggcagcagatttccgtgtcaatcatgtggacccagaggaggaaattgtagagcatggagctatggaggaaagagaaatgaggtttcccacacatcctaaggagtctgaaacagaagatcaagcacttgtctcaagtgtggaagatattctgtccacatgcctgacaccaaatctagtagaaatggaatcccaagaagctccaggcccagcagtagaagatgttggtaggattcttggctctgatacagagtcttggatgtccccactggcctggctggaaaaaggtgtaaatacctccgtcatgctggaaaatctccgccaaagcttatcccttccctcgatgcttcgggatgctgcaattggcactacccctttctctacttgctcggtggggacttggtttactccttcagcaccacaggaaaagagtacaaacacatcccagacaggcctggttggcaccaagcacagtacttctgagacagagcagctcctgtgtggccggcctccagatctgactgccttgtctcgacatgacttggaagataacctgctgagctctcttgtcattctggaggttctctcccgccagcttcgggactggaagagccagctggctgtccctcacccagaaacccaggacagtagcacacagactgacacatctcacagtgggataactaataaacttcagcatcttaaggagagccatgagatgggacaggccctacagcaggccagaaatgtcatgcaatcatgggtgcttatctctaaagagctgatatccttgcttcacctatccctgttgcatttagaagaagataagactactgtgagtcaggagtctcggcgtgcagaaacattggtctgttgctgttttgatttgctgaagaaattgagggcaaagctccagagcctcaaagcagaaagggaggaggcaaggcacagagaggaaatggctctcagaggcaaggatgcggcagagatagtgttggaggctttctgtgcacacgccagccagcgcatcagccagctggaacaggacctagcatccatgcgggaattcagaggccttctgaaggatgcccagacccaactggtagggcttcatgccaagcaagaagagctggttcagcagacagtgagtcttacttctaccttgcaacaagactggaggtccatgcaactggattatacaacatggacagctttgctgagtcggtcccgacaactcacagagaaactcacagtcaagagccagcaagccctgcaggaacgtgatgtggcaattgaggaaaagcaggaggtttctagggtgctggaacaagtctctgcccagttagaggagtgcaaaggccaaacagaacaactggagttggaaaacagtcgtctagcaacagatctccgggctcagttgcagattctggcccggagatctgcaacngatctccgggctcagttgcagattctggccaacatggacagccagctaaaagagctacagagtcagcatacccattgtgcccaggacctggctatgaaggatgagttactctgccagcttacccagagcaatgaggagcaggctgctcaatggcaaaaggaagagatggcactaaaacacatgcaggcagaactgcagcagcaacaagctgtcctggccaaagaggtgcgggacctgaaagagaccttggagtttgcagaccaggagaatcaggttgctcacctggagctgggtcaggttgagtgtcaattgaaaaccacactggaagtgctccgggagcgcagcttgcagtgtgagaacctcaaggacactgtagagaacctaacggctaaactggccagcaccatagcagataaccaggagcaagatctggagaaaacacggcagtactctcaaaagctagggctgctgactgagcaactacagagcctgactctctttctacagacaaaactaaaggagaagctattttttcttctttgcccttagactgaacaagagacccttctgctgagtacagcctgtcctcccacccaggaacaccctctgcctaatgacaggaccttcctgggaagcatcttgacagcagtggcagatgaagagccagaatcaactcctgtgcccttgcttggaagtgacaagagtgctttcacccgagtagcatcaatggtttcccttcagcccgcagagaccccaggcatggaggagagcctggcagaaatgagtattatgactactgagcttcagagtctttgttccctgctacaagagtctaaagaagaagccatcaggactctgcagcgaaaaatttgtgagctgcaagctaggctgcaggcccaggaagaacagcatcaggaagtccagaaggcaaaagaagcagacatagagaagctgaaccaggccttgtgcttgcgctacaagaatgaaaaggagctccaggaagtgatacagcagcagaatgagaagatcctagaacagatagacaagagtggcgagctcataagccttagagaggaggtgacccaccttacccgctcacttcggcgtgcggagacagagaccaaagtgctccaggaggccctggcaggccagctggactccaactgccagcctatggccaccaattggatccaggagaaagtgtggctctctcaggaggtggacaaactgagagtgatgttcctggagatgaaaaatgagaaggaaaaactcatgatcaagttccagagccatagaaatatcctagaggagaaccttcggcgctctgacaaggagttagaaaaactagatgacattgttcagcatatttataagaccctgctctctattccagaggtggtgaggggatgcaaagaactacagggattgctggaatttctgagctaagaaactgaaagccagaatctgcttcacctctttttacctgcaatacccccttaccccaataccaagaccaactggcatagagccaactgagataaatgctatttaaataaagtgtatttaatgaa

SEQ ID NO: 368958 - DNA, 2718 bp, Homo sapiens
caggagggatggactcctggactctccagctacctgcgtggtcctccccggtgtgaggacagaagaccggtcctggaccgggcccgcatccagccctaccgccggtgtctgaggtgagggctccgtcagcggaaaacgctcgacaacggaggggcaggcagggccgggggcgtggtcaacgcgggccccgccccccgggctctacccccgagcgtacgcgcgcgcctgaagcagccaaccaggaagcgcagagcaggttcaaacacagacggcgggtgaacatggcgtcctcgacttggtctgagacgtgataggcctgccttctggttgaagatgtggcgagtgaaaaaactgagcctcagcctgtcgccttcgccccagacgggaaaaccatctatgagaactcctctccgtgaacttaccctgcagcccggtgccctcaccaactctggaaaaagatcccccgcttgctcctcgctgaccccatcactgtgcaagctggggctgcaggaaggcagcaacaactcatctccagtggattttgtaaataacaagaggacagacttatcttcagaacatttcagtcattcctcaaagtggctagaaacttgtcagcatgaatcagatgagcagcctctagatccaattccccaaattagctctactcctaaaacgtctgaggaagcagtagacccactgggcaattatatggttaaaaccatcgtccttgtaccatctccactggggcagcaacaagacatgatatttgaggcccgtttagataccatggcagagacaaacagcatatctttaaatggacctttgagaacagacgatctggtgagagaggaggtggcaccctgcatgggagacaggttttcagaagttgctgctgtatctgagaaacctatctttcaggaatctccgtcccatctcttagaggagtctccaccaaatccctgttctgaacaactacattgctccaaggaaagcctgagcagtagaactgaggctgtgcgtgaggacttagtaccttctgaaagtaacgccttcttgccttcctctgttctctggctttccccttcaactgccttggcagcagatttccgtgtcaatcatgtggacccagaggaggaaattgtagagcatggagctatggaggaaagagaaatgaggtttcccacacatcctaaggagtctgaaacagaagatcaagcacttgtctcaagtgtggaagatattctgtccacatgcctgacaccaaatctagtagaaatggaatcccaagaagctccaggcccagcagtagaagatgttggtaggattcttggctctgatacagagtcttggatgtccccactggcctggctggaaaaaggtgtaaatacctccgtcatgctggaaaatctccgccaaagcttatcccttccctcgatgcttcgggatgctgcaattggcactacccctttctctacttgctcggtggggacttggtttactccttcagcaccacaggaaaagagtacaaacacatcccagacaggcctggttggcaccaagcacagtacttctgagacagagcagctcctgtgtggccggcctccagatctgactgccttgtctcgacatgacttggaagataacctgctgagctctcttgtcattctggaggttctctcccgccagcttcgggactggaagagccagctggctgtccctcacccagaaacccaggacagtagcacacagactgacacatctcacagtgggataactaataaacttcagcatcttaaggagagccatgagatgggacaggccctacagcaggccagaaatgtcatgcaatcatgggtgcttatctctaaagagctgatatccttgcttcacctatccctgttgcatttagaagaagataagactactgtgagtcaggagtctcggcgtgcagaaacattggtctgttgctgttttgatttgctgaagaaattgagggcaaagctccagagcctcaaagcagaaagggaggaggcaaggcacagagaggaaatggctctcagaggcaaggatgcggcagagatagtgttggaggctttctgtgcacacgccagccagcgcatcagccagctggaacaggacctagcatccatgcgggaattcagaggccttctgaaggatgcccagacccaactggtagggcttcatgccaagcaagaagagctggttcagcagacagtgagtcttacttctaccttgcaacaagactggaggtccatgcaactggattatacaacatggacagctttgctgagtcggtcccgacaactcacagagaaactcacagtcaagagccagcaagccctgcaggaacgtgatgtggcaattgaggaaaagcaggaggtttctagggtgctggaacaagtctctgcccagttagaggagtgcaaaggccaaacagaacaactggagttggaaaacagtcgtctagcaacagatctccgggctcagttgcagattctgtcctgaaatattataaggtggatgagaatggcaaaattagtcgccttcgtcgagagtgcccttctgatgaatgtggtgctggggtgtttatggcaagtcactttgacagacattattgtggcaaatgttgtctgacttactgtttcaacaaaccagaagacaagtaactgtatgagttaataaaagacatgaactaaa

SEQ ID NO: 368959 - DNA, 952 bp, Homo sapiens
atcatcagaggggccctctcccattattggtttttctcttagagccagaatcaactcctgtgcccttgcttggaagtgacaagagtgctttcacccgagtagcatcaatggtttcccttcagcccgcagagaccccaggcatggaggagagcctggcagaaatgagtattatgactactgagcttcagagtctttgttccctgctacaagagtctaaagaagaagccatcaggactctgcagcgaaaaatttgtgagctgcaagctaggctgcaggcccaggaagaacagcatcaggaagtccagaaggcaaaagaagcagacatagagaagctgaaccaggccttgtgcttgcgctacaagaatgaaaaggagctccaggaagtgatacagcagcagaatgagaagatcctagaacagatagacaagagtggcgagctcataagccttagagaggaggtgacccaccttacccgctcacttcggcgtgcggagacagagaccaaagtgctccaggaggccctggcaggccagctggactccaactgccagcctatggccaccaattggatccaggagaaagtgtggctctctcaggaggtggacaaactgagagtgatgttcctggagatgaaaaatgagaaggaaaaactcatgatcaagttccagagccatagaaatatcctagaggagaaccttcggcgctctgacaaggagttagaaaaactagatgacattgttcagcatatttataagaccctgctctctattccagaggtggtgaggggatgcaaagaactacagggattgctggaatttctgagctaagaaactgaaagccagaatctgcttcacctctttttacctgcaatacccccttaccccaataccaagaccaactggcatagagccaactgagataaatgctatttaaataaagtgtatttaatgaa

SEQ ID NO: 368960 - DNA, 630 bp, Homo sapiens
aggcgagctcagggaggacagaaacctcccgtgggacgtgataggcctgccttctggttgaagatgtggcgagtgaaaaaactgagcctcagcctgtcgccttcgccccagacgggaaaaccatctatgagaactcctctccgtgaacttaccctgcagcccggtgccctcaccaactctggaaaaagatcccccgcttgctcctcgctgaccccatcactgtgcaagctggggctgcagcagcagatttccgtgtcaatcatgtggacccagaggaggaaattgtagagcatggagctatggaggaaagagaaatgaggtttcccacacatcctaaggagtctgaaacagaagatcaagcacttgtctcaagtgtggaagatattctgtccacatgcctgacaccaaatctagtagaaatggaatcccaagaagctccaggcccagcagtagaagatgttggtaggattcttggctctgatacagagtcttggatgtccccactggcctggctggaaaaaggtgtaaatacctccgtcatgctgcaatacccccttaccccaataccaagaccaactggcatagagccaactgagataaatgctatttaaataaagtgtatttaatgaa

SEQ ID NO: 368961 - DNA, 3244 bp, Homo sapiens
  misc_feature (2925)..(2925): n is a, c, g, or t
tctcactagcctcagagcactctcagaagttcagaaactaagaccagaaaagagaagatttttagacagctcatgaaacggtctgcgcggggcggccattggcggcggagtgtcacgtgaccgcgggggcgtgccaatgtgcgccctcacgggtgtcaaacccctgtcagagtgtgcgatcaagatcgtgaaacaacgcgatgcaaaaagcgacctactacgacagctcggcgatctacggtggctacccctaccaggcagccaacgggttcgcttataatgccaatcagcagccgtacccggcgtccgccgctttgggcgccgacggcgagtaccaccgacccgcctgctccctccagtctccctccagcgccgggggccaccccaaggcacacgaactgagtgaggcgtgcctgcgcaccctgagcgccccacctagccagcctccaagcctgggagagccgcccctgcacccgccgccgccccaggccgcgccccctgccccacagccgcctcagcccgcacctcagccccctgcacctacccctgccgcgcccccgcctccctcttctgcctcccctcctcagaatgccagcaacaaccctacccctgccaacgcggccaagagccccctgctcaactcacccacagtggccaaacaaatcttcccctggatgaaagagtctcgacaaaacacaaagcagaaaaccagcagctccagctcaggcgaaagctgcgctggcgacaagagcccgccggggcaggcttcgtccaagcgcgcgcgcacggcctacacgagcgcgcagctggtggagctggagaaagagttccacttcaaccgctacctgtgccggccgcgccgggtggagatggccaatctgctgaacctcactgagcgccagatcaagatctggttccagaatcgccgcatgaagtacaaaaaggatcagaagggcaagggcatgctaacgtcatcggggggccagtctccaagtcgcagccccgtgccccccggagccggtggctatctgaactctatgcattcgctggtcaacagcgtcccgtatgagccccagtcgcccccgcccttctccaagcccccccagggtacctacgggctgccccccgcctcctaccctgcgtccctgcccagctgcgcacccccgccacccccacagaagcgctacacggcggcaggggcgggcgcagggggcacccccgactatgacccgcacgctcatggcctgcagggcaacggcagctatgggaccccacacatacagggaagccccgtcttcgtggggggcagctatgtggagcccatgagcaactccgggccagccctctttggtctaactcacctcccccacgctgcctcgggcgccatggactatgggggtgccgggccgctgggcagcggccaccaccacgggccggggcctggggagccgcaccccacctacacggaccttaccggccaccatccttctcagggaagaattcaggaagcacccaagctcacccacctgtgatagtgggcttggggctacgcgccaggagagtctccccccacccaccttttttctttggttgcttttttttttttttttaggttcttcctgccctttccttccttccttttctctcttctccgccccgcactccgtttcccggtttcccccctcgttggtaaggcgtttttatagtttatgtgacgtagcaatcttggttgctggaatggctgtatcatagcgatatttatctcttcctgctcctcgataggccactggccctgcaccctttaccttctccactctttgatcagaaacagggtatatgaacaaattttctagtcgagttttcaatgtgaatttgttcttacattatggctcccgaggggaagcgattactttttttaattttaaatttttttttttaattgcacttcttgtaaagagtgagaaaaaaaatcaaaggcgctttgaaacaggggctctctgtgcaaggatgactaagtgtacgtctttccgtgtgtgtatgctggtgaacagtcagatttatttatatttttttgcaagcattgaataatctaagttttaaatattatttatccccatccgttcgtatttatattaaagaattctgtaccctgatggttcagaagggttcttgggccttttgttcaattgtgtattggcgtacttagaattttttttatttgaaagagaaatataattcctttaaacggtaacgatgcaataaaaccagagaagatccagcttttgaaaacagtgatttaggtttgtaacatccggcaaaactgaaaaaaaaaatctgtaaacgcgaaaaatactagatttgttttgagagttcttcattccttgctgctcacattctgagaaacaaaaagaaataaagtttttattctgaataatatccgtgttaagaaggggttctttggccgaagacgtgggtctgcgtggaattcaggccgaggcgagccggcagagcaggccggacgcagcagccctctggctccagcatggggcctggccaggctattcgcctggaagctcggcgaattctcaggatggcggctggggctccaggcggctgcggcagctctggtaacgccgtgcggcgggccagctgggctgcccggttcccagctgctgcggaggcaggctgagggcgcaggggctgccgagtgctgtgcacggaagaaacaaagacatcccggcccaaggcgcagcgggagcgcacaggtgccccgcggcccagccgggggataacgcagggcggtcttctgctccatgctcttcctcgggtcaaagcggaccaactaacgcctaaacctcggtattagccagccgcgcagaggatgccgagcactttccgggagcaatcggactcctggtctcctcnggggatgcttcgcggtctgttatcgcgtcaggaggaaagaattgctccaaaaatctgcacgcggagcgaaacagtttgaaagggactgaggctcacccaggtctccagcaaacggaggactgaactggggagagtcaccctgagccagcccttccctggactgccggaatcccagcattagcttcctgctgaatgtagtatttggcattctctgaatttatttcctctccttcccccacccagctttctttttatggccccagggggagggggagagagcaaggagatcggtatctttgtaataaaactgcaattttat

SEQ ID NO: 368962 - DNA, 401 bp, Homo sapiens
caatggcaggtcccagaagaccaagtagctaccagcaacttctggtactgcacaacacagtacagacaatgtgaaacaatctctaagtctaaagaaggacaatatgagcagcacaggaactgccatctctcattctctctttttttttttaagagacagggtctccctctgttgcccaggctggagggcagtggtgcaatcactcgctgggctcaagtgatcctcccacctcagcctcctgagtagctagaactacaggtgtcaccaagtccaggtaaataaaaaaaaaattttttttgtacagatggggtgttgcccaggctggtccttaaacaattagcctcaagcagtcctcccacctcagcctcccaaagtgctgagattacaggcgtaatgtggcc

SEQ ID NO: 368963 - DNA, 1375 bp, Homo sapiens
agggctcccagacatcacctctgcccgccgccacctcctccaactctcccagctcagccggagccggagcgcgcaacaaccaagtccgagactggaggcagatcggggggaggggagaagcgccaagcgcgctgccctcccagggaaactcactgccgcctactcccagccggccacagtcaccagctcaaaatggcgacgacgagaagggagtcggcgctccgaccaccatccacctactaaggaagcgcgctctggccggccccggcgattggtcaccgcccgctaggggacagccctggcctcctctgattggcaagcgctggccacctccccacaccccttgcgaacgctcccctagtggagaaaaggagtagctattagccaattcggcagggcccgctttttagaagcttgatttcctttgaagatgaaagactagcggaagctctgcctctttccccagtgggcgagggaactcggggcgattggctgggaactgtatccacccaaatgtcaccgatttcttcctatgcaggaaatgagcagacccatcaataagaaatttctcagcctggccgaaaatggttggccccacgaagccacgacaactggaggcaaagagggttgctcaacgccccgcctcattggaaaaccaaatcagatctgggacctatatagcgtggcggaggcggggcgatgattgtcgcgctcgcacccactgcagctgcgcacagtcgcatttctttccccgcccctgagaccctgcagcaccatctgtcatggcggctgggctgtttggtttgagcgctcgccgtcttttggcggcagcggcgacgcgagggctcccggccgcccgcgtccgctgggaatctagcttctccaggactgtggtcgccccgtccgctgtggcgggaaagcggcccccagaaccgaccacaccgtggcaagaggacccagaacccgaggacgaaaacttgtatgagaagaacccagactcccatggttatgacaaggaccccgttttggacgtctggaacatgcgacttgtcttcttctttggcgtctccatcatcctggtccttggcagcacctttgtggcctatctgcctgactacaggtgcacagggtgtccaagagcgtgggatgggatgaaagagtggtcccgccgcgaagctgagaggcttgtgaaataccgagaggccaatggccttcccatcatggaatccaactgcttcgaccccagcaagatccagctgccagaggatgagtgaccagttgctaagtggggctcaagaagcaccgccttccccaccccctgcctgccattctgacctcttctcagagcacctaattaaaggggctgaaagtctga

SEQ ID NO: 368964 - DNA, 1602 bp, Homo sapiens
agggctcccagacatcacctctgcccgccgccacctcctccaactctcccagctcagccggagccggagcgcgcaacaaccaagtccgagactggaggcagatcggggggaggggagaagcgccaagcgcgctgccctcccagggaaactcactgccgcctactcccagccggccacagtcaccagctcaaaatggcgacgacgagaagggagtcggcgctccgaccaccatccacctactaaggaagcgcgctctggccggccccggcgattggtcaccgcccgctaggggacagccctggcctcctctgattggcaagcgctggccacctccccacaccccttgcgaacgctcccctagtggagaaaaggagtagctattagccaattcggcagggcccgctttttagaagcttgatttcctttgaagatgaaagactagcggaagctctgcctctttccccagtgggcgagggaactcggggcgattggctgggaactgtatccacccaaatgtcaccgatttcttcctatgcaggaaatgagcagacccatcaataagaaatttctcagcctggccgaaaatggttggccccacgaagccacgacaactggaggcaaagagggttgctcaacgccccgcctcattggaaaaccaaatcagatctgggacctatatagcgtggcggaggcggggcgatgattgtcgcgctcgcacccactgcagctgcgcacagtcgcatttctttccccgcccctgagaccctgcagcaccatctgtcatggcggctgggctgtttggtttgagcgctcgccgtcttttggcggcagcggcgacgcgagggctcccggccgcccgcgtccgctgggaatctagcttctccaggactgtggtcgccccgtccgctgtggcgggaaagcggcccccagaaccgaccacaccgtggcaagaggacccagaacccgaggacgaaaacttgtatgagaagaacccagactcccatggttatgacaaggaccccgttttggacgtctggaacatgcgacttgtcttcttctttggcgtctccatcatcctggtccttggcagcacctttgtggcctatctgcctgactacaggatgaaagagtggtcccgccgcgaagctgagaggcttgtgaaataccgagaggccaatggccttcccatcatggaatccaactgcttcgaccccagcaagatccagctgccagaggatgagtgaccagttgctaagtggggctcaagaagcaccgccttccccaccccctgcctgccattctgacctcttctcagagcacctaattaaaggggctgaaagtctgaaaaaagataggacaaactccacaccgcgcttcaacctcaacccaagagtgaggcggacgccgacaatcctctgcgagcttctcacacgcgggggacacaggaaactcagcaggagaggcagcgtgtggtgaccaccccttggagaacggtgatgtccggccgctggatcatcggcaccggcaatgcccgggcaagttgccgcgaaaccgggcgggggcccctgggatccgccgaaggcggcgacaacacggtcagag

SEQ ID NO: 368965 - DNA, 1341 bp, Homo sapiens
  misc_feature (1299)..(1299): n is a, c, g, or t
  misc_feature (1302)..(1302): n is a, c, g, or t
agggctcccagacatcacctctgcccgccgccacctcctccaactctcccagctcagccggagccggagcgcgcaacaaccaagtccgagactggaggcagatcggggggaggggagaagcgccaagcgcgctgccctcccagggaaactcactgccgcctactcccagccggccacagtcaccagctcaaaatggcgacgacgagaagggagtcggcgctccgaccaccatccacctactaaggaagcgcgctctggccggccccggcgattggtcaccgcccgctaggggacagccctggcctcctctgattggcaagcgctggccacctccccacaccccttgcgaacgctcccctagtggagaaaaggagtagctattagccaattcggcagggcccgctttttagaagcttgatttcctttgaagatgaaagactagcggaagctctgcctctttccccagtgggcgagggaactcggggcgattggctgggaactgtatccacccaaatgtcaccgatttcttcctatgcaggaaatgagcagacccatcaataagaaatttctcagcctggccgaaaatggttggccccacgaagccacgacaactggaggcaaagagggttgctcaacgccccgcctcattggaaaaccaaatcagatctgggacctatatagcgtggcggaggcggggcgatgattgtcgcgctcgcacccactgcagctgcgcacagtcgcatttctttccccgcccctgagaccctgcagcaccatctgtcatggcggctgggctgtttggtttgagcgctcgccgtcttttggcggcagcggcgacgcgagggctcccggccgcccgcgtccgctgggaatctagcttctccaggactgtggtcgccccgtccgctgtggcgggaaagcggcccccagaaccgaccacaccgtggcaagaggacccagaacccgaggacgaaaacttgtatgagaagaacccagactcccatggttatgacaaggaccccgttttggacgtctggaacatgcgacttgtcttcttctttggcgtctccatcatcctggtccttggcagcacctttgtggcctatctgcctgactacaggatgaaagagtggtcccgccgcgaagctgagaggcttgtgaaataccgagaggccaatggccttcccatcatggaatccaactgcttcgaccccagcaagatccagctgccagaggatgagtgaccagttgctaagtggggctcaagaagcaccgccttccccaccccctgcctgcccnctngtgcatacccagcagtccaagtgcaacgtctcctccata

SEQ ID NO: 368966 - DNA, 1518 bp, Homo sapiens
agggctcccagacatcacctctgcccgccgccacctcctccaactctcccagctcagccggagccggagcgcgcaacaaccaagtccgagactggaggcagatcggggggaggggagaagcgccaagcgcgctgccctcccagggaaactcactgccgcctactcccagccggccacagtcaccagctcaaaatggcgacgacgagaagggagtcggcgctccgaccaccatccacctactaaggaagcgcgctctggccggccccggcgattggtcaccgcccgctaggggacagccctggcctcctctgattggcaagcgctggccacctccccacaccccttgcgaacgctcccctagtggagaaaaggagtagctattagccaattcggcagggcccgctttttagaagcttgatttcctttgaagatgaaagactagcggaagctctgcctctttccccagtgggcgagggaactcggggcgattggctgggaactgtatccacccaaatgtcaccgatttcttcctatgcaggaaatgagcagacccatcaataagaaatttctcagcctggccgaaaatggttggccccacgaagccacgacaactggaggcaaagagggttgctcaacgccccgcctcattggaaaaccaaatcagatctgggacctatatagcgtggcggaggcggggcgatgattgtcgcgctcgcacccactgcagctgcgcacagtcgcatttctttccccgcccctgagaccctgcagcaccatctgtcatggcggctgggctgtttggtttgagcgctcgccgtcttttggcggcagcggcgacgcgagggctcccggccgcccgcgtccgctgggaatctagcttctccaggactgtggtcgccccgtccgctgtggcgggaaagcggcccccagaaccgaccacaccgtggcaagaggacccagaacccgaggacgaaaacttgtatgagaagaacccagactcccatggttatgacaaggaccccgttttggacgtctggaacatgcgacttgtcttcttctttggcgtctccatcatcctggtccttggcagcacctttgtggcctatctgcctgactacaggtgcacagggtgtccaagagcgtgggatgggtaagaggcagaggcagggatggaggttgaaggggattctgccaggagttttgttcctgcaccattgggaatggggagctgagatgagggattggtatcagttgaggctccctcacgtctacccctgctatttgcactaccaggatgaaagagtggtcccgccgcgaagctgagaggcttgtgaaataccgagaggccaatggccttcccatcatggaatccaactgcttcgaccccagcaagatccagctgccagaggatgagtgaccagttgctaagtggggctcaagaagcaccgccttccccaccccctgcctgccattctgacctcttctcagagcacctaattaaaggggctgaaagtctga

SEQ ID NO: 368967 - DNA, 1345 bp, Homo sapiens
agggctcccagacatcacctctgcccgccgccacctcctccaactctcccagctcagccggagccggagcgcgcaacaaccaagtccgagactggaggcagatcggggggaggggagaagcgccaagcgcgctgccctcccagggaaactcactgccgcctactcccagccggccacagtcaccagctcaaaatggcgacgacgagaagggagtcggcgctccgaccaccatccacctactaaggaagcgcgctctggccggccccggcgattggtcaccgcccgctaggggacagccctggcctcctctgattggcaagcgctggccacctccccacaccccttgcgaacgctcccctagtggagaaaaggagtagctattagccaattcggcagggcccgctttttagaagcttgatttcctttgaagatgaaagactagcggaagctctgcctctttccccagtgggcgagggaactcggggcgattggctgggaactgtatccacccaaatgtcaccgatttcttcctatgcaggaaatgagcagacccatcaataagaaatttctcagcctggccgaaaatggttggccccacgaagccacgacaactggaggcaaagagggttgctcaacgccccgcctcattggaaaaccaaatcagatctgggacctatatagcgtggcggaggcggggcgatgattgtcgcgctcgcacccactgcagctgcgcacagtcgcatttctttccccgcccctgagaccctgcagcaccatctgtcatggcggctgggctgtttggtttgagcgctcgccgtcttttggcggcagcggcgacgcgagggctcccggccgcccgcgtccgctgggaatctagcttctccaggactgtggtcgccccgtccgctgtggcgggaaagcggcccccagaaccgaccacaccgtggcaagaggacccagaacccgaggacgaaaacttgtatgagaagaacccagactcccatggttatgacaaggaccccgttttggacgtctggaacatgcgacttgtcttcttctttggcgtctccatcatcctggtccttggcagcacctttgtggcctatctgcctgactacaggatgaaagagtggtcccgccgcgaagctgagaggcttgtgaaataccgagaggccaatggccttcccatcatggaatccaactgcttcgaccccagcaagatccagctgccagaggatgagtgaccagttgctaagtggggctcaagaagcaccgccttccccaccccctgcctgccattctgacctcttctcagagcacctaattaaaggggctgaaagtctga

SEQ ID NO: 368968 - DNA, 1714 bp, Homo sapiens
agggctcccagacatcacctctgcccgccgccacctcctccaactctcccagctcagccggagccggagcgcgcaacaaccaagtccgagactggaggcagatcggggggaggggagaagcgccaagcgcgctgccctcccagggaaactcactgccgcctactcccagccggccacagtcaccagctcaaaatggcgacgacgagaagggagtcggcgctccgaccaccatccacctactaaggaagcgcgctctggccggccccggcgattggtcaccgcccgctaggggacagccctggcctcctctgattggcaagcgctggccacctccccacaccccttgcgaacgctcccctagtggagaaaaggagtagctattagccaattcggcagggcccgctttttagaagcttgatttcctttgaagatgaaagactagcggaagctctgcctctttccccagtgggcgagggaactcggggcgattggctgggaactgtatccacccaaatgtcaccgatttcttcctatgcaggaaatgagcagacccatcaataagaaatttctcagcctggccgaaaatggttggccccacgaagccacgacaactggaggcaaagagggttgctcaacgccccgcctcattggaaaaccaaatcagatctgggacctatatagcgtggcggaggcggggcgatgattgtcgcgctcgcacccactgcagctgcgcacagtcgcatttctttccccgcccctgagaccctgcagcaccatctgtcatggcggctgggctgtttggtttgagcgctcgccgtcttttggcggcagcggcgacgcgagggctcccggccgcccgcgtccgctgggaatctagcttctccaggactgtggtcgccccgtccgctgtggcgggaaagcggcccccagaaccgaccacaccgtggcaagaggacccagaacccgaggacgaaaacttgtatgagaagaacccagactcccatggttatgacaaggaccccgttttggacgtctggaacatgcgacttgtcttcttctttggcgtctccatcatcctggtccttggcagcacctttgtggcctatctgcctgactacaggatgaaagagtggtcccgccgcgaagctgagaggcttgtgaaataccgagaggccaatggccttcccatcatggaatccaactgcttcgaccccagcaagatccagctgccagaggatgagtgaccagttgctaagtggggctcaagaagcaccgccttccccaccccctgcctgccattctgacctcttctcagagcacctaattaaaggggctgaaagtctgaaaaaaaaacaaaaaaaattcgaactagttctctcgaaggggaggtgtgcccgaagtcttcggaatccccccggtcacgccaagtcagagagagttcgagcccagtccggggccccaagaatgtagcgccgaaagaagtccccgtgtagtccggcattggccgggtgggaaccgcctaaattttgagaaacccccctaggtgcggaacggggacgcctttgaggacgaccgggccaaccggggggctacaagagggaactgccccccccgtgttgagcgcgcgatcccgcggagaaagctttgttgcaaatatatcgaccacgtaagaggtgggtcccccctgtgtgcacaaaccgcccaatcttagcga

SEQ ID NO: 368969 - DNA, 1008 bp, Homo sapiens
agggctcccagacatcacctctgcccgccgccacctcctccaactctcccagctcagccggagccggagcgcgcaacaaccaagtccgagactggaggcagatcggggggaggggagaagcgccaagcgcgctgccctcccagggaaactcactgccgcctactcccagccggccacagtcaccagctcaaaatggcgacgacgagaagggagtcggcgctccgaccaccatccacctactaaggaagcgcgctctggccggccccggcgattggtcaccgcccgctaggggacagccctggcctcctctgattggcaagcgctggccacctccccacaccccttgcgaacgctcccctagtggagaaaaggagtagctattagccaattcggcagggcccgctttttagaagcttgatttcctttgaagatgaaagactagcggaagctctgcctctttccccagtgggcgagggaactcggggcgattggctgggaactgtatccacccaaatgtcaccgatttcttcctatgcaggaaatgagcagacccatcaataagaaatttctcagcctggccgaaaatggttggccccacgaagccacgacaactggaggcaaagagggttgctcaacgccccgcctcattggaaaaccaaatcagatctgggacctatatagcgtggcggaggcggggcgatgattgtcgcgctcgcacccactgcagctgcgcacagtcgcatttctttccccgcccctgagaccctgcagcaccatctgtcatggcggctgggctgtttggtttgagcgctcgccgtcttttggcggcagcggcgacgcgagggctcccggccgcccgcgtccgctgggaatctagcttctccaggactgtggtcgccccgtccgctgtggcgggaaagcggcccccagaaccgaccacaccgtggcaacgaaactgaaaaccctggaaggcggcgactttgcggtaccagctcaattctatatgta

SEQ ID NO: 368970 - DNA, 3499 bp, Homo sapiens
agcgggcagaacgctccagacgctgagaggcaggaggcactagggatcgtccgcaggattgggactgatacagaggccgccacggagcccgccggagccaccgttcctgctgctgccgccgctgcccgaatcggaaccgtcgggccgcagccgccggcaatgccgcgaaggaagaggaatgcaggcagtagttcagatggaaccgaagattccgatttttctacagatctcgagcacacagacagttcagaaagtgatggcacatcccgacgatctgctcgagtcacccgctcctcagccaggctaagccagagttctcaagattccagtcctgttcgaaatctgcagtcttttggcactgaggagcctgcttactctaccagaagagtgacccgtagtcagcagcagcctaccccagtgacaccgaaaaaataccctcttcggcagactcgttcatctggttcagaaactgagcaagtggttgatttttcagatagagaaactaaaaatacagctgatcatgatgagtcaccgcctcgaactccaactggaaatgcgccttcttctgagtctgacatagacatctccagccccaatgtatctcacgatgagagcattgccaaggacatgtccctgaaggactcaggcagtgatctctctcatcgccccaagcgccgtcgcttccatgaaagctacaacttcaatatgaagtgtcctacaccaggctgtaactctctaggacaccttacaggaaaacatgagagacatttctccatctcaggatgcccactgtatcataacctctcagctgacgaatgcaaggcaccaacggagaggcagcttcgatataaggaaaaagtggctgaactcaggaagaaaagaaattctggactgagcaaagaacagaaagagaaatatatggaacacagacagacctatgggaacacacgggaacctcttttagaaaacctgacaagcgagtatgacttggatcttttccgaagagcacaagcccgggcttcagaggatttggagaagttaaggctgcaaggccaaatcacagagggaagcaacatgattaaaacaattgcttttggccgctatgagcttgatacctggtatcattctccatatcctgaagaatatgcacggctgggacgtctctatatgtgtgaattctgtttaaaatatatgaagagccaaacgatactccgccggcacatggccaaatgtgtgtggaaacacccacctggtgatgagatatatcgcaaaggttcaatctctgtgtttgaagtggatggcaagaaaaacaagatctactgccaaaacctgtgcctgttggccaaactttttctggaccacaagacattatattatgatgtggagcccttcctgttctatgttatgacagaggcggacaacactggctgtcacctgattggatatttttctaaggaaaagaattcattcctcaactacaacgtctcctgtatccttactatgcctcagtacatgagacagggctatggcaagatgcttattgatttcagttatttgctttccaaagtcgaagaaaaagttggctccccagaacgtccactctcagatctggggcttataagctatcgcagttactggaaagaagtacttctccgctacctgcataattttcaaggcaaagagatttctatcaaagaaatcagtcaggagacggctgtgaatcctgtggacattgtcagcactctgcaagcccttcagatgctcaaatactggaagggaaaacacctagttttaaagagacaggacctgattgatgagtggatagccaaagaggccaaaaggtccaactccaataaaaccatggatcccagctgcttaaaatggacccctcccaagggcacttaaagtgacctgtcattccgagccagcgaaccccagcagtaggaatccgtaccctagggatctgtctgtcatttctctgttgctcttgtgattggcaagtacagtatcctttgggaaggccatccccctcaggactgtcctggctccgacctttgtgtacactgcagacgctggttctgaggaactgttgtttcggcctcagtgaggttgcctggatgggatctgtattagacttgagtgcaggtctctcagcactgacccaaggagttctgttatggtactgtacctgtccagtcactggttctctcctcatgtcctctcgccccatgaggttgtgttgtgtcttctaagcgtggtactagtgcttgccacctggtcaccagacctccaaatatggctgccaccaccaggacctttccagttactccttatatgtgtgttctatggaggggcagggaaaaggtggcacttgtgagtgtgtgtggattggcagggggtccattcactttgggttccatcttgctttaaatttcttcattttgattaagagacctctttttgatctgtattgggctaaccagagccaaatacttttgaagagtttcccagggactagtcatggtaatagcatataattgatctgaatgagatggagagaagaatgaaggggtggtggttctgggtttgatttgagttcacctgtgggcagtgggcagtgggcagtgtcttggtgaaagggaacggatactactttttgcctcaccgtaaagtactcactagtaaatatttccttctctctttactcccactttttacgtttgcaggtgccaaagtaatgtccacttttccctttcatgctgcatattaactggttaattatactgcagaaaccttttcacctccactagtctgatacagtacatctgtacttccatataccttgcactgattttgtctgagtgccctgggagaagtagaaaatgattgaaagtgacttccgtatctcagcccatgactcagcaaggcagaatggccacccctgccaaagtttgcttctcttttcaacagtgcctcaccctccctctaggattaaagtgcttctgcccttccacgaactcctcctccatttcctttttgggatttgtcaccatccttctattctctggtcttctatttttggtgttgttcaagtgaaggaagagatgttccctctaatttctctctagcccattataacctgctatcttggggcaacttttgatgtatgacatgtcacccttcccaacttggtctcctccaacatgctgtcttcatgtggagccctcaccacaatccctgactccggtcatttgtgcctttctcttgtcatctctgtacactacttatattcactgtgggttgggggagctaattttaagcatgttcagtggcagctcccctccagtttcagtgtcactgttaaaatttatcaaaaagcaacttcactaggggttttcttaagggataaaggccttttacagaagctaaacccttccccacatgtggtagaatgtgctcttctatatctactcctcaataaagcatgttctctgctcaa

SEQ ID NO: 368971 - DNA, 4233 bp, Homo sapiens
agcgggcagaacgctccagacgctgagaggcaggaggcactagggatcgtccgcaggattgggactgatacagaggccgccacggagcccgccggagccaccgttcctgctgctgccgccgctgcccgaatcggaaccgtcgggccgcagccgccggcaatgccgcgaaggaagaggaatgcaggcagtagttcagatggaaccgaagattccgatttttctacagatctcgagcacacagacagttcagaaagtgatggcacatcccgacgatctgctcgagtcacccgctcctcagccaggctaagccagagttctcaagattccagtcctgttcgaaatctgcagtcttttggcactgaggagcctgcttactctaccagaagagtgacccgtagtcagcagcagcctaccccagtgacaccgaaaaaataccctcttcggcagactcgttcatctggttcagaaactgagcaagtggttgatttttcagatagagaaactaaaaatacagctgatcatgatgagtcaccgcctcgaactccaactggaaatgcgccttcttctgagtctgacatagacatctccagccccaatgtatctcacgatgagagcattgccaaggacatgtccctgaaggactcaggcagtgatctctctcatcgccccaagcgccgtcgcttccatgaaagctacaacttcaatatgaagtgtcctacaccaggctgtaactctctaggacaccttacaggaaaacatgagagacatttctccatctcaggatgcccactgtatcataacctctcagctgacgaatgcaaggtgagagcacagagccgggataagcagatagaagaaaggatgctgtctcacaggcaagatgacaacaacaggcatgcaaccaggcaccaggcaccaacggagaggcagcttcgatataaggaaaaagtggctgaactcaggaagaaaagaaattctggactgagcaaagaacagaaagagaaatatatggaacacagacagacctatgggaacacacgggaacctcttttagaaaacctgacaagcgagtatgacttggatcttttccgaagagcacaagcccgggcttcagaggatttggagaagttaaggctgcaaggccaaatcacagagggaagcaacatgattaaaacaattgcttttggccgctatgagcttgatacctggtatcattctccatatcctgaagaatatgcacggctgggacgtctctatatgtgtgaattctgtttaaaatatatgaagagccaaacgatactccgccggcacatggccaaatgtgtgtggaaacacccacctggtgatgagatatatcgcaaaggttcaatctctgtgtttgaagtggatggcaagaaaaacaagatctactgccaaaacctgtgcctgttggccaaactttttctggaccacaagacattatattatgatgtggagcccttcctgttctatgttatgacagaggcggacaacactggctgtcacctgattggatatttttctaaggaaaagaattcattcctcaactacaacgtctcctgtatccttactatgcctcagtacatgagacagggctatggcaagatgcttattgatttcagttatttgctttccaaagtcgaagaaaaagttggctccccagaacgtccactctcagatctggggcttataagctatcgcagttactggaaagaagtacttctccgctacctgcataattttcaaggcaaagagatttctatcaaagaaatcagtcaggagacggctgtgaatcctgtggacattgtcagcactctgcaagcccttcagatgctcaaatactggaagggaaaacacctagttttaaagagacaggacctgattgatgagtggatagccaaagaggccaaaaggtccaactccaataaaaccatggatcccagctgcttaaaatggacccctcccaagggcacttaaagtgacctgtcattccgagccagcgaaccccagcagtaggaatccgtaccctagggatctgtctgtcatttctctgttgctcttgtgattggcaagtacagtatcctttgggaaggccatccccctcaggactgtcctggctccgacctttgtgtacactgcagacgctggttctgaggaactgttgtttcggcctcagtgaggttgcctggatgggatctgtattagacttgagtgcaggtctctcagcactgacccaaggagttctgttatggtactgtacctgtccagtcactggttctctcctcatgtcctctcgccccatgaggttgtgttgtgtcttctaagcgtggtactagtgcttgccacctggtcaccagacctccaaatatggctgccaccaccaggacctttccagttactccttatatgtgtgttctatggaggggcagggaaaaggtggcacttgtgagtgtgtgtggattggcagggggtccattcactttgggttccatcttgctttaaatttcttcattttgattaagagacctctttttgatctgtattgggctaaccagagccaaatacttttgaagagtttcccagggactagtcatggtaatagcatataattgatctgaatgagatggagagaagaatgaaggggtggtggttctgggtttgatttgagttcacctgtgggcagtgggcagtgggcagtgtcttggtgaaagggaacggatactactttttgcctcaccgtaaagtactcactagtaaatatttccttctctctttactcccactttttacgtttgcaggtgccaaagtaatgtccacttttccctttcatgctgcatattaactggttaattatactgcagaaaccttttcacctccactagtctgatacagtacatctgtacttccatataccttgcactgattttgtctgagtgccctgggagaagtagaaaatgattgaaagtgacttccgtatctcagcccatgactcagcaaggcagaatggccacccctgccaaagtttgcttctcttttcaacagtgcctcaccctccctctaggattaaagtgcttctgcccttccacgaactcctcctccatttcctttttgggatttgtcaccatccttctattctctggtcttctatttttggtgttgttcaagtgaaggaagagatgttccctctaatttctctctagcccattataacctgctatcttggggcaacttttgatgtatgacatgtcacccttcccaacttggtctcctccaacatgctgtcttcatgtggagccctcaccacaatccctgactccggtcatttgtgcctttctcttgtcatctctgtacactacttatattcactgtgggttgggggagctaattttaagcatgttcagtggcagctcccctccagtttcagtgtcactgttaaaatttatcaaaaagcaacttcactaggggttttcttaagggataaaggccttttacagaagctaaacccttccccacatgtggtagaatgtgctcttctatatctactcctcaataaagcatgttctctgctcaaaaaaaaaaaaaaaaaaaaaaaaaaaaaaaaaaaaaaaaaaaactcgagaaggaatgtttagcacaagacacagcggagctcgggattggctaaactcccatagtatttatggtggccgccggcgggggccccagcccagcttgcaggccacctctagctttcttcctaccccattcccggcttccctcctcctcccctgcagcctggttaggtggatacctgccctgacatgtgaggcaagctaaggcctggagggtcagatgggagaccaggtcccaagggagcaagacctcgcgaagcgcagcagccccggcccttcccccgttttgaacatgtgtaaccgacagtctgcctgggccacagccctctcaccctggtactgcatgcacgcaatgctagctgcccctttcccgtcctgggcaccccgagtctcccccgaccccgggtcccaggtatgctcccacctccacctgccccactcaccacctctgctagttccagacacctccacgcccacctggtcctctcccatcgcccacaaaagggggggcacgagggacgagcttagctgagctgggaggagcagggtgagggtgggcgacccaggattccccctccccttcccaaataaagatgagggtact

SEQ ID NO: 368972 - DNA, 3246 bp, Homo sapiens
  misc_feature (1)..(1): n is a, c, g, or t
nccgagagaagacccctccacgttgtctctcctccccatcccattgttctctgttgatctccctcctgtttctccctttgctctctgtccctgttcctgttgtccctccccggtcaacggtccccatcttgttggttagccccccctagcctcgttctgtctttgtctatccccctggctcagccctcactcctggttcctgctctgcgggcccaactcggtcacatcgtggacccagtttttttcaggagccagctcatacccttggcatagaccggtttcattccacagcccctagagctcaacctcagcatggacaacaacagccctgggcaagtgaatcctgagaaaaagggtccctcttggcgcaagggcaagagggccatcacagtacaaaggagggaaggcccatctcagtaggaagtcccaggtagggagggcttcctcaacccatggacaccaggctcttggcacaaggcaaccccatctatagggtatgtacaagataccctctggttagagtagaaaggggagatgcctttcctggaacacagggtagggagattctagaaaaggttgtgttcaggaagaaagagaaaggccacagacccagcaaacagatagtcaagtcagaagagaagagagaacatctcaggacaaagctggaagaacacagacagacctatgggaacacacgggaacctcttttagaaaacctgacaagcgagtatgacttggatcttttccgaagagcacaagcccgggcttcagaggatttggagaagttaaggctgcaaggccaaatcacagagggaagcaacatgattaaaacaattgcttttggccgctatgagcttgatacctggtatcattctccatatcctgaagaatatgcacggctgggacgtctctatatgtgtgaattctgtttaaaatatatgaagagccaaacgatactccgccggcacatggccaaatgtgtgtggaaacacccacctggtgatgagatatatcgcaaaggttcaatctctgtgtttgaagtggatggcaagaaaaacaagatctactgccaaaacctgtgcctgttggccaaactttttctggaccacaagacattatattatgatgtggagcccttcctgttctatgttatgacagaggcggacaacactggctgtcacctgattggatatttttctaaggaaaagaattcattcctcaactacaacgtctcctgtatccttactatgcctcagtacatgagacagggctatggcaagatgcttattgatttcagttatttgctttccaaagtcgaagaaaaagttggctccccagaacgtccactctcagatctggggcttataagctatcgcagttactggaaagaagtacttctccgctacctgcataattttcaaggcaaagagatttctatcaaagaaatcagtcaggagacggctgtgaatcctgtggacattgtcagcactctgcaagcccttcagatgctcaaatactggaagggaaaacacctagttttaaagagacaggacctgattgatgagtggatagccaaagaggccaaaaggtccaactccaataaaaccatggatcccagctgcttaaaatggacccctcccaagggcacttaaagtgacctgtcattccgagccagcgaaccccagcagtaggaatccgtaccctagggatctgtctgtcatttctctgttgctcttgtgattggcaagtacagtatcctttgggaaggccatccccctcaggactgtcctggctccgacctttgtgtacactgcagacgctggttctgaggaactgttgtttcggcctcagtgaggttgcctggatgggatctgtattagacttgagtgcaggtctctcagcactgacccaaggagttctgttatggtactgtacctgtccagtcactggttctctcctcatgtcctctcgccccatgaggttgtgttgtgtcttctaagcgtggtactagtgcttgccacctggtcaccagacctccaaatatggctgccaccaccaggacctttccagttactccttatatgtgtgttctatggaggggcagggaaaaggtggcacttgtgagtgtgtgtggattggcagggggtccattcactttgggttccatcttgctttaaatttcttcattttgattaagagacctctttttgatctgtattgggctaaccagagccaaatacttttgaagagtttcccagggactagtcatggtaatagcatataattgatctgaatgagatggagagaagaatgaaggggtggtggttctgggtttgatttgagttcacctgtgggcagtgggcagtgggcagtgtcttggtgaaagggaacggatactactttttgcctcaccgtaaagtactcactagtaaatatttccttctctctttactcccactttttacgtttgcaggtgccaaagtaatgtccacttttccctttcatgctgcatattaactggttaattatactgcagaaaccttttcacctccactagtctgatacagtacatctgtacttccatataccttgcactgattttgtctgagtgccctgggagaagtagaaaatgattgaaagtgacttccgtatctcagcccatgactcagcaaggcagaatggccacccctgccaaagtttgcttctcttttcaacagtgcctcaccctccctctaggattaaagtgcttctgcccttccacgaactcctcctccatttcctttttgggatttgtcaccatccttctattctctggtcttctatttttggtgttgttcaagtgaaggaagagatgttccctctaatttctctctagcccattataacctgctatcttggggcaacttttgatgtatgacatgtcacccttcccaacttggtctcctccaacatgctgtcttcatgtggagccctcaccacaatccctgactccggtcatttgtgcctttctcttgtcatctctgtacactacttatattcactgtgggttgggggagctaattttaagcatgttcagtggcagctcccctccagtttcagtgtcactgttaaaatttatcaaaaagcaacttcactaggggttttcttaagggataaaggccttttacagaagctaaacccttccccacatgtggtagaatgtgctcttctatatctactcctcaataaagcatgttctctgctcaa

SEQ ID NO: 368973 - DNA, 2641 bp, Homo sapiens
cggggagtatctaccaaagctccttccaaatctcaggattctgggaatttgtagtgtctctgggaacacagacagacctatgggaacacacgggaacctcttttagaaaacctgacaagcgagtatgacttggatcttttccgaagagcacaagcccgggcttcagaggatttggagaagttaaggctgcaaggccaaatcacagagggaagcaacatgattaaaacaattgcttttggccgctatgagcttgatacctggtatcattctccatatcctgaagaatatgcacggctgggacgtctctatatgtgtgaattctgtttaaaatatatgaagagccaaacgatactccgccggcacatggccaaatgtgtgtggaaacacccacctggtgatgagatatatcgcaaaggttcaatctctgtgtttgaagtggatggcaagaaaaacaagatctactgccaaaacctgtgcctgttggccaaactttttctggaccacaagacattatattatgatgtggagcccttcctgttctatgttatgacagaggcggacaacactggctgtcacctgattggatatttttctaaggaaaagaattcattcctcaactacaacgtctcctgtatccttactatgcctcagtacatgagacagggctatggcaagatgcttattgatttcagttatttgctttccaaagtcgaagaaaaagttggctccccagaacgtccactctcagatctggggcttataagctatcgcagttactggaaagaagtacttctccgctacctgcataattttcaaggcaaagagatttctatcaaagaaatcagtcaggagacggctgtgaatcctgtggacattgtcagcactctgcaagcccttcagatgctcaaatactggaagggaaaacacctagttttaaagagacaggacctgattgatgagtggatagccaaagaggccaaaaggtccaactccaataaaaccatggatcccagctgcttaaaatggacccctcccaagggcacttaaagtgacctgtcattccgagccagcgaaccccagcagtaggaatccgtaccctagggatctgtctgtcatttctctgttgctcttgtgattggcaagtacagtatcctttgggaaggccatccccctcaggactgtcctggctccgacctttgtgtacactgcagacgctggttctgaggaactgttgtttcggcctcagtgaggttgcctggatgggatctgtattagacttgagtgcaggtctctcagcactgacccaaggagttctgttatggtactgtacctgtccagtcactggttctctcctcatgtcctctcgccccatgaggttgtgttgtgtcttctaagcgtggtactagtgcttgccacctggtcaccagacctccaaatatggctgccaccaccaggacctttccagttactccttatatgtgtgttctatggaggggcagggaaaaggtggcacttgtgagtgtgtgtggattggcagggggtccattcactttgggttccatcttgctttaaatttcttcattttgattaagagacctctttttgatctgtattgggctaaccagagccaaatacttttgaagagtttcccagggactagtcatggtaatagcatataattgatctgaatgagatggagagaagaatgaaggggtggtggttctgggtttgatttgagttcacctgtgggcagtgggcagtgggcagtgtcttggtgaaagggaacggatactactttttgcctcaccgtaaagtactcactagtaaatatttccttctctctttactcccactttttacgtttgcaggtgccaaagtaatgtccacttttccctttcatgctgcatattaactggttaattatactgcagaaaccttttcacctccactagtctgatacagtacatctgtacttccatataccttgcactgattttgtctgagtgccctgggagaagtagaaaatgattgaaagtgacttccgtatctcagcccatgactcagcaaggcagaatggccacccctgccaaagtttgcttctcttttcaacagtgcctcaccctccctctaggattaaagtgcttctgcccttccacgaactcctcctccatttcctttttgggatttgtcaccatccttctattctctggtcttctatttttggtgttgttcaagtgaaggaagagatgttccctctaatttctctctagcccattataacctgctatcttggggcaacttttgatgtatgacatgtcacccttcccaacttggtctcctccaacatgctgtcttcatgtggagccctcaccacaatccctgactccggtcatttgtgcctttctcttgtcatctctgtacactacttatattcactgtgggttgggggagctaattttaagcatgttcagtggcagctcccctccagtttcagtgtcactgttaaaatttatcaaaaagcaacttcactaggggttttcttaagggataaaggccttttacagaagctaaacccttccccacatgtggtagaatgtgctcttctatatctactcctcaataaagcatgttctctgctcaa

SEQ ID NO: 368974 - DNA, 2040 bp, Homo sapiens
aacaaaaactatacggctaaggtacgaggccgggtgtgtatatgcctcagtacatgagacagggctatggcaagatgcttattgatttcagttatttgctttccaaagtcgaagaaaaagttggctccccagaacgtccactctcagatctggggcttataagctatcgcagttactggaaagaagtacttctccgctacctgcataattttcaaggcaaagagatttctatcaaagaaatcagtcaggagacggctgtgaatcctgtggacattgtcagcactctgcaagcccttcagatgctcaaatactggaagggaaaacacctagttttaaagagacaggacctgattgatgagtggatagccaaagaggccaaaaggtccaactccaataaaaccatggatcccagctgcttaaaatggacccctcccaagggcacttaaagtgacctgtcattccgagccagcgaaccccagcagtaggaatccgtaccctagggatctgtctgtcatttctctgttgctcttgtgattggcaagtacagtatcctttgggaaggccatccccctcaggactgtcctggctccgacctttgtgtacactgcagacgctggttctgaggaactgttgtttcggcctcagtgaggttgcctggatgggatctgtattagacttgagtgcaggtctctcagcactgacccaaggagttctgttatggtactgtacctgtccagtcactggttctctcctcatgtcctctcgccccatgaggttgtgttgtgtcttctaagcgtggtactagtgcttgccacctggtcaccagacctccaaatatggctgccaccaccaggacctttccagttactccttatatgtgtgttctatggaggggcagggaaaaggtggcacttgtgagtgtgtgtggattggcagggggtccattcactttgggttccatcttgctttaaatttcttcattttgattaagagacctctttttgatctgtattgggctaaccagagccaaatacttttgaagagtttcccagggactagtcatggtaatagcatataattgatctgaatgagatggagagaagaatgaaggggtggtggttctgggtttgatttgagttcacctgtgggcagtgggcagtgggcagtgtcttggtgaaagggaacggatactactttttgcctcaccgtaaagtactcactagtaaatatttccttctctctttactcccactttttacgtttgcaggtgccaaagtaatgtccacttttccctttcatgctgcatattaactggttaattatactgcagaaaccttttcacctccactagtctgatacagtacatctgtacttccatataccttgcactgattttgtctgagtgccctgggagaagtagaaaatgattgaaagtgacttccgtatctcagcccatgactcagcaaggcagaatggccacccctgccaaagtttgcttctcttttcaacagtgcctcaccctccctctaggattaaagtgcttctgcccttccacgaactcctcctccatttcctttttgggatttgtcaccatccttctattctctggtcttctatttttggtgttgttcaagtgaaggaagagatgttccctctaatttctctctagcccattataacctgctatcttggggcaacttttgatgtatgacatgtcacccttcccaacttggtctcctccaacatgctgtcttcatgtggagccctcaccacaatccctgactccggtcatttgtgcctttctcttgtcatctctgtacactacttatattcactgtgggttgggggagctaattttaagcatgttcagtggcagctcccctccagtttcagtgtcactgttaaaatttatcaaaaagcaacttcactaggggttttcttaagggataaaggccttttacagaagctaaacccttccccacatgtggtagaatgtgctcttctatatctactcctcaataaagcatgttctctgctcaa

SEQ ID NO: 368975 - DNA, 2208 bp, Homo sapiens
acgagtagctgggattacaggcatgtgccaccacgcccagctaattttgtatttttttagtggagacggagtttctccatgttggtcaggctggtctcgaactcccgagctcaggtgatccgcccacctcagcctcccagagtgctggaattacaggcgtgagccaccttgcccggccaccttctttcatttttaagtcacctgagaagagatgaactgggaagtgacataagaggggaactatatatctttgaataggttatttgctttccaaagtcgaagaaaaagttggctccccagaacgtccactctcagatctggggcttataagctatcgcagttactggaaagaagtacttctccgctacctgcataattttcaaggcaaagagatttctatcaaagaaatcagtcaggagacggctgtgaatcctgtggacattgtcagcactctgcaagcccttcagatgctcaaatactggaagggaaaacacctagttttaaagagacaggacctgattgatgagtggatagccaaagaggccaaaaggtccaactccaataaaaccatggatcccagctgcttaaaatggacccctcccaagggcacttaaagtgacctgtcattccgagccagcgaaccccagcagtaggaatccgtaccctagggatctgtctgtcatttctctgttgctcttgtgattggcaagtacagtatcctttgggaaggccatccccctcaggactgtcctggctccgacctttgtgtacactgcagacgctggttctgaggaactgttgtttcggcctcagtgaggttgcctggatgggatctgtattagacttgagtgcaggtctctcagcactgacccaaggagttctgttatggtactgtacctgtccagtcactggttctctcctcatgtcctctcgccccatgaggttgtgttgtgtcttctaagcgtggtactagtgcttgccacctggtcaccagacctccaaatatggctgccaccaccaggacctttccagttactccttatatgtgtgttctatggaggggcagggaaaaggtggcacttgtgagtgtgtgtggattggcagggggtccattcactttgggttccatcttgctttaaatttcttcattttgattaagagacctctttttgatctgtattgggctaaccagagccaaatacttttgaagagtttcccagggactagtcatggtaatagcatataattgatctgaatgagatggagagaagaatgaaggggtggtggttctgggtttgatttgagttcacctgtgggcagtgggcagtgggcagtgtcttggtgaaagggaacggatactactttttgcctcaccgtaaagtactcactagtaaatatttccttctctctttactcccactttttacgtttgcaggtgccaaagtaatgtccacttttccctttcatgctgcatattaactggttaattatactgcagaaaccttttcacctccactagtctgatacagtacatctgtacttccatataccttgcactgattttgtctgagtgccctgggagaagtagaaaatgattgaaagtgacttccgtatctcagcccatgactcagcaaggcagaatggccacccctgccaaagtttgcttctcttttcaacagtgcctcaccctccctctaggattaaagtgcttctgcccttccacgaactcctcctccatttcctttttgggatttgtcaccatccttctattctctggtcttctatttttggtgttgttcaagtgaaggaagagatgttccctctaatttctctctagcccattataacctgctatcttggggcaacttttgatgtatgacatgtcacccttcccaacttggtctcctccaacatgctgtcttcatgtggagccctcaccacaatccctgactccggtcatttgtgcctttctcttgtcatctctgtacactacttatattcactgtgggttgggggagctaattttaagcatgttcagtggcagctcccctccagtttcagtgtcactgttaaaatttatcaaaaagcaacttcactaggggttttcttaagggataaaggccttttacagaagctaaacccttccccacatgtggtagaatgtgctcttctatatctactcctcaataaagcatgttctctgctcaa

SEQ ID NO: 368976 - DNA, 1681 bp, Homo sapiens
agcgggcagaacgctccagacgctgagaggcaggaggcactagggatcgtccgcaggattgggactgatacagaggccgccacggagcccgccggagccaccgttcctgctgctgccgccgctgcccgaatcggaaccgtcgggccgcagccgccggcaatgccgcgaaggaagaggaatgcaggcagtagttcagatggaaccgaagattccgatttttctacagatctcgagcacacagacagttcagaaagtgatggcacatcccgacgatctgctcgagtcacccgctcctcagccaggctaagccagagttctcaagattccagtcctgttcgaaatctgcagtcttttggcactgaggagcctgcttactctaccagaagagtgacccgtagtcagcagcagcctaccccagtgacaccgaaaaaataccctcttcggcagactcgttcatctggttcagaaactgagcaagtggttgatttttcagatagagaaactaaaaatacagctgatcatgatgagtcaccgcctcgaactccaactggaaatgcgccttcttctgagtctgacatagacatctccagccccaatgtatctcacgatgagagcattgccaaggacatgtccctgaaggactcaggcagtgatctctctcatcgccccaagcgccgtcgcttccatgaaagctacaacttcaatatgaagtgtcctacaccaggctgtaactctctaggacaccttacaggaaaacatgagagacatttctccatctcaggatgcccactgtatcataacctctcagctgacgaatgcaaggtgagagcacagagccgggataagcagatagaagaaaggatgctgtctcacaggcaagatgacaacaacaggcatgcaaccaggcaccaggcaccaacggagaggcagcttcgatataaggaaaaagtggctgaactcaggaagaaaagaaattctggactgagcaaagaacagaaagagaaatatatggaacacagacagacctatgggaacacacgggaacctcttttagaaaacctgacaagcgagtatgacttggatcttttccgaagagcacaagcccgggcttcagaggatttggagaagttaaggctgcaaggccaaatcacagagggaagcaacatgattaaaacaattgcttttggccgctatgagcttgatacctggtatcattctccatatcctgaagaatatgcacggctgggacgtctctatatgtgtgaattctgtttaaaatatatgaagagccaaacgatactccgccggcacatggccaaatgtgtgtggaaacacccacctggtgatgagatatatcgcaaaggttcaatctctgtgtttgaagtggatggcaagaaaaacaagatctactgccaaaacctgtgcctgttggccaaactttttctggaccacaagacattatattatgatgtggagcccttcctgttctatgttatgacagaggcggacaacactggctgtcacctgattggatatttttctaaggtaagcaggatctggagattaagaagccaatggccagagcagggtgatccatgttcgcagttgggggctcaaatcactgacaggaagaagctgtactctgggcaatgatgacaccccttccttaaattaaaaaaaa

SEQ ID NO: 368977 - DNA, 1598 bp, Homo sapiens
agcgggcagaacgctccagacgctgagaggcaggaggcactagggatcgtccgcaggattgggactgatacagaggccgccacggagcccgccggagccaccgttcctgctgctgccgccgctgcccgaatcggaaccgtcgggccgcagccgccggcaatgccgcgaaggaagaggaatgcaggcagtagttcagatggaaccgaagattccgatttttctacagatctcgagcacacagacagttcagaaagtgatggcacatcccgacgatctgctcgagtcacccgctcctcagccaggctaagccagagttctcaagattccagtcctgttcgaaatctgcagtcttttggcactgaggagcctgcttactctaccagaagagtgacccgtagtcagcagcagcctaccccagtgacaccgaaaaaataccctcttcggcagactcgttcatctggttcagaaactgagcaagtggttgatttttcagatagagaaactaaaaatacagctgatcatgatgagtcaccgcctcgaactccaactggaaatgcgccttcttctgagtctgacatagacatctccagccccaatgtatctcacgatgagagcattgccaaggacatgtccctgaaggactcaggcagtgatctctctcatcgccccaagcgccgtcgcttccatgaaagctacaacttcaatatgaagtgtcctacaccaggctgtaactctctaggacaccttacaggaaaacatgagagacatttctccatctcaggatgcccactgtatcataacctctcagctgacgaatgcaaggtgagagcacagagccgggataagcagatagaagaaaggatgctgtctcacaggcaagatgacaacaacaggcatgcaaccaggcaccaggcaccaacggagaggcagcttcgatataaggaaaaagtggctgaactcaggaagaaaagaaattctggactgagcaaagaacagaaagagaaatatatggaacacagacagacctatgggaacacacgggaacctcttttagaaaacctgacaagcgagtatgacttggatcttttccgaagagcacaagcccgggcttcagaggatttggagaagttaaggctgcaaggccaaatcacagagggaagcaacatgattaaaacaattgcttttggccgctatgagcttgatacctggtatcattctccatatcctgaagaatatgcacggctgggacgtctctatatgtgtgaattctgtttaaaatatatgaagagccaaacgatactccgccggcacatggccaaatgtgtgtggaaacacccacctggtgatgagatatatcgcaaaggttcaatctctgtacactacttatattcactgtgggttgggggagctaattttaagcatgttcagtggcagctcccctccagtttcagtgtcactgttaaaatttatcaaaaagcaacttcactaggggttttcttaagggataaaggccttttacagaagctaaacccttccccacatgtggtagaatgtgctcttctatatctactcctcaataaagcatgttctctgctcaa

SEQ ID NO: 368978 - DNA, 385 bp, Homo sapiens
actcaaactcacatctaattttttaaattatttcatatatacaataaaggtcggtgagcgatgattttcatttctcactgagggtaaagtaggaagaatggattagataggaaagcagtttataagtcaaaatatagtattttttttgataccctaatatgttgttaaacctttggcaattccttcttggcggttagttattttggaatctatgtaaaggcacttgagttgaaagtatgtaatcctttttcccattgttctccctcaggacctgattgatgagtggatagccaaagaggccaaaaggtccaactccaataaaaccatggatcccagctgcttaaaatggacccctcccaagggcacttaaagtgacctgtcattc

SEQ ID NO: 368979 - DNA, 386 bp, Homo sapiens
cttgcccaagatgccacagctagttggtatggtggagtggagttgaatcaagttcagtcctaattccagaacctaaacttattaatgctgtactacattacatctgtatacctgagctaggctcttttgcttatattttatttaattaaatagatattttaaggatttgttggattttgtgaaatatgaagaggaggaggagcgatattctgataaattatatggataggaagtaaaacagatttccatcttttttctttattttcttttaaaattgggatcagattccagtcctgttcgaaatctgcagtcttttggcactgaggagcctgcttactctaccagaagagtgacccgtagtcagcagcagcctaccccagtgacac

SEQ ID NO: 368980 - DNA, 807 bp, Homo sapiens
tacaaagtttcttttacaaaacatccctccgcaactttgagtttatataataaacggaaacgtcctttaaacaatcaggctacgaaggggttaaatctaatctcagcaacctgatggattctggggggtttccttcctcgactctagaaattaaaacgaaattttgcccaaggtaaagatgagaaccgtttacatcaactgtcaggcttctgccccaaacaagaatggctacccacgcccacaaacagagccactcacgtaactaaaaatggttggctccgggttccaccactggagtcactttctgcccaacttcaaaatggcgcccactagcttcaccaaaaggatcgaacttcccagcaccctctctggcccgtaacgtcaggtgacgcgagacccagccggaagtgaaggaaaaagcgcttcagcccgcggcgccagcgggcagaacgctccagacgctgagaggcaggaggcactagggatcgtccgcaggattgggactgatacagaggccgccacggagcccgccggagccaccgttcctgctgctgccgccgctgcccgaatcggaaccgtcgggccgcagccgccggcaatgccgcgaaggaaggtgagaaacgggagaggagggatggcgggtttctaaggacagtcgattgagcaccgtgacgcagttggccacgcctcacagtgcttgggtcccaactttccgctcccccgaaccttgttcagctaccctctcttctgtccatacccaacagaaaaatgtgggcccgaccctggcctcggcctatgcttgcaact

SEQ ID NO: 368981 - DNA, 3589 bp, Homo sapiens
agcgggcagaacgctccagacgctgagaggcaggaggcactagggatcgtccgcaggattgggactgatacagaggccgccacggagcccgccggagccaccgttcctgctgctgccgccgctgcccgaatcggaaccgtcgggccgcagccgccggcaatgccgcgaaggaagaggaatgcaggcagtagttcagatggaaccgaagattccgatttttctacagatctcgagcacacagacagttcagaaagtgatggcacatcccgacgatctgctcgagtcacccgctcctcagccaggctaagccagagttctcaagattccagtcctgttcgaaatctgcagtcttttggcactgaggagcctgcttactctaccagaagagtgacccgtagtcagcagcagcctaccccagtgacaccgaaaaaataccctcttcggcagactcgttcatctggttcagaaactgagcaagtggttgatttttcagatagagaaactaaaaatacagctgatcatgatgagtcaccgcctcgaactccaactggaaatgcgccttcttctgagtctgacatagacatctccagccccaatgtatctcacgatgagagcattgccaaggacatgtccctgaaggactcaggcagtgatctctctcatcgccccaagcgccgtcgcttccatgaaagctacaacttcaatatgaagtgtcctacaccaggctgtaactctctaggacaccttacaggaaaacatgagagacatttctccatctcaggatgcccactgtatcataacctctcagctgacgaatgcaaggtgagagcacagagccgggataagcagatagaagaaaggatgctgtctcacaggcaagatgacaacaacaggcatgcaaccaggcaccaggcaccaacggagaggcagcttcgatataaggaaaaagtggctgaactcaggaagaaaagaaattctggactgagcaaagaacagaaagagaaatatatggaacacagacagacctatgggaacacacgggaacctcttttagaaaacctgacaagcgagtatgacttggatcttttccgaagagcacaagcccgggcttcagaggatttggagaagttaaggctgcaaggccaaatcacagagggaagcaacatgattaaaacaattgcttttggccgctatgagcttgatacctggtatcattctccatatcctgaagaatatgcacggctgggacgtctctatatgtgtgaattctgtttaaaatatatgaagagccaaacgatactccgccggcacatggccaaatgtgtgtggaaacacccacctggtgatgagatatatcgcaaaggttcaatctctgtgtttgaagtggatggcaagaaaaacaagatctactgccaaaacctgtgcctgttggccaaactttttctggaccacaagacattatattatgatgtggagcccttcctgttctatgttatgacagaggcggacaacactggctgtcacctgattggatatttttctaaggaaaagaattcattcctcaactacaacgtctcctgtatccttactatgcctcagtacatgagacagggctatggcaagatgcttattgatttcagttatttgctttccaaagtcgaagaaaaagttggctccccagaacgtccactctcagatctggggcttataagctatcgcagttactggaaagaagtacttctccgctacctgcataattttcaaggcaaagagatttctatcaaagaaatcagtcaggagacggctgtgaatcctgtggacattgtcagcactctgcaagcccttcagatgctcaaatactggaagggaaaacacctagttttaaagagacaggacctgattgatgagtggatagccaaagaggccaaaaggtccaactccaataaaaccatggatcccagctgcttaaaatggacccctcccaagggcacttaaagtgacctgtcattccgagccagcgaaccccagcagtaggaatccgtaccctagggatctgtctgtcatttctctgttgctcttgtgattggcaagtacagtatcctttgggaaggccatccccctcaggactgtcctggctccgacctttgtgtacactgcagacgctggttctgaggaactgttgtttcggcctcagtgaggttgcctggatgggatctgtattagacttgagtgcaggtctctcagcactgacccaaggagttctgttatggtactgtacctgtccagtcactggttctctcctcatgtcctctcgccccatgaggttgtgttgtgtcttctaagcgtggtactagtgcttgccacctggtcaccagacctccaaatatggctgccaccaccaggacctttccagttactccttatatgtgtgttctatggaggggcagggaaaaggtggcacttgtgagtgtgtgtggattggcagggggtccattcactttgggttccatcttgctttaaatttcttcattttgattaagagacctctttttgatctgtattgggctaaccagagccaaatacttttgaagagtttcccagggactagtcatggtaatagcatataattgatctgaatgagatggagagaagaatgaaggggtggtggttctgggtttgatttgagttcacctgtgggcagtgggcagtgggcagtgtcttggtgaaagggaacggatactactttttgcctcaccgtaaagtactcactagtaaatatttccttctctctttactcccactttttacgtttgcaggtgccaaagtaatgtccacttttccctttcatgctgcatattaactggttaattatactgcagaaaccttttcacctccactagtctgatacagtacatctgtacttccatataccttgcactgattttgtctgagtgccctgggagaagtagaaaatgattgaaagtgacttccgtatctcagcccatgactcagcaaggcagaatggccacccctgccaaagtttgcttctcttttcaacagtgcctcaccctccctctaggattaaagtgcttctgcccttccacgaactcctcctccatttcctttttgggatttgtcaccatccttctattctctggtcttctatttttggtgttgttcaagtgaaggaagagatgttccctctaatttctctctagcccattataacctgctatcttggggcaacttttgatgtatgacatgtcacccttcccaacttggtctcctccaacatgctgtcttcatgtggagccctcaccacaatccctgactccggtcatttgtgcctttctcttgtcatctctgtacactacttatattcactgtgggttgggggagctaattttaagcatgttcagtggcagctcccctccagtttcagtgtcactgttaaaatttatcaaaaagcaacttcactaggggttttcttaagggataaaggccttttacagaagctaaacccttccccacatgtggtagaatgtgctcttctatatctactcctcaataaagcatgttctctgctcaa

SEQ ID NO: 368982 - DNA, 4143 bp, Homo sapiens
agcgggcagaacgctccagacgctgagaggcaggaggcactagggatcgtccgcaggattgggactgatacagaggccgccacggagcccgccggagccaccgttcctgctgctgccgccgctgcccgaatcggaaccgtcgggccgcagccgccggcaatgccgcgaaggaagaggaatgcaggcagtagttcagatggaaccgaagattccgatttttctacagatctcgagcacacagacagttcagaaagtgatggcacatcccgacgatctgctcgagtcacccgctcctcagccaggctaagccagagttctcaagattccagtcctgttcgaaatctgcagtcttttggcactgaggagcctgcttactctaccagaagagtgacccgtagtcagcagcagcctaccccagtgacaccgaaaaaataccctcttcggcagactcgttcatctggttcagaaactgagcaagtggttgatttttcagatagagaaactaaaaatacagctgatcatgatgagtcaccgcctcgaactccaactggaaatgcgccttcttctgagtctgacatagacatctccagccccaatgtatctcacgatgagagcattgccaaggacatgtccctgaaggactcaggcagtgatctctctcatcgccccaagcgccgtcgcttccatgaaagctacaacttcaatatgaagtgtcctacaccaggctgtaactctctaggacaccttacaggaaaacatgagagacatttctccatctcaggatgcccactgtatcataacctctcagctgacgaatgcaaggcaccaacggagaggcagcttcgatataaggaaaaagtggctgaactcaggaagaaaagaaattctggactgagcaaagaacagaaagagaaatatatggaacacagacagacctatgggaacacacgggaacctcttttagaaaacctgacaagcgagtatgacttggatcttttccgaagagcacaagcccgggcttcagaggatttggagaagttaaggctgcaaggccaaatcacagagggaagcaacatgattaaaacaattgcttttggccgctatgagcttgatacctggtatcattctccatatcctgaagaatatgcacggctgggacgtctctatatgtgtgaattctgtttaaaatatatgaagagccaaacgatactccgccggcacatggccaaatgtgtgtggaaacacccacctggtgatgagatatatcgcaaaggttcaatctctgtgtttgaagtggatggcaagaaaaacaagatctactgccaaaacctgtgcctgttggccaaactttttctggaccacaagacattatattatgatgtggagcccttcctgttctatgttatgacagaggcggacaacactggctgtcacctgattggatatttttctaaggaaaagaattcattcctcaactacaacgtctcctgtatccttactatgcctcagtacatgagacagggctatggcaagatgcttattgatttcagttatttgctttccaaagtcgaagaaaaagttggctccccagaacgtccactctcagatctggggcttataagctatcgcagttactggaaagaagtacttctccgctacctgcataattttcaaggcaaagagatttctatcaaagaaatcagtcaggagacggctgtgaatcctgtggacattgtcagcactctgcaagcccttcagatgctcaaatactggaagggaaaacacctagttttaaagagacaggacctgattgatgagtggatagccaaagaggccaaaaggtccaactccaataaaaccatggatcccagctgcttaaaatggacccctcccaagggcacttaaagtgacctgtcattccgagccagcgaaccccagcagtaggaatccgtaccctagggatctgtctgtcatttctctgttgctcttgtgattggcaagtacagtatcctttgggaaggccatccccctcaggactgtcctggctccgacctttgtgtacactgcagacgctggttctgaggaactgttgtttcggcctcagtgaggttgcctggatgggatctgtattagacttgagtgcaggtctctcagcactgacccaaggagttctgttatggtactgtacctgtccagtcactggttctctcctcatgtcctctcgccccatgaggttgtgttgtgtcttctaagcgtggtactagtgcttgccacctggtcaccagacctccaaatatggctgccaccaccaggacctttccagttactccttatatgtgtgttctatggaggggcagggaaaaggtggcacttgtgagtgtgtgtggattggcagggggtccattcactttgggttccatcttgctttaaatttcttcattttgattaagagacctctttttgatctgtattgggctaaccagagccaaatacttttgaagagtttcccagggactagtcatggtaatagcatataattgatctgaatgagatggagagaagaatgaaggggtggtggttctgggtttgatttgagttcacctgtgggcagtgggcagtgggcagtgtcttggtgaaagggaacggatactactttttgcctcaccgtaaagtactcactagtaaatatttccttctctctttactcccactttttacgtttgcaggtgccaaagtaatgtccacttttccctttcatgctgcatattaactggttaattatactgcagaaaccttttcacctccactagtctgatacagtacatctgtacttccatataccttgcactgattttgtctgagtgccctgggagaagtagaaaatgattgaaagtgacttccgtatctcagcccatgactcagcaaggcagaatggccacccctgccaaagtttgcttctcttttcaacagtgcctcaccctccctctaggattaaagtgcttctgcccttccacgaactcctcctccatttcctttttgggatttgtcaccatccttctattctctggtcttctatttttggtgttgttcaagtgaaggaagagatgttccctctaatttctctctagcccattataacctgctatcttggggcaacttttgatgtatgacatgtcacccttcccaacttggtctcctccaacatgctgtcttcatgtggagccctcaccacaatccctgactccggtcatttgtgcctttctcttgtcatctctgtacactacttatattcactgtgggttgggggagctaattttaagcatgttcagtggcagctcccctccagtttcagtgtcactgttaaaatttatcaaaaagcaacttcactaggggttttcttaagggataaaggccttttacagaagctaaacccttccccacatgtggtagaatgtgctcttctatatctactcctcaataaagcatgttctctgctcaaaaaaaaaaaaaaaaaaaaaaaaaaaaaaaaaaaaaaaaaaaactcgagaaggaatgtttagcacaagacacagcggagctcgggattggctaaactcccatagtatttatggtggccgccggcgggggccccagcccagcttgcaggccacctctagctttcttcctaccccattcccggcttccctcctcctcccctgcagcctggttaggtggatacctgccctgacatgtgaggcaagctaaggcctggagggtcagatgggagaccaggtcccaagggagcaagacctcgcgaagcgcagcagccccggcccttcccccgttttgaacatgtgtaaccgacagtctgcctgggccacagccctctcaccctggtactgcatgcacgcaatgctagctgcccctttcccgtcctgggcaccccgagtctcccccgaccccgggtcccaggtatgctcccacctccacctgccccactcaccacctctgctagttccagacacctccacgcccacctggtcctctcccatcgcccacaaaagggggggcacgagggacgagcttagctgagctgggaggagcagggtgagggtgggcgacccaggattccccctccccttcccaaataaagatgagggtact

SEQ ID NO: 368983 - DNA, 2608 bp, Homo sapiens
ctggaaaggattcttgtagtgactgccatggaacacagacagacctatgggaacacacgggaacctcttttagaaaacctgacaagcgagtatgacttggatcttttccgaagagcacaagcccgggcttcagaggatttggagaagttaaggctgcaaggccaaatcacagagggaagcaacatgattaaaacaattgcttttggccgctatgagcttgatacctggtatcattctccatatcctgaagaatatgcacggctgggacgtctctatatgtgtgaattctgtttaaaatatatgaagagccaaacgatactccgccggcacatggccaaatgtgtgtggaaacacccacctggtgatgagatatatcgcaaaggttcaatctctgtgtttgaagtggatggcaagaaaaacaagatctactgccaaaacctgtgcctgttggccaaactttttctggaccacaagacattatattatgatgtggagcccttcctgttctatgttatgacagaggcggacaacactggctgtcacctgattggatatttttctaaggaaaagaattcattcctcaactacaacgtctcctgtatccttactatgcctcagtacatgagacagggctatggcaagatgcttattgatttcagttatttgctttccaaagtcgaagaaaaagttggctccccagaacgtccactctcagatctggggcttataagctatcgcagttactggaaagaagtacttctccgctacctgcataattttcaaggcaaagagatttctatcaaagaaatcagtcaggagacggctgtgaatcctgtggacattgtcagcactctgcaagcccttcagatgctcaaatactggaagggaaaacacctagttttaaagagacaggacctgattgatgagtggatagccaaagaggccaaaaggtccaactccaataaaaccatggatcccagctgcttaaaatggacccctcccaagggcacttaaagtgacctgtcattccgagccagcgaaccccagcagtaggaatccgtaccctagggatctgtctgtcatttctctgttgctcttgtgattggcaagtacagtatcctttgggaaggccatccccctcaggactgtcctggctccgacctttgtgtacactgcagacgctggttctgaggaactgttgtttcggcctcagtgaggttgcctggatgggatctgtattagacttgagtgcaggtctctcagcactgacccaaggagttctgttatggtactgtacctgtccagtcactggttctctcctcatgtcctctcgccccatgaggttgtgttgtgtcttctaagcgtggtactagtgcttgccacctggtcaccagacctccaaatatggctgccaccaccaggacctttccagttactccttatatgtgtgttctatggaggggcagggaaaaggtggcacttgtgagtgtgtgtggattggcagggggtccattcactttgggttccatcttgctttaaatttcttcattttgattaagagacctctttttgatctgtattgggctaaccagagccaaatacttttgaagagtttcccagggactagtcatggtaatagcatataattgatctgaatgagatggagagaagaatgaaggggtggtggttctgggtttgatttgagttcacctgtgggcagtgggcagtgggcagtgtcttggtgaaagggaacggatactactttttgcctcaccgtaaagtactcactagtaaatatttccttctctctttactcccactttttacgtttgcaggtgccaaagtaatgtccacttttccctttcatgctgcatattaactggttaattatactgcagaaaccttttcacctccactagtctgatacagtacatctgtacttccatataccttgcactgattttgtctgagtgccctgggagaagtagaaaatgattgaaagtgacttccgtatctcagcccatgactcagcaaggcagaatggccacccctgccaaagtttgcttctcttttcaacagtgcctcaccctccctctaggattaaagtgcttctgcccttccacgaactcctcctccatttcctttttgggatttgtcaccatccttctattctctggtcttctatttttggtgttgttcaagtgaaggaagagatgttccctctaatttctctctagcccattataacctgctatcttggggcaacttttgatgtatgacatgtcacccttcccaacttggtctcctccaacatgctgtcttcatgtggagccctcaccacaatccctgactccggtcatttgtgcctttctcttgtcatctctgtacactacttatattcactgtgggttgggggagctaattttaagcatgttcagtggcagctcccctccagtttcagtgtcactgttaaaatttatcaaaaagcaacttcactaggggttttcttaagggataaaggccttttacagaagctaaacccttccccacatgtggtagaatgtgctcttctatatctactcctcaataaagcatgttctctgctcaa

SEQ ID NO: 368984 - DNA, 2119 bp, Homo sapiens
  misc_feature (12)..(12): n is a, c, g, or t
  misc_feature (20)..(20): n is a, c, g, or t
actaagctcggncctcactncatgtcacaagaggcggacaacactggctgtcacctgattggatatttttctaaggaaaagaattcattcctcaactacaacgtctcctgtatccttactatgcctcagtacatgagacagggctatggcaagatgcttattgatttcagttatttgctttccaaagtcgaagaaaaagttggctccccagaacgtccactctcagatctggggcttataagctatcgcagttactggaaagaagtacttctccgctacctgcataattttcaaggcaaagagatttctatcaaagaaatcagtcaggagacggctgtgaatcctgtggacattgtcagcactctgcaagcccttcagatgctcaaatactggaagggaaaacacctagttttaaagagacaggacctgattgatgagtggatagccaaagaggccaaaaggtccaactccaataaaaccatggatcccagctgcttaaaatggacccctcccaagggcacttaaagtgacctgtcattccgagccagcgaaccccagcagtaggaatccgtaccctagggatctgtctgtcatttctctgttgctcttgtgattggcaagtacagtatcctttgggaaggccatccccctcaggactgtcctggctccgacctttgtgtacactgcagacgctggttctgaggaactgttgtttcggcctcagtgaggttgcctggatgggatctgtattagacttgagtgcaggtctctcagcactgacccaaggagttctgttatggtactgtacctgtccagtcactggttctctcctcatgtcctctcgccccatgaggttgtgttgtgtcttctaagcgtggtactagtgcttgccacctggtcaccagacctccaaatatggctgccaccaccaggacctttccagttactccttatatgtgtgttctatggaggggcagggaaaaggtggcacttgtgagtgtgtgtggattggcagggggtccattcactttgggttccatcttgctttaaatttcttcattttgattaagagacctctttttgatctgtattgggctaaccagagccaaatacttttgaagagtttcccagggactagtcatggtaatagcatataattgatctgaatgagatggagagaagaatgaaggggtggtggttctgggtttgatttgagttcacctgtgggcagtgggcagtgggcagtgtcttggtgaaagggaacggatactactttttgcctcaccgtaaagtactcactagtaaatatttccttctctctttactcccactttttacgtttgcaggtgccaaagtaatgtccacttttccctttcatgctgcatattaactggttaattatactgcagaaaccttttcacctccactagtctgatacagtacatctgtacttccatataccttgcactgattttgtctgagtgccctgggagaagtagaaaatgattgaaagtgacttccgtatctcagcccatgactcagcaaggcagaatggccacccctgccaaagtttgcttctcttttcaacagtgcctcaccctccctctaggattaaagtgcttctgcccttccacgaactcctcctccatttcctttttgggatttgtcaccatccttctattctctggtcttctatttttggtgttgttcaagtgaaggaagagatgttccctctaatttctctctagcccattataacctgctatcttggggcaacttttgatgtatgacatgtcacccttcccaacttggtctcctccaacatgctgtcttcatgtggagccctcaccacaatccctgactccggtcatttgtgcctttctcttgtcatctctgtacactacttatattcactgtgggttgggggagctaattttaagcatgttcagtggcagctcccctccagtttcagtgtcactgttaaaatttatcaaaaagcaacttcactaggggttttcttaagggataaaggccttttacagaagctaaacccttccccacatgtggtagaatgtgctcttctatatctactcctcaataaagcatgttctctgctcaa

SEQ ID NO: 368985 - DNA, 1904 bp, Homo sapiens
agcgggcagaacgctccagacgctgagaggcaggaggcactagggatcgtccgcaggattgggactgatacagaggccgccacggagcccgccggagccaccgttcctgctgctgccgccgctgcccgaatcggaaccgtcgggccgcagccgccggcaatgccgcgaaggaagaggaatgcaggcagtagttcagatggaaccgaagattccgatttttctacagatctcgagcacacagacagttcagaaagtgatggcacatcccgacgatctgctcgagtcacccgctcctcagccaggctaagccagagttctcaagattccagtcctgttcgaaatctgcagtcttttggcactgaggagcctgcttactctaccagaagagtgacccgtagtcagcagcagcctaccccagtgacaccgaaaaaataccctcttcggcagactcgttcatctggttcagaaactgagcaagtggttgatttttcagatagagaaactaaaaatacagctgatcatgatgagtcaccgcctcgaactccaactggaaatgcgccttcttctgagtctgacatagacatctccagccccaatgtatctcacgatgagagcattgccaaggacatgtccctgaaggactcaggcagtgatctctctcatcgccccaagcgccgtcgcttccatgaaagctacaacttcaatatgaagtgtcctacaccaggctgtaactctctaggacaccttacaggaaaacatgagagacatttctccatctcaggatgcccactgtatcataacctctcagctgacgaatgcaaggtgagagcacagagccgggataagcagatagaagaaaggatgctgtctcacaggcaagatgacaacaacaggcatgcaaccaggcaccaggcaccaacggagaggcagcttcgatataaggaaaaagtggctgaactcaggaagaaaagaaattctggactgagcaaagaacagaaagagaaatatatggaacacagacagacctatgggaacacacgggaacctcttttagaaaacctgacaagcgagtatgacttggatcttttccgaagagcacaagcccgggcttcagaggatttggagaagttaaggctgcaaggccaaatcacagagggaagcaacatgattaaaacaattgcttttggccgctatgagcttgatacctggtatcattctccatatcctgaagaatatgcacggctgggacgtctctatatgtgtgaattctgtttaaaatatatgaagagccaaacgatactccgccggcacatggccaaatgtgtgtggaaacacccacctggtgatgagatatatcgcaaaggttcaatctctgtgtttgaagtggatggcaagaaaaacaaggtaaaaagtggtgactttagaaaggagttgaaatgttgtatattcacaggtttcagaaggcatatgttttttctccatcacaccttgtgaaggacatagaactcttctcttgccaaaatacacaatgtgtttcattaataattatggtatgtttgtgaattttaggcctttatctgtttaggaatcagtggcccacacatgaactctgtttctctgcttccagatctactgccaaaacctgtgcctgttggccaaactttttctggaccacaagacattatattatgatgtggagcccttcctgttctatgttatgacagaggcggacaacactggctgtcacctgattggatatttttctaaggtaagcaggatctggagattaagaagccaatggccagagcagggtgatccatgttcgcagttgggggctcaaatcactgacaggaagaagctgtactctgggcaatgatgacaccccttccttaaattaaaaaaaa

SEQ ID NO: 368986 - DNA, 586 bp, Homo sapiens
tactacagtggatgtgagtgtgtagaccttgtacaatagagcttataggctaatgagaagacaggaagaaacaacaggaacacatatagctggaatgcagatgggatctgtgctacttacgctagccatgggatgattagaacaagataagagacatgaggaagacttcttcaaggaggtgctcaagccatgttttggaaaagagaactcaaggtctggcagggagaaaggagcaagggcaagtagagctgcagctgtctggcgccactgtaatgctgtctcctcctctgagtgagttcatcctggaaacattttctcccataagacatgcacaggtcttacgtttacatgtttcactgaaagaaatttgattccactgctgggatgacaaggaagactgaagaaacctaatcctaggtgctgccactgggacaaacaagaagcaccagacacagtgctgttttagggtggggcagaattatgctgagggaaaagttattatcactctttaaggccaaggaaaccacaatttttaaagaagcttctagaaattctacccagtagaaaataaagataaacttctgta

SEQ ID NO: 368987 - DNA, 1036 bp, Homo sapiens
caagtgtgagccactgtgcccggcctatgcctcaatttcttcctgccttactataggtacatcatatttatttaattccctaagtccctcctcaacagattttattctactactgaaatccagtctgcagaaactaaaagttgtatagtggatatgaaatttatataaccaccatagttcagtatctcaggggtaaaaataaaatgtgactatttatttccacaaaactgaacctatcaattcaagataacttttgctttaaaactcacgactccttgaatcaatagtcaatttctggatctttctcctcctcctaggtcctcttctccctgaaggctgtcacagttcctgtgcagagagagagggcactgcagcacccaggcgctgactgccttttgtcagtctcatttgcaggcccccagctggagaacccaggaggaagaggaaaaaagttttttcctcctctacactccccatgcatgactaaagagtaggaggagtcagcaaggtatgtgaccccaactgcaagcagaaacagcaatgaaaggactgatgatcaaacagggaccaagctacatttctgcagctatggtcagtgtgtatctggcttgtttgatgcccagaatgaattgatttttgtcgatcttcatctatacaacaaaattatcttcagtaataatcataaaaatggaatagataataacaatgtccaggaaaaaaagagtcagtaaattttaaaaattgaacttcatatatactgttatgccagaaaaaaagaaaaaagaagtgaaataaatattatagtaaaataaaaagaaatagattaaatattttataacattaatacgacttttgaaaacagggaagacttaaacctacatgtttgttgtagtatgagatgataaaattacagtttataacaaataataataaagaaaatttcaaactaaaaatatattatggctgggcatggtggctcacacctgtaatcccagcactttgggagtgtgaggtgggcagatcacctgaggtcagg

SEQ ID NO: 368988 - DNA, 1460 bp, Homo sapiens
tactacagtggatgtgagtgtgtagaccttgtacaatagagcttataggctaatgagaagacaggaagaaacaacaggaacacatatagctggaatgcagatgggatctgtgctacttacgctagccatgggatgattagaacaagataagagacatgaggaagacttcttcaaggaggtgctcaagccatgttttggaaaagagaactcaaggtctggcagggagaaaggagcaaggtcctcttctccctgaaggctgtcacagttcctgtgcagagagagagggcactgcagcacccaggcgctgactgccttttgtcagtctcatttgcaggcccccagctggagaacccaggaggaagaggaaaaaagttttttcctcctctacactccccatgcatgactaaagagtaggaggagtcagcaaggcagacatatatagtacccaggaggtggacaaacaactgccttggtggaaactctgtcctttctggacttatcctggtgccactgagactgtgcagatttagatctacaatccacctggaattgatttttgtatatggagtgaggtcccacacttacagggaaagcatcacccgaaagtgagaatgcctagaggcaggaatcatggaggcttccttaaccgtctgtctgcaacagcaggtgctagagatgacactgcagagtagagaacaaaggaatcttagtaattgttcaatccaatctccacactttaaagatgaagaaactggtattgagaaaaatacacagcttatccaaggttgcactgctggttggtagctgagatgaatttagaacccacatctgatgactacaccatattgctcccagttttcctgtctgttccacatgtaaaagtctgactcttcacttctcctttgagtatatagacttttaacatttttgtatgtcaagatggacttttcctcatacccagcccctgccttttctcctcccttcataccttgcaggatctttaacagaatttaaaaggagttttttgttttgttttgatgtatctaataaaagtcaagggagggagagggccagtataagcaagagtacagtttcctagtttgtagatgcggtagtctgaggaatcagaaacacacaaaggtttggagaactggtacatgctcccaggtgggaagccaggactcttggtaggatcttgaggacaaggcaaaggacaataagagagcgaggggatcctagaggtggaatcaaggaagagaaactagagagagaaaaaggaactggctatccatccatgatggatcctgtgtggactgatgggtggcttggcatcatcctttagtagacttcatgtggttgaataattggccaatggaaggaatttcttttttggtaacagactctgtgtgtacagttatgggtcttaatttataataaaaggttacattgaaaattgaaaa

SEQ ID NO: 368989 - DNA, 624 bp, Homo sapiens
tactacagtggatgtgagtgtgtagaccttgtacaatagagcttataggctaatgagaagacaggaagaaacaacaggaacacatatagctggaatgcagatgggatctgtgctacttacgctagccatgggatgattagaacaagataagagacatgaggaagacttcttcaaggaggtgctcaagccatgttttggaaaagagaactcaaggtctggcagggagaaaggagcaagggcaagtagagctgcagctgtctggcgccactgtaatgctgtctcctcctctgagtgagttcatcctggaaacattttctcccataagacatgcacaggtcttacgtttacatgtttcactgaaagaaatttgattccactgctgggatgacaaggaagactgaagaaacctaatcctaggtgctgccactgggacaaacaagaagcaccagacacagtgctgttttagggtggggcagaattatgctgagggaaaagttattatcactctttaaggccaaggaaaccacaatttttaaagaagcttctagaaattctacccagtagaaaataaagataaacttctgtaaggaatttcattcttttcagaattcgcaatctgaaatg

SEQ ID NO: 368990 - DNA, 1119 bp, Homo sapiens
tactacagtggatgtgagtgtgtagaccttgtacaatagagcttataggctaatgagaagacaggaagaaacaacaggaacacatatagctggaatgcagatgggatctgtgctacttacgctagccatgggatgattagaacaagataagagacatgaggaagacttcttcaaggaggtgctcaagccatgttttggaaaagagaactcaaggtctggcagggagaaaggagcaagactgcctggcagctctttagaaagttgtgtgacgtatgaaccagttcttccctatatgagagtgtaccgtacatcgcaggctgtccagcatcgaccccactgatggatgctagtagtcctccccgccagcactcaacattgtgacagtcaaaaacatcctctctacattttcaatgcccctgttggggtagcaggactcccactgagagaccccagtagagatgcccagtagagatggtccccaagcatgctaaccatgaagcagtgatatcgcacagcacctgcttccagcagcccggagccaaggggcaaagcttttaacccccactacgcgtcttcgttccattctcctccagtacccattttagtgagcttctgttgtttctgccccaggatatctctaacaaagaaccaagatatttatcaggagaacttctcccactctcctctcagtccttggggatctgatgaaatgacacttcttggactgtggggtggagcatgtgagtcacacctgggccaatcattttatcctatttcgtgaccacatgaccaattcagggatgggaacatgacccaggtggaacctatgagaggcagtgagatctttccaggtacttccaggaaagagggtctcacttttccctctataatgtacaccagagaaggtgtgtggctgaagctgctaccatcctcttgtggctacaggaagctgggattaattgtaacaacgcaattggcagatctgaaagctgagaacaaaaaagcaaaaaacctgtgttctaataacactatatatgagccctaaatccagctatgcctggagccagtcttactgtggaatttttaacctaagctggttgataaattatcttttcattt

SEQ ID NO: 368991 - DNA, 797 bp, Homo sapiens
tactacagtggatgtgagtgtgtagaccttgtacaatagagcttataggctaatgagaagacaggaagaaacaacaggaacacatatagctggaatgcagatgggatctgtgctacttacgctagccatgggatgattagaacaagataagagacatgaggaagacttcttcaaggaggtgctcaagccatgttttggaaaagagaactcaaggtctggcagggagaaaggagcaaggtcctcttctccctgaaggctgtcacagttcctgtgcagagagagagggcactgcagcacccaggcgctgactgccttttgtcagtctcatttgcaggcccccagctggagaacccaggaggaagaggaaaaaagttttttcctcctctacactccccatgcatgactaaagagtaggaggagtcagcaaggcagacatatatagtacccaggaggtggacaaacaactgccttggtggaaactctgtcctttctggacttatcctggtgccactgagactgtgcaggtcccacacttacagggaaagcatcacccgaaagtgagaatgcctagaggcaggaatcatggaggcttccttaaccgtctgtctgcaacagcaggtgctagagatgacactgcagagtagagaacaaaggaatcttagtaattgttcaatccaatctccacactttaaagatgaagaaactggtattgagatttgaggctacccatatggtcccaggttcctgctggtcaacaggtagccggctccttacttctccttggtatgacttatact

SEQ ID NO: 368992 - DNA, 1492 bp, Homo sapiens
caagtgtgagccactgtgcccggcctatgcctcaatttcttcctgccttactataggtacatcatatttatttaattccctaagtccctcctcaacagattttattctactactgaaatccagtctgcagaaactaaaagttgtatagtggatatgaaatttatataaccaccatagttcagtatctcaggggtaaaaataaaatgtgactatttatttccacaaaactgaacctatcaattcaagataacttttgctttaaaactcacgactccttgaatcaatagtcaatttctggatctttctcctcctcctaggtcctcttctccctgaaggctgtcacagttcctgtgcagagagagagggcactgcagcacccaggcgctgactgccttttgtcagtctcatttgcaggcccccagctggagaacccaggaggaagaggaaaaaagttttttcctcctctacactccccatgcatgactaaagagtaggaggagtcagcaaggcagacatatatagtacccaggaggtggacaaacaactgccttggtggaaactctgtcctttctggacttatcctggtgccactgagactgtgcaggtcccacacttacagggaaagcatcacccgaaagtgagaatgcctagaggcaggaatcatggaggcttccttaaccgtctgtctgcaacagcaggtgctagagatgacactgcagagtagagaacaaaggaatcttagtaattgttcaatccaatctccacactttaaagatgaagaaactggtattgagaaaaatacacagcttatccaaggttgcactgctggttggtagctgagatgaatttagaacccacatctgatgactacaccatattgctcccagttttcctgtctgttccacatgtaaaagtctgactcttcacttctcctttgagtatatagacttttaacatttttgtatgtcaagatggacttttcctcatacccagcccctgccttttctcctcccttcataccttgcaggatctttaacagaatttaaaaggagttttttgttttgttttgatgtatctaataaaagtcaagggagggagagggccagtataagcaagagtacagtttcctagtttgtagatgcggtagtctgaggaatcagaaacacacaaaggtttggagaactggtacatgctcccaggtgggaagccaggactcttggtaggatcttgaggacaaggcaaaggacaataagagagcgaggggatcctagaggtggaatcaaggaagagaaactagagagagaaaaaggaactggctatccatccatgatggatcctgtgtggactgatgggtggcttggcatcatcctttagtagacttcatgtggttgaataattggccaatggaaggaatttcttttttggtaacagactctgtgtgtacagttatgggtcttaatttataataaaaggttacattgaaaattgaaaa

SEQ ID NO: 368993 - DNA, 825 bp, Homo sapiens
tttcattaatttctggtttattttattttaggtgctagagatgacactgcagagtagagaacaaaggaatcttagtaattgttcaatccaatctccacactttaaagatgaagaaactggtattgagaaaaatacacagcttatccaaggttgcactgctggttggtagctgagatgaatttagaacccacatctgatgactacaccatattgctcccagttttcctgtctgttccacatgtaaaagtctgactcttcacttctcctttgagtatatagacttttaacatttttgtatgtcaagatggacttttcctcatacccagcccctgccttttctcctcccttcataccttgcaggatctttaacagaatttaaaaggagttttttgttttgttttgatgtatctaataaaagtcaagggagggagagggccagtataagcaagagtacagtttcctagtttgtagatgcggtagtctgaggaatcagaaacacacaaaggtttggagaactggtacatgctcccaggtgggaagccaggactcttggtaggatcttgaggacaaggcaaaggacaataagagagcgaggggatcctagaggtggaatcaaggaagagaaactagagagagaaaaaggaactggctatccatccatgatggatcctgtgtggactgatgggtggcttggcatcatcctttagtagacttcatgtggttgaataattggccaatggaaggaatttcttttttggtaacagactctgtgtgtacagttatgggtcttaatttataataaaaggttacattgaaaattgaaaa

SEQ ID NO: 368994 - DNA, 1715 bp, Homo sapiens
tactacagtggatgtgagtgtgtagaccttgtacaatagagcttataggctaatgagaagacaggaagaaacaacaggaacacatatagctggaatgcagatgggatctgtgctacttacgctagccatgggatgattagaacaagataagagacatgaggaagacttcttcaaggaggtgctcaagccatgttttggaaaagagaactcaaggtctggcagggagaaaggagcaagactgcctggcagctctttagaaagttgtgtgacgtatgaaccagttcttccctatatgagagtgtaccgtacatcgcaggctgtccagcatcgaccccactgatggatgctagtagtcctccccgccagcactcaacattgtgacagtcaaaaacatccccagtagagatggtccccaagcatgctaaccatgaagcagtgatatcgcacagcacctgcttccagcagcccggagccaaggggcaaaatggaaagagtcagcatttctcttttaggttctctgcctctctagtgtgtaagcttttaacccccactacgcgtcttcgttccattctcctccagtacccattttagtgagcttctgttgtttctgccccaggatatctctaacaaagaaccaagatatttatcaggagaattgctggagccaagtaggcagaagttgcatgtgctgagatcacgccactgcactccagcctgggtgacagagcaagactctgcctcaaaaagaaacattaaaaaaaaattaataaataaataagaaatcatcagtgaacttgaagaccagtcaacggatattatttaatcagaaagaaaaaaagattagaataaaaagaagaatagggcctaaaaatcctgtgggataatatcaagcagtctaacatatgtatatttagagctccagaaagagaagagaaacagaatgaagtagaaaaagtatttgaagaaatattgactggaaagccaggcacagtggctcacacctataatctcagcactttgggaagccaagatggaaggattacttgagcccaggagttcgggaccagcctgggcaacatagcaagacccagtctctacaaaaaaattaaaaaattagacaggcatggtggtgtgtacttgtagtcccacctactcaggagactgaggcaggaggatcacttgagcccagggggtcaaggctgtagtgagccgtgattgtaccactgccctccagcctgggtgatgagtgagatgctgtctcaaaaaaaaaaaaaagaaagaaaagaaatattgacaggaaaatcttccggtttgatcaaaaacagtaacctcagcaaactcccagtagaattatttcagccatttagatgtctctgacccaaaacccagccccacccaactcactgacaagacacaaggtaatatacagaccaagaatttctgcaaggataatagggcctgagatgagggtacagatattcagaggcagtgccgacactgaaaaaattccacaggtttcttctcagaatcttgctgactccagaaaacaagtctagagtatacttttcctactgaaggatctgacagtcctctttcaggccaccctgagacgggctccataatattttgaaagtattaggttgatttgactttagcttcaattctacttaaaggaaagatatatttagatagagaatagatttctgggagctaga

SEQ ID NO: 368995 - DNA, 1661 bp, Homo sapiens
tactacagtggatgtgagtgtgtagaccttgtacaatagagcttataggctaatgagaagacaggaagaaacaacaggaacacatatagctggaatgcagatgggatctgtgctacttacgctagccatgggatgattagaacaagataagagacatgaggaagacttcttcaaggaggtgctcaagccatgttttggaaaagagaactcaaggtctggcagggagaaaggagcaagactgcctggcagctctttagaaagttgtgtgacgtatgaaccagttcttccctatatgagagtgtaccgtacatcgcaggctgtccagcatcgaccccactgatggatgctagtagtcctccccgccagcactcaacattgtgacagtcaaaaacatccccagtagagatggtccccaagcatgctaaccatgaagcagtgatatcgcacagcacctgcttccagcagcccggagccaaggggcaaaatggaaagagtcagcatttctcttttaggttctctgcctctctagtgtgtaagcttttaacccccactacgcgtcttcgttccattctcctccagtacccattttagtgagcttctgttgtttctgccccaggatatctctaacaaagaaccaagatatttatcaggagaattgctggagccaagtaggcagaagttgcatgtgctgagatcacgccactgcactccagcctgggtgacagagcaagactctgcctcaaaaagaaacattaaaaaaaaattaataaataaataagaaatcatcagtgaacttgaagaccagtcaacggatattatttaatcagaaagaaaaaaagattagaataaaaagaagaatagggcctaaaaatcctgtgggataatatcaagcagtctaacatatgtatatttagagctccagaaagagaagagaaacagaatgaagtagataatctcagcactttgggaagccaagatggaaggattacttgagcccaggagttcgggaccagcctgggcaacatagcaagacccagtctctacaaaaaaattaaaaaattagacaggcatggtggtgtgtacttgtagtcccacctactcaggagactgaggcaggaggatcacttgagcccagggggtcaaggctgtagtgagccgtgattgtaccactgccctccagcctgggtgatgagtgagatgctgtctcaaaaaaaaaaaaaagaaagaaaagaaatattgacaggaaaatcttccggtttgatcaaaaacagtaacctcagcaaactcccagtagaattatttcagccatttagatgtctctgacccaaaacccagccccacccaactcactgacaagacacaaggtaatatacagaccaagaatttctgcaaggataatagggcctgagatgagggtacagatattcagaggcagtgccgacactgaaaaaattccacaggtttcttctcagaatcttgctgactccagaaaacaagtctagagtatacttttcctactgaaggatctgacagtcctctttcaggccaccctgagacgggctccataatattttgaaagtattaggttgatttgactttagcttcaattctacttaaaggaaagatatatttagatagagaatagatttctgggagctaga

SEQ ID NO: 368996 - DNA, 1287 bp, Homo sapiens
agcataatgaacacaacataaaaaatcagtgaggctggatgcggtggctcacgcctgtaattccagcactttgggaggccgaggtgggcaggtcacttgaggtcaggagttcaagaccaggctggccaacatggtgaaaccccatctctactaaaaatacaaaaattgacctggcgtggtggtgggcacctgtaatcccagctactcaggaggccgaggcaggagaattgctggagccaagtaggcagaagttgcatgtgctgagatcacgccactgcactccagcctgggtgacagagcaagactctgcctcaaaaagaaacattaaaaaaaaattaataaataaataagaaatcatcagtgaacttgaagaccagtcaacggatattatttaatcagaaagaaaaaaagattagaataaaaagaagaatagggcctaaaaatcctgtgggataatatcaagcagtctaacatatgtatatttagagctccagaaagagaagagaaacagaatgaagtagaaaaagtatttgaagaaatattgactggaaagccaggcacagtggctcacacctataatctcagcactttgggaagccaagatggaaggattacttgagcccaggagttcgggaccagcctgggcaacatagcaagacccagtctctacaaaaaaattaaaaaattagacaggcatggtggtgtgtacttgtagtcccacctactcaggagactgaggcaggaggatcacttgagcccagggggtcaaggctgtagtgagccgtgattgtaccactgccctccagcctgggtgatgagtgagatgctgtctcaaaaaaaaaaaaaagaaagaaaagaaatattgacaggaaaatcttccggtttgatcaaaaacagtaacctcagcaaactcccagtagaattatttcagccatttagatgtctctgacccaaaacccagccccacccaactcactgacaagacacaaggtaatatacagaccaagaatttctgcaaggataatagggcctgagatgagggtacagatattcagaggcagtgccgacactgaaaaaattccacaggtttcttctcagaatcttgctgactccagaaaacaagtctagagtatacttttcctactgaaggatctgacagtcctctttcaggccaccctgagacgggctccataatattttgaaagtattaggttgatttgactttagcttcaattctacttaaaggaaagatatatttagatagagaatagatttctgggagctaga

SEQ ID NO: 368997 - DNA, 1296 bp, Homo sapiens
aaaatttttggtagagatgaagcctcactgtattgcctaggctggtctcgagctcctgtgctcaagcaatcatcccactttgggaggccgaggtgggcaggtcacttgaggtcaggagttcaagaccaggctggccaacatggtgaaaccccatctctactaaaaatacaaaaattgacctggcgtggtggtgggcacctgtaatcccagctactcaggaggccgaggcaggagaattgctggagccaagtaggcagaagttgcatgtgctgagatcacgccactgcactccagcctgggtgacagagcaagactctgcctcaaaaagaaacattaaaaaaaaattaataaataaataagaaatcatcagtgaacttgaagaccagtcaacggatattatttaatcagaaagaaaaaaagattagaataaaaagaagaatagggcctaaaaatcctgtgggataatatcaagcagtctaacatatgtatatttagagctccagaaagagaagagaaacagaatgaagtagaaaaagtatttgaagaaatattgactggaaagccaggcacagtggctcacacctataatctcagcactttgggaagccaagatggaaggattacttgagcccaggagttcgggaccagcctgggcaacatagcaagacccagtctctacaaaaaaattaaaaaattagacaggcatggtggtgtgtacttgtagtcccacctactcaggagactgaggcaggaggatcacttgagcccagggggtcaaggctgtagtgagccgtgattgtaccactgccctccagcctgggtgatgagtgagatgctgtctcaaaaaaaaaaaaaagaaagaaaagaaatattgacaggaaaatcttccggtttgatcaaaaacagtaacctcagcaaactcccagtagaattatttcagccatttagatgtctctgacccaaaacccagccccacccaactcactgacaagacacaaggtaatatacagaccaagaatttctgcaaggataatagggcctgagatgagggtacagatattcagaggcagtgccgacactgaaaaaattccacaggtttcttctcagaatcttgctgactccagaaaacaagtctagagtatacttttcctactgaaggatctgacagtcctctttcaggccaccctgagacgggctccataatattttgaaagtattaggttgatttgactttagcttcaattctacttaaaggaaagatatatttagatagagaatagatttctgggagctaga

SEQ ID NO: 368998 - DNA, 1729 bp, Homo sapiens
tactacagtggatgtgagtgtgtagaccttgtacaatagagcttataggctaatgagaagacaggaagaaacaacaggaacacatatagctggaatgcagatgggatctgtgctacttacgctagccatgggatgattagaacaagataagagacatgaggaagacttcttcaaggaggtgctcaagccatgttttggaaaagagaactcaaggtctggcagggagaaaggagcaagactgcctggcagctctttagaaagttgtgtgacgtatgaaccagttcttccctatatgagagtgtaccgtacatcgcaggctgtccagcatcgaccccactgatggatgctagtagtcctccccgccagcactcaacattgtgacagtcaaaaacatcctctctacattttcaatgcccctgttggggtagcaggactcccactgagagaccccagtagagatgcccagtagagatggtccccaagcatgctaaccatgaagcagtgatatcgcacagcacctgcttccagcagcccggagccaaggggcaaagcttttaacccccactacgcgtcttcgttccattctcctccagtacccattttagtgagcttctgttgtttctgccccaggatatctctaacaaagaaccaagatatttatcaggagaattgctggagccaagtaggcagaagttgcatgtgctgagatcacgccactgcactccagcctgggtgacagagcaagactctgcctcaaaaagaaacattaaaaaaaaattaataaataaataagaaatcatcagtgaacttgaagaccagtcaacggatattatttaatcagaaagaaaaaaagattagaataaaaagaagaatagggcctaaaaatcctgtgggataatatcaagcagtctaacatatgtatatttagagctccagaaagagaagagaaacagaatgaagtagaaaaagtatttgaagaaatattgactggaaagccaggcacagtggctcacacctataatctcagcactttgggaagccaagatggaaggattacttgagcccaggagttcgggaccagcctgggcaacatagcaagacccagtctctacaaaaaaattaaaaaattagacaggcatggtggtgtgtacttgtagtcccacctactcaggagactgaggcaggaggatcacttgagcccagggggtcaaggctgtagtgagccgtgattgtaccactgccctccagcctgggtgatgagtgagatgctgtctcaaaaaaaaaaaaaagaaagaaaagaaatattgacaggaaaatcttccggtttgatcaaaaacagtaacctcagcaaactcccagtagaattatttcagccatttagatgtctctgacccaaaacccagccccacccaactcactgacaagacacaaggtaatatacagaccaagaatttctgcaaggataatagggcctgagatgagggtacagatattcagaggcagtgccgacactgaaaaaattccacaggtttcttctcagaatcttgctgactccagaaaacaagtctagagtatacttttcctactgaaggatctgacagtcctctttcaggccaccctgagacgggctccataatattttgaaagtattaggttgatttgactttagcttcaattctacttaaaggaaagatatatttagatagagaatagatttctgggagctaga

SEQ ID NO: 368999 - DNA, 1105 bp, Homo sapiens
tactacagtggatgtgagtgtgtagaccttgtacaatagagcttataggctaatgagaagacaggaagaaacaacaggaacacatatagctggaatgcagatgggatctgtgctacttacgctagccatgggatgattagaacaagataagagacatgaggaagacttcttcaaggaggtgctcaagccatgttttggaaaagagaactcaaggtctggcagggagaaaggagcaagactgcctggcagctctttagaaagttgtgtgacgtatgaaccagttcttccctatatgagagtgtaccgtacatcgcaggctgtccagcatcgaccccactgatggatgctagtagtcctccccgccagcactcaacattgtgacagtcaaaaacatccccagtagagatggtccccaagcatgctaaccatgaagcagtgatatcgcacagcacctgcttccagcagcccggagccaaggggcaaaatggaaagagtcagcatttctcttttaggttctctgcctctctagtgtgtaagcttttaacccccactacgcgtcttcgttccattctcctccagtacccattttagtgagcttctgttgtttctgccccaggatatctctaacaaagaaccaagatatttatcaggagaacttctcccactctcctctcagtccttggggatctgatgaaatgacacttcttggactgtggggtggagcatgtgagtcacacctgggccaatcattttatcctatttcgtgaccacatgaccaattcagggatgggaacatgacccaggtggaacctatgagaggcagtgagatctttccaggtacttccaggaaagagggtctcacttttccctctataatgtacaccagagaaggtgtgtggctgaagctgctaccatcctcttgtggctacaggaagctgggattaattgtaacaacgcaattggcagatctgaaagctgagaacaaaaaagcaaaaaacctgtgttctaataacactatatatgagccctaaatccagctatgcctggagccagtcttactgtggaatttttaacctaagctggttgataaattatcttttcattt

SEQ ID NO: 369000 - DNA, 766 bp, Homo sapiens
tactacagtggatgtgagtgtgtagaccttgtacaatagagcttataggctaatgagaagacaggaagaaacaacaggaacacatatagctggaatgcagatgggatctgtgctacttacgctagccatgggatgattagaacaagataagagacatgaggaagacttcttcaaggaggtgctcaagccatgttttggaaaagagaactcaaggtctggcagggagaaaggagcaagactgcctggcagctctttagaaagttgtgtgacgtatgaaccagttcttccctatatgagagtgtaccgtacatcgcaggctgtccagcatcgaccccactgatggatgctagtagtcctccccgccagcactcaacattgtgacagtcaaaaacatccccagtagagatggtccccaagcatgctaaccatgaagcagtgatatcgcacagcacctgcttccagcagcccggagccaaggggcaaaatggaaagagtcagcatttctcttttaggttctctgcctctctagtgtgtgaagactgaagaaacctaatcctaggtgctgccactgggacaaacaagaagcaccagacacagtgctgttttagggtggggcagaattatgctgagggaaaagttattatcactctttaaggccaaggaaaccacaatttttaaagaagcttctagaaattctacccagtagaaaataaagataaacttctgtaaggaatttcattcttttcagaattcgcaatctgaaatg

SEQ ID NO: 369001 - DNA, 982 bp, Homo sapiens
caagtgtgagccactgtgcccggcctatgcctcaatttcttcctgccttactataggtacatcatatttatttaattccctaagtccctcctcaacagattttattctactactgaaatccagtctgcagaaactaaaagttgtatagtggatatgaaatttatataaccaccatagttcagtatctcaggggtaaaaataaaatgtgactatttatttccacaaaactgaacctatcaattcaagataacttttgctttaaaactcacgactccttgaatcaatagtcaatttctggatctttctcctcctcctaggtcctcttctccctgaaggctgtcacagttcctgtgcagagagagagggcactgcagcacccaggcgctgactgccttttgtcagtctcatttgcaggcccccagctggagaacccaggaggaagaggaaaaaagttttttcctcctctacactccccatgcatgactaaagagtaggaggagtcagcaaggtatgtgaccccaactgcaagcagaaacagcaatgaaaggactgatgatcaaacagggaccaagctacatttctgtgtcgatcttcatctatacaacaaaattatcttcagtaataatcataaaaatggaatagataataacaatgtccaggaaaaaaagagtcagtaaattttaaaaattgaacttcatatatactgttatgccagaaaaaaagaaaaaagaagtgaaataaatattatagtaaaataaaaagaaatagattaaatattttataacattaatacgacttttgaaaacagggaagacttaaacctacatgtttgttgtagtatgagatgataaaattacagtttataacaaataataataaagaaaatttcaaactaaaaatatattatggctgggcatggtggctcacacctgtaatcccagcactttgggagtgtgaggtgggcagatcacctgaggtcagg

SEQ ID NO: 369002 - DNA, 1171 bp, Homo sapiens
tactacagtggatgtgagtgtgtagaccttgtacaatagagcttataggctaatgagaagacaggaagaaacaacaggaacacatatagctggaatgcagatgggatctgtgctacttacgctagccatgggatgattagaacaagataagagacatgaggaagacttcttcaaggaggtgctcaagccatgttttggaaaagagaactcaaggtctggcagggagaaaggagcaagactgcctggcagctctttagaaagttgtgtgacgtatgaaccagttcttccctatatgagagtgtaccgtacatcgcaggctgtccagcatcgaccccactgatggatgctagtagtcctccccgccagcactcaacattgtgacagtcaaaaacatcctctctacattttcaatgcccctgttggggtagcaggactcccactgagagaccccagtagagatgcccagtagagatggtccccaagcatgctaaccatgaagcagtgatatcgcacagcacctgcttccagcagcccggagccaaggggcaaaatggaaagagtcagcatttctcttttaggttctctgcctctctagtgtgtaagcttttaacccccactacgcgtcttcgttccattctcctccagtacccattttagtgagcttctgttgtttctgccccaggatatctctaacaaagaaccaagatatttatcaggagaacttctcccactctcctctcagtccttggggatctgatgaaatgacacttcttggactgtggggtggagcatgtgagtcacacctgggccaatcattttatcctatttcgtgaccacatgaccaattcagggatgggaacatgacccaggtggaacctatgagaggcagtgagatctttccaggtacttccaggaaagagggtctcacttttccctctataatgtacaccagagaaggtgtgtggctgaagctgctaccatcctcttgtggctacaggaagctgggattaattgtaacaacgcaattggcagatctgaaagctgagaacaaaaaagcaaaaaacctgtgttctaataacactatatatgagccctaaatccagctatgcctggagccagtcttactgtggaatttttaacctaagctggttgataaattatcttttcattt

SEQ ID NO: 369003 - DNA, 743 bp, Homo sapiens
tactacagtggatgtgagtgtgtagaccttgtacaatagagcttataggctaatgagaagacaggaagaaacaacaggaacacatatagctggaatgcagatgggatctgtgctacttacgctagccatgggatgattagaacaagataagagacatgaggaagacttcttcaaggaggtgctcaagccatgttttggaaaagagaactcaaggtctggcagggagaaaggagcaagagtagactttgagtctttgcttcagatgcagatcaagatgtggcaacctgttgtggagaactgggtcccttgagcctgtgctgtctctttttttctggtggctttgtcatttggaacaatgcataatgggctggaggctgagaaactctgagctgagggcaagtagagctgcagctgtctggcgccactgtaatgctgtctcctcctctgagtgagttcatcctggaaacattttctcccataagacatgcacaggtcttacgtttacatgtttcactgaaagaaatttgattccactgctgggatgacaaggaagactgaagaaacctaatcctaggtgctgccactgggacaaacaagaagcaccagacacagtgctgttttagggtggggcagaattatgctgagggaaaagttattatcactctttaaggccaaggaaaccacaatttttaaagaagcttctagaaattctacccagtagaaaataaagataaacttctgta

SEQ ID NO: 369004 - DNA, 721 bp, Homo sapiens
tacagtggatgtgagtgtgtagaccttgtacaatagagcttataggctaatgagaagacaggaagaaacaacaggaacacatatagctggaatgcagatgggatctgtgctacttacgctagccatgggatgattagaacaagataagagacatgaggaagacttcttcaaggaggtgctcaagccatgttttggaaaagagaactcaaggtctggcagggagaaaggagcaaggtaaccaggggaagtcttggaggagagcaagatgatgctgaaactgccctcactgttggttttaatgttgttcttgtcttactggtcgattcagagcattcacggtgcaagagagatagggacatttgatttaagaaatagagcagaatctcctcaaattaaatcagaatttttgatggagtagaggtcagagctatgttttggaagtgtttgggaaattgttagttttgttcccaggatctgatgcttttgtggttgaatattccatgtgaatgttttctctgcccatgcaaatagtaggtctcccagacaaatatctcagtggtgccagcacttcattttccaaatgtaggaggatctttctaatacttcctttgtggggaacatgaaactgttggaggcttgtaatcatatctatattttaaagaaagattttttttatcaacaggctatatggaaatatattcaaaactgttagtattatggt

SEQ ID NO: 369005 - DNA, 851 bp, Homo sapiens
agcgctgacggtacgccatgtccccagctcactgcatcttccactcccgggttcaaacgattctcctacttcagcctcccgaatagctgggattacaggcgtgtgccaccacacccagcaaatattgtacttttagtagagatggggtttcgccatgttgcccaggctggtctcaaactcctgagctcaagccatcctcccgcctccaactcccaaagtgctaggcgtgagccactgcgcccggcctcagtatgtatttaagtggcaggaaggtgctgagcttgccgctggggaggagtgatgactttagagctctctctctgccctcatggaacctgctgtctagcagggaggaggacggtagtgctcattgtttggaagaccacagcctgcattgatcgcggggacttgagcattcgtgtccatggtttgggagtccctggctcccatagtacatgttttatgaaggaaactaccagaaatccatgattagagatggaaaatatcagaccaattggaaattttcctttgactctcacctggtctgagcatcttctgtctttttggtacagtgaactactccagattgaaaacatttctgttttctccttgcctggcaagtgagctcagtgaaacatcctattagccacactgcagggttggacattgccacaccaggtcaagggaaagtggcactatgaaggcctgggcagcactgctgctttgagaattacgaggagaaaatctgtgctttaccaaaaagtaaattaaagatcctgcctggtatcagccttgcttgagtgactagtaaaattgcagaatagcttcataggaaaaaacaaaccccagag

SEQ ID NO: 369006 - DNA, 514 bp, Homo sapiens
cttcctgcccaccctctccccagccgcccgtttcaagccatgctgcccctctcagcctgtgagaattggctgtgctacctcttctgttccgcaacaccacagtggtagtttgaaatcggccacgggggaaatatttacaccagggaaatgagcagattggaggactcaggacttttccgagagctggttattagccatttaccagcacatcaccaacctatgctatttataaaccaccttctgccaacctggagtccagcttagcttcgtgtcaaaacgcaacctgatgctgactcagatgggcaaatcatcattacttattttttattctcacacacaagtaactttagaaaggactaaattgtaaaataaattttttaaaagaacaaaagaaatacgggtttcccccccatagagggaaaggcccatagaaatgaaattttactataaaaatgcaacaactggccaggcgcaatggctcattcctgaaatcccagcactttgggagcccgag

SEQ ID NO: 369007 - DNA, 939 bp, Homo sapiens
  misc_feature (874)..(874): n is a, c, g, or t
ctcccgtcacccaggctggagtgcagtggcacaattgttaccggaaagggatcccaatccagaccccaagaggattcttggaccttgagtaagaaagaattcagagagatggtctcgctatgttgcccaggctggtcctgaactcctggcctaaagcgatcctcctgcctcggccccccaaagtgctgaaattacaggtctcaaacaaaagtctggaacctgggattcttgtaggatatctggctgtgctttgtattatatgaaccacagaaaataatcttccagtatgatattgttttcagtatagtacctcaaccctaatttgcctggtaaccctttatccagagacctttgttttcaacttacagtcttattctggggtgggggatgtacagtctggctgtgtggacttgcaggagagatttagggttctaacttcttcttactgacttccaaccaattctcctgtattcagtcttatacacacccccacttatactagacgtagctggtactaccaaagcctggtcacaaaactctatgggagtctcaatgcaagttgagttgcttcttgactttcatccctgctggcttaagactcagcttcacaagcctgctaagtcagttgctatttatcctgttttctagcccttcaaaattttaaatgaaaatttacatttttaattgacaaataatatatatatgggataaatatgatgttttgatagtaatagatgtactgtggatggtattgaggtattgaattcaatctaaattttttgctgtgggacgtaacatttggcagaaggggtcactgtataactggagcggggaaaggggcagttggtcaacccgtgaaaaacctttaacaaangggcgaatagggaagcaatgaagcaaggaaaggcagaagtggtgcgcaaatttggttagttttga

SEQ ID NO: 369008 - DNA, 4445 bp, Homo sapiens
  misc_feature (2490)..(2490): n is a, c, g, or t
  misc_feature (3077)..(3077): n is a, c, g, or t
  misc_feature (3138)..(3138): n is a, c, g, or t
  misc_feature (3151)..(3151): n is a, c, g, or t
  misc_feature (3218)..(3218): n is a, c, g, or t
  misc_feature (3287)..(3287): n is a, c, g, or t
  misc_feature (3390)..(3390): n is a, c, g, or t
  misc_feature (3523)..(3523): n is a, c, g, or t
  misc_feature (3527)..(3527): n is a, c, g, or t
  misc_feature (3970)..(3970): n is a, c, g, or t
gcggccgcttctcgaagctctccccgagcctcaggcaatgttcctcgcggtccagcagcgggtttgcggtcccattcatggccccgcacctgcctcgcacccagatcggcgctctcccggtgcagccgcgatccgagcttctggcgctggcgtctgggaggactgtgcttccgggccaccgctctggaagacaaggagagccgagccggcacccacccgggtccagaagcaagttctctcctctgcgtgggggtgagagaggaatctgaggaggcaaggccgtgggacttccggcgtcgggtaggaacttccgggttcctagcggaagtggcgggggcggtgccatggcaaaagaactcccggagaatccgaattcgtggtcctcagaattggtttagggttgtttcgcggttcttcccgtattctgcctccgaggcccagtggggctggctgtgggccccctgtgctgtttgaggcgtgaaactcacctcaggaaatgtatctgatccattagcgtggattcatattatttggtgatggagaatcttcagctgtgttaagtgttaccgtcagtttcagagatggcttctttgcaaaggaaagggctgcaggcaaggattctcacctctgaagaagaggagaaactgaaaagagaccaaactttggtgtctgattttaaacagcagaaattggaacaagaggctcagaaaaattgggatcttttttacaaaagaaatagcactaatttcttcaaagacagacactggaccaccagagagtttgaggagctaagatcatgtagagagtttgaagatcaaaagttaacaatgcttgaagctggctgtggggttggaaactgtttattcccacttttagaagaagatccgaatatctttgcctatgcctgtgatttttctccaagagccattgaatatgttaagcaaaatcctttatatgatacagaaagatgcaaggtattccagtgtgatctgactaaagatgatcttctggatcatgtaccgccagagtctgtggatgttgttatgttgatatttgtgctgtcagctgttcatcctgataagatgcaccttgtcttacaaaacatttacaagtgccatggctgctcttcagagcttcgccagccctgggacaaggatgattttgcagttacctgggatccatggagtcctgctataaggtattaaaaccaggcaaaagtgtcttgtttcgtgactacggactgtatgatcatgccatgcttaggtttaaagccagcagcaaacttggagaaaacttttatgttagacaagatgggaccagatcatatttttttactgatgacttcctggctcagctctttatggacacaggttatgaagaagtggtaaacgagtatgtgtttcgagagacggtgaataaaaaagaaggcctgtgtgtgccaagagttttccttcagagcaaatttctaaagcctcctaagaacccatctcctgtggtcctgggcctggatcctaagtcctgacctttcatgaggtctcaaacaaaagtctggaacctgggattcttgtaggatatctggctgtgctttgtattatatgaaccacagaaaataatcttccagtatgatattgttttcagtatagtacctcaaccctaatttgcctggtaaccctttatccagagacctttgttttcaacttacagtcttattctggggtgggggatgtacagtctggctgtgtggacttgcaggagagatttagggttctaacttcttcttactgacttccaaccaattctcctgtattcagtcttatacacacccccacttatactagacgtagctggtactaccaaagcctggtcacaaaactctatgggagtctcaatgcaagttgagttgcttcttgactttcatccctgctggcttaagactcagcttcacaagcctgctaagtcagttgctatttatcctgttttctagcccttcaaaattttaaatgaaaatttacatttttaattgacaaataatatatatatgggataaatatgatgttttgatagtaatagatgtatacattgtggaatgattatatgaagctaattagcatatcacactcctcacatacttctttttctttgtattgagaacatgtaaaatctattcttggccaagcatggtggctcacacctgtaattccaacactttgagaggccaaggcaggaagattgcttgagcccaggaattcaggggttccagacaccagcctgggcaacatagcaataccctgtctctaataaaaaaaaaaaaaagtaaaaataaatgtgtaatttaaaaaattcattattgttattatttttacaattttgaaactgtaggggccaggaacaaacttcccctttgccctctgaagaataactaaaaaatcactcaccaaatgcagattaataggagaaatggaataaaaacttagtaattgttttccttgntggatcccttaggtctttatgtagatagggaaaaggtttcttctagcatctgttgattgctaaggacatttaattcaaaatactcattataccagggagccatatctgggggtaaaattccagatgctccttcaaagtatacattattattgactatggtcaccatgtacagtagatctcaaaaacgtattccccctggctaactgaaatgtgtgccctttggtcaacatctcccctactcctctcctcccccagcctctggtaaccaccattctactttctgctgctgtgagttcaactttttaaaattccacgtataagtgaaatcatgtggtatttgtctttctgaatctggcttatttcacttagcataatatcttccaggttcacccatgttgttgcaaatgatagaatgtccttgtttctaatgttctcccaaatttaatcagttgtatggggtttatgtgataaaaatatccttttgctgtcattttcgtggggtttccagaaggatcctaactaggtacacatgcttagtctgtcttttttttttttttttttttgaagcaagtctccctctgttgccnggctggagtgcagtggcctgatcatgactcattgcaacctctgcctcccaggcccaagcantcctcctacctcngcctccaagtagctgggactgaaggtgtgtgccagcatgtgtggctaattttatttttgtaaagacngagtctccttatattgcccaggctggtctcaaactcctgggttcgagatcctcctgcctctgcctcccnaagtgctgggattacaggcatgagccatggtgcctggtctagtctgtcatctttaaacaattgggttgggaaggaaaaggtagcacatagatagatgatttangcagaaatagataagcataattgtccactgtaaaggggctgaatgatctggagaatggaggcatctcaggaaaactgaacttggtggtgtgtgcttaggactaatgaaaagtggccgggcacagatgctcatncctntaatcccagcacttcgggagggtgagagggagtataatttgaggccaggaattcaaggttgcagtgagccatgattgtgccactgttctccagcctgggcagcagagtgagaccccgactcttaaaaaaaaaaaaaaaagaaccaaagaaatgttagttccagggattcccagggacatgggcagggtccaagaatgatgctgagttaaggttaggtggctattcagaaagctacttcgacttgtatcccatattatggatcaaggaccttaaaaatagccatactttttttttgttctagtaactcaatttgtaggattgtttcctaagagataatctgacatattcaaggacttcttcacaaagatattcattagctgcattatttatagtaccaaacattataaatagtctaaaccagagatccacaagctatggctatnacagtgacaaggaggcctagcgtgactaactccattttgctcctaacccccctgcagcgataacctgtatcttttaggttaactgcttttgcttatctctgcacataggccaagctaactatagaaggaatttagtttatagtttagagcaaggatggtaatagtgcctcccccaaaactaacccctgaggagataaggaggatgtatgcaagtaataatgttatgttaaagatttataagagcactgtgacctgaccaaggacaaagtttcaccacctccttggacccttgccaccacccagatgtgatcactggccacttcttgacctcaactccctccctcttcccccttcctctcacgtaaaaggagcctgaaatttgtattgacttaaaaatggttcttcaggacactactcttccattttcttggtttgctggctctctgaataaaagtcactttccttgcctcaaccc

SEQ ID NO: 369009 - DNA, 4359 bp, Homo sapiens
  misc_feature (2404)..(2404): n is a, c, g, or t
  misc_feature (2991)..(2991): n is a, c, g, or t
  misc_feature (3052)..(3052): n is a, c, g, or t
  misc_feature (3065)..(3065): n is a, c, g, or t
  misc_feature (3132)..(3132): n is a, c, g, or t
  misc_feature (3201)..(3201): n is a, c, g, or t
  misc_feature (3304)..(3304): n is a, c, g, or t
  misc_feature (3437)..(3437): n is a, c, g, or t
  misc_feature (3441)..(3441): n is a, c, g, or t
  misc_feature (3884)..(3884): n is a, c, g, or t
gcggccgcttctcgaagctctccccgagcctcaggcaatgttcctcgcggtccagcagcgggtttgcggtcccattcatggccccgcacctgcctcgcacccagatcggcgctctcccggtgcagccgcgatccgagcttctggcgctggcgtctgggaggactgtgcttccgggccaccgctctggaagacaaggagagccgagccggcacccacccgggtccagaagcaagttctctcctctgcgtgggggtgagagaggaatctgaggaggcaaggccgtgggacttccggcgtcgggtaggaacttccgggttcctagcggaagtggcgggggcggtgccatggcaaaagaactcccggagaatccgaattcgtggtcctcagaattggtttagggttgtttcgcggttcttcccgtattctgcctccgaggcccagtggggctggctgtgggccccctgtgctgtttgaggcgtgaaactcacctcaggaaatgtatctgatccattagcgtggattcatattatttggtgatggagaatcttcagctgtgttaagtgttaccgtcagtttcagagatggcttctttgcaaaggaaagggctgcaggcaaggattctcacctctgaagaagaggagaaactgaaaagagaccaaactttggtgtctgattttaaacagcagaaattggaacaagaggctcagaaaaattgggatcttttttacaaaagaaatagcactaatttcttcaaagacagacactggaccaccagagagtttgaggagctaagatcatgtagagagtttgaagatcaaaagttaacaatgcttgaagctggctgtggggttggaaactgtttattcccacttttagaagaagatccgaatatctttgcctatgcctgtgatttttctccaagagccattgaatatgttaagcaaaatcctttatatgatacagaaagatgcaaggtattccagtgtgatctgactaaagatgatcttctggatcatgtaccgccagagtctgtggatgttgttatgttgatatttgtgctgtcagctgttcatcctgataagatgcaccttgtcttacaaaacatttacaaggtattaaaaccaggcaaaagtgtcttgtttcgtgactacggactgtatgatcatgccatgcttaggtttaaagccagcagcaaacttggagaaaacttttatgttagacaagatgggaccagatcatatttttttactgatgacttcctggctcagctctttatggacacaggttatgaagaagtggtaaacgagtatgtgtttcgagagacggtgaataaaaaagaaggcctgtgtgtgccaagagttttccttcagagcaaatttctaaagcctcctaagaacccatctcctgtggtcctgggcctggatcctaagtcctgacctttcatgaggtctcaaacaaaagtctggaacctgggattcttgtaggatatctggctgtgctttgtattatatgaaccacagaaaataatcttccagtatgatattgttttcagtatagtacctcaaccctaatttgcctggtaaccctttatccagagacctttgttttcaacttacagtcttattctggggtgggggatgtacagtctggctgtgtggacttgcaggagagatttagggttctaacttcttcttactgacttccaaccaattctcctgtattcagtcttatacacacccccacttatactagacgtagctggtactaccaaagcctggtcacaaaactctatgggagtctcaatgcaagttgagttgcttcttgactttcatccctgctggcttaagactcagcttcacaagcctgctaagtcagttgctatttatcctgttttctagcccttcaaaattttaaatgaaaatttacatttttaattgacaaataatatatatatgggataaatatgatgttttgatagtaatagatgtatacattgtggaatgattatatgaagctaattagcatatcacactcctcacatacttctttttctttgtattgagaacatgtaaaatctattcttggccaagcatggtggctcacacctgtaattccaacactttgagaggccaaggcaggaagattgcttgagcccaggaattcaggggttccagacaccagcctgggcaacatagcaataccctgtctctaataaaaaaaaaaaaaagtaaaaataaatgtgtaatttaaaaaattcattattgttattatttttacaattttgaaactgtaggggccaggaacaaacttcccctttgccctctgaagaataactaaaaaatcactcaccaaatgcagattaataggagaaatggaataaaaacttagtaattgttttccttgntggatcccttaggtctttatgtagatagggaaaaggtttcttctagcatctgttgattgctaaggacatttaattcaaaatactcattataccagggagccatatctgggggtaaaattccagatgctccttcaaagtatacattattattgactatggtcaccatgtacagtagatctcaaaaacgtattccccctggctaactgaaatgtgtgccctttggtcaacatctcccctactcctctcctcccccagcctctggtaaccaccattctactttctgctgctgtgagttcaactttttaaaattccacgtataagtgaaatcatgtggtatttgtctttctgaatctggcttatttcacttagcataatatcttccaggttcacccatgttgttgcaaatgatagaatgtccttgtttctaatgttctcccaaatttaatcagttgtatggggtttatgtgataaaaatatccttttgctgtcattttcgtggggtttccagaaggatcctaactaggtacacatgcttagtctgtcttttttttttttttttttttgaagcaagtctccctctgttgccnggctggagtgcagtggcctgatcatgactcattgcaacctctgcctcccaggcccaagcantcctcctacctcngcctccaagtagctgggactgaaggtgtgtgccagcatgtgtggctaattttatttttgtaaagacngagtctccttatattgcccaggctggtctcaaactcctgggttcgagatcctcctgcctctgcctcccnaagtgctgggattacaggcatgagccatggtgcctggtctagtctgtcatctttaaacaattgggttgggaaggaaaaggtagcacatagatagatgatttangcagaaatagataagcataattgtccactgtaaaggggctgaatgatctggagaatggaggcatctcaggaaaactgaacttggtggtgtgtgcttaggactaatgaaaagtggccgggcacagatgctcatncctntaatcccagcacttcgggagggtgagagggagtataatttgaggccaggaattcaaggttgcagtgagccatgattgtgccactgttctccagcctgggcagcagagtgagaccccgactcttaaaaaaaaaaaaaaaagaaccaaagaaatgttagttccagggattcccagggacatgggcagggtccaagaatgatgctgagttaaggttaggtggctattcagaaagctacttcgacttgtatcccatattatggatcaaggaccttaaaaatagccatactttttttttgttctagtaactcaatttgtaggattgtttcctaagagataatctgacatattcaaggacttcttcacaaagatattcattagctgcattatttatagtaccaaacattataaatagtctaaaccagagatccacaagctatggctatnacagtgacaaggaggcctagcgtgactaactccattttgctcctaacccccctgcagcgataacctgtatcttttaggttaactgcttttgcttatctctgcacataggccaagctaactatagaaggaatttagtttatagtttagagcaaggatggtaatagtgcctcccccaaaactaacccctgaggagataaggaggatgtatgcaagtaataatgttatgttaaagatttataagagcactgtgacctgaccaaggacaaagtttcaccacctccttggacccttgccaccacccagatgtgatcactggccacttcttgacctcaactccctccctcttcccccttcctctcacgtaaaaggagcctgaaatttgtattgacttaaaaatggttcttcaggacactactcttccattttcttggtttgctggctctctgaataaaagtcactttccttgcctcaaccc

SEQ ID NO: 369010 - DNA, 2700 bp, Homo sapiens
gcggccgcttctcgaagctctccccgagcctcaggcaatgttcctcgcggtccagcagcgggtttgcggtcccattcatggccccgcacctgcctcgcacccagatcggcgctctcccggtgcagccgcgatccgagcttctggcgctggcgtctgggaggactgtgcttccgggccaccgctctggaagacaaggagagccgagccggcacccacccgggtccagaagcaagttctctcctctgcgtgggggtgagagaggaatctgaggaggcaaggccgtgggacttccggcgtcgggtaggaacttccgggttcctagcggaagtggcgggggcggtgccatggcaaaagaactcccggagaatccgaattcgtggtcctcagaattggtttagggttgtttcgcggttcttcccgtattctgcctccgaggcccagtggggctggctgtgggccccctgtgctgtttgaggcgtgaaactcacctcaggaaatgtatctgatccattagcgtggattcatattatttggtgatggagaatcttcagctgtgttaagtgttaccgtcagtttcagagatggcttctttgcaaaggaaagggctgcaggcaaggattctcacctctgaagaagaggagaaactgaaaagagaccaaactttggtgtctgattttaaacagcagaaattggaacaagaggctcagaaaaattgggatcttttttacaaaagaaatagcactaatttcttcaaagacagacactggaccaccagagagtttgaggagctaagatcatgtagagagtttgaagatcaaaagttaacaatgcttgaagctggctgtggggttggaaactgtttattcccacttttagaagaagatccgaatatctttgcctatgcctgtgatttttctccaagagccattgaatatgttaagcaaaatcctttatatgatacagaaagatgcaaggtattccagtgtgatctgactaaagatgatcttctggatcatgtaccgccagagtctgtggatgttgttatgttgatatttgtgctgtcagctgttcatcctgataagatgcaccttgtcttacaaaacatttacaagtgccatggctgctcttcagagcttcgccagccctgggacaaggatgattttgcagttacctgggatccatggagtcctgctataaggtattaaaaccaggcaaaagtgtcttgtttcgtgactacggactgtatgatcatgccatgcttaggtttaaagccagcagcaaacttggagaaaacttttatgttagacaagatgggaccagatcatatttttttactgatgacttcctggctcagctctttatggacacaggttatgaagaagtggtaaacgagtatgtgtttcgagagacggtgaataaaaaagaaggcctgtgtgtgccaagagttttccttcagagcaaatttctaaagcctcctaagaacccatctcctgtggtcctgggcctggatcctaagtcctgacctttcatgaggttggcatttataccttcccttgaagaggaaaatttaaaatcactctttcgtctgggtgcggtggctcatgcctgtaatcccagcacttcgggaggccgaggttgggggatcatctgaggtcaggagtttgagaccagcctggccaacatggtgagaccccatctctactaaaaatacaaaaaaattagctgggcatggtggcgagtgcctgtagtcccagctactcaggaggctgaggcaagagaatcgcttgaacccaagaggcggagactgcagtgagccaagatcatgccattgcactccagcctgggcgacagagtgagaccctgtttcataaataaataaaatcactctttttactttatatattttttgagacaggatcttgtggtacgcaggctggagtgcagtggtgtgtgatcacagctcattgtagcctcgacctcccctgggctcaggcagtcttcctgcctcagcctcctgagtagctaggactacaggtgtaagccaccatgcctggcccttaattttttttaatgagcatgtacagtagtcccgctttatccatggtttcacttaccacaatttcaattacctgttttcaactgcagtcagttacttttcttaagatattttgagggttataggctcatgcctataaccccagcactttgagaggccaaggccagcagatcccttgagcccaggagttcaagaccagtgtgggcaacatggtgaaactctgtctctacagaaaatacaaaaattagccaaatgtggtggcatgtgcctgtagtcccagctggggtgggaggttagcttgagcctggaaggtggaggttgcagtaagtcgagatcacgctactgcactccagcctgggcgacagagcaaaagtctgtctcaaaaaaaacaaaaaaaatttgaaagatcacattcacataacttttattacggtatattgttaaagttgttcttttttttttagagtttggtaccatcttggtttcaggcaaccactgggggtcttgaaacataccacccgcagatacggggggctactatgtactttttgtattaaaaaataggaagtgtatgtgtgtgtgttagagacatgtaaataaaatttcaaggcctgaaaagtagtcaaagttttatagaataacat

SEQ ID NO: 369011 - DNA, 4473 bp, Homo sapiens
  misc_feature (2518)..(2518): n is a, c, g, or t
  misc_feature (3105)..(3105): n is a, c, g, or t
  misc_feature (3166)..(3166): n is a, c, g, or t
  misc_feature (3179)..(3179): n is a, c, g, or t
  misc_feature (3246)..(3246): n is a, c, g, or t
  misc_feature (3315)..(3315): n is a, c, g, or t
  misc_feature (3418)..(3418): n is a, c, g, or t
  misc_feature (3551)..(3551): n is a, c, g, or t
  misc_feature (3555)..(3555): n is a, c, g, or t
  misc_feature (3998)..(3998): n is a, c, g, or t
gcggccgcttctcgaagctctccccgagcctcaggcaatgttcctcgcggtccagcagcgggtttgcggtcccattcatggccccgcacctgcctcgcacccagatcggcgctctcccggtgcagccgcgatccgagcttctggcgctggcgtctgggaggactgtgcttccgggccaccgctctggaagacaaggagagccgagccggcacccacccgggtccagaagcaagttctctcctctgcgtgggggtgagagaggaatctgaggaggcaaggccgtgggacttccggcgtcgggtaggaacttccgggttcctagcggaagtggcgggggcggtgccatggcaaaagaactcccggagaatccgaattcgtggtcctcagaattggtttagggttgtttcgcggttcttcccgtattctgcctccgaggcccagtggggctggctgtggggtgagtgcgcctggccctagccctgcagccccctgtgctgtttgaggcgtgaaactcacctcaggaaatgtatctgatccattagcgtggattcatattatttggtgatggagaatcttcagctgtgttaagtgttaccgtcagtttcagagatggcttctttgcaaaggaaagggctgcaggcaaggattctcacctctgaagaagaggagaaactgaaaagagaccaaactttggtgtctgattttaaacagcagaaattggaacaagaggctcagaaaaattgggatcttttttacaaaagaaatagcactaatttcttcaaagacagacactggaccaccagagagtttgaggagctaagatcatgtagagagtttgaagatcaaaagttaacaatgcttgaagctggctgtggggttggaaactgtttattcccacttttagaagaagatccgaatatctttgcctatgcctgtgatttttctccaagagccattgaatatgttaagcaaaatcctttatatgatacagaaagatgcaaggtattccagtgtgatctgactaaagatgatcttctggatcatgtaccgccagagtctgtggatgttgttatgttgatatttgtgctgtcagctgttcatcctgataagatgcaccttgtcttacaaaacatttacaagtgccatggctgctcttcagagcttcgccagccctgggacaaggatgattttgcagttacctgggatccatggagtcctgctataaggtattaaaaccaggcaaaagtgtcttgtttcgtgactacggactgtatgatcatgccatgcttaggtttaaagccagcagcaaacttggagaaaacttttatgttagacaagatgggaccagatcatatttttttactgatgacttcctggctcagctctttatggacacaggttatgaagaagtggtaaacgagtatgtgtttcgagagacggtgaataaaaaagaaggcctgtgtgtgccaagagttttccttcagagcaaatttctaaagcctcctaagaacccatctcctgtggtcctgggcctggatcctaagtcctgacctttcatgaggtctcaaacaaaagtctggaacctgggattcttgtaggatatctggctgtgctttgtattatatgaaccacagaaaataatcttccagtatgatattgttttcagtatagtacctcaaccctaatttgcctggtaaccctttatccagagacctttgttttcaacttacagtcttattctggggtgggggatgtacagtctggctgtgtggacttgcaggagagatttagggttctaacttcttcttactgacttccaaccaattctcctgtattcagtcttatacacacccccacttatactagacgtagctggtactaccaaagcctggtcacaaaactctatgggagtctcaatgcaagttgagttgcttcttgactttcatccctgctggcttaagactcagcttcacaagcctgctaagtcagttgctatttatcctgttttctagcccttcaaaattttaaatgaaaatttacatttttaattgacaaataatatatatatgggataaatatgatgttttgatagtaatagatgtatacattgtggaatgattatatgaagctaattagcatatcacactcctcacatacttctttttctttgtattgagaacatgtaaaatctattcttggccaagcatggtggctcacacctgtaattccaacactttgagaggccaaggcaggaagattgcttgagcccaggaattcaggggttccagacaccagcctgggcaacatagcaataccctgtctctaataaaaaaaaaaaaaagtaaaaataaatgtgtaatttaaaaaattcattattgttattatttttacaattttgaaactgtaggggccaggaacaaacttcccctttgccctctgaagaataactaaaaaatcactcaccaaatgcagattaataggagaaatggaataaaaacttagtaattgttttccttgntggatcccttaggtctttatgtagatagggaaaaggtttcttctagcatctgttgattgctaaggacatttaattcaaaatactcattataccagggagccatatctgggggtaaaattccagatgctccttcaaagtatacattattattgactatggtcaccatgtacagtagatctcaaaaacgtattccccctggctaactgaaatgtgtgccctttggtcaacatctcccctactcctctcctcccccagcctctggtaaccaccattctactttctgctgctgtgagttcaactttttaaaattccacgtataagtgaaatcatgtggtatttgtctttctgaatctggcttatttcacttagcataatatcttccaggttcacccatgttgttgcaaatgatagaatgtccttgtttctaatgttctcccaaatttaatcagttgtatggggtttatgtgataaaaatatccttttgctgtcattttcgtggggtttccagaaggatcctaactaggtacacatgcttagtctgtcttttttttttttttttttttgaagcaagtctccctctgttgccnggctggagtgcagtggcctgatcatgactcattgcaacctctgcctcccaggcccaagcantcctcctacctcngcctccaagtagctgggactgaaggtgtgtgccagcatgtgtggctaattttatttttgtaaagacngagtctccttatattgcccaggctggtctcaaactcctgggttcgagatcctcctgcctctgcctcccnaagtgctgggattacaggcatgagccatggtgcctggtctagtctgtcatctttaaacaattgggttgggaaggaaaaggtagcacatagatagatgatttangcagaaatagataagcataattgtccactgtaaaggggctgaatgatctggagaatggaggcatctcaggaaaactgaacttggtggtgtgtgcttaggactaatgaaaagtggccgggcacagatgctcatncctntaatcccagcacttcgggagggtgagagggagtataatttgaggccaggaattcaaggttgcagtgagccatgattgtgccactgttctccagcctgggcagcagagtgagaccccgactcttaaaaaaaaaaaaaaaagaaccaaagaaatgttagttccagggattcccagggacatgggcagggtccaagaatgatgctgagttaaggttaggtggctattcagaaagctacttcgacttgtatcccatattatggatcaaggaccttaaaaatagccatactttttttttgttctagtaactcaatttgtaggattgtttcctaagagataatctgacatattcaaggacttcttcacaaagatattcattagctgcattatttatagtaccaaacattataaatagtctaaaccagagatccacaagctatggctatnacagtgacaaggaggcctagcgtgactaactccattttgctcctaacccccctgcagcgataacctgtatcttttaggttaactgcttttgcttatctctgcacataggccaagctaactatagaaggaatttagtttatagtttagagcaaggatggtaatagtgcctcccccaaaactaacccctgaggagataaggaggatgtatgcaagtaataatgttatgttaaagatttataagagcactgtgacctgaccaaggacaaagtttcaccacctccttggacccttgccaccacccagatgtgatcactggccacttcttgacctcaactccctccctcttcccccttcctctcacgtaaaaggagcctgaaatttgtattgacttaaaaatggttcttcaggacactactcttccattttcttggtttgctggctctctgaataaaagtcactttccttgcctcaaccc

SEQ ID NO: 369012 - DNA, 3444 bp, Homo sapiens
  misc_feature (1489)..(1489): n is a, c, g, or t
  misc_feature (2076)..(2076): n is a, c, g, or t
  misc_feature (2137)..(2137): n is a, c, g, or t
  misc_feature (2150)..(2150): n is a, c, g, or t
  misc_feature (2217)..(2217): n is a, c, g, or t
  misc_feature (2286)..(2286): n is a, c, g, or t
  misc_feature (2389)..(2389): n is a, c, g, or t
  misc_feature (2522)..(2522): n is a, c, g, or t
  misc_feature (2526)..(2526): n is a, c, g, or t
  misc_feature (2969)..(2969): n is a, c, g, or t
aagaagtgtcttagtgttatggagccctgcctggtcttactatctttttaagtagtaggccattttggttccgtattatgggcatttcagtctgtccccttagtaactatcacaaatttattttaagtcctaacttaatcaggttttattttgacagggttctccaaagtcatgttcagcctgcttttgtttcataggtattaaaaccaggcaaaagtgtcttgtttcgtgactacggactgtatgatcatgccatgcttaggtttaaagccagcagcaaacttggagaaaacttttatgttagacaagatgggaccagatcatatttttttactgatgacttcctggctcagctctttatggacacaggttatgaagaagtggtaaacgagtatgtgtttcgagagacggtgaataaaaaagaaggcctgtgtgtgccaagagttttccttcagagcaaatttctaaagcctcctaagaacccatctcctgtggtcctgggcctggatcctaagtcctgacctttcatgaggtctcaaacaaaagtctggaacctgggattcttgtaggatatctggctgtgctttgtattatatgaaccacagaaaataatcttccagtatgatattgttttcagtatagtacctcaaccctaatttgcctggtaaccctttatccagagacctttgttttcaacttacagtcttattctggggtgggggatgtacagtctggctgtgtggacttgcaggagagatttagggttctaacttcttcttactgacttccaaccaattctcctgtattcagtcttatacacacccccacttatactagacgtagctggtactaccaaagcctggtcacaaaactctatgggagtctcaatgcaagttgagttgcttcttgactttcatccctgctggcttaagactcagcttcacaagcctgctaagtcagttgctatttatcctgttttctagcccttcaaaattttaaatgaaaatttacatttttaattgacaaataatatatatatgggataaatatgatgttttgatagtaatagatgtatacattgtggaatgattatatgaagctaattagcatatcacactcctcacatacttctttttctttgtattgagaacatgtaaaatctattcttggccaagcatggtggctcacacctgtaattccaacactttgagaggccaaggcaggaagattgcttgagcccaggaattcaggggttccagacaccagcctgggcaacatagcaataccctgtctctaataaaaaaaaaaaaaagtaaaaataaatgtgtaatttaaaaaattcattattgttattatttttacaattttgaaactgtaggggccaggaacaaacttcccctttgccctctgaagaataactaaaaaatcactcaccaaatgcagattaataggagaaatggaataaaaacttagtaattgttttccttgntggatcccttaggtctttatgtagatagggaaaaggtttcttctagcatctgttgattgctaaggacatttaattcaaaatactcattataccagggagccatatctgggggtaaaattccagatgctccttcaaagtatacattattattgactatggtcaccatgtacagtagatctcaaaaacgtattccccctggctaactgaaatgtgtgccctttggtcaacatctcccctactcctctcctcccccagcctctggtaaccaccattctactttctgctgctgtgagttcaactttttaaaattccacgtataagtgaaatcatgtggtatttgtctttctgaatctggcttatttcacttagcataatatcttccaggttcacccatgttgttgcaaatgatagaatgtccttgtttctaatgttctcccaaatttaatcagttgtatggggtttatgtgataaaaatatccttttgctgtcattttcgtggggtttccagaaggatcctaactaggtacacatgcttagtctgtcttttttttttttttttttttgaagcaagtctccctctgttgccnggctggagtgcagtggcctgatcatgactcattgcaacctctgcctcccaggcccaagcantcctcctacctcngcctccaagtagctgggactgaaggtgtgtgccagcatgtgtggctaattttatttttgtaaagacngagtctccttatattgcccaggctggtctcaaactcctgggttcgagatcctcctgcctctgcctcccnaagtgctgggattacaggcatgagccatggtgcctggtctagtctgtcatctttaaacaattgggttgggaaggaaaaggtagcacatagatagatgatttangcagaaatagataagcataattgtccactgtaaaggggctgaatgatctggagaatggaggcatctcaggaaaactgaacttggtggtgtgtgcttaggactaatgaaaagtggccgggcacagatgctcatncctntaatcccagcacttcgggagggtgagagggagtataatttgaggccaggaattcaaggttgcagtgagccatgattgtgccactgttctccagcctgggcagcagagtgagaccccgactcttaaaaaaaaaaaaaaaagaaccaaagaaatgttagttccagggattcccagggacatgggcagggtccaagaatgatgctgagttaaggttaggtggctattcagaaagctacttcgacttgtatcccatattatggatcaaggaccttaaaaatagccatactttttttttgttctagtaactcaatttgtaggattgtttcctaagagataatctgacatattcaaggacttcttcacaaagatattcattagctgcattatttatagtaccaaacattataaatagtctaaaccagagatccacaagctatggctatnacagtgacaaggaggcctagcgtgactaactccattttgctcctaacccccctgcagcgataacctgtatcttttaggttaactgcttttgcttatctctgcacataggccaagctaactatagaaggaatttagtttatagtttagagcaaggatggtaatagtgcctcccccaaaactaacccctgaggagataaggaggatgtatgcaagtaataatgttatgttaaagatttataagagcactgtgacctgaccaaggacaaagtttcaccacctccttggacccttgccaccacccagatgtgatcactggccacttcttgacctcaactccctccctcttcccccttcctctcacgtaaaaggagcctgaaatttgtattgacttaaaaatggttcttcaggacactactcttccattttcttggtttgctggctctctgaataaaagtcactttccttgcctcaaccc

SEQ ID NO: 369013 - DNA, 2500 bp, Homo sapiens
gcggccgcttctcgaagctctccccgagcctcaggcaatgttcctcgcggtccagcagcgggtttgcggtcccattcatggccccgcacctgcctcgcacccagatcggcgctctcccggtgcagccgcgatccgagcttctggcgctggcgtctgggaggactgtgcttccgggccaccgctctggaagacaaggagagccgagccggcacccacccgggtccagaagcaagttctctcctctgcgtgggggtgagagaggaatctgaggaggcaaggccgtgggacttccggcgtcgggtaggaacttccgggttcctagcggaagtggcgggggcggtgccatggcaaaagaactcccggagaatccgaattcgtggtcctcagaattggtttagggttgtttcgcggttcttcccgtattctgcctccgaggcccagtggggctggctgtggggtgagtgcgcctggccctagccctgcagccccctgtgctgtttgaggcgtgaaactcacctcaggaaatgtatctgatccattagcgtggattcatattatttggtgatggagaatcttcagctgtgttaagtgttaccgtcagtttcagagatggcttctttgcaaaggaaagggctgcaggcaaggattctcacctctgaagaagaggagaaactgaaaagagaccaaactttggtgtctgattttaaacagcagaaattggaacaagaggctcagaaaaattgggatcttttttacaaaagaaatagcactaatttcttcaaagacagacactggaccaccagagagtttgaggagctaagatcatgtagagagtttgaagatcaaaagttaacaatgcttgaagctggctgtggggttggaaactgtttattcccacttttagaagaagatccgaatatctttgcctatgcctgtgatttttctccaagagccattgaatatgttaagcaaaatcctttatatgatacagaaagatgcaaggtattccagtgtgatctgactaaagatgatcttctggatcatgtaccgccagagtctgtggatgttgttatgttgatatttgtgctgtcagctgttcatcctgataagatgcaccttgtcttacaaaacatttacaagacttcctggctcagctctttatggacacaggttatgaagaagtggtaaacgagtatgtgtttcgagagacggtgaataaaaaagaaggcctgtgtgtgccaagagttttccttcagagcaaatttctaaagcctcctaagaacccatctcctgtggtcctgggcctggatcctaagtcctgacctttcatgaggttggcatttataccttcccttgaagaggaaaatttaaaatcactctttcgtctgggtgcggtggctcatgcctgtaatcccagcacttcgggaggccgaggttgggggatcatctgaggtcaggagtttgagaccagcctggccaacatggtgagaccccatctctactaaaaatacaaaaaaattagctgggcatggtggcgagtgcctgtagtcccagctactcaggaggctgaggcaagagaatcgcttgaacccaagaggcggagactgcagtgagccaagatcatgccattgcactccagcctgggcgacagagtgagaccctgtttcataaataaataaaatcactctttttactttatatattttttgagacaggatcttgtggtacgcaggctggagtgcagtggtgtgtgatcacagctcattgtagcctcgacctcccctgggctcaggcagtcttcctgcctcagcctcctgagtagctaggactacaggtgtaagccaccatgcctggcccttaattttttttaatgagcatgtacagtagtcccgctttatccatggtttcacttaccacaatttcaattacctgttttcaactgcagtcagttacttttcttaagatattttgagggttataggctcatgcctataaccccagcactttgagaggccaaggccagcagatcccttgagcccaggagttcaagaccagtgtgggcaacatggtgaaactctgtctctacagaaaatacaaaaattagccaaatgtggtggcatgtgcctgtagtcccagctggggtgggaggttagcttgagcctggaaggtggaggttgcagtaagtcgagatcacgctactgcactccagcctgggcgacagagcaaaagtctgtctcaaaaaaaacaaaaaaaatttgaaagatcacattcacataacttttattacggtatattgttaaagttgttcttttttttttagagtttggtaccatcttggtttcaggcaaccactgggggtcttgaaacataccacccgcagatacggggggctactatgtactttttgtattaaaaaataggaagtgtatgtgtgtgtgttagagacatgtaaataaaatttcaaggcctgaaaagtagtcaaagttttatagaataacat

SEQ ID NO: 369014 - DNA, 386 bp, Homo sapiens
agatgggaccagatcatatttttttactgatggtaagatgaatggaatccagtctttaaatgttttattctttgtttctgtttatttgattgcattatcactgcaaggctgcttggagaaggcttgcgacatgtgcacgagaccctgaaacaagccctctactgcacaatatttacccagcacctggaaggcacagacctggcccctgcccttgaagagctcacaagccttctctggtgtcagtgactcccctaatgagcttgggttaatggacagcctctgacatgccatgtggattccctactaggaattgtgctggaataagagggagggcaagtcagaaacttcttgtccagttaaaaataaagcaaatttgacagtataat

SEQ ID NO: 369015 - DNA, 4409 bp, Homo sapiens
  misc_feature (2454)..(2454): n is a, c, g, or t
  misc_feature (3041)..(3041): n is a, c, g, or t
  misc_feature (3102)..(3102): n is a, c, g, or t
  misc_feature (3115)..(3115): n is a, c, g, or t
  misc_feature (3182)..(3182): n is a, c, g, or t
  misc_feature (3251)..(3251): n is a, c, g, or t
  misc_feature (3354)..(3354): n is a, c, g, or t
  misc_feature (3487)..(3487): n is a, c, g, or t
  misc_feature (3491)..(3491): n is a, c, g, or t
  misc_feature (3934)..(3934): n is a, c, g, or t
gcggccgcttctcgaagctctccccgagcctcaggcaatgttcctcgcggtccagcagcgggtttgcggtcccattcatggccccgcacctgcctcgcacccagatcggcgctctcccggtgcagccgcgatccgagcttctggcgctggcgtctgggaggactgtgcttccgggccaccgctctggaagacaaggagagccgagccggcacccacccgggtccagaagcaagttctctcctctgcgtgggggtgagagaggaatctgaggaggcaaggccgtgggacttccggcgtcgggtaggaacttccgggttcctagcggaagtggcgggggcggtgccatggcaaaagaactcccggagaatccgaattcgtggtcctcagaattggtttagggttgtttcgcggttcttcccgtattctgcctccgaggcccagtggggctggctgtgggccccctgtgctgtttgaggcgtgaaactcacctcaggaaatgtatctgatccattagcgtggattcatattatttggtgatggagaatcttcagctgtgttaagtgttaccgtcagtttcagagatggcttctttgcaaaggaaagggctgcaggcaaggattctcacctctgaagaagaggagaaactgaaaagagaccaaactttggtgtctgattttaaacagcagaaattggaacaagaggctcagaaaaattgggatcttttttacaaaagaaatagcactaatttcttcaaagacagacactggaccaccagagagtttgaggagctaagatcatgtagagagtttgaagatcaaaagttaacaatgcttgaagctggctgtggggttggaaactgtttattcccacttttagaagaagatccgaatatctttgcctatgcctgtgatttttctccaagagccattgaatatgttaagcaaaatcctttatatgatacagaaagatgcaaggtattccagtgtgatctgactaaagatgatcttctggatcatgtaccgccagagtctgtggatgttgttatgttgatatttgtgctgtcagctgttcatcctgataagatgcaccttgtcttacaaaacatttacaagtgccatggctgctcttcagagcttcgccagccctgggacaaggatgattttgcagttacctgggatccatggagtcctgctataagtacggactgtatgatcatgccatgcttaggtttaaagccagcagcaaacttggagaaaacttttatgttagacaagatgggaccagatcatatttttttactgatgacttcctggctcagctctttatggacacaggttatgaagaagtggtaaacgagtatgtgtttcgagagacggtgaataaaaaagaaggcctgtgtgtgccaagagttttccttcagagcaaatttctaaagcctcctaagaacccatctcctgtggtcctgggcctggatcctaagtcctgacctttcatgaggtctcaaacaaaagtctggaacctgggattcttgtaggatatctggctgtgctttgtattatatgaaccacagaaaataatcttccagtatgatattgttttcagtatagtacctcaaccctaatttgcctggtaaccctttatccagagacctttgttttcaacttacagtcttattctggggtgggggatgtacagtctggctgtgtggacttgcaggagagatttagggttctaacttcttcttactgacttccaaccaattctcctgtattcagtcttatacacacccccacttatactagacgtagctggtactaccaaagcctggtcacaaaactctatgggagtctcaatgcaagttgagttgcttcttgactttcatccctgctggcttaagactcagcttcacaagcctgctaagtcagttgctatttatcctgttttctagcccttcaaaattttaaatgaaaatttacatttttaattgacaaataatatatatatgggataaatatgatgttttgatagtaatagatgtatacattgtggaatgattatatgaagctaattagcatatcacactcctcacatacttctttttctttgtattgagaacatgtaaaatctattcttggccaagcatggtggctcacacctgtaattccaacactttgagaggccaaggcaggaagattgcttgagcccaggaattcaggggttccagacaccagcctgggcaacatagcaataccctgtctctaataaaaaaaaaaaaaagtaaaaataaatgtgtaatttaaaaaattcattattgttattatttttacaattttgaaactgtaggggccaggaacaaacttcccctttgccctctgaagaataactaaaaaatcactcaccaaatgcagattaataggagaaatggaataaaaacttagtaattgttttccttgntggatcccttaggtctttatgtagatagggaaaaggtttcttctagcatctgttgattgctaaggacatttaattcaaaatactcattataccagggagccatatctgggggtaaaattccagatgctccttcaaagtatacattattattgactatggtcaccatgtacagtagatctcaaaaacgtattccccctggctaactgaaatgtgtgccctttggtcaacatctcccctactcctctcctcccccagcctctggtaaccaccattctactttctgctgctgtgagttcaactttttaaaattccacgtataagtgaaatcatgtggtatttgtctttctgaatctggcttatttcacttagcataatatcttccaggttcacccatgttgttgcaaatgatagaatgtccttgtttctaatgttctcccaaatttaatcagttgtatggggtttatgtgataaaaatatccttttgctgtcattttcgtggggtttccagaaggatcctaactaggtacacatgcttagtctgtcttttttttttttttttttttgaagcaagtctccctctgttgccnggctggagtgcagtggcctgatcatgactcattgcaacctctgcctcccaggcccaagcantcctcctacctcngcctccaagtagctgggactgaaggtgtgtgccagcatgtgtggctaattttatttttgtaaagacngagtctccttatattgcccaggctggtctcaaactcctgggttcgagatcctcctgcctctgcctcccnaagtgctgggattacaggcatgagccatggtgcctggtctagtctgtcatctttaaacaattgggttgggaaggaaaaggtagcacatagatagatgatttangcagaaatagataagcataattgtccactgtaaaggggctgaatgatctggagaatggaggcatctcaggaaaactgaacttggtggtgtgtgcttaggactaatgaaaagtggccgggcacagatgctcatncctntaatcccagcacttcgggagggtgagagggagtataatttgaggccaggaattcaaggttgcagtgagccatgattgtgccactgttctccagcctgggcagcagagtgagaccccgactcttaaaaaaaaaaaaaaaagaaccaaagaaatgttagttccagggattcccagggacatgggcagggtccaagaatgatgctgagttaaggttaggtggctattcagaaagctacttcgacttgtatcccatattatggatcaaggaccttaaaaatagccatactttttttttgttctagtaactcaatttgtaggattgtttcctaagagataatctgacatattcaaggacttcttcacaaagatattcattagctgcattatttatagtaccaaacattataaatagtctaaaccagagatccacaagctatggctatnacagtgacaaggaggcctagcgtgactaactccattttgctcctaacccccctgcagcgataacctgtatcttttaggttaactgcttttgcttatctctgcacataggccaagctaactatagaaggaatttagtttatagtttagagcaaggatggtaatagtgcctcccccaaaactaacccctgaggagataaggaggatgtatgcaagtaataatgttatgttaaagatttataagagcactgtgacctgaccaaggacaaagtttcaccacctccttggacccttgccaccacccagatgtgatcactggccacttcttgacctcaactccctccctcttcccccttcctctcacgtaaaaggagcctgaaatttgtattgacttaaaaatggttcttcaggacactactcttccattttcttggtttgctggctctctgaataaaagtcactttccttgcctcaaccc

SEQ ID NO: 369016 - DNA, 2614 bp, Homo sapiens
gcggccgcttctcgaagctctccccgagcctcaggcaatgttcctcgcggtccagcagcgggtttgcggtcccattcatggccccgcacctgcctcgcacccagatcggcgctctcccggtgcagccgcgatccgagcttctggcgctggcgtctgggaggactgtgcttccgggccaccgctctggaagacaaggagagccgagccggcacccacccgggtccagaagcaagttctctcctctgcgtgggggtgagagaggaatctgaggaggcaaggccgtgggacttccggcgtcgggtaggaacttccgggttcctagcggaagtggcgggggcggtgccatggcaaaagaactcccggagaatccgaattcgtggtcctcagaattggtttagggttgtttcgcggttcttcccgtattctgcctccgaggcccagtggggctggctgtgggccccctgtgctgtttgaggcgtgaaactcacctcaggaaatgtatctgatccattagcgtggattcatattatttggtgatggagaatcttcagctgtgttaagtgttaccgtcagtttcagagatggcttctttgcaaaggaaagggctgcaggcaaggattctcacctctgaagaagaggagaaactgaaaagagaccaaactttggtgtctgattttaaacagcagaaattggaacaagaggctcagaaaaattgggatcttttttacaaaagaaatagcactaatttcttcaaagacagacactggaccaccagagagtttgaggagctaagatcatgtagagagtttgaagatcaaaagttaacaatgcttgaagctggctgtggggttggaaactgtttattcccacttttagaagaagatccgaatatctttgcctatgcctgtgatttttctccaagagccattgaatatgttaagcaaaatcctttatatgatacagaaagatgcaaggtattccagtgtgatctgactaaagatgatcttctggatcatgtaccgccagagtctgtggatgttgttatgttgatatttgtgctgtcagctgttcatcctgataagatgcaccttgtcttacaaaacatttacaaggtattaaaaccaggcaaaagtgtcttgtttcgtgactacggactgtatgatcatgccatgcttaggtttaaagccagcagcaaacttggagaaaacttttatgttagacaagatgggaccagatcatatttttttactgatgacttcctggctcagctctttatggacacaggttatgaagaagtggtaaacgagtatgtgtttcgagagacggtgaataaaaaagaaggcctgtgtgtgccaagagttttccttcagagcaaatttctaaagcctcctaagaacccatctcctgtggtcctgggcctggatcctaagtcctgacctttcatgaggttggcatttataccttcccttgaagaggaaaatttaaaatcactctttcgtctgggtgcggtggctcatgcctgtaatcccagcacttcgggaggccgaggttgggggatcatctgaggtcaggagtttgagaccagcctggccaacatggtgagaccccatctctactaaaaatacaaaaaaattagctgggcatggtggcgagtgcctgtagtcccagctactcaggaggctgaggcaagagaatcgcttgaacccaagaggcggagactgcagtgagccaagatcatgccattgcactccagcctgggcgacagagtgagaccctgtttcataaataaataaaatcactctttttactttatatattttttgagacaggatcttgtggtacgcaggctggagtgcagtggtgtgtgatcacagctcattgtagcctcgacctcccctgggctcaggcagtcttcctgcctcagcctcctgagtagctaggactacaggtgtaagccaccatgcctggcccttaattttttttaatgagcatgtacagtagtcccgctttatccatggtttcacttaccacaatttcaattacctgttttcaactgcagtcagttacttttcttaagatattttgagggttataggctcatgcctataaccccagcactttgagaggccaaggccagcagatcccttgagcccaggagttcaagaccagtgtgggcaacatggtgaaactctgtctctacagaaaatacaaaaattagccaaatgtggtggcatgtgcctgtagtcccagctggggtgggaggttagcttgagcctggaaggtggaggttgcagtaagtcgagatcacgctactgcactccagcctgggcgacagagcaaaagtctgtctcaaaaaaaacaaaaaaaatttgaaagatcacattcacataacttttattacggtatattgttaaagttgttcttttttttttagagtttggtaccatcttggtttcaggcaaccactgggggtcttgaaacataccacccgcagatacggggggctactatgtactttttgtattaaaaaataggaagtgtatgtgtgtgtgttagagacatgtaaataaaatttcaaggcctgaaaagtagtcaaagttttatagaataacat

SEQ ID NO: 369017 - DNA, 4240 bp, Homo sapiens
  misc_feature (2285)..(2285): n is a, c, g, or t
  misc_feature (2872)..(2872): n is a, c, g, or t
  misc_feature (2933)..(2933): n is a, c, g, or t
  misc_feature (2946)..(2946): n is a, c, g, or t
  misc_feature (3013)..(3013): n is a, c, g, or t
  misc_feature (3082)..(3082): n is a, c, g, or t
  misc_feature (3185)..(3185): n is a, c, g, or t
  misc_feature (3318)..(3318): n is a, c, g, or t
  misc_feature (3322)..(3322): n is a, c, g, or t
  misc_feature (3765)..(3765): n is a, c, g, or t
gcggccgcttctcgaagctctccccgagcctcaggcaatgttcctcgcggtccagcagcgggtttgcggtcccattcatggccccgcacctgcctcgcacccagatcggcgctctcccggtgcagccgcgatccgagcttctggcgctggcgtctgggaggactgtgcttccgggccaccgctctggaagacaaggagagccgagccggcacccacccgggtccagaagcaagttctctcctctgcgtggggccccctgtgctgtttgaggcgtgaaactcacctcaggaaatgtatctgatccattagcgtggattcatattatttggtgatggagaatcttcagctgtgttaagtgttaccgtcagtttcagagatggcttctttgcaaaggaaagggctgcaggcaaggattctcacctctgaagaagaggagaaactgaaaagagaccaaactttggtgtctgattttaaacagcagaaattggaacaagaggctcagaaaaattgggatcttttttacaaaagaaatagcactaatttcttcaaagacagacactggaccaccagagagtttgaggagctaagatcatgtagagagtttgaagatcaaaagttaacaatgcttgaagctggctgtggggttggaaactgtttattcccacttttagaagaagatccgaatatctttgcctatgcctgtgatttttctccaagagccattgaatatgttaagcaaaatcctttatatgatacagaaagatgcaaggtattccagtgtgatctgactaaagatgatcttctggatcatgtaccgccagagtctgtggatgttgttatgttgatatttgtgctgtcagctgttcatcctgataagatgcaccttgtcttacaaaacatttacaagtgccatggctgctcttcagagcttcgccagccctgggacaaggatgattttgcagttacctgggatccatggagtcctgctataaggtattaaaaccaggcaaaagtgtcttgtttcgtgactacggactgtatgatcatgccatgcttaggtttaaagccagcagcaaacttggagaaaacttttatgttagacaagatgggaccagatcatatttttttactgatgacttcctggctcagctctttatggacacaggttatgaagaagtggtaaacgagtatgtgtttcgagagacggtgaataaaaaagaaggcctgtgtgtgccaagagttttccttcagagcaaatttctaaagcctcctaagaacccatctcctgtggtcctgggcctggatcctaagtcctgacctttcatgaggtctcaaacaaaagtctggaacctgggattcttgtaggatatctggctgtgctttgtattatatgaaccacagaaaataatcttccagtatgatattgttttcagtatagtacctcaaccctaatttgcctggtaaccctttatccagagacctttgttttcaacttacagtcttattctggggtgggggatgtacagtctggctgtgtggacttgcaggagagatttagggttctaacttcttcttactgacttccaaccaattctcctgtattcagtcttatacacacccccacttatactagacgtagctggtactaccaaagcctggtcacaaaactctatgggagtctcaatgcaagttgagttgcttcttgactttcatccctgctggcttaagactcagcttcacaagcctgctaagtcagttgctatttatcctgttttctagcccttcaaaattttaaatgaaaatttacatttttaattgacaaataatatatatatgggataaatatgatgttttgatagtaatagatgtatacattgtggaatgattatatgaagctaattagcatatcacactcctcacatacttctttttctttgtattgagaacatgtaaaatctattcttggccaagcatggtggctcacacctgtaattccaacactttgagaggccaaggcaggaagattgcttgagcccaggaattcaggggttccagacaccagcctgggcaacatagcaataccctgtctctaataaaaaaaaaaaaaagtaaaaataaatgtgtaatttaaaaaattcattattgttattatttttacaattttgaaactgtaggggccaggaacaaacttcccctttgccctctgaagaataactaaaaaatcactcaccaaatgcagattaataggagaaatggaataaaaacttagtaattgttttccttgntggatcccttaggtctttatgtagatagggaaaaggtttcttctagcatctgttgattgctaaggacatttaattcaaaatactcattataccagggagccatatctgggggtaaaattccagatgctccttcaaagtatacattattattgactatggtcaccatgtacagtagatctcaaaaacgtattccccctggctaactgaaatgtgtgccctttggtcaacatctcccctactcctctcctcccccagcctctggtaaccaccattctactttctgctgctgtgagttcaactttttaaaattccacgtataagtgaaatcatgtggtatttgtctttctgaatctggcttatttcacttagcataatatcttccaggttcacccatgttgttgcaaatgatagaatgtccttgtttctaatgttctcccaaatttaatcagttgtatggggtttatgtgataaaaatatccttttgctgtcattttcgtggggtttccagaaggatcctaactaggtacacatgcttagtctgtcttttttttttttttttttttgaagcaagtctccctctgttgccnggctggagtgcagtggcctgatcatgactcattgcaacctctgcctcccaggcccaagcantcctcctacctcngcctccaagtagctgggactgaaggtgtgtgccagcatgtgtggctaattttatttttgtaaagacngagtctccttatattgcccaggctggtctcaaactcctgggttcgagatcctcctgcctctgcctcccnaagtgctgggattacaggcatgagccatggtgcctggtctagtctgtcatctttaaacaattgggttgggaaggaaaaggtagcacatagatagatgatttangcagaaatagataagcataattgtccactgtaaaggggctgaatgatctggagaatggaggcatctcaggaaaactgaacttggtggtgtgtgcttaggactaatgaaaagtggccgggcacagatgctcatncctntaatcccagcacttcgggagggtgagagggagtataatttgaggccaggaattcaaggttgcagtgagccatgattgtgccactgttctccagcctgggcagcagagtgagaccccgactcttaaaaaaaaaaaaaaaagaaccaaagaaatgttagttccagggattcccagggacatgggcagggtccaagaatgatgctgagttaaggttaggtggctattcagaaagctacttcgacttgtatcccatattatggatcaaggaccttaaaaatagccatactttttttttgttctagtaactcaatttgtaggattgtttcctaagagataatctgacatattcaaggacttcttcacaaagatattcattagctgcattatttatagtaccaaacattataaatagtctaaaccagagatccacaagctatggctatnacagtgacaaggaggcctagcgtgactaactccattttgctcctaacccccctgcagcgataacctgtatcttttaggttaactgcttttgcttatctctgcacataggccaagctaactatagaaggaatttagtttatagtttagagcaaggatggtaatagtgcctcccccaaaactaacccctgaggagataaggaggatgtatgcaagtaataatgttatgttaaagatttataagagcactgtgacctgaccaaggacaaagtttcaccacctccttggacccttgccaccacccagatgtgatcactggccacttcttgacctcaactccctccctcttcccccttcctctcacgtaaaaggagcctgaaatttgtattgacttaaaaatggttcttcaggacactactcttccattttcttggtttgctggctctctgaataaaagtcactttccttgcctcaaccc

SEQ ID NO: 369018 - DNA, 1473 bp, Homo sapiens
gcggccgcttctcgaagctctccccgagcctcaggcaatgttcctcgcggtccagcagcgggtttgcggtcccattcatggccccgcacctgcctcgcacccagatcggcgctctcccggtgcagccgcgatccgagcttctggcgctggcgtctgggaggactgtgcttccgggccaccgctctggaagacaaggagagccgagccggcacccacccgggtccagaagcaagttctctcctctgcgtgggggtgagagaggaatctgaggaggcaaggccgtgggacttccggcgtcgggtaggaacttccgggttcctagcggaagtggcgggggcggtgccatggcaaaagaactcccggagaatccgaattcgtggtcctcagaattggtttagggttgtttcgcggttcttcccgtattctgcctccgaggcccagtggggctggctgtgggccccctgtgctgtttgaggcgtgaaactcacctcaggaaatgtatctgatccattagcgtggattcatattatttggtgatggagaatcttcagctgtgttaagtgttaccgtcagtttcagagatggcttctttgcaaaggaaagggctgcaggcaaggattctcacctctgaagaagaggagaaactgaaaagagaccaaactttggtgtctgattttaaacagcagaaattggaacaagaggctcagaaaaattgggatcttttttacaaaagaaatagcactaatttcttcaaagacagacactggaccaccagagagtttgaggagctaagatcatgtagagagtttgaagatcaaaagttaacaatgcttgaagctggctgtggggttggaaactgtttattcccacttttagaagaagatccgaatatctttgcctatgcctgtgatttttctccaagagccattgaatatgttaagcaaaatcctttatatgatacagaaagatgcaaggtattccagtgtgatctgactaaagatgatcttctggatcatgtaccgccagagtctgtggatgttgttatgttgatatttgtgctgtcagctgttcatcctgataagatgcaccttgtcttacaaaacatttacaagtgccatggctgctcttcagagcttcgccagccctgggacaaggatgattttgcagttacctgggatccatggagtcctgctataaggctgcttggagaaggcttgcgacatgtgcacgagaccctgaaacaagccctctactgcacaatatttacccagcacctggaaggcacagacctggcccctgcccttgaagagctcacaagccttctctggtgtcagtgactcccctaatgagcttgggttaatggacagcctctgacatgccatgtggattccctactaggaattgtgctggaataagagggagggcaagtcagaaacttcttgtccagttaaaaataaagcaaatttgacagta

SEQ ID NO: 369019 - DNA, 526 bp, Homo sapiens
cgtcgacagaagacgacagaagggagcgtgtttagagtatgacactaggattcagattggtgaaagtttttagtaccaagaaaacagggatgaggctcttggattaaaaggtaacttcattcactgattagctatgacatgagggttcaggcccctaaaataattgtaaaactttttttctgggcccttatgtacccacctaaaaccatctttaaaatgctagtggctgatatgggtgtgggggatgctaaccacagggcctgagaagtcttgctttatgggctcaagaatgccatgcgctggcagtacatgtgcacaaagcagaatctcagagggtctcctgcagccctctgctcctcccggccgctgcacagcaacaccacagaacaagcagcaccccacagtgggtgccttccagaaatatagtccaagctttctctgtggaaaaagacaaaactcattagtagacatgtttccctattgctttcataggcaccagtcagaataaagaatcataattcacaca

SEQ ID NO: 369020 - DNA, 960 bp, Homo sapiens
  misc_feature (74)..(74): n is a, c, g, or t
  misc_feature (80)..(81): n is a, c, g, or t
  misc_feature (92)..(92): n is a, c, g, or t
  misc_feature (105)..(105): n is a, c, g, or t
  misc_feature (107)..(107): n is a, c, g, or t
  misc_feature (113)..(113): n is a, c, g, or t
ggcggagggggcgaccgtaacgcggtatcggtgggagcgcgtatggcaacgacccacgagagccggcatcgacncccttnnggaggggccancaggacttaggcncnctaganctagcggatcccccgggctgcaggaattcggcacgagcgggaacatgcctgagcagaagggtgtcatggcggagcacggtcccacttgcatggtgcttcacccgttggctggaagtccctctaagaccaaacttacgtggctactcagcatcgacctcaaggggtggctgcccaagagcatcatcaaccaggtcctgtcccagacccaggtggattttgccaaccacctgcgcaagcgcctggagtcccaccctgcctctgaagccaggtgttgaagaccagcctgctgttcccaactgtgcccagctgcactggtacacacgctcatcaggagaatccctactggaagcctgcaagtctaagatctccatctggtgacagtgggatgggtggggttcgtgtttagagtatgacactaggattcagattggtgaaagtttttagtaccaagaaaacagggatgaggctcttggattaaaaggtaacttcattcactgattagctatgacatgagggttcaggcccctaaaataattgtaaaactttttttctgggcccttatgtacccacctaaaaccatctttaaaatgctagtggctgatatgggtgtgggggatgctaaccacagggcctgagaagtcttgctttatgggctcaagaatgccatgcgctggcagtacatgtgcacaaagcagaatctcagagggtctcctgcagccctctgctcctcccggccgctgcacagcaacaccacagaacaagcagcaccccacagtgggtgccttccagaaatatagtccaagctttctctgttgggggtcagattaggtatcattattcacccaac

SEQ ID NO: 369021 - DNA, 473 bp, Homo sapiens
  misc_feature (74)..(74): n is a, c, g, or t
  misc_feature (80)..(81): n is a, c, g, or t
  misc_feature (92)..(92): n is a, c, g, or t
  misc_feature (105)..(105): n is a, c, g, or t
  misc_feature (107)..(107): n is a, c, g, or t
  misc_feature (113)..(113): n is a, c, g, or t
ggcggagggggcgaccgtaacgcggtatcggtgggagcgcgtatggcaacgacccacgagagccggcatcgacncccttnnggaggggccancaggacttaggcncnctaganctagcggatcccccgggctgcaggaattcggcacgagcaccatctttaaaatgctagtggctgatatgggtgtgggggatgctaaccacagggcctgagaagtcttgctttatgggctcaagaatgccatgcgctggcagtacatgtgcacaaagcagaatctcagagggtctcctgcagccctctgctcctcccggccgctgcacagcaacaccacagaacaagcagcaccccacagtgggtgccttccagaaatatagtccaagctttctctgtggaaaaagacaaaactcattagtagacatgtttccctattgctttcataggcaccagtcagaataaagaatcataattcacaca

SEQ ID NO: 369022 - DNA, 2720 bp, Homo sapiens
  misc_feature (74)..(74): n is a, c, g, or t
  misc_feature (80)..(81): n is a, c, g, or t
  misc_feature (92)..(92): n is a, c, g, or t
  misc_feature (105)..(105): n is a, c, g, or t
  misc_feature (107)..(107): n is a, c, g, or t
  misc_feature (113)..(113): n is a, c, g, or t
ggcggagggggcgaccgtaacgcggtatcggtgggagcgcgtatggcaacgacccacgagagccggcatcgacncccttnnggaggggccancaggacttaggcncnctaganctagcggatcccccgggctgcaggaattcggcacgagctcagaggcgaagcttgaggggctcaggaaggacgaagaaccacccttgagagaagaggcagcagcagcggcggcagcagcagcggcagcgaccccaccactgccacatttgccaggaaacaatgctgctagcgacattcaagctgtgcgctgggagctcctacagacacatgcgcaacatgaaggggctgaggcaacaggctgtgatggccatcagccaggagctgaaccggagggccctggggggccccacccctagcacgtggattaaccaggttcggcggcggagctctctactcggttctcggctggaagagactctctacagtgaccaggagctggcctatctccagcagggggaggaggccatgcagaaggccttgggcatccttagcaaccaagagggctggaagaaggagagtcagcaggacaatggggacaaagtgatgagtaaagtggtcccagatgtgggcaaggtgttccggctggaggtcgtggtggaccagcccatggagaggctctatgaagagctcgtggagcgcatggaagcaatgggggagtggaaccccaatgtcaaggagatcaaggtcctgcagaagatcggaaaagatacattcattactcacgagctggctgccgaggcagcaggaaacctggtggggccccgtgactttgtgagcgtgcgctgtgccaagcgccgaggctccacctgtgtgctggctggcatggccacagacttcgggaacatgcctgagcagaagggtgtcatcagggcggagcacggtcccacttgcatggtgcttcacccgttggctggaagtccctctaagaccaaacttacgtggctactcagcatcgacctcaaggggtggctgcccaagagcatcatcaaccaggtcctgtcccagacccaggtggattttgccaaccacctgcgcaagcgcctggagtcccaccctgcctctgaagccaggtgttgaagaccagcctgctgttcccaactgtgcccagctgcactggtacacacgctcatcaggagaatccctactggaagcctgcaagtctaagatctccatctggtgacagtgggatgggtggggttcgtgtttagagtatgacactaggattcagattggtgaaagtttttagtaccaagaaaacagggatgaggctcttggattaaaaggtaacttcattcactgattagctatgacatgagggttcaggcccctaaaataattgtaaaactttttttctgggcccttatgtacccacctaaaaccatctttaaaatgctagtggctgatatgggtgtgggggatgctaaccacagggcctgagaagtcttgctttatgggctcaagaatgccatgcgctggcagtacatgtgcacaaagcagaatctcagagggtctcctgcagccctctgctcctcccggccgctgcacagcaacaccacagaacaagcagcaccccacagtgggtgccttccagaaatatagtccaagctttctctgtggaaaaagacaaaactcattagtagacatgtttccctattgctttcataggcaccagtcagaataaagaatcataattcacacaaaacatcagtctttgttttaatattgtactgttaaaaaaatctatgcagctgggtgcagtggctcacgcctgtaatcccagcattttgggaggctgaggtaggcggatcacaaggtcaggagatcgagaccatcctggccaacatggtgaaaccccgtctctactaaaatacaaaaaattagctgggtgtggtggcgcaaacctgtagtcgtagctacttgggaggctgaggcaggggaatcacttgaaccccggaggcggaggttgtagtgggccgagattgtgccactgcgctccagcgtgggcgacagagtgagactccatctcaaaaaaaaaaaaaaaaaatctatgctagtagattacaacttcacactagaggagttctggacaaagcttttaattagtcaaactaaattaaggctcattaaaaggaaaggaactactgggaaattatgcaattcaataatttagactctgttaccaggatctttcataaaaatttaatttccataatcataacctaaatgagttcttaaagaattctataagcaatagctgattaatgggccctggaagatgaagattataactgtttatttacctaattaaaaggaaaggcagtgccaaatatgagaggataaacaatattagttaacatttctgttatttatgatgccaattagtagtaagataattccacagctgtcaactttgtttggggctggcaacttctctgcttaaacaggctaaaagtttagtattctgggagaagtggctggaagaaggggtaatatggtgaaagcaaattccctttcccaggagtcaagagaatttatgtgaggtggcttcccgcctgtaatctcagcactttgggagggccaggcaggcaatcacctgaggccaggagaccagcctgactaacatggagaaaccccatctctactaaaaatacaaaatgagctgggcgt

SEQ ID NO: 369023 - DNA, 2776 bp, Homo sapiens
  misc_feature (74)..(74): n is a, c, g, or t
  misc_feature (80)..(81): n is a, c, g, or t
  misc_feature (92)..(92): n is a, c, g, or t
  misc_feature (105)..(105): n is a, c, g, or t
  misc_feature (107)..(107): n is a, c, g, or t
  misc_feature (113)..(113): n is a, c, g, or t
  misc_feature (2610)..(2611): n is a, c, g, or t
ggcggagggggcgaccgtaacgcggtatcggtgggagcgcgtatggcaacgacccacgagagccggcatcgacncccttnnggaggggccancaggacttaggcncnctaganctagcggatcccccgggctgcaggaattcggcacgagctcagaggcgaagcttgaggggctcaggaaggacgaagaaccacccttgagagaagaggcagcagcagcggcggcagcagcagcggcagcgaccccaccactgccacatttgccaggaaacaatgctgctagcgacattcaagctgtgcgctgggagctcctacagacacatgcgcaacatgaaggggctgaggcaacaggctgtgatggccatcagccaggagctgaaccggagggccctggggggccccacccctagcacgtggattaaccaggttcggcggcggagctctctactcggttctcggctggaagagactctctacagtgaccaggagctggcctatctccagcagggggaggaggccatgcagaaggccttgggcatccttagcaaccaagagggctggaagaaggagagtcagcaggacaatggggacaaagtgatgagtaaagtggtcccagatgtgggcaaggtgttccggctggaggtcgtggtggaccagcccatggagaggctctatgaagagctcgtggagcgcatggaagcaatgggggagtggaaccccaatgtcaaggagatcaaggtcctgcagaagatcggaaaagatacattcattactcacgagctggctgccgaggcagcaggaaacctggtggggccccgtgactttgtgagcgtgcgctgtgccaagcgccgaggctccacctgtgtgctggctggcatggccacagacttcgggaacatgcctgagcagaagggtgtcatcagggcggagcacggtcccacttgcatggtgcttcacccgttggctggaagtccctctaagaccaaacttacgtggctactcagcatcgacctcaaggggtggctgcccaagagcatcatcaaccaggtcctgtcccagacccaggtggattttgccaaccacctgcgcaagcgcctggagtcccaccctgcctctgaagccaggtgttgaagaccagcctgctgttcccaactgtgcccagctgcactggtacacacgctcatcaggagaatccctactggaagcctgcaagtctaagatctccatctggtgacagtgggatgggtggggttcgtgtttagagtatgacactaggattcagattggtgaaagtttttagtaccaagaaaacagggatgaggctcttggattaaaaggtaacttcattcactgattagctatgacatgagggttcaggcccctaaaataattgtaaaactttttttctgggcccttatgtacccacctaaaaccatctttaaaatgctagtggctgatatgggtgtgggggatgctaaccacagggcctgagaagtcttgctttatgggctcaagaatgccatgcgctggcagtacatgtgcacaaagcagaatctcagagggtctcctgcagccctctgctcctcccggccgctgcacagcaacaccacagaacaagcagcaccccacagtgggtgccttccagaaatatagtccaagctttctctgtggaaaaagacaaaactcattagtagacatgtttccctattgctttcataggcaccagtcagaataaagaatcataattcacacaaaacatcagtctttgttttaatattgtactgttaaaaaaatctatgcagctgggtgcagtggctcacgcctgtaatcccagcattttgggaggctgaggtaggcggatcacaaggtcaggagatcgagaccatcctggccaacatggtgaaaccccgtctctactaaaatacaaaaaattagctgggtgtggtggcgcaaacctgtagtcgtagctacttgggaggctgaggcaggggaatcacttgaaccccggaggcggaggttgtagtgggccgagattgtgccactgcgctccagcgtgggcgacagagtgagactccatctcaaaaaaaaaaaaaaaaaatctatgctagtagattacaacttcacactagaggagttctggacaaagcttttaattagtcaaactaaattaaggctcattaaaaggaaaggaactactgggaaattatgcaattcaataatttagactctgttaccaggatctttcataaaaatttaatttccataatcataacctaaatgagttcttaaagaattctataagcaatagctgattaatgggccctggaagatgaagattataactgtttatttacctaattaaaaggaaaggcagtgccaaatatgagaggataaacaatattagttaacatttctgttatttatgatgccaattagtagtaagataattccacagctgtcaactttgtttggggctggcaacttctctgcttaaacaggctaaaagtttagtattctgggagaagtggctggaagaaggggtaatatggtgaaagcaaattccctttcccaggagtcaagagaatttatgtgaggtgtaaaagtttagtanntgggagaagtggctggaagaaggggtaatatggtgaaagcaaattccctttccaggagtcaagagattagtggctccgctgtatctcagcacttggagcagcagcatcgactagcgagcagctgactactgagagccatcttctaatcatgctgctgtgtctctt

SEQ ID NO: 369024 - DNA, 1842 bp, Homo sapiens
  misc_feature (74)..(74): n is a, c, g, or t
  misc_feature (80)..(81): n is a, c, g, or t
  misc_feature (92)..(92): n is a, c, g, or t
  misc_feature (105)..(105): n is a, c, g, or t
  misc_feature (107)..(107): n is a, c, g, or t
  misc_feature (113)..(113): n is a, c, g, or t
ggcggagggggcgaccgtaacgcggtatcggtgggagcgcgtatggcaacgacccacgagagccggcatcgacncccttnnggaggggccancaggacttaggcncnctaganctagcggatcccccgggctgcaggaattcggcacgagctcagaggcgaagcttgaggggctcaggaaggacgaagaaccacccttgagagaagaggcagcagcagcggcggcagcagcagcggcagcgaccccaccactgccacatttgccaggaaacaatgctgctagcgacattcaagctgtgcgctgggagctcctacagacacatgcgcaacatgaaggggctgaggcaacaggctgtgatggccatcagccaggagctgaaccggagggccctggggggccccacccctagcacgtggattaaccaggttcggcggcggagctctctactcggttctcggctggaagagactctctacagtgaccaggagctggcctatctccagcagggggaggaggccatgcagaaggccttgggcatccttagcaaccaagagggctggaagaaggagagtcagcaggacaatggggacaaagtgatgagtaaagtggtcccagatgtgggcaaggtgttccggctggaggtcgtggtggaccagcccatggagaggctctatgaagagctcgtggagcgcatggaagcaatgggggagtggaaccccaatgtcaaggagatcaaggtcctgcagaagatcggaaaagatacattcattactcacgagctggctgccgaggcagcaggaaacctggtggggccccgtgactttgtgagcgtgcgctgtgccaagcgccgaggctccacctgtgtgctggctggcatggccacagacttcgggaacatgcctgagcagaagggtgtcatcagggcggagcacggtcccacttgcatggtgcttcacccgttggctggaagtccctctaagaccaaacttacgtggctactcagcatcgacctcaaggggtggctgcccaagagcatcatcaaccaggtcctgtcccagacccaggtggattttgccaaccacctgcgcaagcgcctggagtcccaccctgcctctgaagccaggtgttgaagaccagcctgctgttcccaactgtgcccagctgcactggtacacacgctcatcaggagaatccctactggaagcctgcaagtctaagatctccatctggtgacagtgggatgggtggggttcgtgtttagagtatgacactaggattcagattggtgaaagtttttagtaccaagaaaacagggatgaggctcttggattaaaaggtaacttcattcactgattagctatgacatgagggttcaggcccctaaaataattgtaaaactttttttctgggcccttatgtacccacctaaaaccatctttaaaatgctagtggctgatatgggtgtgggggatgctaaccacagggcctgagaagtcttgctttatgggctcaagaatgccatgcgctggcagtacatgtgcacaaagcagaatctcagagggtctcctgcagccctctgctcctcccggccgctgcacagcaacaccacagaacaagcagcaccccacagtgggtgccttccagaaatatagtccaagctttctctgtggaaaaagacaaaactcattagtagacatgtttccctattgctttcataggcaccagtcagaataaagaatcataattcacacaaaaaaaaactcgagggggggccggtaccccatttggcctatagtgagtcgattaccaattaatggccgtggtttacaactcgtgactggg

SEQ ID NO: 369025 - DNA, 1705 bp, Homo sapiens
  misc_feature (74)..(74): n is a, c, g, or t
  misc_feature (80)..(81): n is a, c, g, or t
  misc_feature (92)..(92): n is a, c, g, or t
  misc_feature (105)..(105): n is a, c, g, or t
  misc_feature (107)..(107): n is a, c, g, or t
  misc_feature (113)..(113): n is a, c, g, or t
ggcggagggggcgaccgtaacgcggtatcggtgggagcgcgtatggcaacgacccacgagagccggcatcgacncccttnnggaggggccancaggacttaggcncnctaganctagcggatcccccgggctgcaggaattcggcacgagctcagaggcgaagcttgaggggctcaggaaggacgaagaaccacccttgagagaagaggcagcagcagcggcggcagcagcagcggcagcgaccccaccactgccacatttgccaggaaacaatgctgctagcgacattcaagctgtgcgctgggagctcctacagacacatgcgcaacatgaaggggctgaggcaacaggctgtgatggccatcagccaggagctgaaccggagggccctggggggccccacccctagcacgtggattaaccaggttcggcggcggagctctctactcggttctcggctggaagagactctctacagtgaccaggagctggcctatctccagcagggggaggaggccatgcagaaggccttgggcatccttagcaaccaagagggctggaagaaggagagtcagcaggacaatggggacaaagtgatgagtaaagtggtcccagatgtgggcaaggtgttccggctggaggtcgtggtggaccagcccatggagaggctctatgaagagctcgtggagcgcatggaagcaatgggggagtggaaccccaatgtcaaggagatcaaggtcctgcagaagatcggaaaagatacattcattactcacgagctggctgccgaggcagcaggaaacctggtggggccccgtgactttgtgagcgtgcgctgtgccaagcgccgaggctccacctgtgtgctggctggcatggccacagacttcgggaacatgcctgagcagaagggtgtcatcagggcggagcacggtcccacttgcatggtgcttcacccgttggctggaagtccctctaagaccaaacttacgtggctactcagcatcgacctcaaggggtggctgcccaagagcatcatcaaccaggtcctgtcccagacccaggtggattttgccaaccacctgcgcaagcgcctggagtcccaccctgcctctgaagccaggtgttgaagaccagcctgctgttcccaactgtgcccagctgcactggtacacacgctcatcaggagaatccctactggaagcctgcaagtctaagatctccatctggtgacagtgggatgggtggggtttaccaagaaaacagggatgaggctcttggattaaaaggtaacttcattcactgattagctatgacatgagggttcaggcccctaaaataattgtaaaactttttttctgggcccttatgtacccacctaaaaccatctttaaaatgctagtggctgatatgggtgtgggggatgctaaccacagggcctgagaagtcttgctttatgggctcaagaatgccatgcgctggcagtacatgtgcacaaagcagaatctcagagggtctcctgcagccctctgctcctcccggccgctgcacagcaacaccacagaacaagcagcaccccacagtgggtgccttccagaaatatagtccaagctttctctgtggaaaaagacaaaactcattagtagacatgtttccctattgctttcataggcaccagtcagaataaagaatcataattcacaca

SEQ ID NO: 369026 - DNA, 1692 bp, Homo sapiens
  misc_feature (74)..(74): n is a, c, g, or t
  misc_feature (80)..(81): n is a, c, g, or t
  misc_feature (92)..(92): n is a, c, g, or t
  misc_feature (105)..(105): n is a, c, g, or t
  misc_feature (107)..(107): n is a, c, g, or t
  misc_feature (113)..(113): n is a, c, g, or t
ggcggagggggcgaccgtaacgcggtatcggtgggagcgcgtatggcaacgacccacgagagccggcatcgacncccttnnggaggggccancaggacttaggcncnctaganctagcggatcccccgggctgcaggaattcggcacgagctcagaggcgaagcttgaggggctcaggaaggacgaagaaccacccttgagagaagaggcagcagcagcggcggcagcagcagcggcagcgaccccaccactgccacatttgccaggaaacaatgctgctagcgacattcaagctgtgcgctgggagctcctacagacacatgcgcaacatgaaggggctgaggcaacaggctgtgatggccatcagccaggagctgaaccggagggccctggggggccccacccctagcacgtggattaaccaggttcggcggcggagctctctactcggttctcggctggaagagactctctacagtgaccaggagctggcctatctccagcagggggaggaggccatgcagaaggccttgggcatccttagcaaccaagagggctggaagaaggagagtcagcaggacaatggggacaaagtgatgagtaaagtggtcccagatgtgggcaaggtgttccggctggaggtcgtggtggaccagcccatggagaggctctatgaagagctcgtggagcgcatggaagcaatgggggagtggaaccccaatgtcaaggagatcaaggtcctgcagaagatcggaaaagatacattcattactcacgagctggctgccgaggcagcaggaaacctggtggggccccgtgactttgtgagcgtgcgctgtgccaagcgccgaggctccacctgtgtgctggctggcatggccacagacttcgggaacatgcctgagcagaagggtgtcatcagggcggagcacggtcccacttgcatggtgcttcacccgttggctggaagtccctctaagaccaaacttacgtggctactcagcatcgacctcaaggggtggctgcccaagagcatcatcaaccaggtcctgtcccagacccaggtggattttgccaaccacctgcgcaagcgcctggagtcccaccctgcctctgaagccaggtgttgaagaccagcctgctgttcccaactgtgcccagctgcactggtacacacgctcatcaggagaatccctactggaagcctgcaagtctaagatctccatctggtgacagtgggatgggtggggttcgtgtttagagtatgacactaggattcagattggtgaaagtttttagtaccaagaaaacagggatgaggctcttggattaaaaggtaacttcattcactgattagctatgacatgagggttcaggcccctaaaataattgtaaaactttttttctgggcccttatgtacccacctaaagaagtcttgctttatgggctcaagaatgccatgcgctggcagtacatgtgcacaaagcagaatctcagagggtctcctgcagccctctgctcctcccggccgctgcacagcaacaccacagaacaagcagcaccccacagtgggtgccttccagaaatatagtccaagctttctctgtggaaaaagacaaaactcattagtagacatgtttccctattgctttcataggcaccagtcagaataaagaatcataattcacaca

SEQ ID NO: 369027 - DNA, 1744 bp, Homo sapiens
  misc_feature (74)..(74): n is a, c, g, or t
  misc_feature (80)..(81): n is a, c, g, or t
  misc_feature (92)..(92): n is a, c, g, or t
  misc_feature (105)..(105): n is a, c, g, or t
  misc_feature (107)..(107): n is a, c, g, or t
  misc_feature (113)..(113): n is a, c, g, or t
ggcggagggggcgaccgtaacgcggtatcggtgggagcgcgtatggcaacgacccacgagagccggcatcgacncccttnnggaggggccancaggacttaggcncnctaganctagcggatcccccgggctgcaggaattcggcacgagctcagaggcgaagcttgaggggctcaggaaggacgaagaaccacccttgagagaagaggcagcagcagcggcggcagcagcagcggcagcgaccccaccactgccacatttgccaggaaacaatgctgctagcgacattcaagctgtgcgctgggagctcctacagacacatgcgcaacatgaaggggctgaggcaacaggctgtgatggccatcagccaggagctgaaccggagggccctggggggccccacccctagcacgtggattaaccaggttcggcggcggagctctctactcggttctcggctggaagagactctctacagtgaccaggagctggcctatctccagcagggggaggaggccatgcagaaggccttgggcatccttagcaaccaagagggctggaagaaggagagtcagcaggacaatggggacaaagtgatgagtaaagtggtcccagatgtgggcaaggtgttccggctggaggtcgtggtggaccagcccatggagaggctctatgaagagctcgtggagcgcatggaagcaatgggggagtggaaccccaatgtcaaggagatcaaggtcctgcagaagatcggaaaagatacattcattactcacgagctggctgccgaggcagcaggaaacctggtggggccccgtgactttgtgagcgtgcgctgtgccaagcgccgaggctccacctgtgtgctggctggcatggccacagacttcgggaacatgcctgagcagaagggtgtcatcagggcggagcacggtcccacttgcatggtgcttcacccgttggctggaagtccctctaagaccaaacttacgtggctactcagcatcgacctcaaggggtggctgcccaagagcatcatcaaccaggtcctgtcccagacccaggtggattttgccaaccacctgcgcaagcgcctggagtcccaccctgcctctgaagccaggtgttgaagaccagcctgctgttcccaactgtgcccagctgcactggtacacacgctcatcaggagaatccctactggaagcctgcaagtctaagatctccatctggtgacagtgggatgggtggggttcgtgtttagagtatgacactaggattcagattggtgaaagtttttagtaccaagaaaacagggatgaggctcttggattaaaaggtaacttcattcactgattagctatgacatgagggttcaggcccctaaaataattgtaaaactttttttctgggcccttatgtacccacctaaaaccatctttaaaatgctagtggctgatatgggtgtgggggatgctaaccacagggcctgagaagtcttgctttatgggctcaagaatgccatgcgctggcagtacatgtgcacaaagcagaatctcagagggtctcctgcagccctctgctcctcccggccgctgcacagcaacaccacagaacaagcagcaccccacagtgggtgccttccagaaatatagtccaagctttctctgtcacaataacggtcataatttacacgtgtttgactaaatttgcatgtataaacctttgtcggacgctcgtgccctcc

SEQ ID NO: 369028 - DNA, 1613 bp, Homo sapiens
  misc_feature (74)..(74): n is a, c, g, or t
  misc_feature (80)..(81): n is a, c, g, or t
  misc_feature (92)..(92): n is a, c, g, or t
  misc_feature (105)..(105): n is a, c, g, or t
  misc_feature (107)..(107): n is a, c, g, or t
  misc_feature (113)..(113): n is a, c, g, or t
ggcggagggggcgaccgtaacgcggtatcggtgggagcgcgtatggcaacgacccacgagagccggcatcgacncccttnnggaggggccancaggacttaggcncnctaganctagcggatcccccgggctgcaggaattcggcacgagctcagaggcgaagcttgaggggctcaggaaggacgaagaaccacccttgagagaagaggcagcagcagcggcggcagcagcagcggcagcgaccccaccactgccacatttgccaggaaacaatgctgctagcgacattcaagctgtgcgctgggagctcctacagacacatgcgcaacatgaaggggctgaggcaacaggctgtgatggccatcagccaggagctgaaccggagggccctggggggccccacccctagcacgtggattaaccaggttcggcggcggagctctctactcggttctcggctggaagagactctctacagtgaccaggagctggcctatctccagcagggggaggaggccatgcagaaggccttgggcatccttagcaaccaagagggctggaagaaggagagtcagcaggacaatggggacaaagtgatgagtaaagtggtcccagatgtgggcaaggtgttccggctggaggtcgtggtggaccagcccatggagaggctctatgaagagctcgtggagcgcatggaagcaatgggggagtggaaccccaatgtcaaggagatcaaggtcctgcagaagatcggaaaagatacattcattactcacgagctggctgccgaggcagcaggaaacctggtggggccccgtgactttgtgagcgtgcgctgtgccaagcgccgaggctccacctgtgtgctggctggcatggccacagacttcgggaacatgcctgagcagaagggtgtcatcagggcggagcacggtcccacttgcatggtgcttcacccgttggctggaagtccctctaagaccaaacttacgtggctactcagcatcgacctcaaggggtggctgcccaagagcatcatcaaccaggtcctgtcccagacccaggtggattttgccaaccacctgcgcaagcgcctggagtcccaccctgcctctgaagccaggtgttgaagaccagcctgctgttcccaactgtgcccagctgcactggtacacacgctcatcaggagaatccctactggaagcctgcaagtctaagatctccatctggtgacagtgggatgggtggggttcgtgtttagagtatgacactaggattcagattggtgaaagtttttagtaccaagaaaacagggatgaggctcttggattaaaaggtaacttcattcactgattagctatgacatgagggttcaggcccctaaaataattgtaaaactttttttctgggcccttatgtacccacctaaacagccctctgctcctcccggccgctgcacagcaacaccacagaacaagcagcaccccacagtgggtgccttccagaaatatagtccaagctttctctgtggaaaaagacaaaactcattagtagacatgtttccctattgctttcataggcaccagtcagaataaagaatcataattcacaca

SEQ ID NO: 369029 - DNA, 1606 bp, Homo sapiens
gacctgtttacgtccgacagaacgaggggacgtaacggaggcaggttggagccgctgccgtcgccatgacccgcggtaaccagcgtgagctcgcccgccagaagaatatgaagttgccaggaaacaatgctgctagcgacattcaagctgtgcgctgggagctcctacagacacatgcgcaacatgaaggggctgaggcaacaggctgtgatggccatcagccaggagctgaaccggagggccctggggggccccacccctagcacgtggattaaccaggttcggcggcggagctctctactcggttctcggctggaagagactctctacagtgaccaggagctggcctatctccagcagggggaggaggccatgcagaaggccttgggcatccttagcaaccaagagggctggaagaaggagagtcagcaggacaatggggacaaagtgatgagtaaagtggtcccagatgtgggcaaggtgttccggctggaggtcgtggtggaccagcccatggagaggctctatgaagagctcgtggagcgcatggaagcaatgggggagtggaaccccaatgtcaaggagatcaaggtcctgcagaagatcggaaaagatacattcattactcacgagctggctgccgaggcagcaggaaacctggtggggccccgtgactttgtgagcgtgcgctgtgccaagcgccgaggctccacctgtgtgctggctggcatggccacagacttcgggaacatgcctgagcagaagggtgtcatcagggcggagcacggtcccacttgcatggtgcttcacccgttggctggaagtccctctaagaccaaacttacgtggctactcagcatcgacctcaaggggtggctgcccaagagcatcatcaaccaggtcctgtcccagacccaggtggattttgccaaccacctgcgcaagcgcctggagtcccaccctgcctctgaagccaggtgttgaagaccagcctgctgttcccaactgtgcccagctgcactggtacacacgctcatcaggagaatccctactggaagcctgcaagtctaagatctccatctggtgacagtgggatgggtggggttcgtgtttagagtatgacactaggattcagattggtgaaagtttttagtaccaagaaaacagggatgaggctcttggattaaaaggtaacttcattcactgattagctatgacatgagggttcaggcccctaaaataattgtaaaactttttttctgggcccttatgtacccacctaaaaccatctttaaaatgctagtggctgatatgggtgtgggggatgctaaccacagggcctgagaagtcttgctttatgggctcaagaatgccatgcgctggcagtacatgtgcacaaagcagaatctcagagggtctcctgcagccctctgctcctcccggccgctgcacagcaacaccacagaacaagcagcaccccacagtgggtgccttccagaaatatagtccaagctttctctgtggaaaaagacaaaactcattagtagacatgtttccctattgctttcataggcaccagtcagaataaagaatcataattcacaca

SEQ ID NO: 369030 - DNA, 1695 bp, Homo sapiens
  misc_feature (74)..(74): n is a, c, g, or t
  misc_feature (80)..(81): n is a, c, g, or t
  misc_feature (92)..(92): n is a, c, g, or t
  misc_feature (105)..(105): n is a, c, g, or t
  misc_feature (107)..(107): n is a, c, g, or t
  misc_feature (113)..(113): n is a, c, g, or t
ggcggagggggcgaccgtaacgcggtatcggtgggagcgcgtatggcaacgacccacgagagccggcatcgacncccttnnggaggggccancaggacttaggcncnctaganctagcggatcccccgggctgcaggaattcggcacgagctcagaggcgaagcttgaggggctcaggaaggacgaagaaccacccttgagagaagaggcagcagcagcggcggcagcagcagcggcagcgaccccaccactgccacatttgccaggaaacaatgctgctagcgacattcaagctgtgcgctgggagctcctacagacacatgcgcaacatgaaggggctgaggcaacaggctgtgatggccatcagccaggagctgaaccggagggccctggggggccccacccctagcacgtggattaaccaggttcggcggcggagctctctactcggttctcggctggaagagactctctacagtgaccaggagctggcctatctccagcagggggaggaggccatgcagaaggccttgggcatccttagcaaccaagagggctggaagaaggagagtcagcaggacaatggggacaaagtgatgagtaaagtggtcccagatgtgggcaaggtgttccggctggaggtcgtggtggaccagcccatggagaggctctatgaagagctcgtggagcgcatggaagcaatgggggagtggaaccccaatgtcaaggagatcaaggcaggaaacctggtggggccccgtgactttgtgagcgtgcgctgtgccaagcgccgaggctccacctgtgtgctggctggcatggccacagacttcgggaacatgcctgagcagaagggtgtcatcagggcggagcacggtcccacttgcatggtgcttcacccgttggctggaagtccctctaagaccaaacttacgtggctactcagcatcgacctcaaggggtggctgcccaagagcatcatcaaccaggtcctgtcccagacccaggtggattttgccaaccacctgcgcaagcgcctggagtcccaccctgcctctgaagccaggtgttgaagaccagcctgctgttcccaactgtgcccagctgcactggtacacacgctcatcaggagaatccctactggaagcctgcaagtctaagatctccatctggtgacagtgggatgggtggggttcgtgtttagagtatgacactaggattcagattggtgaaagtttttagtaccaagaaaacagggatgaggctcttggattaaaaggtaacttcattcactgattagctatgacatgagggttcaggcccctaaaataattgtaaaactttttttctgggcccttatgtacccacctaaaaccatctttaaaatgctagtggctgatatgggtgtgggggatgctaaccacagggcctgagaagtcttgctttatgggctcaagaatgccatgcgctggcagtacatgtgcacaaagcagaatctcagagggtctcctgcagccctctgctcctcccggccgctgcacagcaacaccacagaacaagcagcaccccacagtgggtgccttccagaaatatagtccaagctttctctgtggaaaaagacaaaactcattagtagacatgtttccctattgctttcataggcaccagtcagaataaagaatcataattcacaca

SEQ ID NO: 369031 - DNA, 1705 bp, Homo sapiens
  misc_feature (74)..(74): n is a, c, g, or t
  misc_feature (80)..(81): n is a, c, g, or t
  misc_feature (92)..(92): n is a, c, g, or t
  misc_feature (105)..(105): n is a, c, g, or t
  misc_feature (107)..(107): n is a, c, g, or t
  misc_feature (113)..(113): n is a, c, g, or t
ggcggagggggcgaccgtaacgcggtatcggtgggagcgcgtatggcaacgacccacgagagccggcatcgacncccttnnggaggggccancaggacttaggcncnctaganctagcggatcccccgggctgcaggaattcggcacgagctcagaggcgaagcttgaggggctcaggaaggacgaagaaccacccttgagagaagaggcagcagcagcggcggcagcagcagcggcagcgaccccaccactgccacatttgccaggaaacaatgctgctagcgacattcaagctgtgcgctgggagctcctacagacacatgcgcaacatgaaggggctgaggcaacaggctgtgatggccatcagccaggagctgaaccggagggccctggggggccccacccctagcacgtggattaaccaggttcggcggcggagctctctactcggttctcggctggaagagactctctacagtgaccttgggcatccttagcaaccaagagggctggaagaaggagagtcagcaggacaatggggacaaagtgatgagtaaagtggtcccagatgtgggcaaggtgttccggctggaggtcgtggtggaccagcccatggagaggctctatgaagagctcgtggagcgcatggaagcaatgggggagtggaaccccaatgtcaaggagatcaaggtcctgcagaagatcggaaaagatacattcattactcacgagctggctgccgaggcagcaggaaacctggtggggccccgtgactttgtgagcgtgcgctgtgccaagcgccgaggctccacctgtgtgctggctggcatggccacagacttcgggaacatgcctgagcagaagggtgtcatcagggcggagcacggtcccacttgcatggtgcttcacccgttggctggaagtccctctaagaccaaacttacgtggctactcagcatcgacctcaaggggtggctgcccaagagcatcatcaaccaggtcctgtcccagacccaggtggattttgccaaccacctgcgcaagcgcctggagtcccaccctgcctctgaagccaggtgttgaagaccagcctgctgttcccaactgtgcccagctgcactggtacacacgctcatcaggagaatccctactggaagcctgcaagtctaagatctccatctggtgacagtgggatgggtggggttcgtgtttagagtatgacactaggattcagattggtgaaagtttttagtaccaagaaaacagggatgaggctcttggattaaaaggtaacttcattcactgattagctatgacatgagggttcaggcccctaaaataattgtaaaactttttttctgggcccttatgtacccacctaaaaccatctttaaaatgctagtggctgatatgggtgtgggggatgctaaccacagggcctgagaagtcttgctttatgggctcaagaatgccatgcgctggcagtacatgtgcacaaagcagaatctcagagggtctcctgcagccctctgctcctcccggccgctgcacagcaacaccacagaacaagcagcaccccacagtgggtgccttccagaaatatagtccaagctttctctgtggaaaaagacaaaactcattagtagacatgtttccctattgctttcataggcaccagtcagaataaagaatcataattcacaca

SEQ ID NO: 369032 - DNA, 1696 bp, Homo sapiens
  misc_feature (74)..(74): n is a, c, g, or t
  misc_feature (80)..(81): n is a, c, g, or t
  misc_feature (92)..(92): n is a, c, g, or t
  misc_feature (105)..(105): n is a, c, g, or t
  misc_feature (107)..(107): n is a, c, g, or t
  misc_feature (113)..(113): n is a, c, g, or t
ggcggagggggcgaccgtaacgcggtatcggtgggagcgcgtatggcaacgacccacgagagccggcatcgacncccttnnggaggggccancaggacttaggcncnctaganctagcggatcccccgggctgcaggaattcggcacgagctcagaggcgaagcttgaggggctcaggaaggacgaagaaccacccttgagagaagaggcagcagcagcggcggcagcagcagcggcagcgaccccaccactgccacatttgccaggaaacaatgctgctagcgacattcaagctgtgcgctgggagctcctacagacacatgcgcaacatgaaggggctgaggcaacaggctgtgatggccatcagccaggagctgaaccggagggccctggggggccccacccctagcacgtggattaaccaggttcggcggcggagctctctactcggttctcggctggaagagactctctacagtgaccaggagctggcctatctccagcagggggaggaggccatgcagaaggccttgggcatccttagcaaccaagagggctggaagaaggagagtcagcaggacaatggggacaaagtgatgagtaaagtggtcccagatgtgggcaaggtgttccggctggaggtcgtggtggaccagcccatggagaggctctatgaagagctcgtggagcgcatggaagcaatgggggagtggaaccccaatgtcaaggagatcaaggtcctgcagaagatcggaaaagatacattcattactcacgagctggctgccgaggcaaggctccacctgtgtgctggctggcatggccacagacttcgggaacatgcctgagcagaagggtgtcatcagggcggagcacggtcccacttgcatggtgcttcacccgttggctggaagtccctctaagaccaaacttacgtggctactcagcatcgacctcaaggggtggctgcccaagagcatcatcaaccaggtcctgtcccagacccaggtggattttgccaaccacctgcgcaagcgcctggagtcccaccctgcctctgaagccaggtgttgaagaccagcctgctgttcccaactgtgcccagctgcactggtacacacgctcatcaggagaatccctactggaagcctgcaagtctaagatctccatctggtgacagtgggatgggtggggttcgtgtttagagtatgacactaggattcagattggtgaaagtttttagtaccaagaaaacagggatgaggctcttggattaaaaggtaacttcattcactgattagctatgacatgagggttcaggcccctaaaataattgtaaaactttttttctgggcccttatgtacccacctaaaaccatctttaaaatgctagtggctgatatgggtgtgggggatgctaaccacagggcctgagaagtcttgctttatgggctcaagaatgccatgcgctggcagtacatgtgcacaaagcagaatctcagagggtctcctgcagccctctgctcctcccggccgctgcacagcaacaccacagaacaagcagcaccccacagtgggtgccttccagaaatatagtccaagctttctctgtggaaaaagacaaaactcattagtagacatgtttccctattgctttcataggcaccagtcagaataaagaatcataattcacaca

SEQ ID NO: 369033 - DNA, 1236 bp, Homo sapiens
  misc_feature (74)..(74): n is a, c, g, or t
  misc_feature (80)..(81): n is a, c, g, or t
  misc_feature (92)..(92): n is a, c, g, or t
  misc_feature (105)..(105): n is a, c, g, or t
  misc_feature (107)..(107): n is a, c, g, or t
  misc_feature (113)..(113): n is a, c, g, or t
ggcggagggggcgaccgtaacgcggtatcggtgggagcgcgtatggcaacgacccacgagagccggcatcgacncccttnnggaggggccancaggacttaggcncnctaganctagcggatcccccgggctgcaggaattcggcacgagcgctctatgaagagctcgtggagcgcatggaagcaatgggggagtggaaccccaatgtcaaggagatcaaggtcctgcagaagatcggaaaagatacattcattactcacgagctggctgccgaggcagcaggaaacctggtggggccccgtgactttgtgagcgtgcgctgtgccaagcgccgaggctccacctgtgtgctggctggcatggccacagacttcgggaacatgcctgagcagaagggtgtcatcagggcggagcacggtcccacttgcatggtgcttcacccgttggctggaagtccctctaagaccaaacttacgtggctactcagcatcgacctcaaggggtggctgcccaagagcatcatcaaccaggtcctgtcccagacccaggtggattttgccaaccacctgcgcaagcgcctggagtcccaccctgcctctgaagccaggtgttgaagaccagcctgctgttcccaactgtgcccagctgcactggtacacacgctcatcaggagaatccctactggaagcctgcaagtctaagatctccatctggtgacagtgggatgggtggggttcgtgtttagagtatgacactaggattcagattggtgaaagtttttagtaccaagaaaacagggatgaggctcttggattaaaaggtaacttcattcactgattagctatgacatgagggttcaggcccctaaaataattgtaaaactttttttctgggcccttatgtacccacctaaaaccatctttaaaatgctagtggctgatatgggtgtgggggatgctaaccacagggcctgagaagtcttgctttatgggctcaagaatgccatgcgctggcagtacatgtgcacaaagcagaatctcagagggtctcctgcagccctctgctcctcccggccgctgcacagcaacaccacagaacaagcagcaccccacagtgggtgccttccagaaatatagtccaagctttctctgtggaaaaagacaaaactcattagtagacatgtttccctattgctttcataggcaccagtcagaataaagaatcataattcacaca

SEQ ID NO: 369034 - DNA, 1428 bp, Homo sapiens
  misc_feature (74)..(74): n is a, c, g, or t
  misc_feature (80)..(81): n is a, c, g, or t
  misc_feature (92)..(92): n is a, c, g, or t
  misc_feature (105)..(105): n is a, c, g, or t
  misc_feature (107)..(107): n is a, c, g, or t
  misc_feature (113)..(113): n is a, c, g, or t
ggcggagggggcgaccgtaacgcggtatcggtgggagcgcgtatggcaacgacccacgagagccggcatcgacncccttnnggaggggccancaggacttaggcncnctaganctagcggatcccccgggctgcaggaattcggcacgagctcagaggcgaagcttgaggggctcaggaaggacgaagaaccacccttgagagaagaggcagcagcagcggcggcagcagcagcggcagcgaccccaccactgccacatttgccaggaaacaatgctgctagcgacattcaagctgtgcgctgggagctcctacagacacatgcgcaacatgaaggggctgaggcaacaggctgtgatggccatcagccaggagctgaaccggagggccctggggggccccacccctagcacgtggattaaccaggttcggcggcggagctctctactcggttctcggctggaagagactctctacagtgaccaggagctggcctatctccagcagggggaggaggccatgcagaaggccttgggcatccttagcaaccaagagggctggaagaaggagagtcagcaggacaatggggacaaagtgatgagtaaagtggtcccagatgtgggcaaggtgttccggctggagggaagtccctctaagaccaaacttacgtggctactcagcatcgacctcaaggggtggctgcccaagagcatcatcaaccaggtcctgtcccagacccaggtggattttgccaaccacctgcgcaagcgcctggagtcccaccctgcctctgaagccaggtgttgaagaccagcctgctgttcccaactgtgcccagctgcactggtacacacgctcatcaggagaatccctactggaagcctgcaagtctaagatctccatctggtgacagtgggatgggtggggttcgtgtttagagtatgacactaggattcagattggtgaaagtttttagtaccaagaaaacagggatgaggctcttggattaaaaggtaacttcattcactgattagctatgacatgagggttcaggcccctaaaataattgtaaaactttttttctgggcccttatgtacccacctaaaaccatctttaaaatgctagtggctgatatgggtgtgggggatgctaaccacagggcctgagaagtcttgctttatgggctcaagaatgccatgcgctggcagtacatgtgcacaaagcagaatctcagagggtctcctgcagccctctgctcctcccggccgctgcacagcaacaccacagaacaagcagcaccccacagtgggtgccttccagaaatatagtccaagctttctctgtggaaaaagacaaaactcattagtagacatgtttccctattgctttcataggcaccagtcagaataaagaatcataattcacaca

SEQ ID NO: 369035 - DNA, 896 bp, Homo sapiens
  misc_feature (74)..(74): n is a, c, g, or t
  misc_feature (80)..(81): n is a, c, g, or t
  misc_feature (92)..(92): n is a, c, g, or t
  misc_feature (105)..(105): n is a, c, g, or t
  misc_feature (107)..(107): n is a, c, g, or t
  misc_feature (113)..(113): n is a, c, g, or t
ggcggagggggcgaccgtaacgcggtatcggtgggagcgcgtatggcaacgacccacgagagccggcatcgacncccttnnggaggggccancaggacttaggcncnctaganctagcggatcccccgggctgcaggaattcggcacgagctcagaggcgaagcttgaggggctcaggaaggacgaagaaccacccttgagagaagaggcagcagcagcggcggcagcagcagcggcagcgaccccaccactgccacatgaagccaggtgttgaagaccagcctgctgttcccaactgtgcccagctgcactggtacacacgctcatcaggagaatccctactggaagcctgcaagtctaagatctccatctggtgacagtgggatgggtggggttcgtgtttagagtatgacactaggattcagattggtgaaagtttttagtaccaagaaaacagggatgaggctcttggattaaaaggtaacttcattcactgattagctatgacatgagggttcaggcccctaaaataattgtaaaactttttttctgggcccttatgtacccacctaaaaccatctttaaaatgctagtggctgatatgggtgtgggggatgctaaccacagggcctgagaagtcttgctttatgggctcaagaatgccatgcgctggcagtacatgtgcacaaagcagaatctcagagggtctcctgcagccctctgctcctcccggccgctgcacagcaacaccacagaacaagcagcaccccacagtgggtgccttccagaaatatagtccaagctttctctgtggaaaaagacaaaactcattagtagacatgtttccctattgctttcataggcaccagtcagaataaagaatcataattcacaca

SEQ ID NO: 369036 - DNA, 1042 bp, Homo sapiens
  misc_feature (74)..(74): n is a, c, g, or t
  misc_feature (80)..(81): n is a, c, g, or t
  misc_feature (92)..(92): n is a, c, g, or t
  misc_feature (105)..(105): n is a, c, g, or t
  misc_feature (107)..(107): n is a, c, g, or t
  misc_feature (113)..(113): n is a, c, g, or t
ggcggagggggcgaccgtaacgcggtatcggtgggagcgcgtatggcaacgacccacgagagccggcatcgacncccttnnggaggggccancaggacttaggcncnctaganctagcggatcccccgggctgcaggaattcggcacgagctcagaggcgaagcttgaggggctcaggaaggacgaagaaccacccttgagagaagaggcagcagcagcggcggcagcagcagcggcagcgaccccaccactgccacatttgccaggaaacaatgctgctagcgacattcaagctgtgcgctgggagctcctacagacacatgcgcaacatgaaggggctgaggcaacaggctgtgatggccatcagccaggagctgaaccggagggccctggggggccccacccctagcacgtggattaaccaggttcggcggcggagctctctactcggttctcggctggaagagactctctacagtgaccaggagctggcctatctccagcagggggaggaggccatgcagaaggccttgggcatccttagcaaccaagagggctggaagaaggagagtcagcaggacaatggggacaaagtgatgagtaaagtggtcccagatgtgggcaaggtgttccggctggaggtcgtggtggaccagcccatggagaggctctatgaagagctcgtggagcgcatggaagcaatgggggagtggaaccccaatgtcaaggagatcaaggtcctgcagaagatcggaaaagatacattcattactcacgagctggctgccgaggcagcaggaaacctggtggggccccgtgactttgtgagcgtgcgctgtgccaagcgccgaggctccacctgtgtgctggctggcatggccgctgcacagcaacaccacagaacaagcagcaccccacagtgggtgccttccagaaatatagtccaagctttctctgtggaaaaagacaaaactcattagtagacatgtttccctattgctttcataggcaccagtcagaataaagaatcataattcacaca

SEQ ID NO: 369037 - DNA, 991 bp, Homo sapiens
  misc_feature (74)..(74): n is a, c, g, or t
  misc_feature (80)..(81): n is a, c, g, or t
  misc_feature (92)..(92): n is a, c, g, or t
  misc_feature (105)..(105): n is a, c, g, or t
  misc_feature (107)..(107): n is a, c, g, or t
  misc_feature (113)..(113): n is a, c, g, or t
  misc_feature (902)..(902): n is a, c, g, or t
ggcggagggggcgaccgtaacgcggtatcggtgggagcgcgtatggcaacgacccacgagagccggcatcgacncccttnnggaggggccancaggacttaggcncnctaganctagcggatcccccgggctgcaggaattcggcacgagctcagaggcgaagcttgaggggctcaggaaggacgaagaaccacccttgagagaagaggcagcagcagcggcggcagcagcagcggcagcgaccccaccactgccacatttgccaggaaacaatgctgctagcgacattcaagctgtgcgctgggagctcctacagacacatgcgcaacatgaaggggctgaggcaacaggctgtgatggccatcagccaggagctgaaccggagggccctggggggccccacccctagcacgtggattaaccaggttcggcggcggagctctctactcggttctcggctggaagagactctctacagtgaccaggagctggcctatctccagcagggggaggaggccatgcagaaggccttgggcatccttagcaaccaagagggctggaagaaggagagtcagcaggacaatggggacaaagtgatgagtaaagtggtcccagatgtgggcaaggtgttccggctggaggtcgtggtggaccagcccatggagaggctctatgaagagctcgtggagcgcatggaagcaatgggggagtggaaccccaatgtcaaggagatcaaggtcctgcagaagatcggaaaagatacattcattactcacgagctggctgccgaggcaaggctccacctgtgtgctggctggcatggccacagacttcgggaacatgcctgagcagaagggtgtcatcagtggcaatagggcggagcacggtccacttgcatgggngcttaacccgtgggttgaagtccctttaagacaacctacggggaattaacatttgccctaaggggtggttggcaagaacataataaact

SEQ ID NO: 369038 - DNA, 1494 bp, Homo sapiens
cgtcgacagaagacgacagaagggagcgtgtttagagtatgacactaggattcagattggtgaaagtttttagtaccaagaaaacagggatgaggctcttggattaaaaggtaacttcattcactgattagctatgacatgagggttcaggcccctaaaataattgtaaaactttttttctgggcccttatgtacccacctaaaaccatctttaaaatgctagtggctgatatgggtgtgggggatgctaaccacagggcctgagaagtcttgctttatgggctcaagaatgccatgcgctggcagtacatgtgcacaaagcagaatctcagagggtctcctgcagccctctgctcctcccggccgctgcacagcaacaccacagaacaagcagcaccccacagtgggtgccttccagaaatatagtccaagctttctctgtggaaaaagacaaaactcattagtagacatgtttccctattgctttcataggcaccagtcagaataaagaatcataattcacacaaaacatcagtctttgttttaatattgtactgttaaaaaaatctatgcagctgggtgcagtggctcacgcctgtaatcccagcattttgggaggctgaggtaggcggatcacaaggtcaggagatcgagaccatcctggccaacatggtgaaaccccgtctctactaaaatacaaaaaattagctgggtgtggtggcgcaaacctgtagtcgtagctacttgggaggctgaggcaggggaatcacttgaaccccggaggcggaggttgtagtgggccgagattgtgccactgcgctccagcgtgggcgacagagtgagactccatctcaaaaaaaaaaaaaaaaaatctatgctagtagattacaacttcacactagaggagttctggacaaagcttttaattagtcaaactaaattaaggctcattaaaaggaaaggaactactgggaaattatgcaattcaataatttagactctgttaccaggatctttcataaaaatttaatttccataatcataacctaaatgagttcttaaagaattctataagcaatagctgattaatgggccctggaagatgaagattataactgtttatttacctaattaaaaggaaaggcagtgccaaatatgagaggataaacaatattagttaacatttctgttatttatgatgccaattagtagtaagataattccacagctgtcaactttgtttggggctggcaacttctctgcttaaacaggctaaaagtttagtattctgggagaagtggctggaagaaggggtaatatggtgaaagcaaattccctttcccaggagtcaagagaatttatgtgaggtggcttcccgcctgtaatctcagcactttgggagggccaggcaggcaatcacctgaggccaggagaccagcctgactaacatggagaaaccccatctctactaaaaatacaaaatgagctgggcgt

SEQ ID NO: 369039 - DNA, 868 bp, Homo sapiens
  misc_feature (74)..(74): n is a, c, g, or t
  misc_feature (80)..(81): n is a, c, g, or t
  misc_feature (92)..(92): n is a, c, g, or t
  misc_feature (105)..(105): n is a, c, g, or t
  misc_feature (107)..(107): n is a, c, g, or t
  misc_feature (113)..(113): n is a, c, g, or t
  misc_feature (771)..(771): n is a, c, g, or t
ggcggagggggcgaccgtaacgcggtatcggtgggagcgcgtatggcaacgacccacgagagccggcatcgacncccttnnggaggggccancaggacttaggcncnctaganctagcggatcccccgggctgcaggaattcggcacgagctcagaggcgaagcttgaggggctcaggaaggacgaagaaccacccttgagagaagaggcagcagcagcggcggcagcagcagcggcagcgaccccaccactgccacatttgccaggaaacaatgctgctagcgacattcaagctgtgcgctgggagctcctacagacacatgcgcaacatgaaggggctgaggcaacaggctgtgatggccatcagccaggagctgaaccggagggccctggggggccccacccctagcacgtggattaaccaggttcggcggcggagctctctactcggttctcggctggaagagactctctacagtgaccaggagctggcctatctccagcagggggaggaggccatgcagaaggccttgggcatccttagcaaccaagagggctggaagaaggagagtcagcaggacaatggggacaaagtgatgagtaaagtggtcccagatgtgggcaaggtgttccggctggaggtcgtggtggaccagcccatggagaggctctatgaagagctcgtggagcgcatggaagcaatgggggagtggaaccccaatgtcaaggagatcaagggtcctgcagagaacgccggacttgtgagcgtcnctttgcaagcgccaaggttcaccgtggccggttgatggccagacttcggacagcctggccaaaggtgaataggggggcacggtcccttcatggctta

SEQ ID NO: 369040 - DNA, 949 bp, Homo sapiens
  misc_feature (74)..(74): n is a, c, g, or t
  misc_feature (80)..(81): n is a, c, g, or t
  misc_feature (92)..(92): n is a, c, g, or t
  misc_feature (105)..(105): n is a, c, g, or t
  misc_feature (107)..(107): n is a, c, g, or t
  misc_feature (113)..(113): n is a, c, g, or t
ggcggagggggcgaccgtaacgcggtatcggtgggagcgcgtatggcaacgacccacgagagccggcatcgacncccttnnggaggggccancaggacttaggcncnctaganctagcggatcccccgggctgcaggaattcggcacgagctcagaggcgaagcttgaggggctcaggaaggacgaagaaccacccttgagagaagaggcagcagcagcggcggcagcagcagcggcagcgaccccaccactgccacattgtgcccagctgcactggtacacacgctcatcaggagaatccctactggaagcctgcaagtctaagatctccatctggtgacagtgggatgggtggggttcgtgtttagagtatgacactaggattcagattggtgaaagtttttagtaccaagaaaacagggatgaggctcttggattaaaaggtaacttcattcactgattagctatgacatgagggttcaggcccctaaaataattgtaaaactttttttctgggcccttatgtacccacctaaaaccatctttaaaatgctagtggctgatatgggtgtgggggatgctaaccacagggcctgagaagtcttgctttatgggctcaagaatgccatgcgctggcagtacatgtgcacaaagcagaatctcagagggtctcctgcagccctctgctcctcccggccgctgcacagcaacaccacagaacaagcagcaccccacagtgggtgccttccagaaatatagtccaagctttctctgtggaaaaagacaaaactcattagtagacatgtttccctattgctttcataggcaccagtcagaataaagaatcataattcacacaaaaaaaaactcgagggggggccggtaccccatttggcctatagtgagtcgattaccaattaatggccgtggtttacaactcgtgactggg

SEQ ID NO: 369041 - DNA, 1746 bp, Homo sapiens
cagcagtgtgaggcaatcgctctatccttgaccccttcctttgcacagtgagtgatggcgtttttatctcctgatgatgatgcacagccttcagcgggggacatttaagacgcagaacaccaggtccaggctgcagctgcgggactcagaggcgaagcttgaggggctcaggaaggacgaagaaccacccttgagagaagaggcagcagcagcggcggcagcagcagcggcagcgaccccaccactgccacatttgccaggaaacaatgctgctagcgacattcaagctgtgcgctgggagctcctacagacacatgcgcaacatgaaggggctgaggcaacaggctgtgatggccatcagccaggagctgaaccggagggccctggggggccccacccctagcacgtggattaaccaggttcggcggcggagctctctactcggttctcggctggaagagactctctacagtgaccaggagctggcctatctccagcagggggaggaggccatgcagaaggccttgggcatccttagcaaccaagagggctggaagaaggagagtcagcaggacaatggggacaaagtgatgagtaaagtggtcccagatgtgggcaaggtgttccggctggaggtcgtggtggaccagcccatggagaggctctatgaagagctcgtggagcgcatggaagcaatgggggagtggaaccccaatgtcaaggagatcaaggtcctgcagaagatcggaaaagatacattcattactcacgagctggctgccgaggcagcaggaaacctggtggggccccgtgactttgtgagcgtgcgctgtgccaagcgccgaggctccacctgtgtgctggctggcatggccacagacttcgggaacatgcctgagcagaagggtgtcatcagggcggagcacggtcccacttgcatggtgcttcacccgttggctggaagtccctctaagaccaaacttacgtggctactcagcatcgacctcaaggggtggctgcccaagagcatcatcaaccaggtcctgtcccagacccaggtggattttgccaaccacctgcgcaagcgcctggagtcccaccctgcctctgaagccaggtgttgaagaccagcctgctgttcccaactgtgcccagctgcactggtacacacgctcatcaggagaatccctactggaagcctgcaagtctaagatctccatctggtgacagtgggatgggtggggttcgtgtttagagtatgacactaggattcagattggtgaaagtttttagtaccaagaaaacagggatgaggctcttggattaaaaggtaacttcattcactgattagctatgacatgagggttcaggcccctaaaataattgtaaaactttttttctgggcccttatgtacccacctaaaaccatctttaaaatgctagtggctgatatgggtgtgggggatgctaaccacagggcctgagaagtcttgctttatgggctcaagaatgccatgcgctggcagtacatgtgcacaaagcagaatctcagagggtctcctgcagccctctgctcctcccggccgctgcacagcaacaccacagaacaagcagcaccccacagtgggtgccttccagaaatatagtccaagctttctctgtggaaaaagacaaaactcattagtagacatgtttccctattgctttcataggcaccagtcagaataaagaatcataattcacaca

SEQ ID NO: 369042 - DNA, 1752 bp, Homo sapiens
  misc_feature (74)..(74): n is a, c, g, or t
  misc_feature (80)..(81): n is a, c, g, or t
  misc_feature (92)..(92): n is a, c, g, or t
  misc_feature (105)..(105): n is a, c, g, or t
  misc_feature (107)..(107): n is a, c, g, or t
  misc_feature (113)..(113): n is a, c, g, or t
ggcggagggggcgaccgtaacgcggtatcggtgggagcgcgtatggcaacgacccacgagagccggcatcgacncccttnnggaggggccancaggacttaggcncnctaganctagcggatcccccgggctgcaggaattcggcacgagctcagaggcgaagcttgaggggctcaggaaggacgaagaaccacccttgagagaagaggcagcagcagcggcggcagcagcagcggcagcgaccccaccactgccacatttgccaggaaacaatgctgctagcgacattcaagctgtgcgctgggagctcctacagacacatgcgcaacatgaaggggctgaggcaacaggctgtgatggccatcagccaggagctgaaccggagggccctggggggccccacccctagcacgtggattaaccaggttcggcggcggagctctctactcggttctcggctggaagagactctctacagtgaccaggagctggcctatctccagcagggggaggaggccatgcagaaggccttgggcatccttagcaaccaagagggctggaagaaggagagtcagcaggacaatggggacaaagtgatgagtaaagtggtcccagatgtgggcaaggtgttccggctggaggtcgtggtggaccagcccatggagaggctctatgaagagctcgtggagcgcatggaagcaatgggggagtggaaccccaatgtcaaggagatcaaggtcctgcagaagatcggaaaagatacattcattactcacgagctggctgccgaggcagcaggaaacctggtggggccccgtgactttgtgagcgtgcgctgtgccaagcgccgaggctccacctgtgtgctggctggcatggccacagacttcgggaacatgcctgagcagaagggtgtcatcagggcggagcacggtcccacttgcatggtgcttcacccgttggctggaagtccctctaagaccaaacttacgtggctactcagcatcgacctcaaggggtggctgcccaagagcatcatcaaccaggtcctgtcccagacccaggtggattttgccaaccacctgcgcaagcgcctggagtcccaccctgcctctgaagccaggtgttgaagaccagcctgctgttcccaactgtgcccagctgcactggtacacacgctcatcaggagaatccctactggaagcctgcaagtctaagatctccatctggtgacagtgggatgggtggggttcgtgtttagagtatgacactaggattcagattggtgaaagtttttagtaccaagaaaacagggatgaggctcttggattaaaaggtaacttcattcactgattagctatgacatgagggttcaggcccctaaaataattgtaaaactttttttctgggcccttatgtacccacctaaaaccatctttaaaatgctagtggctgatatgggtgtgggggatgctaaccacagggcctgagaagtcttgctttatgggctcaagaatgccatgcgctggcagtacatgtgcacaaagcagaatctcagagggtctcctgcagccctctgctcctcccggccgctgcacagcaacaccacagaacaagcagcaccccacagtgggtgccttccagaaatatagtccaagctttctctgtggaaaaagacaaaactcattagtagacatgtttccctattgctttcataggcaccagtcagaataaagaatcataattcacaca

SEQ ID NO: 369043 - DNA, 1803 bp, Homo sapiens
  misc_feature (74)..(74): n is a, c, g, or t
  misc_feature (80)..(81): n is a, c, g, or t
  misc_feature (92)..(92): n is a, c, g, or t
  misc_feature (105)..(105): n is a, c, g, or t
  misc_feature (107)..(107): n is a, c, g, or t
  misc_feature (113)..(113): n is a, c, g, or t
  misc_feature (1772)..(1772): n is a, c, g, or t
  misc_feature (1779)..(1779): n is a, c, g, or t
ggcggagggggcgaccgtaacgcggtatcggtgggagcgcgtatggcaacgacccacgagagccggcatcgacncccttnnggaggggccancaggacttaggcncnctaganctagcggatcccccgggctgcaggaattcggcacgagctcagaggcgaagcttgaggggctcaggaaggacgaagaaccacccttgagagaagaggcagcagcagcggcggcagcagcagcggcagcgaccccaccactgccacatttgccaggaaacaatgctgctagcgacattcaagctgtgcgctgggagctcctacagacacatgcgcaacatgaaggggctgaggcaacaggctgtgatggccatcagccaggagctgaaccggagggccctggggggccccacccctagcacgtggattaaccaggttcggcggcggagctctctactcggttctcggctggaagagactctctacagtgaccaggagctggcctatctccagcagggggaggaggccatgcagaaggccttgggcatccttagcaaccaagagggctggaagaaggagagtcagcaggacaatggggacaaagtgatgagtaaagtggtcccagatgtgggcaaggtgttccggctggaggtcgtggtggaccagcccatggagaggctctatgaagagctcgtggagcgcatggaagcaatgggggagtggaaccccaatgtcaaggagatcaaggtcctgcagaagatcggaaaagatacattcattactcacgagctggctgccgaggcagcaggaaacctggtggggccccgtgactttgtgagcgtgcgctgtgccaagcgccgaggctccacctgtgtgctggctggcatggccacagacttcgggaacatgcctgagcagaagggtgtcatcagggcggagcacggtcccacttgcatggtgcttcacccgttggctggaagtccctctaagaccaaacttacgtggctactcagcatcgacctcaaggggtggctgcccaagagcatcatcaaccaggtcctgtcccagacccaggtggattttgccaaccacctgcgcaagcgcctggagtcccaccctgcctctgaagccaggtgttgaagaccagcctgctgttcccaactgtgcccagctgcactggtacacacgctcatcaggagaatccctactggaagcctgcaagtctaagatctccatctggtgacagtgggatgggtggggttcgtgtttagagtatgacactaggattcagattggtgaaagtttttagtaccaagaaaacagggatgaggctcttggattaaaaggtaacttcattcactgattagctatgacatgagggttcaggcccctaaaataattgtaaaactttttttctgggcccttatgtacccacctaaaaccatctttaaaatgctagtggctgatatgggtgtgggggatgctaaccacagggcctgagaagtcttgctttatgggctcaagaatgccatgcgctggcagtacatgtgcacaaagcagaatctcagagggtctcctgcagccctctgctcctcccggccgctgcacagcaacaccacagaacaagcagcaccccacagtgggtgccttccagaaatatagtccaagctttctctgtggaaaaagacaaaactcattagtagacatgtttccctattgctttcataggcaccagtcagaataaagaatcataattcacacacaaaaaaaaaaaaaattcantggccgncgttttacaacgtcgtgacttggt

SEQ ID NO: 369044 - DNA, 2662 bp, Homo sapiens
  misc_feature (74)..(74): n is a, c, g, or t
  misc_feature (80)..(81): n is a, c, g, or t
  misc_feature (92)..(92): n is a, c, g, or t
  misc_feature (105)..(105): n is a, c, g, or t
  misc_feature (107)..(107): n is a, c, g, or t
  misc_feature (113)..(113): n is a, c, g, or t
ggcggagggggcgaccgtaacgcggtatcggtgggagcgcgtatggcaacgacccacgagagccggcatcgacncccttnnggaggggccancaggacttaggcncnctaganctagcggatcccccgggctgcaggaattcggcacgagctcagaggcgaagcttgaggggctcaggaaggacgaagaaccacccttgagagaagaggcagcagcagcggcggcagcagcagcggcagcgaccccaccactgccacatttgccaggaaacaatgctgctagcgacattcaagctgtgcgctgggagctcctacagacacatgcgcaacatgaaggggctgaggcaacaggctgtgatggccatcagccaggagctgaaccggagggccctggggggccccacccctagcacgtggattaaccaggttcggcggcggagctctctactcggttctcggctggaagagactctctacagtgaccaggagctggcctatctccagcagggggaggaggccatgcagaaggccttgggcatccttagcaaccaagagggctggaagaaggagagtcagcaggacaatggggacaaagtgatgagtaaagtggtcccagatgtgggcaaggtgttccggctggaggtcgtggtggaccagcccatggagaggctctatgaagagctcgtggagcgcatggaagcaatgggggagtggaaccccaatgtcaaggagatcaaggtcctgcagaagatcggaaaagatacattcattactcacgagctggctgccgaggcagcaggaaacctggtggggccccgtgactttgtgagcgtgcgctgtgccaagcgccgaggctccacctgtgtgctggctggcatggccacagacttcgggaacatgcctgagcagaagggtgtcatcagggcggagcacggtcccacttgcatggtgcttcacccgttggctggaagtccctctaagaccaaacttacgtggctactcagcatcgacctcaaggggtggctgcccaagagcatcatcaaccaggtcctgtcccagacccaggtggattttgccaaccacctgcgcaagcgcctggagtcccaccctgcctctgaagccaggtgttgaagaccagcctgctgttcccaactgtgcccagctgcactggtacacacgctcatcaggagaatccctactggaagcctgcaagtctaagatctccatctggtgacagtgggatgggtggggttcgtgtttagagtatgacactaggattcagattggtgaaagtttttagtaccaagaaaacagggatgaggctcttggattaaaaggtaacttcattcactgattagctatgacatgagggttcaggcccctaaaataattgtaaaactttttttctgggcccttatgtacccacctaaaaccatctttaaaatgctagtggctgatatgggtgtgggggatgctaaccacagggcctgagaagtcttgctttatgggctcaagaatgccatgcgctggcagtacatgtgcacaaagcagaatctcagagggtctcctgcagccctctgctcctcccggccgctgcacagcaacaccacagaacaagcagcaccccacagtgggtgccttccagaaatatagtccaagctttctctgtggaaaaagacaaaactcattagtagacatgtttccctattgctttcataggcaccagtcagaataaagaatcataattcacacaaaacatcagtctttgttttaatattgtactgttaaaaaaatctatgcagctgggtgcagtggctcacgcctgtaatcccagcattttgggaggctgaggtaggcggatcacaaggtcaggagatcgagaccatcctggccaacatggtgaaaccccgtctctactaaaatacaaaaaattagctgggtgtggtggcgcaaacctgtagtcgtagctacttgggaggctgaggcaggggaatcacttgaaccccggaggcggaggttgtagtgggccgagattgtgccactgcgctccagcgtgggcgacagagtgagactccatctcaaaaaaaaaatttaattagtcaaactaaattaaggctcattaaaaggaaaggaactactgggaaattatgcaattcaataatttagactctgttaccaggatctttcataaaaatttaatttccataatcataacctaaatgagttcttaaagaattctataagcaatagctgattaatgggccctggaagatgaagattataactgtttatttacctaattaaaaggaaaggcagtgccaaatatgagaggataaacaatattagttaacatttctgttatttatgatgccaattagtagtaagataattccacagctgtcaactttgtttggggctggcaacttctctgcttaaacaggctaaaagtttagtattctgggagaagtggctggaagaaggggtaatatggtgaaagcaaattccctttcccaggagtcaagagaatttatgtgaggtggcttcccgcctgtaatctcagcactttgggagggccaggcaggcaatcacctgaggccaggagaccagcctgactaacatggagaaaccccatctctactaaaaatacaaaatgagctgggcgt

SEQ ID NO: 369045 - DNA, 1784 bp, Homo sapiens
  misc_feature (74)..(74): n is a, c, g, or t
  misc_feature (80)..(81): n is a, c, g, or t
  misc_feature (92)..(92): n is a, c, g, or t
  misc_feature (105)..(105): n is a, c, g, or t
  misc_feature (107)..(107): n is a, c, g, or t
  misc_feature (113)..(113): n is a, c, g, or t
ggcggagggggcgaccgtaacgcggtatcggtgggagcgcgtatggcaacgacccacgagagccggcatcgacncccttnnggaggggccancaggacttaggcncnctaganctagcggatcccccgggctgcaggaattcggcacgagctcagaggcgaagcttgaggggctcaggaaggacgaagaaccacccttgagagaagaggcagcagcagcggcggcagcagcagcggcagcgaccccaccactgccacatttgccaggaaacaatgctgctagcgacattcaagctgtgcgctgggagctcctacagacacatgcgcaacatgaaggggctgaggcaacaggctgtgatggccatcagccaggagctgaaccggagggccctggggggccccacccctagcacgtggattaaccaggttcggcggcggagctctctactcggttctcggctggaagagactctctacagtgaccaggagctggcctatctccagcagggggaggaggccatgcagaaggccttgggcatccttagcaaccaagagggctggaagaaggagagtcagcaggacaatggggacaaagtgatgagtaaagtggtcccagatgtgggcaaggtgttccggctggaggtcgtggtggaccagcccatggagaggctctatgaagagctcgtggagcgcatggaagcaatgggggagtggaaccccaatgtcaaggagatcaaggtcctgcagaagatcggaaaagatacattcattactcacgagctggctgccgaggcagcaggaaacctggtggggccccgtgactttgtgagcgtgcgctgtgccaagcgccgaggctccacctgtgtgctggctggcatggccacagacttcgggaacatgcctgagcagaagggtgtcatcagggcggagcacggtcccacttgcatggtgcttcacccgttggctggaagtccctctaagaccaaacttacgtggctactcagcatcgacctcaaggggtggctgcccaagagcatcatcaaccaggtcctgtcccagacccaggtggattttgccaaccacctgcgcaagcgcctggagtcccaccctgcctctgaagccaggtgttgaagaccagcctgctgttcccaactgtgcccagctgcactggtacacacgctcatcaggagaatccctactggaagcctgcaagtctaagatctccatctggtgacagtgggatgggtggggttcgtgtttagagtatgacactaggattcagattggtgaaagtttttagtaccaagaaaacagggatgaggctcttggattaaaaggtaacttcattcactgattagctatgacatgagggttcaggcccctaaaataattgtaaaactttttttctgggcccttatgtacccacctaaaaccatctttaaaatgctagtggctgatatgggtgtgggggatgctaaccacagggcctgagaagtcttgctttatgggctcaagaatgccatgcgctggcagtacatgtgcacaaagcagaatctcagagggtctcctgcagccctctgctcctcccggccgctgcacagcaacaccacagaacaagcagcaccccacagtgggtgccttccagaaatatagtccaagctttctctgtggaaaaagacaaaactcattagtagacatgtttccctattgctttcataggcaccagtcagaataaagaatcataattcacacattaccccaaaaccataaagaaaaaaaataaaa

SEQ ID NO: 369046 - DNA, 2660 bp, Homo sapiens
  misc_feature (74)..(74): n is a, c, g, or t
  misc_feature (80)..(81): n is a, c, g, or t
  misc_feature (92)..(92): n is a, c, g, or t
  misc_feature (105)..(105): n is a, c, g, or t
  misc_feature (107)..(107): n is a, c, g, or t
  misc_feature (113)..(113): n is a, c, g, or t
ggcggagggggcgaccgtaacgcggtatcggtgggagcgcgtatggcaacgacccacgagagccggcatcgacncccttnnggaggggccancaggacttaggcncnctaganctagcggatcccccgggctgcaggaattcggcacgagctcagaggcgaagcttgaggggctcaggaaggacgaagaaccacccttgagagaagaggcagcagcagcggcggcagcagcagcggcagcgaccccaccactgccacatttgccaggaaacaatgctgctagcgacattcaagctgtgcgctgggagctcctacagacacatgcgcaacatgaaggggctgaggcaacaggctgtgatggccatcagccaggagctgaaccggagggccctggggggccccacccctagcacgtggattaaccaggttcggcggcggagctctctactcggttctcggctggaagagactctctacagtgaccaggagctggcctatctccagcagggggaggaggccatgcagaaggccttgggcatccttagcaaccaagagggctggaagaaggagagtcagcaggacaatggggacaaagtgatgagtaaagtggtcccagatgtgggcaaggtgttccggctggaggtcgtggtggaccagcccatggagaggctctatgaagagctcgtggagcgcatggaagcaatgggggagtggaaccccaatgtcaaggagatcaaggtcctgcagaagatcggaaaagatacattcattactcacgagctggctgccgaggcagcaggaaacctggtggggccccgtgactttgtgagcgtgcgctgtgccaagcgccgaggctccacctgtgtgctggctggcatggccacagacttcgggaacatgcctgagcagaagggtgtcatcagggcggagcacggtcccacttgcatggtgcttcacccgttggctggaagtccctctaagaccaaacttacgtggctactcagcatcgacctcaaggggtggctgcccaagagcatcatcaaccaggtcctgtcccagacccaggtggattttgccaaccacctgcgcaagcgcctggagtcccaccctgcctctgaagccaggtgttgaagaccagcctgctgttcccaactgtgcccagctgcactggtacacacgctcatcaggagaatccctactggaagcctgcaagtctaagatctccatctggtgacagtgggatgggtggggttcgtgtttagagtatgacactaggattcagattggtgaaagtttttagtaccaagaaaacagggatgaggctcttggattaaaaggtaacttcattcactgattagctatgacatgagggttcaggcccctaaaataattgtaaaactttttttctgggcccttatgtacccacctaaagaagtcttgctttatgggctcaagaatgccatgcgctggcagtacatgtgcacaaagcagaatctcagagggtctcctgcagccctctgctcctcccggccgctgcacagcaacaccacagaacaagcagcaccccacagtgggtgccttccagaaatatagtccaagctttctctgtggaaaaagacaaaactcattagtagacatgtttccctattgctttcataggcaccagtcagaataaagaatcataattcacacaaaacatcagtctttgttttaatattgtactgttaaaaaaatctatgcagctgggtgcagtggctcacgcctgtaatcccagcattttgggaggctgaggtaggcggatcacaaggtcaggagatcgagaccatcctggccaacatggtgaaaccccgtctctactaaaatacaaaaaattagctgggtgtggtggcgcaaacctgtagtcgtagctacttgggaggctgaggcaggggaatcacttgaaccccggaggcggaggttgtagtgggccgagattgtgccactgcgctccagcgtgggcgacagagtgagactccatctcaaaaaaaaaaaaaaaaaatctatgctagtagattacaacttcacactagaggagttctggacaaagcttttaattagtcaaactaaattaaggctcattaaaaggaaaggaactactgggaaattatgcaattcaataatttagactctgttaccaggatctttcataaaaatttaatttccataatcataacctaaatgagttcttaaagaattctataagcaatagctgattaatgggccctggaagatgaagattataactgtttatttacctaattaaaaggaaaggcagtgccaaatatgagaggataaacaatattagttaacatttctgttatttatgatgccaattagtagtaagataattccacagctgtcaactttgtttggggctggcaacttctctgcttaaacaggctaaaagtttagtattctgggagaagtggctggaagaaggggtaatatggtgaaagcaaattccctttcccaggagtcaagagaatttatgtgaggtggcttcccgcctgtaatctcagcactttgggagggccaggcaggcaatcacctgaggccaggagaccagcctgactaacatggagaaaccccatctctactaaaaatacaaaatgagctgggcgt

SEQ ID NO: 369047 - DNA, 1702 bp, Homo sapiens
  misc_feature (74)..(74): n is a, c, g, or t
  misc_feature (80)..(81): n is a, c, g, or t
  misc_feature (92)..(92): n is a, c, g, or t
  misc_feature (105)..(105): n is a, c, g, or t
  misc_feature (107)..(107): n is a, c, g, or t
  misc_feature (113)..(113): n is a, c, g, or t
ggcggagggggcgaccgtaacgcggtatcggtgggagcgcgtatggcaacgacccacgagagccggcatcgacncccttnnggaggggccancaggacttaggcncnctaganctagcggatcccccgggctgcaggaattcggcacgagctcagaggcgaagcttgaggggctcaggaaggacgaagaaccacccttgagagaagaggcagcagcagcggcggcagcagcagcggcagcgaccccaccactgccacatttgccaggaaacaatgctgctagcgacattcaagctgtgcgctgggagctcctacagacacatgcgcaacatgaaggggctgaggcaacaggctgtgatggccatcagccaggagctgaaccggagggccctggggggccccacccctagcacgtggattaaccaggttcggcggcggagctctctactcggttctcggctggaagagactctctacagtgaccaggagctggcctatctccagcagggggaggaggccatgcagaaggccttgggcatccttagcaaccaagagggctggaagaaggagagtcagcaggacaatggggacaaagtgatgagtaaagtggtcccagatgtgggcaaggtgttccggctggaggtcgtggtggaccagcccatggagaggctctatgaagagctcgtggagcgcatggaagcaatgggggagtggaaccccaatgtcaaggagatcaaggtcctgcagaagatcggaaaagatacattcattactcacgagctggctgccgaggcagcaggaaacctggtggggccccgtgactttgtgagcgtgcgctgtgccaagcgccgaggctccacctgtgtgctggctggcatggccacagacttcgggaacatgcctgagcagaagggtgtcatcagggcggagcacggtcccacttgcatggtgcttcacccgttggctggaagtccctctaagaccaaacttacgtggctactcagcatcgacctcaaggggtggctgcccaagagcatcatcaaccaggtcctgtcccagacccaggtggattttgccaaccacctgcgcaagcgcctggagtcccaccctgcctctgaagccaggtgttgaagaccagcctgctgttcccaactgtgcccagctgcactggtacacacgctcatcaggagaatccctactggaagcctgcaagtctaagatctccatctggtgacagtgggatgggtggggttcgtgtttagagtatgacactaggattcagattggtgaaagtttttagtaccaagaaaacagggatgaggctcttggattaaaaggtaacttcattcactgattagctatgacatgagggttcaggcccctaaaataattgtaaaactttttttctgggcccttatgtacccacctaaaaccatctttaaaatgctagtggctgatatgggtgtgggggatgctaaccacagggcctgagaagtcttgctttatgggctcaagaatgccatgcgctggcagtacatgtgcacaaagcagaatctcagagggtctcctgcagccctctgctcctcccggccgctgcacagcaacaccacagaacaagcagcaccccacagtgggtgccttccagaaatatagtccaagctttctctgttgggggtcagattaggtatcattattcacccaac

SEQ ID NO: 369048 - DNA, 1709 bp, Homo sapiens
  misc_feature (74)..(74): n is a, c, g, or t
  misc_feature (80)..(81): n is a, c, g, or t
  misc_feature (92)..(92): n is a, c, g, or t
  misc_feature (105)..(105): n is a, c, g, or t
  misc_feature (107)..(107): n is a, c, g, or t
  misc_feature (113)..(113): n is a, c, g, or t
ggcggagggggcgaccgtaacgcggtatcggtgggagcgcgtatggcaacgacccacgagagccggcatcgacncccttnnggaggggccancaggacttaggcncnctaganctagcggatcccccgggctgcaggaattcggcacgagctcagaggcgaagcttgaggggctcaggaaggacgaagaaccacccttgagagaagaggcagcagcagcggcggcagcagcagcggcagcgaccccaccactgccacatttgccaggaaacaatgctgctagcgacattcaagctgtgcgctgggagctcctacagacacatgcgcaacatgaaggggctgaggcaacaggctgtgatggccatcagccaggagctgaaccggagggccctggggggccccacccctagcacgtggattaaccaggttcggcggcggagctctctactcggttctcggctggaagagactctctacagtgaccaggagctggcctatctccagcagggggaggaggccatgcagaaggccttgggcatccttagcaaccaagagggctggaagaaggagagtcagcaggacaatggggacaaagtgatgagtaaagtggtcccagatgtgggcaaggtgttccggctggaggtcgtggtggaccagcccatggagaggctctatgaagagctcgtggagcgcatggaagcaatgggggagtggaaccccaatgtcaaggagatcaaggtcctgcagaagatcggaaaagatacattcattactcacgagctggctgccgaggcagcaggaaacctggtggggccccgtgactttgtgagcgtgcgctgtgccaagcgccgaggctccacctgtgtgctggctggcatggccacagacttcgggaacatgcctgagcagaagggtgtcatcagggaagtccctctaagaccaaacttacgtggctactcagcatcgacctcaaggggtggctgcccaagagcatcatcaaccaggtcctgtcccagacccaggtggattttgccaaccacctgcgcaagcgcctggagtcccaccctgcctctgaagccaggtgttgaagaccagcctgctgttcccaactgtgcccagctgcactggtacacacgctcatcaggagaatccctactggaagcctgcaagtctaagatctccatctggtgacagtgggatgggtggggttcgtgtttagagtatgacactaggattcagattggtgaaagtttttagtaccaagaaaacagggatgaggctcttggattaaaaggtaacttcattcactgattagctatgacatgagggttcaggcccctaaaataattgtaaaactttttttctgggcccttatgtacccacctaaaaccatctttaaaatgctagtggctgatatgggtgtgggggatgctaaccacagggcctgagaagtcttgctttatgggctcaagaatgccatgcgctggcagtacatgtgcacaaagcagaatctcagagggtctcctgcagccctctgctcctcccggccgctgcacagcaacaccacagaacaagcagcaccccacagtgggtgccttccagaaatatagtccaagctttctctgtggaaaaagacaaaactcattagtagacatgtttccctattgctttcataggcaccagtcagaataaagaatcataattcacaca

SEQ ID NO: 369049 - DNA, 1658 bp, Homo sapiens
  misc_feature (74)..(74): n is a, c, g, or t
  misc_feature (80)..(81): n is a, c, g, or t
  misc_feature (92)..(92): n is a, c, g, or t
  misc_feature (105)..(105): n is a, c, g, or t
  misc_feature (107)..(107): n is a, c, g, or t
  misc_feature (113)..(113): n is a, c, g, or t
ggcggagggggcgaccgtaacgcggtatcggtgggagcgcgtatggcaacgacccacgagagccggcatcgacncccttnnggaggggccancaggacttaggcncnctaganctagcggatcccccgggctgcaggaattcggcacgagctcagaggcgaagcttgaggggctcaggaaggacgaagaaccacccttgagagaagaggcagcagcagcggcggcagcagcagcggcagcgaccccaccactgccacatttgccaggaaacaatgctgctagcgacattcaagctgtgcgctgggagctcctacagacacatgcgcaacatgaaggggctgaggcaacaggctgtgatggccatcagccaggagctgaaccggagggccctggggggccccacccctagcacgtggattaaccaggttcggcggcggagctctctactcggttctcggctggaagagactctctacagtgaccaggagctggcctatctccagcagggggaggaggccatgcagaaggccttgggcatccttagcaaccaagagggctggaagaaggagagtcagcaggacaatggggacaaagtgatgagtaaagtggtcccagatgtgggcaaggtgttccggctggaggtcgtggtggaccagcccatggagaggctctatgaagagctcgtggagcgcatggaagcaatgggggagtggaaccccaatgtcaaggagatcaaggtcctgcagaagatcggaaaagatacattcattactcacgagctggctgccgaggcagcaggaaacctggtggggccccgtgactttgtgagcgtgcgctgtgccaagcgccgaggctccacctgtgtgctggctggcatggccacagacttcgggaacatgcctgagcagaagggtgtcatcaggggtggctgcccaagagcatcatcaaccaggtcctgtcccagacccaggtggattttgccaaccacctgcgcaagcgcctggagtcccaccctgcctctgaagccaggtgttgaagaccagcctgctgttcccaactgtgcccagctgcactggtacacacgctcatcaggagaatccctactggaagcctgcaagtctaagatctccatctggtgacagtgggatgggtggggttcgtgtttagagtatgacactaggattcagattggtgaaagtttttagtaccaagaaaacagggatgaggctcttggattaaaaggtaacttcattcactgattagctatgacatgagggttcaggcccctaaaataattgtaaaactttttttctgggcccttatgtacccacctaaaaccatctttaaaatgctagtggctgatatgggtgtgggggatgctaaccacagggcctgagaagtcttgctttatgggctcaagaatgccatgcgctggcagtacatgtgcacaaagcagaatctcagagggtctcctgcagccctctgctcctcccggccgctgcacagcaacaccacagaacaagcagcaccccacagtgggtgccttccagaaatatagtccaagctttctctgtggaaaaagacaaaactcattagtagacatgtttccctattgctttcataggcaccagtcagaataaagaatcataattcacaca

SEQ ID NO: 369050 - DNA, 2065 bp, Homo sapiens
  misc_feature (74)..(74): n is a, c, g, or t
  misc_feature (80)..(81): n is a, c, g, or t
  misc_feature (92)..(92): n is a, c, g, or t
  misc_feature (105)..(105): n is a, c, g, or t
  misc_feature (107)..(107): n is a, c, g, or t
  misc_feature (113)..(113): n is a, c, g, or t
ggcggagggggcgaccgtaacgcggtatcggtgggagcgcgtatggcaacgacccacgagagccggcatcgacncccttnnggaggggccancaggacttaggcncnctaganctagcggatcccccgggctgcaggaattcggcacgagctcagaggcgaagcttgaggggctcaggaaggacgaagaaccacccttgagagaagaggcagcagcagcggcggcagcagcagcggcagcgaccccaccactgccacatttgccaggaaacaatgctgctagcgacattcaagctgtgcgctgggagctcctacagacacatgcgcaacatgaaggggctgaggcaacaggctgtgatggccatcagccaggagctgaaccggagggccctggggggccccacccctagcacgtggattaaccaggttcggcggcggagctctctactcggtaagtgctgaggcttctgggctcctggtgctgctggcaggaggttccctggagggtgatgtggtgcatgtggctttggctcccctcctgccattccttcattttgagaggacgtccccagcctagagttcctcaaggccagatccctctctggtcacctggggcggctgtgattaactcgaccagcaggctggcccctatggctttagtccgggctcttcagagcaatgagcagacccagagctccagggatgagagctggtggaggctgggagaagaaggaagctctgtctctcctcggctgtgtatccaggttctcggctggaagagactctctacagtgaccaggagctggcctatctccagcagggggaggaggccatgcagaaggccttgggcatccttagcaaccaagagggctggaagaaggagagtcagcaggacaatggggacaaagtgatgagtaaagtggtcccagatgtgggcaaggtgttccggctggaggtcgtggtggaccagcccatggagaggctctatgaagagctcgtggagcgcatggaagcaatgggggagtggaaccccaatgtcaaggagatcaaggtcctgcagaagatcggaaaagatacattcattactcacgagctggctgccgaggcagcaggaaacctggtggggccccgtgactttgtgagcgtgcgctgtgccaagcgccgaggctccacctgtgtgctggctggcatggccacagacttcgggaacatgcctgagcagaagggtgtcatcagggcggagcacggtcccacttgcatggtgcttcacccgttggctggaagtccctctaagaccaaacttacgtggctactcagcatcgacctcaaggggtggctgcccaagagcatcatcaaccaggtcctgtcccagacccaggtggattttgccaaccacctgcgcaagcgcctggagtcccaccctgcctctgaagccaggtgttgaagaccagcctgctgttcccaactgtgcccagctgcactggtacacacgctcatcaggagaatccctactggaagcctgcaagtctaagatctccatctggtgacagtgggatgggtggggttcgtgtttagagtatgacactaggattcagattggtgaaagtttttagtaccaagaaaacagggatgaggctcttggattaaaaggtaacttcattcactgattagctatgacatgagggttcaggcccctaaaataattgtaaaactttttttctgggcccttatgtacccacctaaaaccatctttaaaatgctagtggctgatatgggtgtgggggatgctaaccacagggcctgagaagtcttgctttatgggctcaagaatgccatgcgctggcagtacatgtgcacaaagcagaatctcagagggtctcctgcagccctctgctcctcccggccgctgcacagcaacaccacagaacaagcagcaccccacagtgggtgccttccagaaatatagtccaagctttctctgtggaaaaagacaaaactcattagtagacatgtttccctattgctttcataggcaccagtcagaataaagaatcataattcacaca

SEQ ID NO: 369051 - DNA, 1698 bp, Homo sapiens
  misc_feature (74)..(74): n is a, c, g, or t
  misc_feature (80)..(81): n is a, c, g, or t
  misc_feature (92)..(92): n is a, c, g, or t
  misc_feature (105)..(105): n is a, c, g, or t
  misc_feature (107)..(107): n is a, c, g, or t
  misc_feature (113)..(113): n is a, c, g, or t
ggcggagggggcgaccgtaacgcggtatcggtgggagcgcgtatggcaacgacccacgagagccggcatcgacncccttnnggaggggccancaggacttaggcncnctaganctagcggatcccccgggctgcaggaattcggcacgagctcagaggcgaagcttgaggggctcaggaaggacgaagaaccacccttgagagaagaggcagcagcagcggcggcagcagcagcggcagcgaccccaccactgccacatttgccaggaaacaatgctgctagcgacattcaagctgtgcgctgggagctcctacagacacatgcgcaacatgaaggggctgaggcaacaggctgtgatggccatcagccaggagctgaaccggagggccctggggggccccacccctagcacgtggattaaccaggttcggcggcggagctctctactcggttctcggctggaagagactctctacagtgaccaggagctggcctatctccagcagggggaggaggccatgcagaaggccttgggcatccttagcaaccaagtggtcccagatgtgggcaaggtgttccggctggaggtcgtggtggaccagcccatggagaggctctatgaagagctcgtggagcgcatggaagcaatgggggagtggaaccccaatgtcaaggagatcaaggtcctgcagaagatcggaaaagatacattcattactcacgagctggctgccgaggcagcaggaaacctggtggggccccgtgactttgtgagcgtgcgctgtgccaagcgccgaggctccacctgtgtgctggctggcatggccacagacttcgggaacatgcctgagcagaagggtgtcatcagggcggagcacggtcccacttgcatggtgcttcacccgttggctggaagtccctctaagaccaaacttacgtggctactcagcatcgacctcaaggggtggctgcccaagagcatcatcaaccaggtcctgtcccagacccaggtggattttgccaaccacctgcgcaagcgcctggagtcccaccctgcctctgaagccaggtgttgaagaccagcctgctgttcccaactgtgcccagctgcactggtacacacgctcatcaggagaatccctactggaagcctgcaagtctaagatctccatctggtgacagtgggatgggtggggttcgtgtttagagtatgacactaggattcagattggtgaaagtttttagtaccaagaaaacagggatgaggctcttggattaaaaggtaacttcattcactgattagctatgacatgagggttcaggcccctaaaataattgtaaaactttttttctgggcccttatgtacccacctaaaaccatctttaaaatgctagtggctgatatgggtgtgggggatgctaaccacagggcctgagaagtcttgctttatgggctcaagaatgccatgcgctggcagtacatgtgcacaaagcagaatctcagagggtctcctgcagccctctgctcctcccggccgctgcacagcaacaccacagaacaagcagcaccccacagtgggtgccttccagaaatatagtccaagctttctctgtggaaaaagacaaaactcattagtagacatgtttccctattgctttcataggcaccagtcagaataaagaatcataattcacaca

SEQ ID NO: 369052 - DNA, 1601 bp, Homo sapiens
  misc_feature (74)..(74): n is a, c, g, or t
  misc_feature (80)..(81): n is a, c, g, or t
  misc_feature (92)..(92): n is a, c, g, or t
  misc_feature (105)..(105): n is a, c, g, or t
  misc_feature (107)..(107): n is a, c, g, or t
  misc_feature (113)..(113): n is a, c, g, or t
ggcggagggggcgaccgtaacgcggtatcggtgggagcgcgtatggcaacgacccacgagagccggcatcgacncccttnnggaggggccancaggacttaggcncnctaganctagcggatcccccgggctgcaggaattcggcacgagctcagaggcgaagcttgaggggctcaggaaggacgaagaaccacccttgagagaagaggcagcagcagcggcggcagcagcagcggcagcgaccccaccactgccacatttgccaggaaacaatgctgctagcgacattcaagctgtgcgctgggagctcctacagacacatgcgcaacatgaaggggctgaggcaacaggctgtgatggccatcagccaggagctgaaccggagggccctggggggccccacccctagcacgtggattaaccaggttcggcggcggagctctctactcggttctcggctggaagagactctctacagtgaccaggagctggcctatctccagcagggggaggaggccatgcagaaggccttgggcatccttagcaaccaagagggctggaagaaggagagtcagcaggacaatggggacaaagtgatgagtaaagtggtcccagatgtgggcaaggtgttccggctggaggtcgtggtggaccagcccatggagaggctctatgaagagctcgtggagcgcatggaagcaatgggggagtggaaccccaatgtcaaggagatcaaggcaggaaacctggtggggccccgtgactttgtgagcgtgcgctgtgccaagcgccgaggctccacctgtgtgctggctggcatggccacagacttcgggaacatgcctgagcagaagggtgtcatcaggggtggctgcccaagagcatcatcaaccaggtcctgtcccagacccaggtggattttgccaaccacctgcgcaagcgcctggagtcccaccctgcctctgaagccaggtgttgaagaccagcctgctgttcccaactgtgcccagctgcactggtacacacgctcatcaggagaatccctactggaagcctgcaagtctaagatctccatctggtgacagtgggatgggtggggttcgtgtttagagtatgacactaggattcagattggtgaaagtttttagtaccaagaaaacagggatgaggctcttggattaaaaggtaacttcattcactgattagctatgacatgagggttcaggcccctaaaataattgtaaaactttttttctgggcccttatgtacccacctaaaaccatctttaaaatgctagtggctgatatgggtgtgggggatgctaaccacagggcctgagaagtcttgctttatgggctcaagaatgccatgcgctggcagtacatgtgcacaaagcagaatctcagagggtctcctgcagccctctgctcctcccggccgctgcacagcaacaccacagaacaagcagcaccccacagtgggtgccttccagaaatatagtccaagctttctctgtggaaaaagacaaaactcattagtagacatgtttccctattgctttcataggcaccagtcagaataaagaatcataattcacaca

SEQ ID NO: 369053 - DNA, 887 bp, Homo sapiens
  misc_feature (74)..(74): n is a, c, g, or t
  misc_feature (80)..(81): n is a, c, g, or t
  misc_feature (92)..(92): n is a, c, g, or t
  misc_feature (105)..(105): n is a, c, g, or t
  misc_feature (107)..(107): n is a, c, g, or t
  misc_feature (113)..(113): n is a, c, g, or t
ggcggagggggcgaccgtaacgcggtatcggtgggagcgcgtatggcaacgacccacgagagccggcatcgacncccttnnggaggggccancaggacttaggcncnctaganctagcggatcccccgggctgcaggaattcggcacgagcgggtggctgcccaagagcatcatcaaccaggtcctgtcccagacccaggtggattttgccaaccacctgcgcaagcgcctggagtcccaccctgcctctgaagccaggtgttgaagaccagcctgctgttcccaactgtgcccagctgcactggtacacacgctcatcaggagaatccctactggaagcctgcaagtctaagatctccatctggtgacagtgggatgggtggggttcgtgtttagagtatgacactaggattcagattggtgaaagtttttagtaccaagaaaacagggatgaggctcttggattaaaaggtaacttcattcactgattagctatgacatgagggttcaggcccctaaaataattgtaaaactttttttctgggcccttatgtacccacctaaaaccatctttaaaatgctagtggctgatatgggtgtgggggatgctaaccacagggcctgagaagtcttgctttatgggctcaagaatgccatgcgctggcagtacatgtgcacaaagcagaatctcagagggtctcctgcagccctctgctcctcccggccgctgcacagcaacaccacagaacaagcagcaccccacagtgggtgccttccagaaatatagtccaagctttctctgtggaaaaagacaaaactcattagtagacatgtttccctattgctttcataggcaccagtcagaataaagaatcataattcacaca

SEQ ID NO: 369054 - DNA, 2010 bp, Homo sapiens
  misc_feature (74)..(74): n is a, c, g, or t
  misc_feature (80)..(81): n is a, c, g, or t
  misc_feature (92)..(92): n is a, c, g, or t
  misc_feature (105)..(105): n is a, c, g, or t
  misc_feature (107)..(107): n is a, c, g, or t
  misc_feature (113)..(113): n is a, c, g, or t
ggcggagggggcgaccgtaacgcggtatcggtgggagcgcgtatggcaacgacccacgagagccggcatcgacncccttnnggaggggccancaggacttaggcncnctaganctagcggatcccccgggctgcaggaattcggcacgagctcagaggcgaagcttgaggggctcaggaaggacgaagaaccacccttgagagaagaggcagcagcagcggcggcagcagcagcggcagcgaccccaccactgccacatttgccaggaaacaatgctgctagcgacattcaagctgtgcgctgggagctcctacagacacatgcgcaacatgaaggggctgaggcaacaggctgtgatggccatcagccaggagctgaaccggagggccctggggggccccacccctagcacgtggattaaccaggttcggcggcggagctctctactcggttctcggctggaagagactctctacagtgaccaggagctggcctatctccagcagggggaggaggccatgcagaaggccttgggcatccttagcaaccaagagggctggaagaaggagagtcagcaggacaatggggacaaagtgatgagtaaagtggtcccagatgtgggcaaggtgttccggctggaggtcgtggtggaccagcccatggagaggctctatgaagagctcgtggagcgcatggaagcaatgggggagtggaaccccaatgtcaaggagatcaaggtcctgcagaagatcggaaaagatacattcattactcacgagctggctgccgaggcagcaggaaacctggtggggccccgtgactttgtgagcgtgcgctgtgccaagcgccgaggctccacctgtgtgctggctggcatggccgctgcacagcaacaccacagaacaagcagcaccccacagtgggtgccttccagaaatatagtccaagctttctctgtggaaaaagacaaaactcattagtagacatgtttccctattgctttcataggcaccagtcagaataaagaatcataattcacacaaaacatcagtctttgttttaatattgtactgttaaaaaaatctatgcagctgggtgcagtggctcacgcctgtaatcccagcattttgggaggctgaggtaggcggatcacaaggtcaggagatcgagaccatcctggccaacatggtgaaaccccgtctctactaaaatacaaaaaattagctgggtgtggtggcgcaaacctgtagtcgtagctacttgggaggctgaggcaggggaatcacttgaaccccggaggcggaggttgtagtgggccgagattgtgccactgcgctccagcgtgggcgacagagtgagactccatctcaaaaaaaaaaaaaaaaaatctatgctagtagattacaacttcacactagaggagttctggacaaagcttttaattagtcaaactaaattaaggctcattaaaaggaaaggaactactgggaaattatgcaattcaataatttagactctgttaccaggatctttcataaaaatttaatttccataatcataacctaaatgagttcttaaagaattctataagcaatagctgattaatgggccctggaagatgaagattataactgtttatttacctaattaaaaggaaaggcagtgccaaatatgagaggataaacaatattagttaacatttctgttatttatgatgccaattagtagtaagataattccacagctgtcaactttgtttggggctggcaacttctctgcttaaacaggctaaaagtttagtattctgggagaagtggctggaagaaggggtaatatggtgaaagcaaattccctttcccaggagtcaagagaatttatgtgaggtggcttcccgcctgtaatctcagcactttgggagggccaggcaggcaatcacctgaggccaggagaccagcctgactaacatggagaaaccccatctctactaaaaatacaaaatgagctgggcgt

SEQ ID NO: 369055 - DNA, 880 bp, Homo sapiens
  misc_feature (74)..(74): n is a, c, g, or t
  misc_feature (80)..(81): n is a, c, g, or t
  misc_feature (92)..(92): n is a, c, g, or t
  misc_feature (105)..(105): n is a, c, g, or t
  misc_feature (107)..(107): n is a, c, g, or t
  misc_feature (113)..(113): n is a, c, g, or t
ggcggagggggcgaccgtaacgcggtatcggtgggagcgcgtatggcaacgacccacgagagccggcatcgacncccttnnggaggggccancaggacttaggcncnctaganctagcggatcccccgggctgcaggaattcggcacgagctcagaggcgaagcttgaggggctcaggaaggacgaagaaccacccttgagagaagaggcagcagcagcggcggcagcagcagcggcagcgaccccaccactgccacatttgccaggaaacaatgctgctagcgacattcaagctgtgcgctgggagctcctacagacacatgcgcaacatgaaggggctgaggcaacaggctgtgatggccatcagccaggagctgaaccggagggccctggggggccccacccctagcacgtggattaaccaggttcggcggcggagctctctactcggttctcggctggaagagactctctacagtgaccaggagctggcctatctccagcagggggaggaggccatgcagaaggccttgggcatccttagcaaccaagagggctggaagaaggagagtcagcaggacaatggggacaaagtgatgagtaaagtggtcccagatgtgggcaaggtgttccggctggaggtcgtggtggaccagcccatggagaggctctatgaagagctcgtggagcgcatggaagcaatgggggagtggaaccccaatgtcaaggagatcaagtggccctgcagaagaacggaaaggatcgatacattactgacgacctggctgtcaatgcattaggctcacactggtgctggttggattggcaagactatgggacatgctgaccgtaggtagtcttcggccgtcacgggaccact

SEQ ID NO: 369056 - DNA, 818 bp, Homo sapiens
  misc_feature (74)..(74): n is a, c, g, or t
  misc_feature (80)..(81): n is a, c, g, or t
  misc_feature (92)..(92): n is a, c, g, or t
  misc_feature (105)..(105): n is a, c, g, or t
  misc_feature (107)..(107): n is a, c, g, or t
  misc_feature (113)..(113): n is a, c, g, or t
ggcggagggggcgaccgtaacgcggtatcggtgggagcgcgtatggcaacgacccacgagagccggcatcgacncccttnnggaggggccancaggacttaggcncnctaganctagcggatcccccgggctgcaggaattcggcacgagctcagaggcgaagcttgaggggctcaggaaggacgaagaaccacccttgagagaagaggcagcagcagcggcggcagcagcagcggcagcgaccccaccactgccacatttgccaggaaacaatgctgctagcgacattcaagctgtgcgctgggagctcctacagacacatgcgcaacatgaaggggctgaggcaacaggctgtgatggccatcagccaggagctgaaccggagggccctggggggccccacccctagcacgtggattaaccaggttcggcggcggagctctctactcggttctcggctggaagagactctctacagtgaccaggagctggcctatctccagcagggggaggaggccatgcagaaggccttgggcatccttagcaaccaagagggctggaagaaggagagtcagcaggacaatggggacaaagtgatgagtaaagtggtcccagatgtgggcaaggtgttccggctggaggtcgtggtggaccagcccatggagaggctctatgaagagctcgtggagcgcatggaagcaatgggggagtggaaccccaatgtcaaggagatcaagcaacatcgacaaacctcttataaccccataactttttaaacctacgctagtccaaaccccgaaactcacctatttcctact

SEQ ID NO: 369057 - DNA, 1441 bp, Homo sapiens
  misc_feature (74)..(74): n is a, c, g, or t
  misc_feature (80)..(81): n is a, c, g, or t
  misc_feature (92)..(92): n is a, c, g, or t
  misc_feature (105)..(105): n is a, c, g, or t
  misc_feature (107)..(107): n is a, c, g, or t
  misc_feature (113)..(113): n is a, c, g, or t
ggcggagggggcgaccgtaacgcggtatcggtgggagcgcgtatggcaacgacccacgagagccggcatcgacncccttnnggaggggccancaggacttaggcncnctaganctagcggatcccccgggctgcaggaattcggcacgagcaccatctttaaaatgctagtggctgatatgggtgtgggggatgctaaccacagggcctgagaagtcttgctttatgggctcaagaatgccatgcgctggcagtacatgtgcacaaagcagaatctcagagggtctcctgcagccctctgctcctcccggccgctgcacagcaacaccacagaacaagcagcaccccacagtgggtgccttccagaaatatagtccaagctttctctgtggaaaaagacaaaactcattagtagacatgtttccctattgctttcataggcaccagtcagaataaagaatcataattcacacaaaacatcagtctttgttttaatattgtactgttaaaaaaatctatgcagctgggtgcagtggctcacgcctgtaatcccagcattttgggaggctgaggtaggcggatcacaaggtcaggagatcgagaccatcctggccaacatggtgaaaccccgtctctactaaaatacaaaaaattagctgggtgtggtggcgcaaacctgtagtcgtagctacttgggaggctgaggcaggggaatcacttgaaccccggaggcggaggttgtagtgggccgagattgtgccactgcgctccagcgtgggcgacagagtgagactccatctcaaaaaaaaaaaaaaaaaatctatgctagtagattacaacttcacactagaggagttctggacaaagcttttaattagtcaaactaaattaaggctcattaaaaggaaaggaactactgggaaattatgcaattcaataatttagactctgttaccaggatctttcataaaaatttaatttccataatcataacctaaatgagttcttaaagaattctataagcaatagctgattaatgggccctggaagatgaagattataactgtttatttacctaattaaaaggaaaggcagtgccaaatatgagaggataaacaatattagttaacatttctgttatttatgatgccaattagtagtaagataattccacagctgtcaactttgtttggggctggcaacttctctgcttaaacaggctaaaagtttagtattctgggagaagtggctggaagaaggggtaatatggtgaaagcaaattccctttcccaggagtcaagagaatttatgtgaggtggcttcccgcctgtaatctcagcactttgggagggccaggcaggcaatcacctgaggccaggagaccagcctgactaacatggagaaaccccatctctactaaaaatacaaaatgagctgggcgt

SEQ ID NO: 369058 - DNA, 7427 bp, Homo sapiens
cgctaggagtccctagcggccagggcgtggaagcggattctgaggcggctttctcctactgccctccgcttgccaacgcgggacccggagcccaacggcagcggcggtccttgggcctgtggagaggggttctctgtggccgagtcctaggcctggtgaaccgcgcggtgcgggagaggcgcttgggcctcgtccagccccagcccctgtctccccgcggccggtgccggcggctgtaggcctcgccgcgcccacccagcctggggcgggcccagcctcaccgcccggcccgccccgccccacgggccagccccgcgccgggtgtttccgctacttccctgcggcggggtaaccgcctcgcacctaccgggctcggttccctggctccggccgcggggggagcatggagtttgcggagctgattaagaccccgcgggtggacaatgtggtgctgcaccggcctttctacccggctgtcgagggcaccctgtgcctgacgggccaccacttgatcctgtcctcccggcaggacaatacggaggagctgtggctcctccattcaaacatcgacgccatcgacaagcgatttgtaggatcactgggtaccatcatcataaaatgtaaagattttcgaattattcagttggatattcctggaatggaggaatgcttgaatatagccagttccattgaggcattgtctactctggactccatcactctgatgtaccctttcttttaccgtcctatgtttgaagtgatagaagatggctggcattccttccttcctgagcaagaatttgaactctattcttcagctaccagtgaatggaggctaagctatgtcaataaggaatttgctgtctgtccctcttacccaccaattgtcacagtgcccaaatccatcgatgatgaagctcttcggaaggtagctacatttcgacatggagggcgcttcccagtactaagctattaccacaaaaaaaatgggatggtaattatgcgaagtggtcagccactcactggtacaaacgggaggaggtgcaaggaggacgagaagctgataaatgctaccctcagggctggaaagcgtggctacatcattgacacccgatccctgaacgtggctcagcaaactagagccaaaggaggtggctttgaacaagaagctcattatcctcagtggaggcgaattcataagtccattgagaggtatcacattcttcaggagagcttaatcaaacttgtggaagcttgtaatgaccaaacacataacatggaccgatggctcagtaaattggaggcctctaactggctgactcacatcaaagagattctgacaactgcctgcctagcggctcagtgcatcgacagggaaggagcatcaatattgattcacggaacagaaggaactgattccacactccaggtgacctccttggcccagatcatcttagagccaagaagcaggaccattcgtggttttgaggccctgattgaaagagagtggctgcaggctggtcacccattccagcagcgctgtgcacagtcagcctactgtaacaccaagcagaagtgggaggctcctgtatttcttctcttcttggactgcgtgtggcagatccttcgtcagtttccctgttcttttgagtttaatgagaatttcctcatcatgctctttgagcatgcttatgcctcacagtttggaacatttctgggcaacaatgaaagtgaaagatgtaagttgaagctacagcagaagacgatgtctttgtggtcctgggttaatcagcccagtgagctgagtaaattcaccaatcccctctttgaagccaacaaccttgtcatctggccttcagttgctccgcagagtcttccactgtgggaaggtattttcctacgttggaatagatcctctaagtatttggatgaagcatatgaagaaatggttaacatcattgaatataataaagaattacaagcaaaagtcaatatccttcgaaggcagttggcagaactggaaacagaggacgggatgcaggagagtccctgaaaggtctcctcgcacccttcgcaaggaccttcttgggcctgtgtccgccgttctctccttgtgcccttcagttcacttttacacggtagccttgaagtgaaggctttagatgtgggacccccctaatgtaatggatttctcaatactgtatgaataatgaaacttactatcataaaccatgtttcatgtggcctgttagggcctgtcactttgggagccggaaggaggtgctagtcattttatttttacgtgaaatagatgacctatttaatgccatttgtgtttcatgccattttatccaaagctttttctctgtgtccactctccaaacagcattctagagcagtcaaggagacagctaatctctctagggactatttggtggtttaaaaaaagggtcagacttttaaacactctgaccatagaaatgtttttcaaaatggcaacaatggataaaccaaggattttgtgtttaacaatccatttccagtgtcttcgccacataaaatagccattttctttaaaatagttttggactaacgaagctgaaatctattctcattcttgtttgtcaagaaaggaaaatctgttattcaaggtaaattatttctacaagggcaacaggtatggtcctccgatatttacattaagaagagttaaatttattttaacgtagacactaaaagtatgtgcaatatacaattaaagtaggaatttgttactgattgagaattgttactggtgaattggttttcaggttttgagcatacatatacaatgtgtttcaaatgctgcttgtaaaattaaaccatcatctagaatagagttaatttattataatcaagctacaaataggttttcttaaaccagagatgcactgcccttgtctaaagttcttattgcactggtttatatgtgtatgtgtgttttattgtgtgtttttttaatttgtaagtattctaagagtttcctaatactaaggttaaaattttcatgttgacctgagccttttgcaaatttgctttggctctattgatttgtccattatgtgttaggcaaatataacttaagtggagggggaagtttatgaatataatatagctctgtgttttaaacctcagaaacagatttgagtgtttcagtattatagaaacagtgatgactattcatgctctgctagtctatgcctgcaactccaaatgtttgtggttcagtatttcccacctacatttctgtttggtgacattgctcattttaacaaatatgaccgagtctagtttttctttaaaaggatagtttatgagtaatctttaaaaccatttccataccatctgtatataaccatttcggtagagaacacactacactgaaccctgctttagagctgtgtgttgagctaaaaatataattttttaaaaattgactagcaaaatctatggccacactgagaagcctttgaaaatggcaaatacttttcatcaccaattgcccaattcatctttcttctgcttcctcagccttgtagcaaaggctacacagcagcccacagtccacagtctttttgggaaaattggcctgccaccttctttaagctcagtttatttttgacttactttctttgctgtagttatgaaccttggggcattaaaatcccatggcaaggagcataagagatgttctcgtagctctgcgttgtgtgaaatgtccatcttagttttgttaaaaaaaaaaaaaaaaaaaggaaacagcctcacttttttgtgctccctcagaattgcttgctatgtctgttaatacagctgagctttttgttttcttctctttttgtctcaagattgtatatgaaggaggcttttcttctcagctaacaggcatataaggaaaaccatctagagagttttctttagaagtgactcccattagcctggtgtggtggtgtgtgcctatagtcccagccactaggaaagctgaggcagaaggatcccttgagcctaggaggttgaggctgcagtgagctatgatcgcatcagtccactccagcctgagcaacagagcgagaccctgtgtctaagtaaagaaaaagccagaagtgactcccactgcttctgttgatcggccatagggcttccatgggtggaaacttgtgagggagtttgtattaggtctggtcatggagggatgatgtaccatcaaggtagacccatcttcctgatgcacatttgctgtgcgagccagagtacagtcataacacggtattcgcatttcgttttctctgtctcactgagacaacaatctatactgttttggcaagtttgcattttagtattaatttataattagggattgttcaaacttcagatctgtttacaggttgtaaaaataaacttcggtatcagtgcatctacagaagtgttatttggtaatccaaatattagagttttcccaaatccaaaaacggtcagaaataagtccattatcaatataatttgaagaagatttttagtagtactgtgaagttcgtgcttacctggatgagaagaataaatgacacggatacactcctgagaagacactcgttaaacattgcatcggagagctgcctttgataaatgtgctgttaaacacttgaatgaagagaatggtggcagaatgagtgagcaagcagattgccccagaggggccggtaataatcacgtgagggataatcagattcctgcgtattcagcatcttctctattcatgtggagtgaaagctggtttttatacaggagatacgtaaagtaggccccacaaataatatttttaaaatacaaaggatcaccacaatcctctattgaacatataaggatcctcagatttaaataagtactttttttttttttaatcagaagaacattgttgtttgattatatgtttttaaaaacctgaagcttttttggtggcaggacctttcaataaatatttatttggtcaaaattttttattttgattttattaaatgggaagaaagcaagcagaaatagtaaaattcagtaggtttaaaacaatctataaatgtattttatttccaagaaaacttagggtctcaaagcaagattttaaagtgatttttgagaagacttgggggggacaataatagacattcatgtcagatcccatatgggggatttttaaacatttctttgaactttgaggcctgatttaggggtgggattttattgctttttgttttaaaggatgaaattttgtggggttttagtctttgattcagtcagtatttggtttatgttaaataaaaaatcagtatcatggaaaagatatgaccataatttagtctcctcaagtgaaaaacaggagtaatgtttcgttgcactttgaaagatctgcttcaaggcataactcgtgtagttgtctggtttcagggatagctgtttgaattgtcattctaaagtaggtcatcaggttcacttattatccgaccttaatctgggataaaggttttggtatttgcccacttctagatagaatgaatgaaaacaacacaagcgttttatgagcactctttatcagaaaggtatttcctggaccagaaatgggcaatagttacaatagttgatcctctgttctggaagctttgaaatttatcagagaatgaagtcattcagtacatctgataaagttttgttgttgttgttgttgttgttgttttaattgggcaaccctcagaactgaagaggttcagagaactttccaggtttatactatacctcaagaccacatagattagctactgcttattctttcacatgggctaggcctgttctcctcctccagacctagtattctaagttattaccacatagtatttttatgttacccatcatctttaaaaacattataggctgggcatggtggcttacgcctgtaatcccagcactttgggaggccaaggcgggcggatcatgaggtcaggagatcgagaccatcctggctaacacggtgaaaacccatgtctactaaaaatacaaaaaattagccaggtgtggtggcgggcgcctgtagtcccagctactcaggaggctgaggcaggagaatggtgtgaacccgggaggcagagcttgcagtgagccgagatcgcaccactgcactccagcctgggcgaaagggcaagactccatctcaaaaaaaaaaaaaaaaaaagactcatttatccatttacatttattctcagatgataaaatatatactgatactataactttcttatggtatcagttttctttattttcttgaataaaattacttctaccttcatttggtctttataatccactgtccacagcatcttcctttaaaccaatagtcccagaagagaccctctgaaattctaggactggatattaaaatgcctgaacctgttatctaaatcctttttaagaaacttaatgttccagctcttgaactacactgtggaacagtaatttgtgcccaatttagtggaagataatgaggctcactgtaaacactacattgtcctgcaaagtaattctgatgagagtttactgacttctagagccattctctttaaccgtctgcaggtctaaggattaactatatttgtgatttgtaataaaactgaattgtacaacactgcctgtgtttgtctggccaagacatttgcttcacttttaaaatgcacgttatctttggagaggtgaattattctacaaaatgcaccctaaatctcattgtttaaaaccttactgatctaataccatctacacaaaaaaatgttgtacttgcagaacttagtttataaaaacaaagaatgtgtatttcttcaatagccgggtatttggattgttctcttgataatatttgaatgtgactcttggatttaagtgcactattattcatggcttatacaataaaattgcactgtatggcaaatatgtctataatgtatgctttgctgaaacctcaagagtgctgtaaggtacaggtttccatattgtgaacctgtgtacgcacacacacatatacatacagtcttagggaaaaaaaaaagcagaacttttgtaagtctgtgtaacattttaatattgtttgtaatattcactaggtgataatttcccctgtaccctataactgtaatcattcaccttgggttggccggtttgtcaagcttggtttactgaatcaagaaagagtcttgtcgaatgtggtactgttcttagtgtgtaatatttgcgtatggtgttcctctgcctcagaggacagttgcacagatggctagtgttaaatttctatagacgatggtaataaaatctgaatatatttaagtgctaataaattaaatctgtgggcttatttg

SEQ ID NO: 369059 - DNA, 810 bp, Homo sapiens
cgctaggagtccctagcggccagggcgtggaagcggattctgaggcggctttctcctactgccctccgcttgccaacgcgggacccggagcccaacggcagcggcggtccttgggcctgtggagaggggttctctgtggccgagtcctaggcctggtgaaccgcgcggtgcgggagaggcgcttgggcctcgtccagccccagcccctgtctccccgcggccggtgccggcggctgtaggcctcgccgcgcccacccagcctggggcgggcccagcctcaccgcccggcccgccccgccccacgggccagccccgcgccgggtgtttccgctacttccctgcggcggggtaaccgcctcgcacctaccgggctcggttccctggctccggccgcggggggagcatggagtttgcggagctgattaagaccccgcgggtggacaatgtggtgctgcaccggcctttctacccggctgtcgagggcaccctgtgcctgacgggccaccacttgatcctgtcctcccggcaggacaatacggaggagctgtggctcctccattcaaacatcgacgccatcgacaagcgatttgtaggatcactgggtaccatcatcataaaatgtaaagattttcgaattattcagttggatattcctggaatggaggaatgcttgaatatagccagttccattgaggcattgtctactctggactccatcactctgatgtaccctttcttttaccgtcctatgtttgaagtgatagaagatggctggcattccttcaaacataggacggtaaaaaaaaaaaa

SEQ ID NO: 369060 - DNA, 5773 bp, Homo sapiens
gtactactactagtccactgaattctcagtgatgcttatgcctcacagtttggaacatttctgggcaacaatgaaagtgaaagatgtaagttgaagctacagcagaagacgatgtctttgtggtcctgggttaatcagcccagtgagctgagtaaattcaccaatcccctctttgaagccaacaaccttgtcatctggccttcagttgctccgcagagtcttccactgtgggaaggtattttcctacgttggaatagatcctctaagtatttggatgaagcatatgaagaaatggttaacatcattgaatataataaagaattacaagcaaaagtcaatatccttcgaaggcagttggcagaactggaaacagaggacgggatgcaggagagtccctgaaaggtctcctcgcacccttcgcaaggaccttcttgggcctgtgtccgccgttctctccttgtgcccttcagttcacttttacacggtagccttgaagtgaaggctttagatgtgggacccccctaatgtaatggatttctcaatactgtatgaataatgaaacttactatcataaaccatgtttcatgtggcctgttagggcctgtcactttgggagccggaaggaggtgctagtcattttatttttacgtgaaatagatgacctatttaatgccatttgtgtttcatgccattttatccaaagctttttctctgtgtccactctccaaacagcattctagagcagtcaaggagacagctaatctctctagggactatttggtggtttaaaaaaagggtcagacttttaaacactctgaccatagaaatgtttttcaaaatggcaacaatggataaaccaaggattttgtgtttaacaatccatttccagtgtcttcgccacataaaatagccattttctttaaaatagttttggactaacgaagctgaaatctattctcattcttgtttgtcaagaaaggaaaatctgttattcaaggtaaattatttctacaagggcaacaggtatggtcctccgatatttacattaagaagagttaaatttattttaacgtagacactaaaagtatgtgcaatatacaattaaagtaggaatttgttactgattgagaattgttactggtgaattggttttcaggttttgagcatacatatacaatgtgtttcaaatgctgcttgtaaaattaaaccatcatctagaatagagttaatttattataatcaagctacaaataggttttcttaaaccagagatgcactgcccttgtctaaagttcttattgcactggtttatatgtgtatgtgtgttttattgtgtgtttttttaatttgtaagtattctaagagtttcctaatactaaggttaaaattttcatgttgacctgagccttttgcaaatttgctttggctctattgatttgtccattatgtgttaggcaaatataacttaagtggagggggaagtttatgaatataatatagctctgtgttttaaacctcagaaacagatttgagtgtttcagtattatagaaacagtgatgactattcatgctctgctagtctatgcctgcaactccaaatgtttgtggttcagtatttcccacctacatttctgtttggtgacattgctcattttaacaaatatgaccgagtctagtttttctttaaaaggatagtttatgagtaatctttaaaaccatttccataccatctgtatataaccatttcggtagagaacacactacactgaaccctgctttagagctgtgtgttgagctaaaaatataattttttaaaaattgactagcaaaatctatggccacactgagaagcctttgaaaatggcaaatacttttcatcaccaattgcccaattcatctttcttctgcttcctcagccttgtagcaaaggctacacagcagcccacagtccacagtctttttgggaaaattggcctgccaccttctttaagctcagtttatttttgacttactttctttgctgtagttatgaaccttggggcattaaaatcccatggcaaggagcataagagatgttctcgtagctctgcgttgtgtgaaatgtccatcttagttttgttaaaaaaaaaaaaaaaaaaaggaaacagcctcacttttttgtgctccctcagaattgcttgctatgtctgttaatacagctgagctttttgttttcttctctttttgtctcaagattgtatatgaaggaggcttttcttctcagctaacaggcatataaggaaaaccatctagagagttttctttagaagtgactcccattagcctggtgtggtggtgtgtgcctatagtcccagccactaggaaagctgaggcagaaggatcccttgagcctaggaggttgaggctgcagtgagctatgatcgcatcagtccactccagcctgagcaacagagcgagaccctgtgtctaagtaaagaaaaagccagaagtgactcccactgcttctgttgatcggccatagggcttccatgggtggaaacttgtgagggagtttgtattaggtctggtcatggagggatgatgtaccatcaaggtagacccatcttcctgatgcacatttgctgtgcgagccagagtacagtcataacacggtattcgcatttcgttttctctgtctcactgagacaacaatctatactgttttggcaagtttgcattttagtattaatttataattagggattgttcaaacttcagatctgtttacaggttgtaaaaataaacttcggtatcagtgcatctacagaagtgttatttggtaatccaaatattagagttttcccaaatccaaaaacggtcagaaataagtccattatcaatataatttgaagaagatttttagtagtactgtgaagttcgtgcttacctggatgagaagaataaatgacacggatacactcctgagaagacactcgttaaacattgcatcggagagctgcctttgataaatgtgctgttaaacacttgaatgaagagaatggtggcagaatgagtgagcaagcagattgccccagaggggccggtaataatcacgtgagggataatcagattcctgcgtattcagcatcttctctattcatgtggagtgaaagctggtttttatacaggagatacgtaaagtaggccccacaaataatatttttaaaatacaaaggatcaccacaatcctctattgaacatataaggatcctcagatttaaataagtactttttttttttttaatcagaagaacattgttgtttgattatatgtttttaaaaacctgaagcttttttggtggcaggacctttcaataaatatttatttggtcaaaattttttattttgattttattaaatgggaagaaagcaagcagaaatagtaaaattcagtaggtttaaaacaatctataaatgtattttatttccaagaaaacttagggtctcaaagcaagattttaaagtgatttttgagaagacttgggggggacaataatagacattcatgtcagatcccatatgggggatttttaaacatttctttgaactttgaggcctgatttaggggtgggattttattgctttttgttttaaaggatgaaattttgtggggttttagtctttgattcagtcagtatttggtttatgttaaataaaaaatcagtatcatggaaaagatatgaccataatttagtctcctcaagtgaaaaacaggagtaatgtttcgttgcactttgaaagatctgcttcaaggcataactcgtgtagttgtctggtttcagggatagctgtttgaattgtcattctaaagtaggtcatcaggttcacttattatccgaccttaatctgggataaaggttttggtatttgcccacttctagatagaatgaatgaaaacaacacaagcgttttatgagcactctttatcagaaaggtatttcctggaccagaaatgggcaatagttacaatagttgatcctctgttctggaagctttgaaatttatcagagaatgaagtcattcagtacatctgataaagttttgttgttgttgttgttgttgttgttttaattgggcaaccctcagaactgaagaggttcagagaactttccaggtttatactatacctcaagaccacatagattagctactgcttattctttcacatgggctaggcctgttctcctcctccagacctagtattctaagttattaccacatagtatttttatgttacccatcatctttaaaaacattataggctgggcatggtggcttacgcctgtaatcccagcactttgggaggccaaggcgggcggatcatgaggtcaggagatcgagaccatcctggctaacacggtgaaaacccatgtctactaaaaatacaaaaaattagccaggtgtggtggcgggcgcctgtagtcccagctactcaggaggctgaggcaggagaatggtgtgaacccgggaggcagagcttgcagtgagccgagatcgcaccactgcactccagcctgggcgaaagggcaagactccatctcaaaaaaaaaaaaaaaaaaagactcatttatccatttacatttattctcagatgataaaatatatactgatactataactttcttatggtatcagttttctttattttcttgaataaaattacttctaccttcatttggtctttataatccactgtccacagcatcttcctttaaaccaatagtcccagaagagaccctctgaaattctaggactggatattaaaatgcctgaacctgttatctaaatcctttttaagaaacttaatgttccagctcttgaactacactgtggaacagtaatttgtgcccaatttagtggaagataatgaggctcactgtaaacactacattgtcctgcaaagtaattctgatgagagtttactgacttctagagccattctctttaaccgtctgcaggtctaaggattaactatatttgtgatttgtaataaaactgaattgtacaacactgcctgtgtttgtctggccaagacatttgcttcacttttaaaatgcacgttatctttggagaggtgaattattctacaaaatgcaccctaaatctcattgtttaaaaccttactgatctaataccatctacacaaaaaaatgttgtacttgcagaacttagtttataaaaacaaagaatgtgtatttcttcaatagccgggtatttggattgttctcttgataatatttgaatgtgactcttggatttaagtgcactattattcatggcttatacaataaaattgcactgtatggcaaatatgtctataatgtatgctttgctgaaacctcaagagtgctgtaaggtacaggtttccatattgtgaacctgtgtacgcacacacacatatacatacagtcttagggaaaaaaaaaagcagaacttttgtaagtctgtgtaacattttaatattgtttgtaatattcactaggtgataatttcccctgtaccctataactgtaatcattcaccttgggttggccggtttgtcaagcttggtttactgaatcaagaaagagtcttgtcgaatgtggtactgttcttagtgtgtaatatttgcgtatggtgttcctctgcctcagaggacagttgcacagatggctagtgttaaatttctatagacgatggtaataaaatctgaatatatttaagtgctaataaattaaatctgtgggcttatttg

SEQ ID NO: 369061 - DNA, 2943 bp, Homo sapiens
  misc_feature (2894)..(2894): n is a, c, g, or t
cgctaggagtccctagcggccagggcgtggaagcggattctgaggcggctttctcctactgccctccgcttgccaacgcgggacccggagcccaacggcagcggcggtccttgggcctgtggagaggggttctctgtggccgagtcctaggcctggtgaaccgcgcggtgcgggagaggcgcttgggcctcgtccagccccagcccctgtctccccgcggccggtgccggcggctgtaggcctcgccgcgcccacccagcctggggcgggcccagcctcaccgcccggcccgccccgccccacgggccagccccgcgccgggtgtttccgctacttccctgcggcggggtaaccgcctcgcacctaccgggctcggttccctggctccggccgcggggggagcatggagtttgcggagctgattaagaccccgcgggtggacaatgtggtgctgcaccggcctttctacccggctgtcgagggcaccctgtgcctgacgggccaccacttgatcctgtcctcccggcaggacaatacggaggagctgtggctcctccattcaaacatcgacgccatcgacaagcgatttgtaggatcactgggtaccatcatcataaaatgtaaagattttcgaattattcagttggatattcctggaatggaggaatgcttgaatatagccagttccattgaggcattgtctactctggactccatcactctgatgtaccctttcttttaccgtcctatgtttgaagtgatagaagatggctggcattccttccttcctgagcaagaatttgaactctattcttcagctgtgagttaacttttgagaactgtggattatgagaagtaacccaataccttatttgacttgtgaaaatgatcacttcttttgaagagtaataaggtgaagttgacttatccattcctaatcttaatatatttaaaaggattgaagccatgcagagtatgatctctgatcacaaaggaattagattaataatcagtaatactaagatatctaggaatacccccaagtatttctaaattaaacagaacgcttgtaaataatctgcatgtcaaagaaattagaaaacattttgaagtgagtgataatggttatgtaacatattgaaatttgtggaatacagacagctaaggcagtgtttagagataaacttacagctttaaaatttttactagaaaggaaagtctaaaattattgacctaagcaccaatttaagaagctagaaaaaaaaaagcaaagtaactagaaagaaaaaataataaaaataagagcagaaagcaataaaataactagaataagtaagtttagcaaagttggttgatataagatcggtatacaaaaacgaattgaattggcaacaagcgatctgacaatgaataaaatatttacgaataaatttaacaaaagaaattcaaggtctatacactgaaagacataaaacattgttggaagaagttgcaagagatctaaataaaaggagagatactgtgtacatcaattggaagacaatattgttaaggttagtggttggctgacttttgtgaaagaccattagatagtagatattttaagctttgcaggtcatgtggtctctgttgtaactactgaactctgctgttgttgcatgaaaaaagcaatcagatgagacatcagtgaatgggtggtgctatgttctaataaactttatttgcagaaacaagtagcaggctggatttggctcattaaagtggcagttctcccttaattgatctgtagagtcagtgcaatccctgttaaaattctaataggtgtttttgtagaaatggacaaaatgatacaaattttatggaaatgcaaatttaaatatataagtttatatggaaagtcaaaacagctttgagaaaacacttgattactgtaaagccacagtaatcaagagagtatggtattgctgtaagcgaagacatacagaccaatgaaacagaatacagggtacagaaataaaccttccccttaatgctcagttgatttttgacaaaagtaccaatacaattcaattgggaaaggatagctttttcaaccaatagtattggaacagttggatatccatatgtaaaaaagataaacctagacccttacctcacatcatccacaaaaattaactaaaatgtattatgcaactaaacatgagaactaaaactatcaaacctctttaagaaagcacaggagaaaatctttatgaccttcagttagacagagattttttagatatgacaccaaaagtgactgaaagcaggttagtgatttcctagtattgggtgttacacaggtgtatacaactgtcaagactcatgaaattgtgtagtcaaaatggattcagtttattttttataagttttgtctcaataaagttgactaaaaagaagataaaagaataatctaatgcaaatgttaagtagctgattagaaacagcttaggagaaaataagtgatttgaaatatagatccgaaataattactcagaatatggaacagagaaggaagatggaaaaacagagaggttagacacatgcatgcttaataaaggaagaagatccaatatttattacatgggagtttaggataaaagatgatagaggctggttatggtggctcacacctatagtcctagcacttaaggaggctgaggcaggcaggtcacttgagctcaggagagtttgagaccagcctaggcaacatggcgaaaccccatctctatgaaaaaatttagctaggtgtgataatgtgtgtctttggtcccagttacctgggggtctgaggtgggagaatggcttgagcccagaaagttgagtttgcagtgagcagtgataatgccgctgcnctccagcctgggtgagagagcaagaccttgtctccaaaaaaaaaaaaaa

SEQ ID NO: 369062 - DNA, 1639 bp, Homo sapiens
cgctaggagtccctagcggccagggcgtggaagcggattctgaggcggctttctcctactgccctccgcttgccaacgcgggacccggagcccaacggcagcggcggtccttgggcctgtggagaggggttctctgtggccgagtcctaggcctggtgaaccgcgcggtgcgggagaggcgcttgggcctcgtccagccccagcccctgtctccccgcggccggtgccggcggctgtaggcctcgccgcgcccacccagcctggggcgggcccagcctcaccgcccggcccgccccgccccacgggccagccccgcgccgggtgtttccgctacttccctgcggcggggtaaccgcctcgcacctaccgggctcggttccctggctccggccgcggggggagcatggagtttgcggagctgattaagaccccgcgggtggacaatgtggtgctgcaccggcctttctacccggctgtcgagggcaccctgtgcctgacgggccaccacttgatcctgtcctcccggcaggacaatacggaggagctgtggctcctccattcaaacatcgacgccatcgacaagcgatttgtaggatcactgggtaccatcatcataaaatgtaaagattttcgaattattcagttggatattcctggaatggaggaatgcttgaatatagccagttccattgaggcattgtctactctggactccatcactctgatgtaccctttcttttaccgtcctatgtttgaagtgatagaagatggctggcattccttccttcctgagcaagaatttgaactctattcttcagctaccagtgaatggaggctaagctatgtcaataaggaatttgctgtctgtccctcttacccaccaattgtcacagtgcccaaatccatcgatgatgaagctcttcggaaggtagctacatttcgacatggagggcgcttcccagtactaagctattaccacaaaaaaaatgggatggtaattatgcgaagtggtcagccactcactggtacaaacgggaggaggtgcaaggaggacgagaagctgataaatgctaccctcagggctggaaagcgtggctacatcattgacacccgatccctgaacgtggctcagcaaactagagccaaaggaggtggctttgaacaagaagctcattatcctcagtggaggcgaattcataagtccattgagaggtatcacattcttcaggagagcttaatcaaacttgtggaagcttgtaatgaccaaacacataacatggaccgatggctcagtaaattggaggcctctaactggctgactcacatcaaagagattctgacaactgcctgcctagcggctcagtgcatcgacaggtaaagtgcatttcagcgttcctgagcgaaacatgacgttgctaattagactttgtgtttatccagacatatgtttatagattatgtgaaagtttgcagtaaattactgtgtaggctagtcaacaccatcccattattgatgaggtgtgtgcctagagtctggcatttaatagataatgtttgtttcataaatatgaaccaggtaaatatacatgtcttctatgacacaaatttttaagtactaatggaccccgttttttttttc

SEQ ID NO: 369063 - DNA, 7155 bp, Homo sapiens
cgctaggagtccctagcggccagggcgtggaagcggattctgaggcggctttctcctactgccctccgcttgccaacgcgggacccggagcccaacggcagcggcggtccttgggcctgtggagaggggttctctgtggccgagtcctaggcctggtgaaccgcgcggtgcgggagaggcgcttgggcctcgtccagccccagcccctgtctccccgcggccggtgccggcggctgtaggcctcgccgcgcccacccagcctggggcgggcccagcctcaccgcccggcccgccccgccccacgggccagccccgcgccgggtgtttccgctacttccctgcggcggggtaaccgcctcgcacctaccgggctcggttccctggctccggccgcggggggagcatggagtttgcggagctgattaagaccccgcgggtggacaatgtggtgctgcaccggcctttctacccggctgtcgagggcaccctgtgcctgacgggccaccacttgatcctgtcctcccggcaggacaatacggaggagctgtggctcctccattcaaacatcgacgccatcgacaagcgatttgtaggatcactgggtaccatcatcataaaatgtaaagattttcgaattattcagttggatattcctggaatggaggaatgcttgaatatagccagttccattgaggcattgtctactctggactccatcactctgatgtaccctttcttttaccgtcctatgtttgaagtgatagaagatggctggcattccttccttcctgagcaagaatttgaactctattcttcagctaccagtgaatggaggctaagctatgtcaataaggaatttgctgtctgtccctcttacccaccaattgtcacagtgcccaaatccatcgatgatgaagctcttcggaaggtagctacatttcgacatggagggcgcttcccagtactaagctattaccacaaaaaaaatgggatggtaattatgcgaagtggtcagccactcactggtacaaacgggaggaggtgcaaggaggacgagaagctgataaatgctaccctcagggctggaaagcgtggctacatcattgacacccgatccctgaacgtggctcagcaaactagagccaaaggaggtggctttgaacaagaagctcattatcctcagtggaggcgaattcataagtccattgagaggtatcacattcttcaggagagcttaatcaaacttgtggaagcttgtaatgaccaaacacataacatggaccgatggctcagtaaattggaggcctctaactggctgactcacatcaaagagattctgacaactgcctgcctagcggctcagtgcatcgacagggaaggagcatcaatattgattcacggaacagaaggaactgattccacactccaggtgacctccttggcccagatcatcttagagccaagaagcaggaccattcgtggttttgaggccctgattgaaagagagtggctgcaggctggtcacccattccagcagcgctgtgcacagtcagcctactgtaacaccaagcagaagtgggaggctcctgtatttcttctcttcttggactgcgtgtggcagatccttcgtcagtttccctgttcttttgagtttaatgagaatttcctcatcatgctctttgagcatgcttatgcctcacagtttggaacatttctgggcaacaatgaaagtgaaagatgtaagttgaagctacagcagaagacgatgtctttgtggtcctgggttaatcagcccagtgagctgagtaaattcaccaatcccctctttgaagccaacaaccttgtcatctggccttcagttgctccgcagagtcttccactgtgggaaggtattttcctacgttggaatagatcctctaagtatttggatgaagcatatgaagaaatggttaacatcattgaatataataaagaattacaagcaaaagtcaatatccttcgaaggcagttggcagaactggaaacagaggacgggatgcaggagagtccctgaaaggtctcctcgcacccttcgcaaggaccttcttgggcctgtgtccgccgttctctccttgtgcccttcagttcacttttacacggtagccttgaagtgaaggctttagatgtgggacccccctaatgtaatggatttctcaatactgtatgaataatgaaacttactatcataaaccatgtttcatgtggcctgttagggcctgtcactttgggagccggaaggaggtgctagtcattttatttttacgtgaaatagatgacctatttaatgccatttgtgtttcatgccattttatccaaagctttttctctgtgtccactctccaaacagcattctagagcagtcaaggagacagctaatctctctagggactatttggtggtttaaaaaaagggtcagacttttaaacactctgaccatagaaatgtttttcaaaatggcaacaatggataaaccaaggattttgtgtttaacaatccatttccagtgtcttcgccacataaaatagccattttctttaaaatagttttggactaacgaagctgaaatctattctcattcttgtttgtcaagaaaggaaaatctgttattcaaggtaaattatttctacaagggcaacaggtatggtcctccgatatttacattaagaagagttaaatttattttaacgtagacactaaaagtatgtgcaatatacaattaaagtaggaatttgttactgattgagaattgttactggtgaattggttttcaggttttgagcatacatatacaatgtgtttcaaatgctgcttgtaaaattaaaccatcatctagaatagagttaatttattataatcaagctacaaataggttttcttaaaccagagatgcactgcccttgtctaaagttcttattgcactggtttatatgtgtatgtgtgttttattgtgtgtttttttaatttgtaagtattctaagagtttcctaatactaaggttaaaattttcatgttgacctgagccttttgcaaatttgctttggctctattgatttgtccattatgtgttaggcaaatataacttaagtggagggggaagtttatgaatataatatagctctgtgttttaaacctcagaaacagatttgagtgtttcagtattatagaaacagtgatgactattcatgctctgctagtctatgcctgcaactccaaatgtttgtggttcagtatttcccacctacatttctgtttggtgacattgctcattttaacaaatatgaccgagtctagtttttctttaaaaggatagtttatgagtaatctttaaaaccatttccataccatctgtatataaccatttcggtagagaacacactacactgaaccctgctttagagctgtgtgttgagctaaaaatataattttttaaaaattgactagcaaaatctatggccacactgagaagcctttgaaaatggcaaatacttttcatcaccaattgcccaattcatctttcttctgcttcctcagccttgtagcaaaggctacacagcagcccacagtccacagtctttttgggaaaattggcctgccaccttctttaagctcagtttatttttgacttactttctttgctgtagttatgaaccttggggcattaaaatcccatggcaaggagcataagagatgttctcgtagctctgcgttgtgtgaaatgtccatcttagttttgttaaaaaaaaaaaaaaaaaaaggaaacagcctcacttttttgtgctccctcagaattgcttgctatgtctgttaatacagctgagctttttgttttcttctctttttgtctcaagattgtatatgaaggaggcttttcttctcagctaacaggcatataaggaaaaccatctagagagttttctttagaagtgactcccattagcctggtgtggtggtgtgtgcctatagtcccagccactaggaaagctgaggcagaaggatcccttgagcctaggaggttgaggctgcagtgagctatgatcgcatcagtccactccagcctgagcaacagagcgagaccctgtgtctaagtaaagaaaaagccagaagtgactcccactgcttctgttgatcggccatagggcttccatgggtggaaacttgtgagggagtttgtattaggtctggtcatggagggatgatgtaccatcaaggtagacccatcttcctgatgcacatttgctgtgcgagccagagtacagtcataacacggtattcgcatttcgttttctctgtctcactgagacaacaatctatactgttttggcaagtttgcattttagtattaatttataattagggattgttcaaacttcagatctgtttacaggttgtaaaaataaacttcggtatcagtgcatctacagaagtgttatttggtaatccaaatattagagttttcccaaatccaaaaacggtcagaaataagtccattatcaatataatttgaagaagatttttagtagtactgtgaagttcgtgcttacctggatgagaagaataaatgacacggatacactcctgagaagacactcgttaaacattgcatcggagagctgcctttgataaatgtgctgttaaacacttgaatgaagagaatggtggcagaatgagtgagcaagcagattgccccagaggggccggtaataatcacgtgagggataatcagattcctgcgtattcagcatcttctctattcatgtggagtgaaagctggtttttatacaggagatacgtaaagtaggccccacaaataatatttttaaaatacaaaggatcaccacaatcctctattgaacatataaggatcctcagatttaaataagtactttttttttttttaatcagaagaacattgttgtttgattatatgtttttaaaaacctgaagcttttttggtggcaggacctttcaataaatatttatttggtcaaaattttttattttgattttattaaatgggaagaaagcaagcagaaatagtaaaattcatatcatggaaaagatatgaccataatttagtctcctcaagtgaaaaacaggagtaatgtttcgttgcactttgaaagatctgcttcaaggcataactcgtgtagttgtctggtttcagggatagctgtttgaattgtcattctaaagtaggtcatcaggttcacttattatccgaccttaatctgggataaaggttttggtatttgcccacttctagatagaatgaatgaaaacaacacaagcgttttatgagcactctttatcagaaaggtatttcctggaccagaaatgggcaatagttacaatagttgatcctctgttctggaagctttgaaatttatcagagaatgaagtcattcagtacatctgataaagttttgttgttgttgttgttgttgttgttttaattgggcaaccctcagaactgaagaggttcagagaactttccaggtttatactatacctcaagaccacatagattagctactgcttattctttcacatgggctaggcctgttctcctcctccagacctagtattctaagttattaccacatagtatttttatgttacccatcatctttaaaaacattataggctgggcatggtggcttacgcctgtaatcccagcactttgggaggccaaggcgggcggatcatgaggtcaggagatcgagaccatcctggctaacacggtgaaaacccatgtctactaaaaatacaaaaaattagccaggtgtggtggcgggcgcctgtagtcccagctactcaggaggctgaggcaggagaatggtgtgaacccgggaggcagagcttgcagtgagccgagatcgcaccactgcactccagcctgggcgaaagggcaagactccatctcaaaaaaaaaaaaaaaaaaagactcatttatccatttacatttattctcagatgataaaatatatactgatactataactttcttatggtatcagttttctttattttcttgaataaaattacttctaccttcatttggtctttataatccactgtccacagcatcttcctttaaaccaatagtcccagaagagaccctctgaaattctaggactggatattaaaatgcctgaacctgttatctaaatcctttttaagaaacttaatgttccagctcttgaactacactgtggaacagtaatttgtgcccaatttagtggaagataatgaggctcactgtaaacactacattgtcctgcaaagtaattctgatgagagtttactgacttctagagccattctctttaaccgtctgcaggtctaaggattaactatatttgtgatttgtaataaaactgaattgtacaacactgcctgtgtttgtctggccaagacatttgcttcacttttaaaatgcacgttatctttggagaggtgaattattctacaaaatgcaccctaaatctcattgtttaaaaccttactgatctaataccatctacacaaaaaaatgttgtacttgcagaacttagtttataaaaacaaagaatgtgtatttcttcaatagccgggtatttggattgttctcttgataatatttgaatgtgactcttggatttaagtgcactattattcatggcttatacaataaaattgcactgtatggcaaatatgtctataatgtatgctttgctgaaacctcaagagtgctgtaaggtacaggtttccatattgtgaacctgtgtacgcacacacacatatacatacagtcttagggaaaaaaaaaagcagaacttttgtaagtctgtgtaacattttaatattgtttgtaatattcactaggtgataatttcccctgtaccctataactgtaatcattcaccttgggttggccggtttgtcaagcttggtttactgaatcaagaaagagtcttgtcgaatgtggtactgttcttagtgtgtaatatttgcgtatggtgttcctctgcctcagaggacagttgcacagatggctagtgttaaatttctatagacgatggtaataaaatctgaatatatttaagtgctaataaattaaatctgtgggcttatttg

SEQ ID NO: 369064 - DNA, 697 bp, Homo sapiens
tttttgtgaattttcccaaaaaccattatgttaagaaattccaatctttctgctttacttgaactctcaagcatttgattttaggcatgtcacttcattttacattgaaatcgcccaaatgaatctctgactgtgacttgacacacacagaggaaggtctcattgaaacctcttttccctattttgggtagaagagtggtcatagatattacctgacaatctgtttcaactaagtttattttttcaaaaaaggaactcctcccccagattttagactgccttaaagtacaacaaacatctttactcttgactaactccaagtatttatttcttgctgcttgtgtgagagcaaatataaacatagttttatcagtgggcggctttcttggtctttgggttgcaaacaatgatttctttttgattctcactttgtctctgactgttgaaaagaaaatggcaagatattggggctgacctttctgcctccaagtttttgctgtagtcacaaggaaaggtgacctttaaggcctctcccagccatgagcttgagtaaaccacacattcttggatccacaggaaatgaaattgtgaaggtcatctttcagcccagagtggcttgggaggggctcatattcattaattaatttgccttttatgatctcagaattaaggatacatataaagattgagcttctga

SEQ ID NO: 369065 - DNA, 338 bp, Homo sapiens
caaggcagaagtccttaggcgggacttccttaccaccacgggtgctaaaagaagagttagtaggtcatgcttctaccagtaatctaaggactctctccttctcttcttcctctttctccagatttccaagccttagctaagagtaatttggcttgtttagtattgttttcttatggtccagttaattaccaaaaatatttttaaaatcatctctgttaatagaatgtctaccaacttctcactatcagaaaatactcaacctccaaacaatttgaaattatctttctgatccaggtaaagaagcaaattgaaaatcaataaagtaaaaagtgacggag

SEQ ID NO: 369066 - DNA, 427 bp, Homo sapiens
catctttaaaaatacccatcttgaagtctgtatttactgtaagcatttcaatttaattaaatactaactttggatttggaaccgaattctgatttttttctgacctacttgtgatgttaacgaactttttaaaaaattacttatttttttagggccgggtgtggtcgtcacgcctgtaatccaggcactttgggaggccaaggtggttggatcccttgaggccaggggtttgagaacaacatggcaaaatctcatctctataaaaatacaaaaattagtcaggtgtggtggtgtgcacctgtgatcccagctactcaggaggctgaggcacaagaatcacttgaacctgggaggcagaggttgcagtgagccaagatcgtgtcaccacactccagcctgagtgacagagcgactctctcttaaaaaa

SEQ ID NO: 369067 - DNA, 322 bp, Homo sapiens
atctcacccacaaaacacccctggaaggtgctagagcatgctaaatacagctggtgaaagcgaggtggaagtaaaagcgtggggtggagatggcagaggagcaggtgtctgcaaagccaagcacctcccgggccccgtacgacgacactggatggaacattccaaaggaaagtgtgcaccatggttattttcaaatgtcaaccaaccatgttctgtaacaatcgtctcctactaccccaacaatattctcatggaaaagtattcttccctgaaaaacgatcatccaagaagatttccatccaacatatctccccaaaaaggt

SEQ ID NO: 369068 - DNA, 555 bp, Homo sapiens
ttcacccaatctgcttgactcaaaaaaacaccaatttaaatgtgactctcatctaaaaacatcctcacagaaacatccaaaatagtgtttgaccaaatatctgtacaatgtggcccatctaaattgacataaaattaaccatcacatataatgatcatacctagatgtgatttagtctgagtatgccataagacctcacaagtctttctcaggctctacgtgaagtcatttcctgtggggattcaagctcaccagttaatgcctactgctttattcccaccagaaacccaccatttctttctatcttgtcttatagctttctacccacaaacaaggttgatatgtatttcagcacactatggcacgacaggcatgtagaagctctattttgtccatcgtaaccaggaacctttctaagcttttagtcattgaggcttacagttacacagtgatcagtcctctgggagttgtatactgcataatttgatagcccagccaggagcagtttctggaaattcttcccaaatgatatcctttgtagtagatgtaacctga

SEQ ID NO: 369069 - DNA, 651 bp, Homo sapiens
acaatagccaggcgaagaaactacaactcccagggcgtcccggagcaggccaacgggactacgggaagcagcgggcagcggcccgcgggaggcacctcggagatctgggtgcaaaagcccagggttaggaaccgtaggcatgctgcgccccaaggctttgacccaggtgctaagccaagccaacactggaggcgtccagagcaccctgctgctgaataacgagggatcactgctggcctactctggttacggggacactgacgcccgggtcaccgctgccatagccagtaacatctgggccgcctacgaccggaacgggaaccaagcgtttaatgaagacaatctcaaattcatcctcatggactgcatggagggccgtgtagccatcacccgagtggccaaccttctgctgtgtatgtatgccaaggagaccgtgggctttggaatgctcaaggccaaggcccaggctttggtgcagtacctggaggagcccctcacccaagtggcggcatcttaacggcattggtggaagctggggtcagaaaagagaaatgaccatttggaggggcggggcctcctagaagaaccttcttagacaatggggggaggatgggactttgttttttccaagaataaacttcaactcctgtc

SEQ ID NO: 369070 - DNA, 901 bp, Homo sapiens
acaatagccaggcgaagaaactacaactcccagggcgtcccggagcaggccaacgggactacgggaagcagcgggcagcggcccgcgggaggcacctcggagatctgggtgcaaaagcccagggttaggaaccgtaggcatgctgcgccccaaggctttgacccaggtgctaagccaagccaacactggaggcgtccagagcaccctgctgctgaataacgagggatcactgctggcctactctggttacggggacactgacgcccgggtcaccgctgccatagccagtaacatctgggccgcctacgaccggaacgggaaccaagcgtttaatgaagacaatctcaaattcatcctcatggactgcatggtatggagaggggagccagacttcccctgtcccccaaaggggatcccaagggggcgacctggaccccatcctggatggttggaggggcagggacaggatctccggaagattactaagagttggtctgcagcagcatttgtaataggcaggaccctattcatcaagtggtggtgaggaaggatccctggacctgagaggtctgacttgggttctggtctcagccatccacttatcagttgtggaaccttgggagggccgtgtagccatcacccgagtggccaaccttctgctgtgtatgtatgccaaggagaccgtgggctttggaatgctcaaggccaaggcccaggctttggtgcagtacctggaggagcccctcacccaagtggcggcatcttaacggcattggtggaagctggggtcagaaaagagaaatgaccatttggaggggcggggcctcctagaagaaccttcttagacaatggggggaggatgggactttgttttttccaagaataaacttcaactcctgtc

SEQ ID NO: 369071 - DNA, 610 bp, Homo sapiens
acaatagccaggcgaagaaactacaactcccagggcgtcccggagcaggccaacgggactacgggaagcagcgggcagcggcccgcgggaggcacctcggagatctgggtgcaaaagcccagggttaggaaccgtaggcatgctgcgccccaaggctttgacccaggctgctgaataacgagggatcactgctggcctactctggttacggggacactgacgcccgggtcaccgctgccatagccagtaacatctgggccgcctacgaccggaacgggaaccaagcgtttaatgaagacaatctcaaattcatcctcatggactgcatggagggccgtgtagccatcacccgagtggccaaccttctgctgtgtatgtatgccaaggagaccgtgggctttggaatgctcaaggccaaggcccaggctttggtgcagtacctggaggagcccctcacccaagtggcggcatcttaacggcattggtggaagctggggtcagaaaagagaaatgaccatttggaggggcggggcctcctagaagaaccttcttagacaatggggggaggatgggactttgttttttccaagaataaacttcaactcctgtc

SEQ ID NO: 369072 - DNA, 861 bp, Homo sapiens
  misc_feature (659)..(660): n is a, c, g, or t
  misc_feature (662)..(662): n is a, c, g, or t
acaatagccaggcgaagaaactacaactcccagggcgtcccggagcaggccaacgggactacgggaagcagcgggcagcggcccgcgggaggcacctcggagatctgggtgcaaaagcccagggttaggaaccgtaggcatgctgcgccccaaggctttgacccaggtgctaagccaagccaacactggaggcgtccagagcaccctgctgctgaataacgagggatcactgctggcctactctggttacggggacactgacgcccgggtcaccgctgccatagccagtaacatctgggccgcctacgaccggaacgggaaccaagcgtttaatgaagacaatctcaaattcatcctcatggactgcatggagggccgtgtagccatcacccgagtggccaaccttctgctgtgtatgtatgccaaggagaccgtgggctttggaatgctcaaggccaaggcccaggctttggtgcagtacctggaggagcccctcacccaagtggcggcatcttaacggcattggtggaagctggggtcagaaaagagaaatgaccatttggaggggcggggcctcctagaagaaccttcttagacaatggggggaggatgggactttgttttttccaagaataaacttcaactcctgtcaaaaaacnnancaaaaaaaacgttgggggccgccgggccccaaaaaagcttttaacccactcgttgggcgcgggcccatgtgaattagcatcgggcaggggtcccaagaaaccgggctgaagggctggtttccccaataaaaacccggggacacccgcgttcggaacaacccaaggggtcggggcttcggattcacagggccaggcgaaa

SEQ ID NO: 369073 - DNA, 941 bp, Homo sapiens
acaatagccaggcgaagaaactacaactcccagggcgtcccggagcaggccaacgggactacgggaagcagcgggcagcggcccgcgggaggcacctcggagatctgggtgcaaaagcccagggttaggaaccgtaggcatgctgcgccccaaggctttgacccaggtgctaagccaagccaacactggaggcgtccagagcaccctgctgctgaataacgagggatcactgctggcctactctggttacggggacactgacgcccgggtcaccgctgccatagccagtaacatctgggccgcctacgaccggaacgggaaccaagcgtttaatgaagacaatctcaaattcatcctcatggactgcatggtatggagaggggagccagacttcccctgtcccccaaaggggatcccaagggggcgacctggaccccatcctggatggttggaggggcagggacaggatctccggaagattactaagagttggtctgcagcagcatttgtaataggcaggaccctattcatcaagtggtggtgaggaaggatccctggacctgagaggtctgacttgggttctggtctcagccatccacttatcagttgtggaaccttgggtaagtcgcttaacctctctcagcttccttacctcatgtttaaggagaagacaataatttccctctccccgctcccctcatgggttgttgtgaaggtcagatgaaataatgggtataaacagtagaatgacgtgcaaacacaaagtgttgtcatcccagtttcaccgactcacagaaccatggcagtctccagaccctagtccaaccccttaagctttcaaagaaaggaaaatgaagtccagaaaggggaagtcaccattagattgtgaacttcttagtatctgttcggtcgacaagtatttaggtccttgcagtattctc

SEQ ID NO: 369074 - DNA, 898 bp, Homo sapiens
acaatagccaggcgaagaaactacaactcccagggcgtcccggagcaggccaacgggactacgggaagcagcgggcagcggcccgcgggaggcacctcggagatctgggtgcaaaagcccagggttaggaaccgtaggcatgctgcgccccaaggctttgacccaggtgctaagccaagccaacactggaggcgtccagagcaccctgctgctgaataacgagggatcactgctggcctactctggttacggggacactgacgcccgggtcaccgctgccatagccagtaacatctgggccgcctacgaccggaacgggaaccaagcgtttaatgaagacaatctcaaattcatcctcatggactgcatggagggccgtgtagccatcacccgagtggccaaccttctgctgtgtatgtatgccaaggagaccgtgggctttggaatgctcaaggccaaggtgtgtatgtgcccatccctccatagccctgggcccagccttcgtgcttctacactgtgttcactcccaccaggaccctgtttctagagttctcatgtctactcagtccatttctggtgtgggccagctcccaagagcaggtgggggttgggggctggttgcttcctatggcactgggagcagacctggatttggggtccctaatgccaggctgtgtgcgggactgatctctgttctccctctgcaggcccaggctttggtgcagtacctggaggagcccctcacccaagtggcggcatcttaacggcattggtggaagctggggtcagaaaagagaaatgaccatttggaggggcggggcctcctagaagaaccttcttagacaatggggggaggatgggactttgttttttccaagaataaacttcaactcctgtc

SEQ ID NO: 369075 - DNA, 221 bp, Homo sapiens
aggtcccctgtcgaaaagggaagccggtgtgctgggtgcttagggcatgttccgggacacgctcaggccagagccttgctggatgtgcccttggtgggacttgggatggaaacccagacgttttactccccgctctgagcacatcgctatccctccccgcccctcaccaggctgctgaataacgagggatcactgctggcctactctggttacggggacac

SEQ ID NO: 369076 - DNA, 950 bp, Homo sapiens
acaatagccaggcgaagaaactacaactcccagggcgtcccggagcaggccaacgggactacgggaagcagcgggcagcggcccgcgggaggcacctcggagatctgggtgcaaaagcccagggttaggaaccgtaggcatgctgcgccccaaggctttgacccaggtgctaagccaagccaacactggaggcgtccagagcaccctgctgctgaataacgagggatcactgctggcctactctggttacggggacactgacgcccgggtcaccgctgccatagccagtaacatctgggccgcctacgaccggaacgggaaccaagcgtttaatgaagacaatctcaaattcatcctcatggactgcatggagggccgtgtagccatcacccgagtggccaaccttctgctgtgtatgtatgccaaggagaccgtgggctttggaatgctcaaggccaaggcccaggctttggtgcagtacctggaggagcccctcacccaagtggcggcatcttaacggcattggtggaagctggggtcagaaaagagaaatgaccatttggaggggcggggcctcctagaagaaccttcttagacaatggggggaggatgggactttgttttttccaagaataaacttcaactcctgtcaaaaaaaaaaaaaaaacaaaaaaaatttggagggggctgggcccttagaaaaggtttaaaaccaattgcgtgggagcgcggggccccaagaagtatacggaacactgggcacaacgcgtggtccccaaagagaagaacccgggacacaacaaaagggccggggaatactccgacatatataaaaagggccgcggggaaacaccagagaggtctgtggaccaaactccaaaaggggagagccagagacacaaacggggcgacctacacaacgggagccagagaaccccgatactaagtga

SEQ ID NO: 369077 - DNA, 688 bp, Homo sapiens
acaatagccaggcgaagaaactacaactcccagggcgtcccggagcaggccaacgggactacgggaagcagcgggcagcggcccgcgggaggcacctcggagatctgggtgcaaaagcccagggttaggaaccgtaggcatgctgcgccccaaggctttgacccaggtgctaagccaagccaacactggaggcgtccagagcaccctgctgctgaataacgagggatcactgctggcctactctggttacggggacactgacgcccgggtcaccgctgccatagccagtaacatctgggccgcctacgaccggaacgggaaccaagcgtttaatgaagacaatctcaaattcatcctcatggactgcatggagggccgtgtagccatcacccgagtggccaaccttctgctgtgtatgtatgccaaggagaccgtgggctttggaatgctcaaggccaaggctgtgtgcgggactgatctctgttctccctctgcaggcccaggctttggtgcagtacctggaggagcccctcacccaagtggcggcatcttaacggcattggtggaagctggggtcagaaaagagaaatgaccatttggaggggcggggcctcctagaagaaccttcttagacaatggggggaggatgggactttgttttttccaagaataaacttcaactcctgtc

SEQ ID NO: 369078 - DNA, 921 bp, Homo sapiens
acaatagccaggcgaagaaactacaactcccagggcgtcccggagcaggccaacgggactacgggaagcagcgggcagcggcccgcgggaggcacctcggagatctgggtgcaaaagcccagggttaggaaccgtaggcatgctgcgccccaaggctttgacccaggtgctaagccaagccaacactggaggcgtccagagcacccttgacgcccgggtcaccgctgccatagccagtaacatctgggccgcctacgaccggaacgggaaccaagcgtttaatgaagacaatctcaaattcatcctcatggactgcatggcccaggctttggtgcagtacctggaggagcccctcacccaagtggcggcatcttaacggcattggtggaagctggggtcagaaaagagaaatgaccatttggaggggcggggcctcctagaagaaccttcttagacaatggggggaggatgggactttgttttttccaagaataaacttcaactcctgtcaacaaaaacaccgtacacgaccaaccgacccccacccaaccacccccacacacatctttggcgccccccgcctctgccgaccaccggagaaaaaaccctggtgtacacaaccccacccgccgttatggggcaggcgccaggcggaccccccgagacgcacacggcgaccacgacagggtgctctataagccggctgattccccacaacgacaaaaaccgcgtgcgccccaagacaacaccaaaggccgcggcgggaacccgcccccacccagagaaaaacaacacggccgccgggcggcacaaaccgacaagcgtcctgcaaccaaagatccccaagagaggtcagacaccgccaacaggcggcgaccccaaaacccaggcagcgaccacgggggcgcgaatatcgcagtg

SEQ ID NO: 369079 - DNA, 350 bp, Homo sapiens
tgagacagactcttgctctgttgcccaggctggagcacagtggtgtgatgttggctcactgcaacctctccctcccaggttcaagtgattcttgtgcctcagcctcccgagtagttgggactatagacacacaccaccctgccctgctaatttttgtattattggtagaaatcaggtttcactatgttggccaggctgttcttaaactcctgacctcaagtgatccaccttccttggcctctcaaagtggattacagtcatgagccactgcgcctggccagtattactttttcactagtgttacagcaacagttactttcacttctaaaaacatataatcaaatggcttt

SEQ ID NO: 369080 - DNA, 464 bp, Homo sapiens
atgtttcttttcctcgttggaccagcaggctagctgaggcatgttatcctcatgacagtggcagaggcataagaggaaaagtgggaaaacacacaatctcttacagcccaggctcaaaactagattgccagttctgcttcattctagtacagctggatattggggtcgaaagtgcagttttccatgaatattaattaaagtttgaaatgaggctgggcatggaggctcacacctgtaataccagcactttgggaggccaaggcgggaggatcacgaggtcaggagtttgagagcggcctgcccaacatggtgaaaccccatctctactaaaactacaaaaattagccaggcgtggtggcacgcgcctgtactcccagctactcaggaggctgaggcaggagaatcgcttgaacctgggaggtggagtttgcagtgagctgagattgtgccaccacactccaggc

SEQ ID NO: 369081 - DNA, 2623 bp, Homo sapiens
  misc_feature (230)..(230): n is a, c, g, or t
  misc_feature (306)..(306): n is a, c, g, or t
  misc_feature (2151)..(2151): n is a, c, g, or t
taaattatactttaagttttagggtacatgtgcacattgtgcaggttagttacatatgtatacatgtgacctggctacctttaaagatggatattgactcctccaaaatgctttcacttgaaaaaaaaaagaagaaaaaaacctcaaaaatgagaagggctttccgacttgaggaaagcaaatctttttaacttgcactaggaacatcacgacattttcttgcctcttanatggtttgtattttggatgcttctgaagagaaacaaagacatatagaatttaaacattatctgtgtttatttgtanaatacttattttttgtattttgttttttaaatgagtatgtctgatatctcatacatttagaatatttgtaatagaatagcaaatttccaccatggaatcagtggagagctatgcaatttaacaactgcaaagaatcttagagatccttagagtaacacatcctcttatttacaaatggggaaacagggtatacgagtagaagtgacttgcctaatccataagctaggggtacaacagggtcattagggccatcctgttcaatttctccctgatatgatcctagcgatggagtacctaccaactttctttacaatagcccaacgtctagtatgagaatcattctgtggacactcttccaaattgaaacaatctccttggattactcctggcacagcttatgtattctcatagccaatcccctggtcatgactctgacactagtagataaaaagtatcactctaatctcttgatcttttcatcatgcctttatttttacacatgcagtactcagagtctaaacaaaccttagcttgcattttcctcttaaaagcccaccatggatctcacagttttgttgttgttgttgttgttgttgttgttgttgttgagacgggatctcactctgttgccaggctggagtgcagtggcacaatcttggctcactgcaacctccgactccttggttgttcaagtgattctcttgcctcagcctcccaaatagctgagattacaggcacgcgccaccaggcccagctaatttttgtatttttagtagagacagcgtttcaccatgttggccaggatggtctcgatctcctgacctcgtgatccacccacctcagccttccaaagtgctgggattacaggcgtgagccaccgcgcccggcctcttgtagtttttaaaattaaatttaatccaataaaacatttagtttgcctttatttggaatttgttatctattgttatatactctattaatacctcctcttcagcaaggaaattttcttacatctgcttacacgtacatcatttgttagagcccctaaatattggtaatgatgatgatgatattatagcatgaattactttacgttgaacattggcctaagtgctttaaacacattatttgcctagcatttacaacatttttgtaggtattatttgtcacaattacattttcttgttctatgatataatttgttttgatatcgtattagttttctattgttcccctactgaattaccacaaatttattacattgtgggattgtaagtctgaagtccaataggggtctcactagcctaaagttaaggtgtcggcaggactgtgttctgttttggagactctaggagaaaatctgtctccttgccttttccagcttcttgatgccattcatagcttctttcatgatctggcatcctatacgttatacttattttctgattatattttgcctaacctctgtgagatattaattatttgagggcagagatttttatttgtttgttcataactatatccaggtgccttaaaatgatgcctgacacaaaataggtactcaatcaacataggttaataaatgaatgagcaaaaagttttattgtgcatattaattgttacctgggggaatatactcagacatcttaagtctcatatgtaaacttggggtattgatatcaacatgccattttgaggattaattgaggttatgtctataaatacctactagcatagtgtctagcacatagtatgaaaacattgtattattattatttattaaaatggcattttgttttctttatagcacctgacactatccaaattgccttttctgtttttttntttttacttatttcttaattgtttcacaaaggcagagtcttgtatgctttgcctctatgtctttagtacctagaatagtgcctgtttaaaagtaggagctgaataaatgtttgctgaattaatattaatcatgtgtaggaaaagaagcttgggaatgttattctaccacccacagctgtgcccactattatgatggttgttttgtgtgttctttctcaaggattcactttcagaactcaaaatggggtgtagggtggtggtggtgccagcagtggggatgggagaagctcgatctctccctacagtagaagtgcttactgctctatgtgttcttcagccctataagaaccaatgaaagccatccacacttccctcgatactggacatccctacatactcacagcagtctgcaaaacatatccaagggcccactgagacactgaagatgacccattgatttaatacatatttg

SEQ ID NO: 369082 - DNA, 119 bp, Homo sapiens
ttaaaatatatttcctagttcttttaaattaaaatgatttgtatttagatatttacaaagactgggtagattgaggagtgttaaaactgatataaaccaaagacattttgtgccattag

SEQ ID NO: 369083 - DNA, 476 bp, Homo sapiens
gtgtaatcagtcaccatggagttttttaataggacagcttctgctcttacagagcagagtttttatgccagtaggttagaagcataacatgtttctatattgaagtgattctccaacaaggacttcttttcatcaggggtgacctaaaagttattacttgaaatataattacatcatgttcttaactgggtttagtagtaggataattacaaggttgtatccacctcaaataggaagaactgataagttttgcacaattatttaactcctctgttaggccttccttatttcctgttctctttttaaaatttgactaagatattgctaatgggcttgggagcctataaaatgatcagaattgttgccttatgttttgcatgtttggggtaacattggagccagatgtactcttaaataaaaggtaggcctacaaaaccagtttctcagttgcattcaaaatgtgattaaaaaaaaaa

SEQ ID NO: 369084 - DNA, 471 bp, Homo sapiens
ctggcatatacagtggaaaaggaagaagggcaagtgttttactatacgatcacatatgggtcatacgccccttttactacctatatgcccatcctgccacctctaagacataaagttccatagccagagatacaggactggtgaaatgaagatggcttatgatgaaacctgctgccttcttaaaattgcaaccactgcaccttttctggaagccagatcaagtttcaaacttgcagcaccaatgaggcatttgaagatgattcgcttagcctcagtgaaagtctagagagcctagcatcacagtcccaattcagcaccccaatctctgacttacaattacctctggatctcaaggaagatttatgtatatatgtttccttttacctatttctatgtcttataggttgaatgtatgtatgcatatggatttgaggattacagagtattttaaaagtctaaaatgtaatgaaa

SEQ ID NO: 369085 - DNA, 624 bp, Homo sapiens
atccgtatacataagcttcagaatctatcttctacttaaaaataagttcctatgcaatttgactgaacttaaaaagaacatgtaacaagctgtttagagaaataaaatgttcactcttcaagctctgtagtagtaattaagggtatctacgtttacgtacttctatttgctttttatccattcctcagcgatcacatatgggtcatacgccccttttactacctatatgcccatcctgccacctctaagacataaagttccatagccagagatacaggactggtgaaatgaagatggcttatgatgaaacctgctgccttcttaaaattgcaaccactgcaccttttctggaagccagatcaagtttcaagtaagtacaatatttcaaacctctgtaactcaggtatctgtaaaaagctgtgaggaatcatgttcagtatgtatctaaatacaaaaagcaatgtatgcacaaagatagtcattaatgagttacttctcatttgaatgcctagtaaaaaaaaggagtcttaaggtaaatctacgccccagaattcactgtcatgtggcagtgaattaaaaattgtatttctgggccaggcgcagtggctcatgcctgtaatccca

SEQ ID NO: 369086 - DNA, 403 bp, Homo sapiens
tatacgtggtcccagcacagactaaggaatccaactatcattgggcaagccatgctaggtatgcatgcctttggggctctgcaggggatagcgctatgcagggatggttgagagctggttttggggttgagacacgtgggaaatacttggactttgggctgagcctgtggtgctcaatcccggctgcatgttgggaccacagggagatgacaaaaccatccccagccctcaccctagggccctcgaatgagcatctcaggggtctaggaggcctccacaaagacctactgattggcacacacttgtttctctaggaagagaacttacagctgcaggcaggagcatgtcttaatctgcttgggctgccataagtaccacagactgggagggtttaacaacagaa

SEQ ID NO: 369087 - DNA, 394 bp, Homo sapiens
gtctctccacattctcttccctctatgcatgtctgtctctgtgtccaaatttgtcctttttaaaggacatcagtcctgggtgggcgtggtggctcacgcctgtaatctcagcactttgggaagccaacgcgggcagatcacctgaggtcaggagttccagaccagcctggccaacacggtgaaaccccgtctctactaaaaatacaaaaatcagcctggcgtggtggtgcatgcctgtaatcccagctacttagaggctgaggcaggagaatctcttgaaccagggaggtggatgttgcagtgagccaaaatttcatcactgcactccagcctaggccacagagcgagactctgtctcaaaaacaaacaaacaacaaacaacaacacaacaaaa

SEQ ID NO: 369088 - DNA, 357 bp, Homo sapiens
cgaaaaaagaaagcagaaagtgagttttgggcaagggaacagtagacatggagtgaggggtgggatccgtggggctgatgtagatagggtggcagcagggacaatgatggcttcggtgactaagacaggggagagaggagaggagcccgggggttggaagctgctccctcaccaggaagaagcagagtaggcacgtcaggtctcttctccccattgtgacatgcaaagtgtaaattttaaggataactggcagaaacagaaagattcaaggagactccagttcctcctccagcctggggctccagggcctcaaccataacttctaccaagagcccactcacactcagtgcagtggcc

SEQ ID NO: 369089 - DNA, 3191 bp, Homo sapiens
cgcggggcggaaggatcgcgttgccagctgcggcggccgccacagccacagccgccgccgccgccgccgccgcccctgcccctgccgcccctgcccctgccgttaggtggtggggtttctcagcccggcggcgggaggcgggccggcctcggcttcctgtcggaggacgcgcaaggatccgggcgtcggagtgtgtgcgagtgcgtgagtgtgtgtcggtcgcacggcgtgtgtctccggccgcgggttccgcctcctcccctgccgccgctgctcacggtgtaagtcaatgtgaagcagcagctccagccccgggataaacatggcgacgtctctgcatgagggacccacgaaccagctggatctgctcatccgggccgtggaagcatcagttcacagcagtaatgcacactgtacagataagacaattgaagctgctgaagccctgcttcatatggaatctcctacctgcttgagggattcaagaagtcctgtggaagtgtttgttcctccttgtgtatcaactccagaattcatccatgctgctatgaggccagatgtcattacagaaactgtagtggaggtgtcaactgaagagtctgaacccatggatacctctcctattccaacatcaccagatagccatgaaccaatgaaaaagaaaaaagttggccgtaaaccaaagacccagcaatcaccaatttccaatgggtctcctgagttaggtataaagaagaaaccaagagaaggaaaaggaaacacaacctatttgtgggagtttcttttagatctacttcaagataaaaatacttgtcccaggtatattaaatggactcagagagaaaaaggcatattcaagctggtggattcaaaggctgtctctaagctttggggaaagcataagaacaaaccagacatgaactatgaaaccatgggacgagctttgagatactactaccaaaggggaattcttgcaaaggttgaaggacagaggcttgtatatcagttcaaggatatgccgaaaaacatagtggtcatagatgatgacaaaagtgaaacctgtaatgaagatttagcaggaactactgatgaaaaatcattagaacgagtgtcactgtctgcagaaagtctcctgaaagcagcatcctctgttcgcagtggaaaaaattcatcccctataaactgctccagagcagagaagggtgtagctagagttgtgaatatcacttcccctgggcacgatgcttcatccaggtctcctactaccactgcatctgtgtcagcaacagcagctccaaggacagttcgtgtggcaatgcaggtacctgttgtaatgacatcattgggtcagaaaatttcaactgtggcagttcagtcagttaatgcaggtgcaccattaataaccagcactagtccaacaacagcgacctctccaaaggtagtcattcagacaatccctactgtgatgccagcttctactgaaaatggagacaaaatcaccatgcagcctgccaaaattattaccatcccagctacacagcttgcacagtgtcaactgcagacaaagtcaaatctgactggatcaggaagcattaacattgttggaaccccattggctgtgagagcacttacccctgtttcaatagcccatggtacacctgtaatgagactatcaatgcctactcagcaggcatctggccagactcctcctcgagttatcagtgcagtcataaaggggccagaggttaaatcggaagcagtggcaaaaaagcaagaacatgatgtgaaaactttgcagctagtagaagaaaaaccagcagatggaaataagacagtgacccacgtagtggttgtcagtgcgccttcagctattgcccttcctgtaactatgaaaacagaaggactagtgacatgtgagaaataaaatagcagctccaccatggacttcaggctgttagtggcagtactgacataaacatttgcaagggaagtcatcaagaaaagtcaaagaagactttaaaacatttttaatgcatatacaaaaacaatcagacttactggaaataaattacctatcccatgtttcagtgggaaatgaactacatattgagatgctgacagaaaactgcctcttacagtaggaaacaactgaacccatcaataagaaaaaggatcgaaagggaccaagcagctcactacgatatcaagttacactaagacttggaacactaacattctgtaagaggttatatagttttcagtgggaggggttgggatgggtaatctcattgttacatatagcaatttttgatgcattttatatgcataccagcaattattactgtgttcgcacagttctcacttaactggtgctatgtgaagactctgctaatataggtattttagaatgtgaattgaagaatggatcccaaaaacttcagaaagaggatagcaaaaaaagatctagtgcgatttatatatatatatatatatatatacatacatatatatatatcatatagcttaagctgatttaaaacaaaggccttagactaattttcgattttctttcttgaaataagctaatggcttgtttgtgtaaagcttttttattaaaagaaaaattttaaaaatcttgtacctagcacagtattgttatagaatatacatgtaacattttatatggtagtttaagtctgtcagtttcttaattgtggacaaattaacagttggctctggccttttgctgtaacatgcctgtgtcactcacttagccttggcatttgtgcagacataccattttcagttctgctgtcacttggaagttcaggctcagcatgaatttttggcaggtagctctaatacctggagttttctttgtttttttttcttttttttagttgaagtttatgagggaaataccagtgttcagttttgaactataatagtttgtatattcaacatttgaagtatattctattttgttgtactcttgtttcaaagtgtattcaagtaggttttctgaaatatagaaatgaaatttatcttctgttttggtctctggtgatattttaaacaatatttaaaagtcagtatagaagtgttttagttaggaagtgataaaacatctctcttctccttcccaactactgcatgaagaaattctacttccattatattaatatttgggc

SEQ ID NO: 369090 - DNA, 2592 bp, Homo sapiens
cgcggggcggaaggatcgcgttgccagctgcggcggccgccacagccacagccgccgccgccgccgccgccgcccctgcccctgccgcccctgcccctgccgttaggtggtggggtttctcagcccggcggcgggaggcgggccggcctcggcttcctgtcggaggacgcgcaaggatccgggcgtcggagtgtgtgcgagtgcgtgagtgtgtgtcggtcgcacggcgtgtgtctccggccgcgggttccgcctcctcccctgccgccgctgctcacggtgtaagtcaatgtgaagcagcagctccagccccgggataaacatggcgacgtctctgcatgagggacccacgaaccagctggatctgctcatccgggccgtggaagcatcagttcacagcagtaatgcacactgtacagataagacaattgaagctgctgaagccctgcttcatatggaatctcctacctgcttgagggattcaagaagtcctgaattcatccatgctgctatgaggccagatgtcattacagaaactgtagtggaggtgtcaactgaagagtctgaacccatggatacctctcctattccaacatcaccagatagccatgaaccaatgaaaaagaaaaaagttggccgtaaaccaaagacccagcaatcaccaatttccaatgggtctcctgagttaggtataaagaagaaaccaagagaaggaaaaggaaacacaacctatttgtgggagtttcttttagatctacttcaagataaaaatacttgtcccaggtatattaaatggactcagagagaaaaaggcatattcaagctggtggattcaaaggctgtctctaagctttggggaaagcataagaacaaaccagacatgaactatgaaaccatgggacgagctttgagatactactaccaaaggggaattcttgcaaaggttgaaggacagaggcttgtatatcagttcaaggatatgccgaaaaacatagtggtcatagatgatgacaaaagtgaaacctgtaatgaagatttagcaggaactactgatgaaaaatcattagaacgagtgtcactgtctgcagaaagtctcctgaaagcagcatcctctgttcgcagtggaaaaaattcatcccctataaactgctccagagcagagaagggtgtagctagagttgtgaatatcacttcccctgggcacgatgcttcatccaggtctcctactaccactgcatctgtgtcagcaacagcagctccaaggacagttcgtgtggcaatgcaggtacctgttgtaatgacatcattgggtcagaaaatttcaactgtggcagttcagtcagttaatgcaggtgcaccattaataaccagcactagtccaacaacagcgacctctccaaaggtagtcattcagacaatccctactgtgatgccagcttctactgaaaatggagacaaaatcaccatgcagcctgccaaaattattaccatcccagctacacagcttgcacagtgtcaactgcagacaaagtcaaatctgactggatcaggaagcattaacattgttggaaccccattggctgtgagagcacttacccctgtttcaatagcccatggtacacctgtaatgagactatcaatgcctactcagcaggcatctggccagactcctcctcgagttatcagtgcagtcataaaggggccagaggttaaatcggaagcagtggcaaaaaagcaagaacatgatgtgaaaactttgcagctagtagaagaaaaaccagcagatggaaataagacagtgacccacgtagtggttgtcagtgcgccttcagctattgcccttcctgtaactatgaaaacagaaggactagtgacatgtgagaaataaaatagcagctccaccatggacttcaggctgttagtggcagtactgacataaacatttgcaagggaagtcatcaagaaaagtcaaagaagactttaaaacatttttaatgcatatacaaaaacaatcagacttactggaaataaattacctatcccatgtttcagtgggaaatgaactacatattgagatgctgacagaaaactgcctcttacagtaggaaacaactgaacccatcaataagaaaaaggatcgaaagggaccaagcagctcactacgatatcaagttacactaagacttggaacactaacattctgtaagaggttatatagttttcagtgggaggggttgggatgggtaatctcattgttacatatagcaatttttgatgcattttatatgcataccagcaattattactgtgttcgcacagttctcacttaactggtgctatgtgaagactctgctaatataggtattttagaatgtgaattgaagaatggatcccaaaaacttcagaaagaggatagcaaaaaaagatctagtgcgatttatatatatatatatatatatatacatacatatatatatatcatatagcttaagctgatttaaaacaaaggccttagactaattttcgattttctttcttgaaataagctaatggcttgtttgtgtaaagcttttttattaaaagaaaaatttt

SEQ ID NO: 369091 - DNA, 934 bp, Homo sapiens
gccgccgtcgcctaggcggttgggggtcggtggggcggcgcgggcgggggtcgctgcgcggggcggcgagcctctgttttgtctccttctctccctgtggagcggctcgggctgctggggaggccccggctccctccggacgctcggccaacggcggcggctagtccgcggccctgctgagagggaaaaggacgccgcggtcttcccaggcgtcgcggagagcagttccaaagaactactggttcagattttagctcttcccaagttgtgaaaatagtgaaggatgcttagactacttaacatacaaactgctttctggttaatcatctttagaagactggatttctggatatctactccactccatctctattgacttttaaaacatgataatgcaaacctataacactggcaaccatcagtgaacctttaatttcattgattaatagcgtttgaagcttcctcagggaataacaatgacatcagcagtggttgacagtggaggtactattttggagctttccagcaatggagtagaaaatcaagaggaaagtgaaaaggtttctgaatatccagcagtgattgtggagccagttccaagtgccagattagagcagggctatgcagcccaggttctggtttatgatgatgagacttatatgatgcaagatgtggcagaagaacaagaagttgagaccgagaatgtggaaacaggtggaatctcactctgtcacccaggctggagtgcggtggtgtgatctcggctcactgcaacctccgcctcccgggttcaagtgattctcctgcctcagcctcccaagtggctgggactacagaaatcctccctgtggcacaaaaggactcctttaattagaaaatattgttgccacagggaggtagaagatcgacatgaaaaactggggatctgaaaacg

SEQ ID NO: 369092 - DNA, 834 bp, Homo sapiens
gccgccgtcgcctaggcggttgggggtcggtggggcggcgcgggcgggggtcgctgcgcggggcggcgagcctctgttttgtctccttctctccctgtggagcggctcgggctgctggggaggccccggctccctccggacgctcggccaacggcggcggctagtccgcggccctgctgagagggaaaaggacgccgcggtcttcccaggcgtcgcggagagcagttccaaagaactactggttcagattttagctcttcccaagttgtgaaaatagtgaaggatgcttagactacttaacatacaaactgctttctggttaatcatctttagaagactggatttctggatatctactccactccatctctattgacttttaaaacatgataatgcaaacctataacactggcaaccatcagtgaacctttaatttcattgattaatagcgtttgaagcttcctcagggaataacaatgacatcagcagtggttgacagtggaggtactattttggagctttccagcaatggagtagaaaatcaagaggttaggcattcaatgaattacatttctattttcttcatagaaatttgtgcatgaactaattttgaaattaataggaaacatatttgagagtaaaaatgtacaaagcatgaaattatacatgtacatgtcgtgtatccttatataatttaggtaatagaaggtcaaggaaggtattgcagggcttacgtgaattgttggaacatacatatattagaatgaacttggagggaggaaaggaatggaaagaacactatagtattagttgagagttaaatttaaatccctc

SEQ ID NO: 369093 - DNA, 2921 bp, Homo sapiens
cgcggggcggaaggatcgcgttgccagctgcggcggccgccacagccacagccgccgccgccgccgccgccgcccctgcccctgccgcccctgcccctgccgttaggtggtggggtttctcagcccggcggcgggaggcgggccggcctcggcttcctgtcggaggacgcgcaaggatccgggcgtcggagtgtgtgcgagtgcgtgagtgtgtgtcggtcgcacggcgtgtgtctccggccgcgggttccgcctcctcccctgccgccgctgctcacggtgtaagtcaatgtgaagcagcagctccagccccgggataaacatggcgacgtctctgcatgagggacccacgaaccagctggatctgctcatccgggccgtggaagcatcagttcacagcagtaatgcacactgtacagataagacaattgaagctgctgaagccctgcttcatatggaatctcctacctgcttgagggattcaagaagtcctgaattcatccatgctgctatgaggccagatgtcattacagaaactgtagtggaggtgtcaactgaagagtctgaacccatggatacctctcctattccaacatcaccagatagccatgaaccaatgaaaaagaaaaaaggaaacacaacctatttgtgggagtttcttttagatctacttcaagataaaaatacttgtcccaggtatattaaatggactcagagagaaaaaggcatattcaagctggtggattcaaaggctgtctctaagctttggggaaagcataagaacaaaccagacatgaactatgaaaccatgggacgagctttgagatactactaccaaaggggaattcttgcaaaggttgaaggacagaggcttgtatatcagttcaaggatatgccgaaaaacatagtggtcatagatgatgacaaaagtgaaacctgtaatgaagatttagcaggaactactgatgaaaaatcattagaacgagtgtcactgtctgcagaaagtctcctgaaagcagcatcctctgttcgcagtggaaaaaattcatcccctataaactgctccagagcagagaagggtgtagctagagttgtgaatatcacttcccctgggcacgatgcttcatccaggtctcctactaccactgcatctgtgtcagcaacagcagctccaaggacagttcgtgtggcaatgcaggtacctgttgtaatgacatcattgggtcagaaaatttcaactgtggcagttcagtcagttaatgcaggtgcaccattaataaccagcactagtccaacaacagcgacctctccaaaggtagtcattcagacaatccctactgtgatgccagcttctactgaaaatggagacaaaatcaccatgcagcctgccaaaattattaccatcccagctacacagcttgcacagtgtcaactgcagacaaagtcaaatctgactggatcaggaagcattaacattgttggaaccccattggctgtgagagcacttacccctgtttcaatagcccatggtacacctgtaatgagactatcaatgcctactcagcaggcatctggccagactcctcctcgagttatcagtgcagtcataaaggggccagaggttaaatcggaagcagtggcaaaaaagcaagaacatgatgtgaaaactttgcagctagtagaagaaaaaccagcagatggaaataagacagtgacccacgtagtggttgtcagtgcgccttcagctattgcccttcctgtaactatgaaaacagaaggactagtgacatgtgagaaataaaatagcagctccaccatggacttcaggctgttagtggcagtactgacataaacatttgcaagggaagtcatcaagaaaagtcaaagaagactttaaaacatttttaatgcatatacaaaaacaatcagacttactggaaataaattacctatcccatgtttcagtgggaaatgaactacatattgagatgctgacagaaaactgcctcttacagtaggaaacaactgaacccatcaataagaaaaaggatcgaaagggaccaagcagctcactacgatatcaagttacactaagacttggaacactaacattctgtaagaggttatatagttttcagtgggaggggttgggatgggtaatctcattgttacatatagcaatttttgatgcattttatatgcataccagcaattattactgtgttcgcacagttctcacttaactggtgctatgtgaagactctgctaatataggtattttagaatgtgaattgaagaatggatcccaaaaacttcagaaagaggatagcaaaaaaagatctagtgcgatttatatatatatatatatatatatacatacatatatatatatcatatagcttaagctgatttaaaacaaaggccttagactaattttcgattttctttcttgaaataagctaatggcttgtttgtgtaaagcttttttattaaaagaaaaattttaaaaatcttgtacctagcacagtattgttatagaatatacatgtaacattttatatggtagtttaagtctgtcagtttcttaattgtggacaaattaacagttggctctggccttttgctgtaacatgcctgtgtcactcacttagccttggcatttgtgcagacataccattttcagttctgctgtcacttggaagttcaggctcagcatgaatttttggcaggtagctctaatacctggagttttctttgtttttttttcttttttttagttgaagtttatgagggaaataccagtgttcagttttgaactataatagtttgtatattcaacatttgaagtatattctattttgttgtactcttgtttcaaagtgtattcaagtaggttttctgaaatatagaaatgaaattta

SEQ ID NO: 369094 - DNA, 3535 bp, Homo sapiens
tgattctcctgcctcagcctctcaagtagctgggattacaggcacccgccaccacgcccagctaattgttttgtatttttagtagagacggggtttcaccatgttggtcaggctggtctccaactgctgacctcgtgatccacctgcctcggcctcccaaagtgctggaatatacaggcgtgagccaccgcacctggcacagttatatttatctcctagaatatgaatatcataatactacctatgtacaattgcttgttaagaacttaattcagtatgttcatgaacttgattactaactcttaagaagcagaatgttcattactgccctcttttgacacggggatgttaagcctgtcttctttttcttagttaagtgttaaaattagattgcacaataagttatgctttatttatgtccttcctgtaatttttaaaataacttttcaaattcttcctctttttaggctttctggttaatcatctttagaagactggatttctggatatctactccactccatctctattgacttttaaaacatgataatgcaaacctataacactggcaaccatcagtgaacctttaatttcattgattaatagcgtttgaagcttcctcagggaataacaatgacatcagcagtggttgacagtggaggtactattttggagctttccagcaatggagtagaaaatcaagaggaaagtgaaaaggtttctgaatatccagcagtgattgtggagccagttccaagtgccagattagagcagggctatgcagcccaggttctggtttatgatgatgagacttatatgatgcaagatgtggcagaagaacaagaagttgagaccgagaatgtggaaacagtggaagcatcagttcacagcagtaatgcacactgtacagataagacaattgaagctgctgaagccctgcttcatatggaatctcctacctgcttgagggattcaagaagtcctgtggaagtgtttgttcctccttgtgtatcaactccagaattcatccatgctgctatgaggccagatgtcattacagaaactgtagtggaggtgtcaactgaagagtctgaacccatggatacctctcctattccaacatcaccagatagccatgaaccaatgaaaaagaaaaaagttggccgtaaaccaaagacccagcaatcaccaatttccaatgggtctcctgagttaggtataaagaagaaaccaagagaaggaaaaggaaacacaacctatttgtgggagtttcttttagatctacttcaagataaaaatacttgtcccaggtatattaaatggactcagagagaaaaaggcatattcaagctggtggattcaaaggctgtctctaagctttggggaaagcataagaacaaaccagacatgaactatgaaaccatgggacgagctttgagatactactaccaaaggggaattcttgcaaaggttgaaggacagaggcttgtatatcagttcaaggatatgccgaaaaacatagtggtcatagatgatgacaaaagtgaaacctgtaatgaagatttagcaggaactactgatgaaaaatcattagaacgagtgtcactgtctgcagaaagtctcctgaaagcagcatcctctgttcgcagtggaaaaaattcatcccctataaactgctccagagcagagaagggtgtagctagagttgtgaatatcacttcccctgggcacgatgcttcatccaggtctcctactaccactgcatctgtgtcagcaacagcagctccaaggacagttcgtgtggcaatgcaggtacctgttgtaatgacatcattgggtcagaaaatttcaactgtggcagttcagtcagttaatgcaggtgcaccattaataaccagcactagtccaacaacagcgacctctccaaaggtagtcattcagacaatccctactgtgatgccagcttctactgaaaatggagacaaaatcaccatgcagcctgccaaaattattaccatcccagctacacagcttgcacagtgtcaactgcagacaaagtcaaatctgactggatcaggaagcattaacattgttggaaccccattggctgtgagagcacttacccctgtttcaatagcccatggtacacctgtaatgagactatcaatgcctactcagcaggcatctggccagactcctcctcgagttatcagtgcagtcataaaggggccagaggttaaatcggaagcagtggcaaaaaagcaagaacatgatgtgaaaactttgcagctagtagaagaaaaaccagcagatggaaataagacagtgacccacgtagtggttgtcagtgcgccttcagctattgcccttcctgtaactatgaaaacagaaggactagtgacatgtgagaaataaaatagcagctccaccatggacttcaggctgttagtggcagtactgacataaacatttgcaagggaagtcatcaagaaaagtcaaagaagactttaaaacatttttaatgcatatacaaaaacaatcagacttactggaaataaattacctatcccatgtttcagtgggaaatgaactacatattgagatgctgacagaaaactgcctcttacagtaggaaacaactgaacccatcaataagaaaaaggatcgaaagggaccaagcagctcactacgatatcaagttacactaagacttggaacactaacattctgtaagaggttatatagttttcagtgggaggggttgggatgggtaatctcattgttacatatagcaatttttgatgcattttatatgcataccagcaattattactgtgttcgcacagttctcacttaactggtgctatgtgaagactctgctaatataggtattttagaatgtgaattgaagaatggatcccaaaaacttcagaaagaggatagcaaaaaaagatctagtgcgatttatatatatatatatatatatatacatacatatatatatatcatatagcttaagctgatttaaaacaaaggccttagactaattttcgattttctttcttgaaataagctaatggcttgtttgtgtaaagcttttttattaaaagaaaaattttaaaaatcttgtacctagcacagtattgttatagaatatacatgtaacattttatatggtagtttaagtctgtcagtttcttaattgtggacaaattaacagttggctctggccttttgctgtaacatgcctgtgtcactcacttagccttggcatttgtgcagacataccattttcagttctgctgtcacttggaagttcaggctcagcatgaatttttggcaggtagctctaatacctggagttttctttgtttttttttcttttttttagttgaagtttatgagggaaataccagtgttcagttttgaactataatagtttgtatattcaacatttgaagtatattctattttgttgtactcttgtttcaaagtgtattcaagtaggttttctgaaatatagaaatgaaattta

SEQ ID NO: 369095 - DNA, 3489 bp, Homo sapiens
gccgccgtcgcctaggcggttgggggtcggtggggcggcgcgggcgggggtcgctgcgcggggcggcgagcctctgttttgtctccttctctccctgtggagcggctcgggctgctggggaggccccggctccctccggacgctcggccaacggcggcggctagtccgcggccctgctgagagggaaaaggacgccgcggtcttcccaggcgtcgcggagagcagttccaaagaactactggttcagattttagctcttcccaagttgtgaaaatagtgaaggatgcttagactacttaacatacaaactgctttctggttaatcatctttagaagactggatttctggatatctactccactccatctctattgacttttaaaacatgataatgcaaacctataacactggcaaccatcagtgaacctttaatttcattgattaatagcgtttgaagcttcctcagggaataacaatgacatcagcagtggttgacagtggaggtactattttggagctttccagcaatggagtagaaaatcaagaggaaagtgaaaaggtttctgaatatccagcagtgattgtggagccagttccaagtgccagattagagcagggctatgcagcccaggttctggtttatgatgatgagacttatatgatgcaagatgtggcagaagaacaagaagttgagaccgagaatgtggaaacagtggaagcatcagttcacagcagtaatgcacactgtacagataagacaattgaagctgctgaagccctgcttcatatggaatctcctacctgcttgagggattcaagaagtcctgaattcatccatgctgctatgaggccagatgtcattacagaaactgtagtggaggtgtcaactgaagagtctgaacccatggatacctctcctattccaacatcaccagatagccatgaaccaatgaaaaagaaaaaagttggccgtaaaccaaagacccagcaatcaccaatttccaatgggtctcctgagttaggtataaagaagaaaccaagagaaggaaaaggaaacacaacctatttgtgggagtttcttttagatctacttcaagataaaaatacttgtcccaggtatattaaatggactcagagagaaaaaggcatattcaagctggtggattcaaaggctgtctctaagctttggggaaagcataagaacaaaccagacatgaactatgaaaccatgggacgagctttgagatactactaccaaaggggaattcttgcaaaggttgaaggacagaggcttgtatatcagttcaaggatatgccgaaaaacatagtggtcatagatgatgacaaaagtgaaacctgtaatgaagatttagcaggaactactgatgaaaaatcattagaacgagtgtcactgtctgcagaaagtctcctgaaagcagcatcctctgttcgcagtggaaaaaattcatcccctataaactgctccagagcagagaagggtgtagctagagttgtgaatatcacttcccctgggcacgatgcttcatccaggtctcctactaccactgcatctgtgtcagcaacagcagctccaaggacagttcgtgtggcaatgcaggtacctgttgtaatgacatcattgggtcagaaaatttcaactgtggcagttcagtcagttaatgcaggtgcaccattaataaccagcactagtccaacaacagcgacctctccaaaggtagtcattcagacaatccctactgtgatgccagcttctactgaaaatggagacaaaatcaccatgcagcctgccaaaattattaccatcccagctacacagcttgcacagtgtcaactgcagacaaagtcaaatctgactggatcaggaagcattaacattgttggaaccccattggctgtgagagcacttacccctgtttcaatagcccatggtacacctgtaatgagactatcaatgcctactcagcaggcatctggccagactcctcctcgagttatcagtgcagtcataaaggggccagaggttaaatcggaagcagtggcaaaaaagcaagaacatgatgtgaaaactttgcagctagtagaagaaaaaccagcagatggaaataagacagtgacccacgtagtggttgtcagtgcgccttcagctattgcccttcctgtaactatgaaaacagaaggactagtgacatgtgagaaataaaatagcagctccaccatggacttcaggctgttagtggcagtactgacataaacatttgcaagggaagtcatcaagaaaagtcaaagaagactttaaaacatttttaatgcatatacaaaaacaatcagacttactggaaataaattacctatcccatgtttcagtgggaaatgaactacatattgagatgctgacagaaaactgcctcttacagtaggaaacaactgaacccatcaataagaaaaaggatcgaaagggaccaagcagctcactacgatatcaagttacactaagacttggaacactaacattctgtaagaggttatatagttttcagtgggaggggttgggatgggtaatctcattgttacatatagcaatttttgatgcattttatatgcataccagcaattattactgtgttcgcacagttctcacttaactggtgctatgtgaagactctgctaatataggtattttagaatgtgaattgaagaatggatcccaaaaacttcagaaagaggatagcaaaaaaagatctagtgcgatttatatatatatatatatatatatacatacatatatatatatcatatagcttaagctgatttaaaacaaaggccttagactaattttcgattttctttcttgaaataagctaatggcttgtttgtgtaaagcttttttattaaaagaaaaattttaaaaatcttgtacctagcacagtattgttatagaatatacatgtaacattttatatggtagtttaagtctgtcagtttcttaattgtggacaaattaacagttggctctggccttttgctgtaacatgcctgtgtcactcacttagccttggcatttgtgcagacataccattttcagttctgctgtcacttggaagttcaggctcagcatgaatttttggcaggtagctctaatacctggagttttctttgtttttttttcttttttttagttgaagtttatgagggaaataccagtgttcagttttgaactataatagtttgtatattcaacatttgaagtatattctattttgttgtactcttgtttcaaagtgtattcaagtaggttttctgaaatatagaaatgaaatttatcttctgttttggtctctggtgatattttaaacaatatttaaaagtcagtatagaagtgttttagttaggaagtgataaaacatctctcttctccttcccaactactgcatgaagaaattctacttccattatattaatatttgggc

SEQ ID NO: 369096 - DNA, 2644 bp, Homo sapiens
cgcggggcggaaggatcgcgttgccagctgcggcggccgccacagccacagccgccgccgccgccgccgccgcccctgcccctgccgcccctgcccctgccgttaggtggtggggtttctcagcccggcggcgggaggcgggccggcctcggcttcctgtcggaggacgcgcaaggatccgggcgtcggagtgtgtgcgagtgcgtgagtgtgtgtcggtcgcacggcgtgtgtctccggccgcgggttccgcctcctcccctgccgccgctgctcacggtgtaagtcaatgtgaagcagcagctccagccccgggataaacatggcgacgtctctgcatgagggacccacgaaccagctggatctgctcatccgggccgtggaagcatcagttcacagcagtaatgcacactgtacagataagacaattgaagctgctgaagccctgcttcatatggaatctcctacctgcttgagggattcaagaagtcctgaattcatccatgctgctatgaggccagatgtcattacagaaactgtagtggaggtgtcaactgaagagtctgaacccatggatacctctcctattccaacatcaccagatagccatgaaccaatgaaaaagaaaaaagttggccgtaaaccaaagacccagcaatcaccaatttccaatgggtctcctgagttaggtataaagaagaaaccaagagaaggaaaaggaaacacaacctatttgtgggagtttcttttagatctacttcaagataaaaatacttgtcccaggtatattaaatggactcagagagaaaaaggcatattcaagctggtggattcaaaggctgtctctaagctttggggaaagcataagaacaaaccagacatgaactatgaaaccatgggacgagctttgagatactactaccaaaggggaattcttgcaaaggttgaaggacagaggcttgtatatcagttcaaggatatgccgaaaaacatagtggtcatagatgatgacaaaagtgaaacctgtaatgaagatttagcaggaactactgatgaaaaatcattagaacgagtgtcactgtctgcagaaagtctcctgaaagcagcatcctctgttcgcagtggaaaaaattcatcccctataaactgctccagagcagagaagggtgtagctagagttgtgaatatcacttcccctgggcacgatgcttcatccaggtctcctactaccactgcatctgtgtcagcaacagcagctccaaggacagttcgtgtggcaatgcaggtacctgttgtaatgacatcattgggtcagaaaatttcaactgtggcagttcagtcagttaatgcaggtgcaccattaataaccagcactagtccaacaacagcgacctctccaaaggtagtcattcagacaatccctactgtgatgccagcttctactgaaaatggagacaaaatcaccatgcagcctgccaaaattattaccatcccagctacacagcttgcacagtgtcaactgcagacaaagtcaaatctgactggatcaggaagcattaacattgttggaaccccattggctgtgagagcacttacccctgtttcaatagcccatggtacacctgtaatgagactatcaatgcctactcagcaggcatctggccagactcctcctcgagttatcagtgcagtcataaaggggccagaggttaaatcggaagcagtggcaaaaaagcaagaacatgatgtgaaaactttgcagctagtagaagaaaaaccagcagatggaaataagacagtgacccacgtagtggttgtcagtgcgccttcagctattgcccttcctgtaactatgaaaacagaaggactagtgacatgtgagaaataaaatagcagctccaccatggacttcaggctgttagtggcagtactgacataaacatttgcaagggaagtcatcaagaaaagtcaaagaagactttaaaacatttttaatgcatatacaaaaacaatcagacttactggaaataaattacctatcccatgtttcagtgggaaatgaactacatattgagatgctgacagaaaactgcctcttacagtaggaaacaactgaacccatcaataagaaaaaggatcgaaagggaccaagcagctcactacgatatcaagttacactaagacttggaacactaacattctgtaagaggttatatagttttcagtgggaggggttgggatgggtaatctcattgttacatatagcaatttttgatgcattttatatgcataccagcaattattactgtgttcgcacagttctcacttaactggtgctatgtgaagactctgctaatataggtattttagaatgtgaattgaagaatggatcccaaaaacttcagaaagaggatagcaaaaaaagatctagtgcgatttatatatatatatatatatatatacatacatatatatatatcatatagcttaagctgatttaaaacaaaggccttagactaattttcgattttctttcttgaaataagctaatggcttgtttgtgtaaagcttttttattaaaagaaaaattttaaaaatcttgtacctagcacagtattgttatagaatatacatgtaacatttt

SEQ ID NO: 369097 - DNA, 3489 bp, Homo sapiens
cgcggggcggaaggatcgcgttgccagctgcggcggccgccacagccacagccgccgccgccgccgccgccgcccctgcccctgccgcccctgcccctgccgttaggtggtggggtttctcagcccggcggcgggaggcgggccggcctcggcttcctgtcggaggacgcgcaaggatccgggcgtcggagtgtgtgcgagtgcgtgagtgtgtgtcggtcgcacggcgtgtgtctccggccgcgggttccgcctcctcccctgccgccgctgctcacggtgtaagtcaatgtgaagcagcagctccagccccgggataaacatggcgacgtctctgcatgagggacccacgaaccagctggatctgctcatccgggccgtggaagcatcagttcacagcagtaatgcacactgtacagataagacaattgaagctgctgaagccctgcttcatatggaatctcctacctgcttgagggattcaagaagtcctgaattcatccatgctgctatgaggccagatgtcattacagaaactgtagtggaggtgtcaactgaagagtctgaacccatggatacctctcctattccaacatcaccagatagccatgaaccaatgaaaaagaaaaaagttggccgtaaaccaaagacccagcaatcaccaatttccaatgggtctcctgagttaggtataaagaagaaaccaagagaaggaaaaggaaacacaacctatttgtgggagtttcttttagatctacttcaagataaaaatacttgtcccaggtatattaaatggactcagagagaaaaaggcatattcaagctggtggattcaaaggctgtctctaagctttggggaaagcataagaacaaaccagacatgaactatgaaaccatgggacgagctttgagatactactaccaaaggggaattcttgcaaaggttgaaggacagaggcttgtatatcagttcaaggatatgccgaaaaacatagtggtcatagatgatgacaaaagtgaaacctgtaatgaagatttagcaggaactactgatgaaaaatcattagaacgagtgtcactgtctgcagaaagtctcctgaaagcagcatcctctgttcgcagtggaaaaaattcatcccctataaactgctccagagcagagaagggtgtagctagagttgtgaatatcacttcccctgggcacgatgcttcatccaggtctcctactaccactgcatctgtgtcagcaacagcagctccaaggacagttcgtgtggcaatgcaggtacctgttgtaatgacatcattgggtcagaaaatttcaactgtggcagttcagtcagttaatgcaggtgcaccattaataaccagcactagtccaacaacagcgacctctccaaaggtagtcattcagacaatccctactgtgatgccagcttctactgaaaatggagacaaaatcaccatgcagcctgccaaaattattaccatcccagctacacagcttgcacagtgtcaactgcagacaaagtcaaatctgactggatcaggaagcattaacattgttggaaccccattggctgtgagagcacttacccctgtttcaatagcccatggtacacctgtaatgagactatcaatgcctactcagcaggcatctggccagactcctcctcgagttatcagtgcagtcataaaggggccagaggttaaatcggaagcagtggcaaaaaagcaagaacatgatgtgaaaactttgcagctagtagaagaaaaaccagcagatggaaataagacagtgacccacgtagtggttgtcagtgcgccttcagctattgcccttcctgtaactatgaaaacagaaggactagtgacatgtgagaaataaaatagcagctccaccatggacttcaggctgttagtggcagtactgacataaacatttgcaagggaagtcatcaagaaaagtcaaagaagactttaaaacatttttaatgcatatacaaaaacaatcagacttactggaaataaattacctatcccatgtttcagtgggaaatgaactacatattgagatgctgacagaaaactgcctcttacagtaggaaacaactgaacccatcaataagaaaaaggatcgaaagggaccaagcagctcactacgatatcaagttacactaagacttggaacactaacattctttcctgataatgcatcagtgaaggatccaatctcctgcagtgataactagaaaggataactcgagagtttcactggattttttccagtccccttaactcatagtaacataccaatcatatgttggtgtttccaaaactgatttcgtctggtggcatgcccatgcacccatatgcccaccctcaactcataccctgttaattttgttggtagacaacacttgaaactcagacattattttggccttcattcttatccagatttatttatttaaggctgccatggtttctcttccggttgaagtattttggggtaggtaaacaatgtacctgcaataatgagtattctaatcagtattgttctcaacaacatatgactagcaattagtcatgctaaaatctgaaccaattctacatttggtagatgttcccgtgcttgtcattctttccagtagccccaaaattctgtgcatactatgttacttctgaaaacctcatttgttttaaaagtggttctattaaagaatgagtgatccatttcagtggacgttgttgcagctacagatctatgtacgttcacttttacagtgaaggctccatgtgtgaatggatatatgtgggtcattatgataaaacagtattaaaggagaaaatctactcccagattctttttggactacaaagacattaaaagcactaggtttaaaagaccatttattaatcttatgtatttacaactcacaaattaaaatatctattaccaataagttattttgtttggaagaggctttacctgtaatttttacttttatttctgatggaagagaattccaggtttttttgagatggagtttcactcttgttgcccaggctagagcacaataatggaacatagaggcaggacaaggattatttttgaagaatgtatcaaagaaatctgacatttaaataacaaaagcccctccaggctaaatagttcctttgtactcattttgttatagcccaaatgaaaatattttaaagctttatgaaaatcaccataaattactttctctataacttctcttgcatggttctaaaatgttcataatgctataatttacttaattttatatgaagatataaaaaataaatactgccatgcattttgttgacattttaaaaacccacaaataaataacttaaaatgctgtttagagaaattgctcctacatactattatggaagattcaagcaacaagtctaagtttttatagcatcctcaaattgaaaaagcttcaaaataaccga

SEQ ID NO: 369098 - DNA, 2148 bp, Homo sapiens
  misc_feature (2129)..(2129): n is a, c, g, or t
cgcggggcggaaggatcgcgttgccagctgcggcggccgccacagccacagccgccgccgccgccgccgccgcccctgcccctgccgcccctgcccctgccgttaggtggtggggtttctcagcccggcggcgggaggcgggccggcctcggcttcctgtcggaggacgcgcaaggatccgggcgtcggagtgtgtgcgagtgcgtgagtgtgtgtcggtcgcacggcgtgtgtctccggccgcgggttccgcctcctcccctgccgccgctgctcacggtgtaagtcaatgtgaagcagcagctccagccccgggataaacatggcgacgtctctgcatgagggacccacgaaccagctggatctgctcatccgggccgtggaagcatcagttcacagcagtaatgcacactgtacagataagacaattgaagctgctgaagccctgcttcatatggaatctcctacctgcttgagggattcaagaagtcctgaattcatccatgctgctatgaggccagatgtcattacagaaactgtagtggaggtgtcaactgaagagtctgaacccatggatacctctcctattccaacatcaccagatagccatgaaccaatgaaaaagaaaaaagttggccgtaaaccaaagacccagcaatcaccaatttccaatgggtctcctgagttaggtataaagaagaaaccaagagaaggaaaaggaaacacaacctatttgtgggagtttcttttagatctacttcaagataaaaatacttgtcccaggtatattaaatggactcagagagaaaaaggcatattcaagctggtggattcaaaggctgtctctaagctttggggaaagcataagaacaaaccagacatgaactatgaaaccatgggacgagctttgagatactactaccaaaggggaattcttgcaaaggttgaaggacagaggcttgtatatcagttcaaggatatgccgaaaaacatagtggtcatagatgatgacaaaagtgaaacctgtaatgaagatttagcaggaactactgatgaaaaatcattagaacgagtgtcactgtctgcagaaagtctcctgaaagcagcatcctctgttcgcagtggaaaaaattcatcccctataaactgctccagagcagagaagggtgtagctagagttgtgaatatcacttcccctgggcacgatgcttcatccaggtctcctactaccactgcatctgtgtcagcaacagcagctccaaggacagttcgtgtggcaatgcaggtacctgttgtaatgacatcattgggtcagaaaatttcaactgtggcagttcagtcagttaatgcaggtgcaccattaataaccagcactagtccaacaacagcgacctctccaaaggtagtcattcagacaatccctactgtgatgccagcttctactgaaaatggagacaaaatcaccatgcagcctgccaaaattattaccatcccagctacacagcttgcacagtgtcaactgcagacaaagtcaaatctgactggatcaggaagcattaacattgttggaaccccattggctgtgagagcacttacccctgtttcaatagcccatggtacacctgtaatgagactatcaatgcctactcagcaggcatctggccagactcctcctcgagttatcagtgcagtcataaaggggccagaggttaaatcggaagcagtggcaaaaaagcaagaacatgatgtgaaaactttgcagctagtagaagaaaaaccagcagatggaaataagacagtgacccacgtagtggttgtcagtgcgccttcagctattgcccttcctgtaactatgaaaacagaaggactagtgacatgtgagaaataaaatagcagctccaccatggacttcaggctgttagtggcagtactgacataaacatttgcaagggaagtcatcaagaaaagtcaaagaagactttaaaacatttttaatgcatatacaaaaacaatcagacttactggaaataaattacctatcccatgtttcagtgggaaatgaactacatattgagatgctgacagaaaactgcctcttacagtaggaaacaactgaacccatcacgaanggttttccaagtaagagcc

SEQ ID NO: 369099 - DNA, 1456 bp, Homo sapiens
cgcggggcggaaggatcgcgttgccagctgcggcggccgccacagccacagccgccgccgccgccgccgccgcccctgcccctgccgcccctgcccctgccgttaggtggtggggtttctcagcccggcggcgggaggcgggccggcctcggcttcctgtcggaggacgcgcaaggatccgggcgtcggagtgtgtgcgagtgcgtgagtgtgtgtcggtcgcacggcgtgtgtctccggccgcgggttccgcctcctcccctgccgccgctgctcacggtgtaagtcaatgtgaagcagcagctccagccccgggataaacatggcgacgtctctgcatgagggacccacgaaccagctggatctgctcatccgggccgtggaagcatcagttcacagcagtaatgcacactgtacagataagacaattgaagctgctgaagccctgcttcatatggaatctcctacctgcttgagggattcaagaagtcctgaattcatccatgctgctatgaggccagatgtcattacagaaactgtagtggaggtgtcaactgaagagtctgaacccatggatacctctcctattccaacatcaccagatagccatgaaccaatgaaaaagaaaaaagttggccgtaaaccaaagacccagcaatcaccaatttccaatgggtctcctgagttaggtataaagaagaaaccaagagaaggaaaaggaaacacaacctatttgtgggagtttcttttagatctacttcaagataaaaatacttgtcccaggtatattaaatggactcagagagaaaaaggcatattcaagctggtggattcaaaggctgtctctaagctttggggaaagcataagaacaaaccagacatgaactatgaaaccatgggacgagctttgagatactactaccaaaggggaattcttgcaaaggttgaaggacagaggcttgtatatcagttcaaggatatgccgaaaaacatagtggtcatagatgatgacaaaagtgaaacctgtaatgaagatttagcaggaactactgatgaaaaatcattagaacgagtgtcactgtctgcagaaagtctcctgaaagcagcatcctctgttcgcagtggaaaaaattcatcccctataaactgctccagagcagagaagggtgtagctagagttgtgaatatcacttcccctgggcacgatgcttcatccaggtctcctactaccactgcatctgtgtcagcaacagcagctccaaggttttttggggaaaacaaacaaaaaacagccaaacatccaagtgtggtctcctgatcagcaatatcagcatcacctgggattgtgatccccaaattgtgagctaacgtgtcccagggaaccacagcaaactcacagggacaccatggtatattttatattttaaatgtgaaataaacagtgacgtttgacacc

SEQ ID NO: 369100 - DNA, 1982 bp, Homo sapiens
tcggccgcctactactactaaattaacggccggtcgacgtgtatgggaaaatagaaaaataaaaaccagaaacaatagtatatagggtataataggaaaagcagaatgaaaggtacatatggatggaataagggatctatgcaaggaacatgcaacttagggtggggcacagtggctcatggctgtaatcccagcactttgggaggtggaggtaggaggatcacttgaacccaggagtttgggaccagcctgggcaatgtgatgaaaccccatctctacaaaaaagtaaaaaattttagctgggcatggtttcacgtgcctgtggtcccagcagctcgggagactgaggtgggaggatcactggagcccgtggggtagactacagtgagccatgatcacaccactgcactgcagcctgggtgacagagcaataccgtatctcaaaagaaaagaaaaaagcaacctattaagatttatatactactaaaaaattattagaaggctcacatatgactttaaaaaaattttctttttcagttcctgataatgcatcagtgaaggatccaatctcctgcagtgataactagaaaggataactcgagagtttcactggattttttccagtccccttaactcatagtaacataccaatcatatgttggtgtttccaaaactgatttcgtctggtggcatgcccatgcacccatatgcccaccctcaactcataccctgttaattttgttggtagacaacacttgaaactcagacattattttggccttcattcttatccagatttatttatttaaggctgccatggtttctcttccggttgaagtattttggggtaggtaaacaatgtacctgcaataatgagtattctaatcagtattgttctcaacaacatatgactagcaattagtcatgctaaaatctgaaccaattctacatttggtagatgttcccgtgcttgtcattctttccagtagccccaaaattctgtgcatactatgttacttctgaaaacctcatttgttttaaaagtggttctattaaagaatgagtgatccatttcagtggacgttgttgcagctacagatctatgtacgttcacttttacagtgaaggctccatgtgtgaatggatatatgtgggtcattatgataaaacagtattaaaggagaaaatctactcccagattctttttggactacaaagacattaaaagcactaggtttaaaagaccatttattaatcttatgtatttacaactcacaaattaaaatatctattaccaataagttattttgtttggaagaggctttacctgtaatttttacttttatttctgatggaagagaattccaggtttttttgagatggagtttcactcttgttgcccaggctagagcgcaatggtgcagtctgggttcactgcaacctctacctcccaggttcaagcgattctcctgtttcagcctcccaagtagctgggattacagacacctgccaccatgcccagctaatttttgtatttttagtagagacgaggtttcaccatgttggccaggctggtttcgaactcctgaccacagttgatccgcccaccttggcctccgaaagtgctgggattacaagcatgagccaccacacccgacccaggttatctaactttttacattcttctttctagatattttgaatgacagtatctggctatcttaggaaatttcaatgaaagcccattaacaggctttctagaaagtttcctatctctgaaaagaaggtcctactgactctcttggccactgccacatacagcttctaaataacctattgtgaatagcacattccaatacaaataatgatgacatcgagtgactaatatcaaacgcataccaatattattccaatggtaaagtttaaatataacagcaataatgaaaactaattggttaaataattgaaaactaattggaatc

SEQ ID NO: 369101 - DNA, 1650 bp, Homo sapiens
tgattctcctgcctcagcctctcaagtagctgggattacaggcacccgccaccacgcccagctaattgttttgtatttttagtagagacggggtttcaccatgttggtcaggctggtctccaactgctgacctcgtgatccacctgcctcggcctcccaaagtgctggaatatacaggcgtgagccaccgcacctggcacagttatatttatctcctagaatatgaatatcataatactacctatgtacaattgcttgttaagaacttaattcagtatgttcatgaacttgattactaactcttaagaagcagaatgttcattactgccctcttttgacacggggatgttaagcctgtcttctttttcttagttaagtgttaaaattagattgcacaataagttatgctttatttatgtccttcctgtaatttttaaaataacttttcaaattcttcctctttttaggctttctggttaatcatctttagaagactggatttctggatatctactccactccatctctattgacttttaaaacatgataatgcaaacctataacactggcaaccatcagtgaacctttaatttcattgattaatagcgtttgaagcttcctcagggaataacaatgacatcagcagtggttgacagtggaggtactattttggagctttccagcaatggagtagaaaatcaagaggaaagtgaaaaggtttctgaatatccagcagtgattgtggagccagttccaagtgccagattagagcagggctatgcagcccaggttctggtttatgatgatgagacttatatgatgcaagatgtggcagaagaacaagaagttgagaccgagaatgtggaaacaggtagacatctcataaaatgttcattatttataactttctcattttgtaagcttcaacaatactattgccagatgaaaaatatactgaaaaacctttttaatgctatttagtatagcttggaaaccagtgaaacatctatgtttaagggaatttgtgtagatataaaacttctattgtataattctatgaggtgtaacagtctcatatcatggactctatgcacaaaattacagcttcacataatgataaagttattttattattttttttctgagagtataaatcctagctgttatttatacaagtcaataggctagtattatgaggacagctttttaaattaaaaaaaatggtattctatcattgtctaattgattatgagtttctttgagttaatattgatggagcaataagatttcttttcattaatatcagaagcatcattgtagtgttctatcagtttcctctttgctttttgtcgtcttagagatcttagtatttcagtctatttctggtgagatagctatatgtttaattggagattagtatctataattcttagagaaatcttttagtttttgccattgattatgaagaaaatagagtattttatcagaaggattgtagtgactcttacataataataaacatgcaaatgtatcatctttagctgttaatggagaaaaagaatcattatacttgttgtttaatcctagtaaaaattctttactattttgatacatttttataaatgtaggaaactttcatgattaaaattt

SEQ ID NO: 369102 - DNA, 991 bp, Homo sapiens
tgattctcctgcctcagcctctcaagtagctgggattacaggcacccgccaccacgcccagctaattgttttgtatttttagtagagacggggtttcaccatgttggtcaggctggtctccaactgctgacctcgtgatccacctgcctcggcctcccaaagtgctggaatatacaggcgtgagccaccgcacctggcacagttatatttatctcctagaatatgaatatcataatactacctatgtacaattgcttgttaagaacttaattcagtatgttcatgaacttgattactaactcttaagaagcagaatgttcattactgccctcttttgacacggggatgttaagcctgtcttctttttcttagttaagtgttaaaattagattgcacaataagttatgctttatttatgtccttcctgtaatttttaaaataacttttcaaattcttcctctttttaggctttctggttaatcatctttagaagactggatttctggatatctactccactccatctctattgacttttaaaacatgataatgcaaacctataacactggcaaccatcagtgaacctttaatttcattgattaatagcgtttgaagcttcctcagggaataacaatgacatcagcagtggttgacagtggaggtactattttggagctttccagcaatggagtagaaaatcaagaggttaggcattcaatgaattacatttctattttcttcatagaaatttgtgcatgaactaattttgaaattaataggaaacatatttgagagtaaaaatgtacaaagcatgaaattatacatgtacatgtcgtgtatccttatataatttaggtaatagaaggtcaaggaaggtattgcagggcttacgtgaattgttggaacatacatatattagaatgaacttggagggaggaaaggaatggaaagaacactatagtattagttgagagttaaatttaaatccctc

SEQ ID NO: 369103 - DNA, 327 bp, Homo sapiens
ttggccgtaaaccaaagacccagcaatcaccaatttccaatgggtctcctgagttaggtataaagaagaaaccaagagaaggaaaaggtaatttggggagggttgctttggaagtgagatgattttttttcagttaggtgacatttttgtatttgtaagaaaactatttctagtacatgcacatatgagaatactgtcgctggtaatagttcttaataagggatgtatcagcatcacgtggggagctttttcaaaatatctgtgcccagttcctacaccacagagattctgtaaccatagttgtatcatgggggatatagggacttg

SEQ ID NO: 369104 - DNA, 768 bp, Homo sapiens
cgcggggcggaaggatcgcgttgccagctgcggcggccgccacagccacagccgccgccgccgccgccgccgcccctgcccctgccgcccctgcccctgccgttaggtggtggggtttctcagcccggcggcgggaggcgggccggcctcggcttcctgtcggaggacgcgcaaggatccgggcgtcggagtgtgtgcgagtgcgtgagtgtgtgtcggtcgcacggcgtgtgtctccggccgcgggttccgcctcctcccctgccgccgctgctcacggtgtaagtcaatgtgaagcagcagctccagccccgggataaacatggcgacgtctctgcatgagggacccacgaaccagctggatctgctcatccgggccggtaaggacaggggaacttttctcccgtgcatcggtgcagcaggagagggggtgcacagaaggcggggtgactcccctgtagcagtctgtgctgggggtacagtgtccacctcacagtcactggggcggctgggggaaaggggggagtgaatgaagtaatggaggcgacgaatcaggaagtgatcaccttggagagtaacctgcctcgaatccggcgctgtcgcttcagggtgggttcggcgagcagcagcagcagctgccgggctgagcgctggcagcgggtgctggagaacggagccgcggttaagttggcactcgggggcggacgagttgtgcgcttcaccccagttgctgaggaaccaggaagtgagtgaggctgttgtctctcg

SEQ ID NO: 369105 - DNA, 544 bp, Homo sapiens
cgcggggcggaaggatcgcgttgccagctgcggcggccgccacagccacagccgccgccgccgccgccgccgcccctgcccctgccgcccctgcccctgccgttaggtggtggggtttctcagcccggcggcgggaggcgggccggcctcggcttcctgtcggaggacgcgcaaggatccgggcgtcggagtgtgtgcgagtgcgtgagtgtgtgtcggtcgcacggcgtgtgtctccggccgcgggttccgcctcctcccctgccgccgctgctcacggtgtaagtcaatgtgaagcagcagctccagccccgggataaacatggcgacgtctctgcatgagggacccacgaaccagctggatctgctcatccgggccgtggaagcatcagttcacagcagactcccccaacccgatccccacagtcaacgcccgtaccctgggggcgggcggagggggcggcggcagccgacggaagaggcgggcggctggactaaacaaggtcaactgcagagtatttatgcatggggttgtaaggaagga

SEQ ID NO: 369106 - DNA, 3008 bp, Homo sapiens
cgcggggcggaaggatcgcgttgccagctgcggcggccgccacagccacagccgccgccgccgccgccgccgcccctgcccctgccgcccctgcccctgccgttaggtggtggggtttctcagcccggcggcgggaggcgggccggcctcggcttcctgtcggaggacgcgcaaggatccgggcgtcggagtgtgtgcgagtgcgtgagtgtgtgtcggtcgcacggcgtgtgtctccggccgcgggttccgcctcctcccctgccgccgctgctcacggtgtaagtcaatgtgaagcagcagctccagccccgggataaacatggcgacgtctctgcatgagggacccacgaaccagctggatctgctcatccgggccgtggaagcatcagttcacagcagtaatgcacactgtacagataagacaattgaagctgctgaagccctgcttcatatggaatctcctacctgcttgagggattcaagaagtcctgaattcatccatgctgctatgaggccagatgtcattacagaaactgtagtggaggtgtcaactgaagagtctgaacccatggatacctctcctattccaacatcaccagatagccatgaaccaatgaaaaagaaaaaagttggccgtaaaccaaagacccagcaatcaccaatttccaatgggtctcctgagttaggtataaagaagaaaccaagagaaggaaaaggaaacacaacctatttgtgggagtttcttttagatctacttcaagataaaaatacttgtcccaggtatattaaatggactcagagagaaaaaggcatattcaagctggtggattcaaaggctgtctctaagctttggggaaagcataagaacaaaccagacatgaactatgaaaccatgggacgagctttgagatactactaccaaaggggaattcttgcaaaggttgaaggacagaggcttgtatatcagttcaaggatatgccgaaaaacatagtggtcatagatgatgacaaaagtgaaacctgtaatgaagatttagcaggaactactgatgaaaaatcattagaacgagtgtcactgtctgcagaaagtctcctgaaagcagcatcctctgttcgcagtggaaaaaattcatcccctataaactgctccagagcagagaagggtgtagctagagttgtgaatatcacttcccctgggcacgatgcttcatccaggtctcctactaccactgcatctgtgtcagcaacagcagctccaaggacagttcgtgtggcaatgcaggtacctgttgtaatgacatcattgggtcagaaaatttcaactgtggcagttcagtcagttaatgcaggtgcaccattaataaccagcactagtccaacaacagcgacctctccaaaggtagtcattcagacaatccctactgtgatgccagcttctactgaaaatggagacaaaatcaccatgcagcctgccaaaattattaccatcccagctacacagcttgcacagtgtcaactgcagacaaagtcaaatctgactggatcaggaagcattaacattgttggaaccccattggctgtgagagcacttacccctgtttcaatagcccatggtacacctgtaatgagactatcaatgcctactcagcaggcatctggccagactcctcctcgagttatcagtgcagtcataaaggggccagaggttaaatcggaagcagtggcaaaaaagcaagaacatgatgtgaaaactttgcagctagtagaagaaaaaccagcagatggaaataagacagtgacccacgtagtggttgtcagtgcgccttcagctattgcccttcctgtaactatgaaaacagaaggactagtgacatgtgagaaataaaatagcagctccaccatggacttcaggctgttagtggcagtactgacataaacatttgcaagggaagtcatcaagaaaagtcaaagaagactttaaaacatttttaatgcatatacaaaaacaatcagacttactggaaataaattacctatcccatgtttcagtgggaaatgaactacatattgagatgctgacagaaaactgcctcttacagtaggaaacaactgaacccatcaataagaaaaaggatcgaaagggaccaagcagctcactacgatatcaagttacactaagacttggaacactaacattctgtaagaggttatatagttttcagtgggaggggttgggatgggtaatctcattgttacatatagcaatttttgatgcattttatatgcataccagcaattattactgtgttcgcacagttctcacttaactggtgctatgtgaagactctgctaatataggtattttagaatgtgaattgaagaatggatcccaaaaacttcagaaagaggatagcaaaaaaagatctagtgcgatttatatatatatatatatatatatacatacatatatatatatcatatagcttaagctgatttaaaacaaaggccttagactaattttcgattttctttcttgaaataagctaatggcttgtttgtgtaaagcttttttattaaaagaaaaattttaaaaatcttgtacctagcacagtattgttatagaatatacatgtaacattttatatggtagtttaagtctgtcagtttcttaattgtggacaaattaacagttggctctggccttttgctgtaacatgcctgtgtcactcacttagccttggcatttgtgcagacataccattttcagttctgctgtcacttggaagttcaggctcagcatgaatttttggcaggtagctctaatacctggagttttctttgtttttttttcttttttttagttgaagtttatgagggaaataccagtgttcagttttgaactataatagtttgtatattcaacatttgaagtatattctattttgttgtactcttgtttcaaagtgtattcaagtaggttttctgaaatatagaaatgaaattta

SEQ ID NO: 369107 - DNA, 3499 bp, Homo sapiens
tgattctcctgcctcagcctctcaagtagctgggattacaggcacccgccaccacgcccagctaattgttttgtatttttagtagagacggggtttcaccatgttggtcaggctggtctccaactgctgacctcgtgatccacctgcctcggcctcccaaagtgctggaatatacaggcgtgagccaccgcacctggcacagttatatttatctcctagaatatgaatatcataatactacctatgtacaattgcttgttaagaacttaattcagtatgttcatgaacttgattactaactcttaagaagcagaatgttcattactgccctcttttgacacggggatgttaagcctgtcttctttttcttagttaagtgttaaaattagattgcacaataagttatgctttatttatgtccttcctgtaatttttaaaataacttttcaaattcttcctctttttaggctttctggttaatcatctttagaagactggatttctggatatctactccactccatctctattgacttttaaaacatgataatgcaaacctataacactggcaaccatcagtgaacctttaatttcattgattaatagcgtttgaagcttcctcagggaataacaatgacatcagcagtggttgacagtggaggtactattttggagctttccagcaatggagtagaaaatcaagaggaaagtgaaaaggtttctgaatatccagcagtgattgtggagccagttccaagtgccagattagagcagggctatgcagcccaggttctggtttatgatgatgagacttatatgatgcaagatgtggcagaagaacaagaagttgagaccgagaatgtggaaacagtggaagcatcagttcacagcagtaatgcacactgtacagataagacaattgaagctgctgaagccctgcttcatatggaatctcctacctgcttgagggattcaagaagtcctgaattcatccatgctgctatgaggccagatgtcattacagaaactgtagtggaggtgtcaactgaagagtctgaacccatggatacctctcctattccaacatcaccagatagccatgaaccaatgaaaaagaaaaaagttggccgtaaaccaaagacccagcaatcaccaatttccaatgggtctcctgagttaggtataaagaagaaaccaagagaaggaaaaggaaacacaacctatttgtgggagtttcttttagatctacttcaagataaaaatacttgtcccaggtatattaaatggactcagagagaaaaaggcatattcaagctggtggattcaaaggctgtctctaagctttggggaaagcataagaacaaaccagacatgaactatgaaaccatgggacgagctttgagatactactaccaaaggggaattcttgcaaaggttgaaggacagaggcttgtatatcagttcaaggatatgccgaaaaacatagtggtcatagatgatgacaaaagtgaaacctgtaatgaagatttagcaggaactactgatgaaaaatcattagaacgagtgtcactgtctgcagaaagtctcctgaaagcagcatcctctgttcgcagtggaaaaaattcatcccctataaactgctccagagcagagaagggtgtagctagagttgtgaatatcacttcccctgggcacgatgcttcatccaggtctcctactaccactgcatctgtgtcagcaacagcagctccaaggacagttcgtgtggcaatgcaggtacctgttgtaatgacatcattgggtcagaaaatttcaactgtggcagttcagtcagttaatgcaggtgcaccattaataaccagcactagtccaacaacagcgacctctccaaaggtagtcattcagacaatccctactgtgatgccagcttctactgaaaatggagacaaaatcaccatgcagcctgccaaaattattaccatcccagctacacagcttgcacagtgtcaactgcagacaaagtcaaatctgactggatcaggaagcattaacattgttggaaccccattggctgtgagagcacttacccctgtttcaatagcccatggtacacctgtaatgagactatcaatgcctactcagcaggcatctggccagactcctcctcgagttatcagtgcagtcataaaggggccagaggttaaatcggaagcagtggcaaaaaagcaagaacatgatgtgaaaactttgcagctagtagaagaaaaaccagcagatggaaataagacagtgacccacgtagtggttgtcagtgcgccttcagctattgcccttcctgtaactatgaaaacagaaggactagtgacatgtgagaaataaaatagcagctccaccatggacttcaggctgttagtggcagtactgacataaacatttgcaagggaagtcatcaagaaaagtcaaagaagactttaaaacatttttaatgcatatacaaaaacaatcagacttactggaaataaattacctatcccatgtttcagtgggaaatgaactacatattgagatgctgacagaaaactgcctcttacagtaggaaacaactgaacccatcaataagaaaaaggatcgaaagggaccaagcagctcactacgatatcaagttacactaagacttggaacactaacattctgtaagaggttatatagttttcagtgggaggggttgggatgggtaatctcattgttacatatagcaatttttgatgcattttatatgcataccagcaattattactgtgttcgcacagttctcacttaactggtgctatgtgaagactctgctaatataggtattttagaatgtgaattgaagaatggatcccaaaaacttcagaaagaggatagcaaaaaaagatctagtgcgatttatatatatatatatatatatatacatacatatatatatatcatatagcttaagctgatttaaaacaaaggccttagactaattttcgattttctttcttgaaataagctaatggcttgtttgtgtaaagcttttttattaaaagaaaaattttaaaaatcttgtacctagcacagtattgttatagaatatacatgtaacattttatatggtagtttaagtctgtcagtttcttaattgtggacaaattaacagttggctctggccttttgctgtaacatgcctgtgtcactcacttagccttggcatttgtgcagacataccattttcagttctgctgtcacttggaagttcaggctcagcatgaatttttggcaggtagctctaatacctggagttttctttgtttttttttcttttttttagttgaagtttatgagggaaataccagtgttcagttttgaactataatagtttgtatattcaacatttgaagtatattctattttgttgtactcttgtttcaaagtgtattcaagtaggttttctgaaatatagaaatgaaattta

SEQ ID NO: 369108 - DNA, 2926 bp, Homo sapiens
gccgccgtcgcctaggcggttgggggtcggtggggcggcgcgggcgggggtcgctgcgcggggcggcgagcctctgttttgtctccttctctccctgtggagcggctcgggctgctggggaggccccggctccctccggacgctcggccaacggcggcggctagtccgcggccctgctgagagggaaaaggacgccgcggtcttcccaggcgtcgcggagagcagttccaaagaactactggttcagattttagctcttcccaagttgtgaaaatagtgaaggatgcttagactacttaacatacaaactgctttctggttaatcatctttagaagactggatttctggatatctactccactccatctctattgacttttaaaacatgataatgcaaacctataacactggcaaccatcagtgaacctttaatttcattgattaatagcgtttgaagcttcctcagggaataacaatgacatcagcagtggttgacagtggaggtactattttggagctttccagcaatggagtagaaaatcaagaggaaagtgaaaaggtttctgaatatccagcagtgattgtggagccagttccaagtgccagattagagcagggctatgcagcccaggttctggtttatgatgatgagacttatatgatgcaagatgtggcagaagaacaagaagttgagaccgagaatgtggaaacagtggaagcatcagttcacagcagtaatgcacactgtacagataagacaattgaagctgctgaagccctgcttcatatggaatctcctacctgcttgagggattcaagaagtcctgaattcatccatgctgctatgaggccagatgtcattacagaaactgtagtggaggtgtcaactgaagagtctgaacccatggatacctctcctattccaacatcaccagatagccatgaaccaatgaaaaagaaaaaagttggccgtaaaccaaagacccagcaatcaccaatttccaatgggtctcctgagttaggtataaagaagaaaccaagagaaggaaaaggaaacacaacctatttgtgggagtttcttttagatctacttcaagataaaaatacttgtcccaggtatattaaatggactcagagagaaaaaggcatattcaagctggtggattcaaaggctgtctctaagctttggggaaagcataagaacaaaccagacatgaactatgaaaccatgggacgagctttgagatactactaccaaaggggaattcttgcaaaggttgaaggacagaggcttgtatatcagttcaaggatatgccgaaaaacatagtggtcatagatgatgacaaaagtgaaacctgtaatgaagatttagcaggaactactgatgaaaaatcattagaacgagtgtcactgtctgcagaaagtctcctgaaagcagcatcctctgttcgcagtggaaaaaattcatcccctataaactgctccagagcagagaagggtgtagctagagttgtgaatatcacttcccctgggcacgatgcttcatccaggtctcctactaccactgcatctgtgtcagcaacagcagctccaaggacagttcgtgtggcaatgcaggtacctgttgtaatgacatcattgggtcagaaaatttcaactgtggcagttcagtcagttaatgcaggtgcaccattaataaccagcactagtccaacaacagcgacctctccaaaggtagtcattcagacaatccctactgtgatgccagcttctactgaaaatggagacaaaatcaccatgcagcctgccaaaattattaccatcccagctacacagcttgcacagtgtcaactgcagacaaagtcaaatctgactggatcaggaagcattaacattgttggaaccccattggctgtgagagcacttacccctgtttcaatagcccatggtacacctgtaatgagactatcaatgcctactcagcaggcatctggccagactcctcctcgagttatcagtgcagtcataaaggggccagaggttaaatcggaagcagtggcaaaaaagcaagaacatgatgtgaaaactttgcagctagtagaagaaaaaccagcagatggaaataagacagtgacccacgtagtggttgtcagtgcgccttcagctattgcccttcctgtaactatgaaaacagaaggactagtgacatgtgagaaataaaatagcagctccaccatggacttcaggctgttagtggcagtactgacataaacatttgcaagggaagtcatcaagaaaagtcaaagaagactttaaaacatttttaatgcatatacaaaaacaatcagacttactggaaataaattacctatcccatgtttcagtgggaaatgaactacatattgagatgctgacagaaaactgcctcttacagtaggaaacaactgaacccatcaataagaaaaaggatcgaaagggaccaagcagctcactacgatatcaagttacactaagacttggaacactaacattctgtaagaggttatatagttttcagtgggaggggttgggatgggtaatctcattgttacatatagcaatttttgatgcattttatatgcataccagcaattattactgtgttcgcacagttctcacttaactggtgctatgtgaagactctgctaatataggtattttagaatgtgaattgaagaatggatcccaaaaacttcagaaagaggatagcaaaaaaagatctagtgcgatttatatatatatatatatatatatacatacatatatatatatcatatagcttaagctgatttaaaacaaaggccttagactaattttcgattttctttcttgaaataagctaatggcttgtttgtgtaaagcttttttattaaaagaaaaatttt

SEQ ID NO: 369109 - DNA, 3647 bp, Homo sapiens
cgcggggcggaaggatcgcgttgccagctgcggcggccgccacagccacagccgccgccgccgccgccgccgcccctgcccctgccgcccctgcccctgccgttaggtggtggggtttctcagcccggcggcgggaggcgggccggcctcggcttcctgtcggaggacgcgcaaggatccgggcgtcggagtgtgtgcgagtgcgtgagtgtgtgtcggtcgcacggcgtgtgtctccggccgcgggttccgcctcctcccctgccgccgctgctcacggtgtaagtcaatgtgaagcagcagctccagccccgggataaacatggcgacgtctctgcatgagggacccacgaaccagctggatctgctcatccgggccgtggaagcatcagttcacagcagtaatgcacactgtacagataagacaattgaagctgctgaagccctgcttcatatggaatctcctacctgcttgagggattcaagaagtcctgaattcatccatgctgctatgaggccagatgtcattacagaaactgtagtggaggtgtcaactgaagagtctgaacccatggatacctctcctattccaacatcaccagatagccatgaaccaatgaaaaagaaaaaagttggccgtaaaccaaagacccagcaatcaccaatttccaatgggtctcctgagttaggtataaagaagaaaccaagagaaggaaaaggaaacacaacctatttgtgggagtttcttttagatctacttcaagataaaaatacttgtcccaggtatattaaatggactcagagagaaaaaggcatattcaagctggtggattcaaaggctgtctctaagctttggggaaagcataagaacaaaccagacatgaactatgaaaccatgggacgagctttgagatactactaccaaaggggaattcttgcaaaggttgaaggacagaggcttgtatatcagttcaaggatatgccgaaaaacatagtggtcatagatgatgacaaaagtgaaacctgtaatgaagatttagcaggaactactgatgaaaaatcattagaacgagtgtcactgtctgcagaaagtctcctgaaagcagcatcctctgttcgcagtggaaaaaattcatcccctataaactgctccagagcagagaagggtgtagctagagttgtgaatatcacttcccctgggcacgatgcttcatccaggtctcctactaccactgcatctgtgtcagcaacagcagctccaaggacagttcgtgtggcaatgcaggtacctgttgtaatgacatcattgggtcagaaaatttcaactgtggcagttcagtcagttaatgcaggtgcaccattaataaccagcactagtccaacaacagcgacctctccaaaggtagtcattcagacaatccctactgtgatgccagcttctactgaaaatggagacaaaatcaccatgcagcctgccaaaattattaccatcccagctacacagcttgcacagtgtcaactgcagacaaagtcaaatctgactggatcaggaagcattaacattgttggaaccccattggctgtgagagcacttacccctgtttcaatagcccatggtacacctgtaatgagactatcaatgcctactcagcaggcatctggccagactcctcctcgagttatcagtgcagtcataaaggggccagaggttaaatcggaagcagtggcaaaaaagcaagaacatgatgtgaaaactttgcagctagtagaagaaaaaccagcagatggaaataagacagtgacccacgtagtggttgtcagtgcgccttcagctattgcccttcctgtaactatgaaaacagaaggactagtgacatgtgagaaataaaatagcagctccaccatggacttcaggctgttagtggcagtactgacataaacatttgcaagggaagtcatcaagaaaagtcaaagaagactttaaaacatttttaatgcatatacaaaaacaatcagacttactggaaataaattacctatcccatgtttcagtgggaaatgaactacatattgagatgctgacagaaaactgcctcttacagtaggaaacaactgaacccatcaataagaaaaaggatcgaaagggaccaagcagctcactacgatatcaagttacactaagacttggaacactaacattctttcctgataatgcatcagtgaaggatccaatctcctgcagtgataactagaaaggataactcgagagtttcactggattttttccagtccccttaactcatagtaacataccaatcatatgttggtgtttccaaaactgatttcgtctggtggcatgcccatgcacccatatgcccaccctcaactcataccctgttaattttgttggtagacaacacttgaaactcagacattattttggccttcattcttatccagatttatttatttaaggctgccatggtttctcttccggttgaagtattttggggtaggtaaacaatgtacctgcaataatgagtattctaatcagtattgttctcaacaacatatgactagcaattagtcatgctaaaatctgaaccaattctacatttggtagatgttcccgtgcttgtcattctttccagtagccccaaaattctgtgcatactatgttacttctgaaaacctcatttgttttaaaagtggttctattaaagaatgagtgatccatttcagtggacgttgttgcagctacagatctatgtacgttcacttttacagtgaaggctccatgtgtgaatggatatatgtgggtcattatgataaaacagtattaaaggagaaaatctactcccagattctttttggactacaaagacattaaaagcactaggtttaaaagaccatttattaatcttatgtatttacaactcacaaattaaaatatctattaccaataagttattttgtttggaagaggctttacctgtaatttttacttttatttctgatggaagagaattccaggtttttttgagatggagtttcactcttgttgcccaggctagagcgcaatggtgcagtctgggttcactgcaacctctacctcccaggttcaagcgattctcctgtttcagcctcccaagtagctgggattacagacacctgccaccatgcccagctaatttttgtatttttagtagagacgaggtttcaccatgttggccaggctggtttcgaactcctgaccacagttgatccgcccaccttggcctccgaaagtgctgggattacaagcatgagccaccacacccgacccaggttatctaactttttacattcttctttctagatattttgaatgacagtatctggctatcttaggaaatttcaatgaaagcccattaacaggctttctagaaagtttcctatctctgaaaagaaggtcctactgactctcttggccactgccacatacagcttctaaataacctattgtgaatagcacattccaatacaaataatgatgacatcgagtgactaatatcaaacgcataccaatattattccaatggtaaagtttaaatataacagcaataatgaaaactaattggttaaataattgaaaactaattggaatc

SEQ ID NO: 369110 - DNA, 1501 bp, Homo sapiens
cgcggggcggaaggatcgcgttgccagctgcggcggccgccacagccacagccgccgccgccgccgccgccgcccctgcccctgccgcccctgcccctgccgttaggtggtggggtttctcagcccggcggcgggaggcgggccggcctcggcttcctgtcggaggacgcgcaaggatccgggcgtcggagtgtgtgcgagtgcgtgagtgtgtgtcggtcgcacggcgtgtgtctccggccgcgggttccgcctcctcccctgccgccgctgctcacggtgtaagtcaatgtgaagcagcagctccagccccgggataaacatggcgacgtctctgcatgagggacccacgaaccagctggatctgctcatccgggccgtggaagcatcagttcacagcagtaatgcacactgtacagataagacaattgaagctgctgaagccctgcttcatatggaatctcctacctgcttgagggattcaagaagtcctgaattcatccatgctgctatgaggccagatgtcattacagaaactgtagtggaggtgtcaactgaagagtctgaacccatggatacctctcctattccaacatcaccagatagccatgaaccaatgaaaaagaaaaaagttggccgtaaaccaaagacccagcaatcaccaatttccaatgggtctcctgagttaggtataaagaagaaaccaagagaaggaaaaggaaacacaacctatttgtgggagtttcttttagatctacttcaagataaaaatacttgtcccaggtatattaaatggactcagagagaaaaaggcatattcaagctggtggattcaaaggctgtctctaagctttggggaaagcataagaacaaaccagacatgaactatgaaaccatgggacgagctttgagatactactaccaaaggggaattcttgcaaaggttgaaggacagaggcttgtatatcagttcaaggatatgccgaaaaacatagtggtcatagatgatgacaaaagtgaaacctgtaatgaagatttagcaggaactactgatgaaaaatcattagaacgagtgtcactgtctgcagaaagtctcctgaaagcagcatcctctgttcgcagtggaaaaaattcatcccctataaactgctccagagcagagaagggtgtagctagagttgtgaatatcacttcccctgggcacgatgcttcatccaggtctcctactaccactgcatctgtgtcagcaacagcagctccaaggtggcagtcacagaccagacaagaaagctgaagcgtcatccagacaagactgaaccataccttcagccaggacagactcatatggaaaagctctctaaagagaagggaatcccctccatgataaatgcttagtttaacatgttcgactggtgctcaattgtctattggctgacaaatcatttccacaagctgggcttttctagcacaatcctctgaaataaaaatgtgaaaaagcaaa

SEQ ID NO: 369111 - DNA, 1199 bp, Homo sapiens
cgcagtggttcacgcctgtaatgccagcactgggaggccgaggcaggtggatcacgaggtcaggagatcgagaccatcctggctatcatggtgaaaccccatctctactaaaaataaaaataaaaaaattagccgggcatggtggcgggggcctgtagtcccagctactcaggaggctgaggcaggagaatggcatgaacctgggaggcggagcttgcagtgagctgagattgcgccactgcactccagcctgggcgacagagcgagactccatttcaagaaaaattaaaaaactgtttgttgcctgcttgttttaatgttctggcttgaggcagcgagcccttgactatgccacattgccaggattttgcaggttagattgtactacagcactgcctttggcttgccagactctggagtccccacattttcatcctgttctcaggaaaacactttgacccacttgaagctctgagctactgcttcacagcttcctggggtcagtctccagccaaaaccatagatatcccaactgcagccaaaccacggctctgggcgaaggaacgattaggtttactctaggtttccacaccctgatgctcctgcctttactttgacacctctgactgccaggttttcacagacctgttgacagtgactcaagatctggaatgtaatggatggtttggcaacagtgtttgcttgagcagtttaaaatctggccagggagactcaatgtgagcaagaaaatgatagaataccaagttttctggaggtcagagggagctgagttgagtgttacagagaatgctgtggggtttgagatgagaaaaatagcttgctaatttaaaagacggattatttttccctaaagaccttgacttatgtaaatgtatattatccataattttaaaaatccacttatggctgggcacagaagctcacacctgtaatcccagcactttgggaggctgaggcaggaggatcagttgagtccaggagttcgagaccagcctgggcaacatggtgaaaccctgtatctacaaaacatagaaaaactagttgggtgtggtggtgtgtacctgtagttccagctactagggaggtaggaagatcacctgagcccatggagattgaggctgtggtgagctgtgaaggcaccacagcactctggcctgggcaagagtgggactctctca

SEQ ID NO: 369112 - DNA, 804 bp, Homo sapiens
ggtcttagaggaaaaaactacagtttgtcttggagggagcctcctcttgctaagacccccaccaccagggctaaggattgcttaaatcagtggtgttcaaacctggttctgagctgccttctcaggggctgaggatagggacaggaccagaccctggggctctcacccccagcctgggcctgagcagcttcttgcttatctgcttgatgtcctaggcttctagagaaggtttcattttgaacaaagagttatagggctgaagaaaaagttgaaaagcaccgcctcaaatcgtgttccctctccccagggatagattgctttctgcttccggagcccatcagcgtttgccagtcccagagcaggcctgacactgcagtgtagggaggggcatgggagtccctcaggagaagtgtcgcaggagtgatccttggagcacttgggtgaagggcggatgcacaagatacacagacacctctgggggacacagctttgggctctgagtgttaagtggctcccagagaaatagaggttcgactccgtgctgtttcccttctgtaccctgtgctttctgcctccatgcttctgtccaggctgctttcacccggagcgctcttgtgcatgtccacgccctccttgtcctcaaaggctggctcccatgttacccttccattaagtcctcctgatccccttgaaatcccatagttcttcactttgttcctctttgcatgtgagtccctcccagaacacagtggcactcaaccccctgggaacaaatgaatgaataaacgaacttaaacaagggca

SEQ ID NO: 369113 - DNA, 3916 bp, Homo sapiens
cctctggcatgttggaacaatgtaggtaaggaaagtcggcaagccggatccgtaacttcgggataaggattggctctaagggctgggtcggtcgggctggggcgcgtaagggccagcagctgctggcccttacgcgcctgctggcacttacgcgccctccatcatcaatcctaaacagagcaaggatgcccccaaaagcttcacctttgactactcctactggtcacacacttcgacggaggacccccagtttgcatctcagcagcaagtgtatcgggacattggagaagagatgctgctccacgcctttgaaggctacaacgtgtgcatctttgcctatgggcagaccggggctgggaaatcctataccatgatggggcgacaggagccagggcagcagggcatcgtgccccagctctgtgaggacctcttctctcgcgttagtgagaaccagagtgctcagctatcctactctgtggaggtgagctatatggagatctactgtgagcgggtacgagacctcttgaaccccaagagtcggggttctctgcgggtccgggagcaccccatcctgggcccgtacgtgcaggacctgtccaaattggctgtgacctcctacgcagacattgctgacctcatggactgtggaaataaagcacggactgtggctgccaccaacatgaatgagaccagcagccgttcccatgccgtctttaccatcgtcttcacacagcgctgccatgaccagctcacggggctggactcggagaaggtcagtaagatcagtttggtggaccttgctgggagtgagcgagccgactcctcaggggcccggggcatgcgcctgaaggaaggagccaacatcaataagtccctgactacactagggaaagtgatctcggcccttgcagatatgcaatcaaagaagcgaaagtcggattttatcccctacagggactctgtgctcacctggctgctcaaggaaaatttgggggggaactcacgcacagccatgattgcagccctgagccctgctgacatcaattacgaggagactctcagcaccctcaggtatgctgaccgcaccaagcaaatccgctgcaatgccatcatcaacgaggaccctaatgcccggctgattagagagctgcaggaggaagtagcccggctgcgggaactgctgatggctcagggactgtcagcctctgctctggaaggcctgaagacggaagaagggagtgtcagaggcgccctgccagctgtgtcatctcccccagctccagtttcaccctcatcacccaccacacataatggggagctggagccgtcattctcccccaacacggagtcccagattgggcctgaggaagccatggagaggctgcaggagacagagaagattatagctgagctgaacgagacatgggaggagaagctacgcaagacagaagccctgaggatggagagagaagcattgctggctgagatgggggtggccgtccgggaggatgggggaactgtgggcgtcttctctccaaagaagactccccacctggtgaacctgaacgaagaccctctgatgtctgagtgtctgctctaccacatcaaagatggcgtcaccagggtcggccaagtagatatggacatcaagctgaccggacagttcattcgggagcaacactgtctgttccggagcatcccccagccagatggagaagtggtggtcactctggagccttgtgaaggagctgagacatatgtgaatgggaagcttgtgacggagccgctggtgctgaagtcagggaataggattgtgatgggcaagaaccacgttttccgcttcaaccacccggagcaggcaaggctggaacgggaacgaggggtccccccacccccaggaccgccctctgagccagtcgactggaactttgcccagaaggaactgctggagcagcaaggcatcgacataaagctggaaatggagaagaggctgcaggatctggagaatcagtaccggaaagaaaaggaagaagccgatcttctgctggagcagcagcgactgtatgcagactcggacagcggggatgactctgacaagcgctcttgtgaagagagctggaggctcatctcctccttgcgggagcagctgccgcccaccacggtccagaccattgtcaaacgctgtggtctgcccagcagtggcaagcgcagggcccctcgcagggtttatcagatcccccagcgacgcaggctgcagggcaaagacccccgctgggccaccatggctgacctgaagatgcaggcggtgaaggagatctgctacgaggtggccctggctgacttccgccacgggcgggctgagattgaggccctggccgccctcaagatgcgggagctgtgtcgcacctatggcaagccagacggccccggagacgcctggagggctgtggcccgggatgtctgggacactgtaggcgaggaggaaggaggtggagctggcagtggtggtggcagtgaggagggagcccgaggggcggaggtggaggacctccgggcccacatcgacaagctgacggggattctgcaggaggtgaagctgcagaacagcagcaaggaccgggagctgcaggccctgcgggaccgcatgctccgcatggagagggtcatccccctggcccaggatcatgaggatgagaatgaagaaggtggtgaggtcccctgggccccgcctgaaggatcagaggcagcagaggaggcagcccccagtgaccgcatgccgtcagcccggcccccctcgccgccactgtcaagctgggagcgggtgtcacggctcatggaggaggaccctgccttccgtcgtggtcgtcttcgctggctcaagcaggagcagctacggctgcagggactgcagggctctgggggccggggcggggggctgcgcaggcccccagcccgctttgtgccccctcacgactgcaagctacgcttccccttcaagagcaacccccagcaccgggagtcttggccagggatggggagcggggaggctccaactccgctccaaccccctgaggaggtcactccccatccagccacccctgcccgccggcctccgagtccccgaaggtcccaccatccccgcaggaactccctggatggagggggccgatcccggggagcgggttctgcacagcctgaaccccagcacttccagcccaaaaagcacaactcttatccccagccaccccaaccctacccagcccagcggcccccagggccccgctaccccccatacactactcccccacgaatgagacggcagcgttctgcccctgacctcaaggagagtggggcagctgtgtgagtcccacatcctgggcagagggcctggtggggccccttgctaggagaagggaagacgcccgagacgctgcttccccagaagtgctggggcagggaggcccaggagatgagagagaaggtccgagtaggtgatagaagacaagggggagaccgagccggaggctgaggaaaggaagagggcacggagttgccaggagcaaaccaaagtgaagagagagataggaagctgcctcggggccaccccttgcaaagggggtgtgtcccacaaacgctgctatgggtggggtggggggctggggtgctgcgtagccagtgtttgactttcttttcaagtgggggaaagtgggagaggactgagagtgaggcaagttctccccagcccctgtccgtctgtctgtctgtctgtggtggtttctgtttcttgggaggcatggtaggatcataagtcattcccctccccttccaggcctcctgctatatttgggggacctgactggtttggctggagtcccatgaggatgtgggccctttaataaaggatagcaaacaggga

SEQ ID NO: 369114 - DNA, 4786 bp, Homo sapiens
cgctcccgccccagctcgcgctgcccgggcgggcgccggccgctggcgccgctactgctgccgcccccggggcgcgagtccgccgcccgccgcccgggcacccggcgaggggcgggggcagctccgaaccggccccagatccttcccgcttccgcctcacgcttcccggaaagcttgtccctctccgccgagctgctccgggagccccgccgcgccgagggtatctcccagagccccagctggtgtggccaggccccaggagtaggatggggctccccctacgagggccggtggcagccagaactgatacagcccccctggtctggggccaggacgccagctgaggagggcaggagtgtctggagctatggctggtgcctcggtgaaagtggcagtgagggttcggccctttaacgcccgtgagaccagccaggatgccaagtgtgtggtcagcatgcagggcaacaccacctccatcatcaatcctaaacagagcaaggatgcccccaaaagcttcacctttgactactcctactggtcacacacttcgacggaggacccccagtttgcatctcagcagcaagtgtatcgggacattggagaagagatgctgctccacgcctttgaaggctacaacgtgtgcatctttgcctatgggcagaccggggctgggaaatcctataccatgatggggcgacaggagccagggcagcagggcatcgtgccccagctctgtgaggacctcttctctcgcgttagtgagaaccagagtgctcagctatcctactctgtggaggtgagctatatggagatctactgtgagcgggtacgagacctcttgaaccccaagagtcggggttctctgcgggtccgggagcaccccatcctgggcccgtacgtgcaggacctgtccaaattggctgtgacctcctacgcagacattgctgacctcatggactgtggaaataaagcacggactgtggctgccaccaacatgaatgagaccagcagccgttcccatgccgtctttaccatcgtcttcacacagcgctgccatgaccagctcacggggctggactcggagaaggtcagtaagatcagtttggtggaccttgctgggagtgagcgagccgactcctcaggggcccggggcatgcgcctgaaggaaggagccaacatcaataagtccctgactacactagggaaagtgatctcggcccttgcagatatgcaatcaaagaagcgaaagtcggattttatcccctacagggactctgtgctcacctggctgctcaaggaaaatttgggggggaactcacgcacagccatgattgcagccctgagccctgctgacatcaattacgaggagactctcagcaccctcaggtatgctgaccgcaccaagcaaatccgctgcaatgccatcatcaacgaggaccctaatgcccggctgattagagagctgcaggaggaagtagcccggctgcgggaactgctgatggctcagggactgtcagcctctgctctggaaggcctgaagacggaagaagggagtgtcagaggcgccctgccagctgtgtcatctcccccagctccagtttcaccctcatcacccaccacacataatggggagctggagccgtcattctcccccaacacggagtcccagattgggcctgaggaagccatggagaggctgcaggagacagagaagattatagctgagctgaacgagacatgggaggagaagctacgcaagacagaagccctgaggatggagagagaagcattgctggctgagatgggggtggccgtccgggaggatgggggaactgtgggcgtcttctctccaaagaagactccccacctggtgaacctgaacgaagaccctctgatgtctgagtgtctgctctaccacatcaaagatggcgtcaccagggtcggccaagtagatatggacatcaagctgaccggacagttcattcgggagcaacactgtctgttccggagcatcccccagccagatggagaagtggtggtcactctggagccttgtgaaggagctgagacatatgtgaatgggaagcttgtgacggagccgctggtgctgaagtcagggaataggattgtgatgggcaagaaccacgttttccgcttcaaccacccggagcaggcaaggctggaacgggaacgaggggtccccccacccccaggaccgccctctgagccagtcgactggaactttgcccagaaggaactgctggagcagcaaggcatcgacataaagctggaaatggagaagaggctgcaggatctggagaatcagtaccggaaagaaaaggaagaagccgatcttctgctggagcagcagcgactgtatgcagactcggacagcggggatgactctgacaagcgctcttgtgaagagagctggaggctcatctcctccttgcgggagcagctgccgcccaccacggtccagaccattgtcaaacgctgtggtctgcccagcagtggcaagcgcagggcccctcgcagggtttatcagatcccccagcgacgcaggctgcagggcaaagacccccgctgggccaccatggctgacctgaagatgcaggcggtgaaggagatctgctacgaggtggccctggctgacttccgccacgggcgggctgagattgaggccctggccgccctcaagatgcgggagctgtgtcgcacctatggcaagccagacggccccggagacgcctggagggctgtggcccgggatgtctgggacactgtaggcgaggaggaaggaggtggagctggcagtggtggtggcagtgaggagggagcccgaggggcggaggtggaggacctccgggcccacatcgacaagctgacggggattctgcaggaggtgaagctgcagaacagcagcaaggaccgggagctgcaggccctgcgggaccgcatgctccgcatggagagggtcatccccctggcccaggatcatgaggatgagaatgaagaaggtggtgaggtcccctgggccccgcctgaaggatcagaggcagcagaggaggcagcccccagtgaccgcatgccgtcagcccggcccccctcgccgccactgtcaagctgggagcgggtgtcacggctcatggaggaggaccctgccttccgtcgtggtcgtcttcgctggctcaagcaggagcagctacggctgcagggactgcagggctctgggggccggggcggggggctgcgcaggcccccagcccgctttgtgccccctcacgactgcaagctacgcttccccttcaagagcaacccccagcaccgggagtcttggccagggatggggagcggggaggctccaactccgctccaaccccctgaggaggtcactccccatccagccacccctgcccgccggcctccgagtccccgaaggtcccaccatccccgcaggaactccctggatggagggggccgatcccggggagcgggttctgcacagcctgaaccccagcacttccagcccaaaaagcacaactcttatccccagccaccccaaccctacccagcccagcggcccccagggccccgctaccccccatacactactcccccacgaatgagacggcagcgttctgcccctgacctcaaggagagtggggcagctgtgtgagtcccacatcctgggcagagggcctggtggggccccttgctaggagaagggaagacgcccgagacgctgcttccccagaagtgctggggcagggaggcccaggagatgagagagaaggtccgagtaggtgatagaagacaagggggagaccgagccggaggctgaggaaaggaagagggcacggagttgccaggagcaaaccaaagtgaagagagagataggaagctgcctcggggccaccccttgcaaagggggtgtgtcccacaaacgctgctatgggtggggtggggggctggggtgctgcgtagccagtgtttgactttcttttcaagtgggggaaagtgggagaggactgagagtgaggcaagttctccccagcccctgtccgtctgtctgtctgtctgtggtggtttctgtttcttgggaggcatggtaggatcataagtcattcccctccccttccaggcctcctgctatatttgggggacctgactggtttggctggagtcccatgaggatgtgggccctttaataaaggatagcaaacagggagcttgtggcctgtttgttttgggttttcatggaggtgtaggttatataaggcaatggcacaggtcttaagcatacttatcagtgaagtattgtatgtgtgctctgtgcaggcaccacccagatctggatataagaatgtttccatcttgtcttcctgaacttcaccctcctgtctcttccttcagggtgcgcagcccgatcttttccccgctttttttttttgggagacagggtcttgctttgttgcccaggctggaggtacagtcttggctcactgcagcctccgcctcctgagtagctgggattacaggcatgtgccaccacgcccggctcattactgttttttttgtagtgacgaggtttcaccagcctgggcaacatggtgaaaccctgtatctacaaaacatagaaaaactagttgggtgtggtggtgtgtacctgtagttccagctactagggaggtaggaagatcacctgagcccatggagattgaggctgtggtgagctgtgaaggcaccacagcactctggcctgggcaagagtgggactctctca

SEQ ID NO: 369115 - DNA, 4171 bp, Homo sapiens
cgctcccgccccagctcgcgctgcccgggcgggcgccggccgctggcgccgctactgctgccgcccccggggcgcgagtccgccgcccgccgcccgggcacccggcgaggggcgggggcagctccgaaccggccccagatccttcccgcttccgcctcacgcttcccggaaagcttgtccctctccgccgagctgctccgggagccccgccgcgccgagggtatctcccagagccccagctggtgtggccaggccccaggagtaggatggggctccccctacgagggccggtggcagccagaactgatacagcccccctggtctggggccaggacgccagctgaggagggcaggagtgtctggagctatggctggtgcctcggtgaaagtggcagtgagggttcggccctttaacgcccgtgagaccagccaggatgccaagtgtgtggtcagcatgcagggcaacaccacctccatcatcaatcctaaacagagcaaggatgcccccaaaagcttcacctttgactactcctactggtcacacacttcgacggaggacccccagtttgcatctcagcagcaagtgtatcgggacattggagaagagatgctgctccacgcctttgaaggctacaacgtgtgcatctttgcctatgggcagaccggggctgggaaatcctataccatgatggggcgacaggagccagggcagcagggcatcgtgccccagctctgtgaggacctcttctctcgcgttagtgagaaccagagtgctcagctatcctactctgtggaggtgagctatatggagatctactgtgagcgggtacgagacctcttgaaccccaagagtcggggttctctgcgggtccgggagcaccccatcctgggcccgtacgtgcaggacctgtccaaattggctgtgacctcctacgcagacattgctgacctcatggactgtggaaataaagcacggactgtggctgccaccaacatgaatgagaccagcagccgttcccatgccgtctttaccatcgtcttcacacagcgctgccatgaccagctcacggggctggactcggagaaggtcagtaagatcagtttggtggaccttgctgggagtgagcgagccgactcctcaggggcccggggcatgcgcctgaaggaaggagccaacatcaataagtccctgactacactagggaaagtgatctcggcccttgcagatatgcaatcaaagaagcgaaagtcggattttatcccctacagggactctgtgctcacctggctgctcaaggaaaatttgggggggaactcacgcacagccatgattgcagccctgagccctgctgacatcaattacgaggagactctcagcaccctcaggtatgctgaccgcaccaagcaaatccgctgcaatgccatcatcaacgaggaccctaatgcccggctgattagagagctgcaggaggaagtagcccggctgcgggaactgctgatggctcagggactgtcagcctctgctctggaaggcctgaagacggaagaagggagtgtcagaggcgccctgccagctgtgtcatctcccccagctccagtttcaccctcatcacccaccacacataatggggagctggagccgtcattctcccccaacacggagtcccagattgggcctgaggaagccatggagaggctgcaggagacagagaagattatagctgagctgaacgagacatgggaggagaagctacgcaagacagaagccctgaggatggagagagaagcattgctggctgagatgggggtggccgtccgggaggatgggggaactgtgggcgtcttctctccaaagaagactccccacctggtgaacctgaacgaagaccctctgatgtctgagtgtctgctctaccacatcaaagatggcgtcaccagggtcggccaagtagatatggacatcaagctgaccggacagttcattcgggagcaacactgtctgttccggagcatcccccagccagatggagaagtggtggtcactctggagccttgtgaaggagctgagacatatgtgaatgggaagcttgtgacggagccgctggtgctgaagtcagggaataggattgtgatgggcaagaaccacgttttccgcttcaaccacccggagcaggcaaggctggaacgggaacgaggggtccccccacccccaggaccgccctctgagccagtcgactggaactttgcccagaaggaactgctggagcagcaaggcatcgacataaagctggaaatggagaagaggctgcaggatctggagaatcagtaccggaaagaaaaggaagaagccgatcttctgctggagcagcagcgactgtatgcagactcggacagcggggatgactctgacaagcgctcttgtgaagagagctggaggctcatctcctccttgcgggagcagctgccgcccaccacggtccagaccattgtcaaacgctgtggtctgcccagcagtggcaagcgcagggcccctcgcagggtttatcagatcccccagcgacgcaggctgcagggcaaagacccccgctgggccaccatggctgacctgaagatgcaggcggtgaaggagatctgctacgaggtggccctggctgacttccgccacgggcgggctgagattgaggccctggccgccctcaagatgcgggagctgtgtcgcacctatggcaagccagacggccccggagacgcctggagggctgtggcccgggatgtctgggacactgtaggcgaggaggaaggaggtggagctggcagtggtggtggcagtgaggagggagcccgaggggcggaggtggaggacctccgggcccacatcgacaagctgacggggattctgcaggaggtgaagctgcagaacagcagcaaggaccgggagctgcaggccctgcgggaccgcatgctccgcatggagagggtcatccccctggcccaggatcatgaggatgagaatgaagaaggtggtgaggtcccctgggccccgcctgaaggatcagaggcagcagaggaggcagcccccagtgaccgcatgccgtcagcccggcccccctcgccgccactgtcaagctgggagcgggtgtcacggctcatggaggaggaccctgccttccgtcgtggtcgtcttcgctggctcaagcaggagcagctacggctgcagggactgcagggctctgggggccggggcggggggctgcgcaggcccccagcccgctttgtgccccctcacgactgcaagctacgcttccccttcaagagcaacccccagcaccgggagtcttggccagggatggggagcggggaggctccaactccgctccaaccccctgaggaggtcactccccatccagccacccctgcccgccggcctccgagtccccgaaggtcccaccatccccgcaggaactccctggatggagggggccgatcccggggagcgggttctgcacagcctgaaccccagcacttccagcccaaaaagcacaactcttatccccagccaccccaaccctacccagcccagcggcccccagggccccgctaccccccatacactactcccccacgaatgagacggcagcgttctgcccctgacctcaaggagagtggggcagctgtgtgagtcccacatcctgggcagagggcctggtggggccccttgctaggagaagggaagacgcccgagacgctgcttccccagaagtgctggggcagggaggcccaggagatgagagagaaggtccgagtaggtgatagaagacaagggggagaccgagccggaggctgaggaaaggaagagggcacggagttgccagacctccgggcccacatcgtcaagctgacggggattctgcaggaggtcaagcgtagccagtgtttgactttcttttcaagtgggggaaagtgggagaggactgagagtgaggcaagttctccccagcccctgtccgtctgtctgtctgtctgtggtggtttctgtttcttgggaggcatggtaggatcataagtcattcccctccccttccaggcctcctgctatatttgggggacctgactggtttggctggagtcccatgaggatgtgggccctttaataaaggatagcaaacaggga

SEQ ID NO: 369116 - DNA, 3995 bp, Homo sapiens
cgctcccgccccagctcgcgctgcccgggcgggcgccggccgctggcgccgctactgctgccgcccccggggcgcgagtccgccgcccgccgcccgggcacccggcgaggggcgggggcagctccgaaccggccccagatccttcccgcttccgcctcacgcttcccggaaagcttgtccctctccgccgagctgctccgggagccccgccgcgccgagggtatctcccagagccccagctggtgtggccaggccccaggagtaggatggggctccccctacgagggccggtggcagccagaactgatacagcccccctggtctggggccaggacgccagctgaggagggcaggagtgtctggagctatggctggtgcctcggtgaaagtggcagtgagggttcggccctttaacgcccgtgagaccagccaggatgccaagtgtgtggtcagcatgcagggcaacaccacctccatcatcaatcctaaacagagcaaggatgcccccaaaagcttcacctttgactactcctactggtcacacacttcgacggaggacccccagtttgcatctcagcagcaagtgtatcgggacattggagaagagatgctgctccacgcctttgaaggctacaacgtgtgcatctttgcctatgggcagaccggggctgggaaatcctataccatgatggggcgacaggagccagggcagcagggcatcgtgccccagctctgtgaggacctcttctctcgcgttagtgagaaccagagtgctcagctatcctactctgtggaggtgagctatatggagatctactgtgagcgggtacgagacctcttgaaccccaagagtcggggttctctgcgggtccgggagcaccccatcctgggcccgtacgtgcaggacctgtccaaattggctgtgacctcctacgcagacattgctgacctcatggactgtggaaataaagcacggactgtggctgccaccaacatgaatgagaccagcagccgttcccatgccgtctttaccatcgtcttcacacagcgctgccatgaccagctcacggggctggactcggagaaggtcagtaagatcagtttggtggaccttgctgggagtgagcgagccgactcctcaggggcccggggcatgcgcctgaaggaaggagccaacatcaataagtccctgactacactagggaaagtgatctcggcccttgcagatatgcaatcaaagaagcgaaagtcggattttatcccctacagggactctgtgctcacctggctgctcaaggaaaatttgggggggaactcacgcacagccatgattgcagccctgagccctgctgacatcaattacgaggagactctcagcaccctcaggtatgctgaccgcaccaagcaaatccgctgcaatgccatcatcaacgaggaccctaatgcccggctgattagagagctgcaggaggaagtagcccggctgcgggaactgctgatggctcagggactgtcagcctctgctctggaaggcctgaagacggaagaagggagtgtcagaggcgccctgccagctgtgtcatctcccccagctccagtttcaccctcatcacccaccacacataatggggagctggagccgtcattctcccccaacacggagtcccagattgggcctgaggaagccatggagaggctgcaggagacagagaagattatagctgagctgaacgagacatgggaggagaagctacgcaagacagaagccctgaggatggagagagaagcattgctggctgagatgggggtggccgtccgggaggatgggggaactgtgggcgtcttctctccaaagaagactccccacctggtgaacctgaacgaagaccctctgatgtctgagtgtctgctctaccacatcaaagatggcgtcaccagggtcggccaagtagatatggacatcaagctgaccggacagttcattcgggagcaacactgtctgttccggagcatcccccagccagatggagaagtggtggtcactctggagccttgtgaaggagctgagacatatgtgaatgggaagcttgtgacggagccgctggtgctgaagtcagggaataggattgtgatgggcaagaaccacgttttccgcttcaaccacccggagcaggcaaggctggaacgggaacgaggggtccccccacccccaggaccgccctctgagccagtcgactggaactttgcccagaaggaactgctggagcagcaaggcatcgacataaagctggaaatggagaagaggctgcaggatctggagaatcagtaccggaaagaaaaggaagaagccgatcttctgctggagcagcagcgactgtatgcagactcggacagcggggatgactctgacaagcgctcttgtgaagagagctggaggctcatctcctccttgcgggagcagctgccgcccaccacggtccagaccattgtcaaacgctgtggtctgcccagcagtggcaagcgcagggcccctcgcagggtttatcagatcccccagcgacgcaggctgcagggcaaagacccccgctgggccaccatggctgacctgaagatgcaggcggtgaaggagatctgctacgaggtggccctggctgacttccgccacgggcgggctgagattgaggccctggccgccctcaagatgcgggagctgtgtcgcacctatggcaagccagacggccccggagacgcctggagggctgtggcccgggatgtctgggacactgtaggcgaggaggaaggaggtggagctggcagtggtggtggcagtgaggagggagcccgaggggcggaggtggaggacctccgggcccacatcgacaagctgacggggattctgcaggaggtgaagctgcagaacagcagcaaggaccgggagctgcaggccctgcgggaccgcatgctccgcatggagagggtcatccccctggcccaggatcatgaggatgagaatgaagaaggtggtgaggtcccctgggccccgcctgaaggatcagaggcagcagaggaggcagcccccagtgaccgcatgccgtcagcccggcccccctcgccgccactgtcaagctgggagcgggtgtcacggctcatggaggaggaccctgccttccgtcgtggtcgtcttcgctggctcaagcaggagcagctacggctgcagggactgcagggctctgggggccggggcggggggctgcgcaggcccccagcccgctttgtgccccctcacgactgcaagctacgcttccccttcaagagcaacccccagcaccgggagtcttggccagggatggggagcggggaggctccaactccgctccaaccccctgaggaggtcactccccatccagccacccctgcccgccggcctccgagtccccgaaggtcccaccatccccgcaggaactccctggatggagggggccgatcccggggagcgggttctgcacagcctgaaccccagcacttccagcccaaaaagcacaactcttatccccagccaccccaaccctacccagcccagcggcccccagggccccgctaccccccatacactactcccccacgaatgagacggcagcgttctgcccctgacctcaaggagagtggggcagctgtgtgagtcccacatcctgggcagagggcctggtggggccccttgctaggagaagggaagacgcccgagacgctgcttccccagaagtgctggggcagggaggcccaggagatgagagagaaggtccgagtaggcaagttctccccagcccctgtccgtctgtctgtctgtctgtggtggtttctgtttcttgggaggcatggtaggatcataagtcattcccctccccttccaggcctcctgctatatttgggggacctgactggtttggctggagtcccatgaggatgtgggccctttaataaaggatagcaaacaggga

SEQ ID NO: 369117 - DNA, 3706 bp, Homo sapiens
cgctcccgccccagctcgcgctgcccgggcgggcgccggccgctggcgccgctactgctgccgcccccggggcgcgagtccgccgcccgccgcccgggcacccggcgaggggcgggggcagctccgaaccggccccagatccttcccgcttccgcctcacgcttcccggaaagcttgtccctctccgccgagctgctccgggagccccgccgcgccgagggtatctcccagagccccagctggtgtggccaggccccaggagtaggatggggctccccctacgagggccggtggcagccagaactgatacagcccccctggtctggggccaggacgccagctgaggagggcaggagtgtctggagctatggctggtgcctcggtgaaagtggcagtgagggttcggccctttaacgcccgtgagaccagccaggatgccaagtgtgtggtcagcatgcagggcaacaccacctccatcatcaatcctaaacagagcaaggatgcccccaaaagcttcacctttgactactcctactggtcacacacttcgacggaggacccccagtttgcatctcagcagcaagtgtatcgggacattggagaagagatgctgctccacgcctttgaaggctacaacgtgtgcatctttgcctatgggcagaccggggctgggaaatcctataccatgatggggcgacaggagccagggcagcagggcatcgtgccccagctctgtgaggacctcttctctcgcgttagtgagaaccagagtgctcagctatcctactctgtggaggtgagctatatggagatctactgtgagcgggtacgagacctcttgaaccccaagagtcggggttctctgcgggtccgggagcaccccatcctgggcccgtacgtgcaggacctgtccaaattggctgtgacctcctacgcagacattgctgacctcatggactgtggaaataaagcacggactgtggctgccaccaacatgaatgagaccagcagccgttcccatgccgtctttaccatcgtcttcacacagcgctgccatgaccagctcacggggctggactcggagaaggtcagtaagatcagtttggtggaccttgctgggagtgagcgagccgactcctcaggggcccggggcatgcgcctgaaggaaggagccaacatcaataagtccctgactacactagggaaagtgatctcggcccttgcagatatgcaatcaaagaagcgaaagtcggattttatcccctacagggactctgtgctcacctggctgctcaaggaaaatttgggggggaactcacgcacagccatgattgcagccctgagccctgctgacatcaattacgaggagactctcagcaccctcaggtatgctgaccgcaccaagcaaatccgctgcaatgccatcatcaacgaggaccctaatgcccggctgattagagagctgcaggaggaagtagcccggctgcgggaactgctgatggctcagggactgtcagcctctgctctggaaggcctgaagacggaagaagggagtgtcagaggcgccctgccagctgtgtcatctcccccagctccagtttcaccctcatcacccaccacacataatggggagctggagccgtcattctcccccaacacggagtcccagattgggcctgaggaagccatggagaggctgcagccagtcgactggaactttgcccagaaggaactgctggagcagcaaggcatcgacataaagctggaaatggagaagaggctgcaggatctggagaatcagtaccggaaagaaaaggaagaagccgatcttctgctggagcagcagcgactgtatgcagactcggacagcggggatgactctgacaagcgctcttgtgaagagagctggaggctcatctcctccttgcgggagcagctgccgcccaccacggtccagaccattgtcaaacgctgtggtctgcccagcagtggcaagcgcagggcccctcgcagggtttatcagatcccccagcgacgcaggctgcagggcaaagacccccgctgggccaccatggctgacctgaagatgcaggcggtgaaggagatctgctacgaggtggccctggctgacttccgccacgggcgggctgagattgaggccctggccgccctcaagatgcgggagctgtgtcgcacctatggcaagccagacggccccggagacgcctggagggctgtggcccgggatgtctgggacactgtaggcgaggaggaaggaggtggagctggcagtggtggtggcagtgaggagggagcccgaggggcggaggtggaggacctccgggcccacatcgacaagctgacggggattctgcaggaggtgaagctgcagaacagcagcaaggaccgggagctgcaggccctgcgggaccgcatgctccgcatggagagggtcatccccctggcccaggatcatgaggatgagaatgaagaaggtggtgaggtcccctgggccccgcctgaaggatcagaggcagcagaggaggcagcccccagtgaccgcatgccgtcagcccggcccccctcgccgccactgtcaagctgggagcgggtgtcacggctcatggaggaggaccctgccttccgtcgtggtcgtcttcgctggctcaagcaggagcagctacggctgcagggactgcagggctctgggggccggggcggggggctgcgcaggcccccagcccgctttgtgccccctcacgactgcaagctacgcttccccttcaagagcaacccccagcaccgggagtcttggccagggatggggagcggggaggctccaactccgctccaaccccctgaggaggtcactccccatccagccacccctgcccgccggcctccgagtccccgaaggtcccaccatccccgcaggaactccctggatggagggggccgatcccggggagcgggttctgcacagcctgaaccccagcacttccagcccaaaaagcacaactcttatccccagccaccccaaccctacccagcccagcggcccccagggccccgctaccccccatacactactcccccacgaatgagacggcagcgttctgcccctgacctcaaggagagtggggcagctgtgtgagtcccacatcctgggcagagggcctggtggggccccttgctaggagaagggaagacgcccgagacgctgcttccccagaagtgctggggcagggaggcccaggagatgagagagaaggtccgagtaggtgatagaagacaagggggagaccgagccggaggctgaggaaaggaagagggcacggagttgccaggagcaaaccaaagtgaagagagagataggaagctgcctcggggccaccccttgcaaagggggtgtgtcccacaaacgctgctatgggtggggtggggggctggggtgctgcgtagccagtgtttgactttcttttcaagtgggggaaagtgggagaggactgagagtgaggcaagttctccccagcccctgtccgtctgtctgtctgtctgtggtggtttctgtttcttgggaggcatggtaggatcataagtcattcccctccccttccaggcctcctgctatatttgggggacctgactggtttggctggagtcccatgaggatgtgggccctttaataaaggatagcaaacaggga

SEQ ID NO: 369118 - DNA, 2587 bp, Homo sapiens
ctctctccacactggatatgaagaggcagctgcctatattcaatgccagtttgaagatctgaacagaagaaaagataccaaggagatctatactcacttcacctgtgccacagacacgaagaatgtgcagtttgtttttgatgctgttacagatgtcatcattaaaaacaacttaaaggaatgtggactttattgagaagcatggatgttagtgaaagttactacagtgcggagtgttgagaccagacaccttttgctgtctcatggggcagctacaagcatgaacgggaccagggtcggccaagtagatatggacatcaagctgaccggacagttcattcgggagcaacactgtctgttccggagcatcccccagccagatggagaagtggtggtcactctggagccttgtgaaggagctgagacatatgtgaatgggaagcttgtgacggagccgctggtgctgaagtcagggaataggattgtgatgggcaagaaccacgttttccgcttcaaccacccggagcaggcaaggctggaacgggaacgaggggtccccccacccccaggaccgccctctgagccagtcgactggaactttgcccagaaggaactgctggagcagcaaggcatcgacataaagctggaaatggagaagaggctgcaggatctggagaatcagtaccggaaagaaaaggaagaagccgatcttctgctggagcagcagcgactgtatgcagactcggacagcggggatgactctgacaagcgctcttgtgaagagagctggaggctcatctcctccttgcgggagcagctgccgcccaccacggtccagaccattgtcaaacgctgtggtctgcccagcagtggcaagcgcagggcccctcgcagggtttatcagatcccccagcgacgcaggctgcagggcaaagacccccgctgggccaccatggctgacctgaagatgcaggcggtgaaggagatctgctacgaggtggccctggctgacttccgccacgggcgggctgagattgaggccctggccgccctcaagatgcgggagctgtgtcgcacctatggcaagccagacggccccggagacgcctggagggctgtggcccgggatgtctgggacactgtaggcgaggaggaaggaggtggagctggcagtggtggtggcagtgaggagggagcccgaggggcggaggtggaggacctccgggcccacatcgacaagctgacggggattctgcaggaggtgaagctgcagaacagcagcaaggaccgggagctgcaggccctgcgggaccgcatgctccgcatggagagggtcatccccctggcccaggatcatgaggatgagaatgaagaaggtggtgaggtcccctgggccccgcctgaaggatcagaggcagcagaggaggcagcccccagtgaccgcatgccgtcagcccggcccccctcgccgccactgtcaagctgggagcgggtgtcacggctcatggaggaggaccctgccttccgtcgtggtcgtcttcgctggctcaagcaggagcagctacggctgcagggactgcagggctctgggggccggggcggggggctgcgcaggcccccagcccgctttgtgccccctcacgactgcaagctacgcttccccttcaagagcaacccccagcaccgggagtcttggccagggatggggagcggggaggctccaactccgctccaaccccctgaggaggtcactccccatccagccacccctgcccgccggcctccgagtccccgaaggtcccaccatccccgcaggaactccctggatggagggggccgatcccggggagcgggttctgcacagcctgaaccccagcacttccagcccaaaaagcacaactcttatccccagccaccccaaccctacccagcccagcggcccccagggccccgctaccccccatacactactcccccacgaatgagacggcagcgttctgcccctgacctcaaggagagtggggcagctgtgtgagtcccacatcctgggcagagggcctggtggggccccttgctaggagaagggaagacgcccgagacgctgcttccccagaagtgctggggcagggaggcccaggagatgagagagaaggtccgagtaggtgatagaagacaagggggagaccgagccggaggctgaggaaaggaagagggcacggagttgccaggagcaaaccaaagtgaagagagagataggaagctgcctcggggccaccccttgcaaagggggtgtgtcccacaaacgctgctatgggtggggtggggggctggggtgctgcgtagccagtgtttgactttcttttcaagtgggggaaagtgggagaggactgagagtgaggcaagttctccccagcccctgtccgtctgtctgtctgtctgtggtggtttctgtttcttgggaggcatggtaggatcataagtcattcccctccccttccaggcctcctgctatatttgggggacctgactggtttggctggagtcccatgaggatgtgggccctttaataaaggatagcaaacaggga

SEQ ID NO: 369119 - DNA, 2314 bp, Homo sapiens
cgttggccattgcttccccagggtcggccaagtagatatggacatcaagctgaccggacagttcattcgggagcaacactgtctgttccggagcatcccccagccagatggagaagtggtggtcactctggagccttgtgaaggagctgagacatatgtgaatgggaagcttgtgacggagccgctggtgctgaagtcagggaataggattgtgatgggcaagaaccacgttttccgcttcaaccacccggagcaggcaaggctggaacgggaacgaggggtccccccacccccaggaccgccctctgagccagtcgactggaactttgcccagaaggaactgctggagcagcaaggcatcgacataaagctggaaatggagaagaggctgcaggatctggagaatcagtaccggaaagaaaaggaagaagccgatcttctgctggagcagcagcgactgtatgcagactcggacagcggggatgactctgacaagcgctcttgtgaagagagctggaggctcatctcctccttgcgggagcagctgccgcccaccacggtccagaccattgtcaaacgctgtggtctgcccagcagtggcaagcgcagggcccctcgcagggtttatcagatcccccagcgacgcaggctgcagggcaaagacccccgctgggccaccatggctgacctgaagatgcaggcggtgaaggagatctgctacgaggtggccctggctgacttccgccacgggcgggctgagattgaggccctggccgccctcaagatgcgggagctgtgtcgcacctatggcaagccagacggccccggagacgcctggagggctgtggcccgggatgtctgggacactgtaggcgaggaggaaggaggtggagctggcagtggtggtggcagtgaggagggagcccgaggggcggaggtggaggacctccgggcccacatcgacaagctgacggggattctgcaggaggtgaagctgcagaacagcagcaaggaccgggagctgcaggccctgcgggaccgcatgctccgcatggagagggtcatccccctggcccaggatcatgaggatgagaatgaagaaggtggtgaggtcccctgggccccgcctgaaggatcagaggcagcagaggaggcagcccccagtgaccgcatgccgtcagcccggcccccctcgccgccactgtcaagctgggagcgggtgtcacggctcatggaggaggaccctgccttccgtcgtggtcgtcttcgctggctcaagcaggagcagctacggctgcagggactgcagggctctgggggccggggcggggggctgcgcaggcccccagcccgctttgtgccccctcacgactgcaagctacgcttccccttcaagagcaacccccagcaccgggagtcttggccagggatggggagcggggaggctccaactccgctccaaccccctgaggaggtcactccccatccagccacccctgcccgccggcctccgagtccccgaaggtcccaccatccccgcaggaactccctggatggagggggccgatcccggggagcgggttctgcacagcctgaaccccagcacttccagcccaaaaagcacaactcttatccccagccaccccaaccctacccagcccagcggcccccagggccccgctaccccccatacactactcccccacgaatgagacggcagcgttctgcccctgacctcaaggagagtggggcagctgtgtgagtcccacatcctgggcagagggcctggtggggccccttgctaggagaagggaagacgcccgagacgctgcttccccagaagtgctggggcagggaggcccaggagatgagagagaaggtccgagtaggtgatagaagacaagggggagaccgagccggaggctgaggaaaggaagagggcacggagttgccaggagcaaaccaaagtgaagagagagataggaagctgcctcggggccaccccttgcaaagggggtgtgtcccacaaacgctgctatgggtggggtggggggctggggtgctgcgtagccagtgtttgactttcttttcaagtgggggaaagtgggagaggactgagagtgaggcaagttctccccagcccctgtccgtctgtctgtctgtctgtggtggtttctgtttcttgggaggcatggtaggatcataagtcattcccctccccttccaggcctcctgctatatttgggggacctgactggtttggctggagtcccatgaggatgtgggccctttaataaaggatagcaaacaggga

SEQ ID NO: 369120 - DNA, 2514 bp, Homo sapiens
cgctcccgccccagctcgcgctgcccgggcgggcgccggccgctggcgccgctactgctgccgcccccggggcgcgagtccgccgcccgccgcccgggcacccggcgaggggcgggggcagctccgaaccggccccagatccttcccgcttccgcctcacgcttcccggaaagcttgtccctctccgccgagctgctccgggagccccgccgcgccgagggtatctcccagagccccagctggtgtggccaggccccaggagtaggatggggctccccctacgagggccggtggcagccagaactgatacagcccccctggtctggggccaggacgccagctgaggagggcaggagtgtctggagctatggctggtgcctcggtgaaagtggcagtgagggttcggccctttaacgcccgtgagaccagccaggatgccaagtgtgtggtcagcatgcagggcaacaccacctccatcatcaatcctaaacagagcaaggatgcccccaaaagcttcacctttgactactcctactggtcacacacttcgacggaggacccccagtttgcatctcagcagcaagtgtatcgggacattggagaagagatgctgctccacgcctttgaaggctacaacgtgtgcatctttgcctatgggcagaccggggctgggaaatcctataccatgatggggcgacaggagccagggcagcagggcatcgtgccccagctctgtgaggacctcttctctcgcgttagtgagaaccagagtgctcagctatcctactctgtggaggtgagctatatggagatctactgtgagcgggtacgagacctcttgaaccccaagagtcggggttctctgcgggtccgggagcaccccatcctgggcccgtacgtgcaggacctgtccaaattggctgtgacctcctacgcagacattgctgacctcatggactgtggaaataaagcacggactgtggctgccaccaacatgaatgagaccagcagccgttcccatgccgtctttaccatcgtcttcacacagcgctgccatgaccagctcacggggctggactcggagaaggtcagtaagatcagtttggtggaccttgctgggagtgagcgagccgactcctcaggggcccggggcatgcgcctgaaggaaggagccaacatcaataagtccctgactacactagggaaagtgatctcggcccttgcagatatgcaatcaaagaagcgaaagtcggattttatcccctacagggactctgtgctcacctggctgctcaaggaaaatttgggggggaactcacgcacagccatgattgcagccctgagccctgctgacatcaattacgaggagactctcagcaccctcaggtatgctgaccgcaccaagcaaatccgctgcaatgccatcatcaacgaggaccctaatgcccggctgattagagagctgcaggaggaagtagcccggctgcgggaactgctgatggctcagggactgtcagcctctgctctggaaggcctgaagacggaagaagggagtgtcagaggcgccctgccagctgtgtcatctcccccagctccagtttcaccctcatcacccaccacacataatggggagctggagccgtcattctcccccaacacggagtcccagattgggcctgaggaagccatggagaggctgcaggagacagagaagattatagctgagctgaacgagacatgggaggagaagctacgcaagacagaagccctgaggatggagagagaagcattgctggctgagatgggggtggccgtccgggaggatgggggaactgtgggcgtcttctctccaaagaagactccccacctggtgaacctgaacgaagaccctctgatgtctgagtgtctgctctaccacatcaaagatggcgtcaccagggtcggccaagtagatatggacatcaagctgaccggacagttcattcgggagcaacactgtctgttccggagcatcccccagccagatggagaagtggtggtcactctggagccttgtgaaggagctgagacatatgtgaatgggaagcttgtgacggagccgctggtgctgaagtcagggaataggattgtgatgggcaagaaccacgttttccgcttcaaccacccggagcaggcaaggctggaacgggaacgaggggtccccccacccccaggaccgccctctgagccagtcgactggaactttgcccagaaggaactgctggagcagcaaggcatcgacataaagctggaaatggagaagaggctgcaggatctggagaatcagtaccggaaataaaatacagaactttccagaagcagcaggagctggacatggtgctcatgtctatcacctcagcaactctggaggagtcacctgagcccaggtgttttttctttttgtttgtttttgagatgggtctgctctattgcccagactggaggcaggtgggtacggggtcctctaagtcacct

SEQ ID NO: 369121 - DNA, 1980 bp, Homo sapiens
cgctcccgccccagctcgcgctgcccgggcgggcgccggccgctggcgccgctactgctgccgcccccggggcgcgagtccgccgcccgccgcccgggcacccggcgaggggcgggggcagctccgaaccggccccagatccttcccgcttccgcctcacgcttcccggaaagcttgtccctctccgccgagctgctccgggagccccgccgcgccgagggtatctcccagagccccagctggtgtggccaggccccaggagtaggatggggctccccctacgagggccggtggcagccagaactgatacagcccccctggtctggggccaggacgccagctgaggagggcaggagtgtctggagctatggctggtgcctcggtgaaagtggcagtgagggttcggccctttaacgcccgtgagaccagccaggatgccaagtgtgtggtcagcatgcagggcaacaccacctccatcatcaatcctaaacagagcaaggatgcccccaaaagcttcacctttgactactcctactggtcacacacttcgacggaggacccccagtttgcatctcagcagcaagtgtatcgggacattggagaagagatgctgctccacgcctttgaaggctacaacgtgtgcatctttgcctatgggcagaccggggctgggaaatcctataccatgatggggcgacaggagccagggcagcagggcatcgtgccccagctctgtgaggacctcttctctcgcgttagtgagaaccagagtgctcagctatcctactctgtggaggtgagctatatggagatctactgtgagcgggtacgagacctcttgaaccccaagagtcggggttctctgcgggtccgggagcaccccatcctgggcccgtacgtgcaggacctgtccaaattggctgtgacctcctacgcagacattgctgacctcatggactgtggaaataaagcacggactgtggctgccaccaacatgaatgagaccagcagccgttcccatgccgtctttaccatcgtcttcacacagcgctgccatgaccagctcacggggctggactcggagaaggtcagtaagatcagtttggtggaccttgctgggagtgagcgagccgactcctcaggggcccggggcatgcgcctgaaggaaggagccaacatcaataagtccctgactacactagggaaagtgatctcggcccttgcagatatgcaatcaaagaagcgaaagtcggattttatcccctacagggactctgtgctcacctggctgctcaaggaaaatttgggagacagagaagattatagctgagctgaacgagacatgggaggagaagctacgcaagacagaagccctgaggatggagagagaagcattgctggctgagatgggggtggccgtccgggaggatgggggaactgtgggcgtcttctctccaaagaaggtgagtgaggaatcgagcgaggaggcctagagagctctctggatgcctagaaaagaggcagcaggtgcagggtagtgagtgctgtccctgatcgctccctttgaggtccccggcttgtccctccatcatttctgtcccctcccctgccacctcctctccgtcttgtttagtcatccctgccttctcccttcagccattcaacagtcagcctcaggagagggagaggacctgggaaatcggaggttggttgcaatagagcatgcttttgtatcatttgagttttgtattctgtgcatgctcaaaaagataactaaagaaatctatttttcagaaggataacttgggaagacaagactaaagggaatagaggaggcatgagcactacattgtaagacagtggttgccagtgcagcgaggggttggttatagatggaggcacccgtgtagcttggagctatgctgcaactggtttcctggaggaggtggtttggaaagtggaacctgaaagatggacagg

SEQ ID NO: 369122 - DNA, 942 bp, Homo sapiens
ggaattatcggttcgaacccaacggccgtttccggccccacgcgtcgcgtctgtctgtctctgtctgtggtggtttctgtttcttgggaggcatggtaggatcataagtcattcccctccccttccaggcctcctgctatatttgggggacctgactggtttggctggagtcccatgaggatgaggactgagagtgaggcaagttctccccagcccctgtccgtctgtctgtctgtctgtggtggtttctgtttcttgggaggcatggtaggatcataagtcattcccctccccttccaggcctcctgctatatttgggggacctgactggtttggctggagtcccatgaggatgtgggccctttaataaaggatagcaaacagggagcttgtggcctgtttgttttgggttttcatggaggtgtaggttatataaggcaatggcacaggtcttaagcatacttatcagtgaagtattgtatgtgtgctctgtgcaggcaccacccagatctggatataagaatgtttccatcttgtcttcctgaacttcaccctcctgtctcttccttcagggtgcgcagcccgatcttttccccgctttttttttttgggagacagggtcttgctttgttgcccaggctggaggtacagtcttggctcactgcagcctccgcctcctgagtagctgggattacaggcatgtgccaccacgcccggctcattactgttttttttgtagtgacgaggtttcaccagcctgggcaacatggtgaaaccctgtatctacaaaacatagaaaaactagttgggtgtggtggtgtgtacctgtagttccagctactagggaggtaggaagatcacctgagcccatggagattgaggctgtggtgagctgtgaaggcaccacagcactctggcctgggcaagagtgggactctctca

SEQ ID NO: 369123 - DNA, 867 bp, Homo sapiens
cgctcccgccccagctcgcgctgcccgggcgggcgccggccgctggcgccgctactgctgccgcccccggggcgcgagtccgccgcccgccgcccgggcacccggcgaggggcgggggcagctccgaaccggccccagatccttcccgcttccgcctcacgcttcccggaaagcttgtccctctccgccgagctgctccgggagccccgccgcgccgagggtatctcccagagccccagctggtgtggccaggccccaggagtaggatggggctccccctacgagggccggtggcagccagaactgatacagcccccctggtctggggccaggacgccagctgaggagggcaggagtgtctggagctatggctggtgcctcggtgaaagtggcagtgagggttcggccctttaacgcccgtgagaccagccaggatgccaagtgtgtggtcagcatgcagggcaacaccacctccatcatcaatcctaaacagagcaaggatgcccccaaaagcttcacctttgactactcctactggtcacacacttcgacggaggacccccagtttgcatctcagcagcaagtgtatcgggacattggagaagagatgctgctccacgcctttgaaggctacaacgtgtgcatctttgcctatgggcagaccggggctgggaaatcctataccatgatggggcgacaggagccagggcagcagggcatcgtgccccagctctgtgaggacctcttctctcgcgttagtgagaaccagagtgctcagctatcctactctgtggagtgctgacctgcatggacatgtggaaataaagcacggacattgctgccaccaatacaacgaggcagcagcag

SEQ ID NO: 369124 - DNA, 323 bp, Homo sapiens
tgtcccttgtccatgcctgcggtgggcctgtagctatttgtaattgagtgagtaaccaccgtctcactgttgtcacgtattctgtttcccccggcctcctccctctcctcctcctggctctctctagcccttgccagctgcccacattcctgctgggtgcttccctgatttccctgccccgtcccccacccgcaccttatctcctgcctgtttcctctgaccccaggtcagtaagatcagtttggtggaccttgctgggagtgagcgagccgactcctcaggggcccggggcatgcgcctgaaggtgaggggccttcagaggg

SEQ ID NO: 369125 - DNA, 6217 bp, Homo sapiens
  misc_feature (4649)..(4649): n is a, c, g, or t
  misc_feature (4663)..(4663): n is a, c, g, or t
  misc_feature (4676)..(4676): n is a, c, g, or t
  misc_feature (4784)..(4784): n is a, c, g, or t
  misc_feature (5545)..(5545): n is a, c, g, or t
  misc_feature (6134)..(6134): n is a, c, g, or t
cgctcccgccccagctcgcgctgcccgggcgggcgccggccgctggcgccgctactgctgccgcccccggggcgcgagtccgccgcccgccgcccgggcacccggcgaggggcgggggcagctccgaaccggccccagatccttcccgcttccgcctcacgcttcccggaaagcttgtccctctccgccgagctgctccgggagccccgccgcgccgagggtatctcccagagccccagctggtgtggccaggccccaggagtaggatggggctccccctacgagggccggtggcagccagaactgatacagcccccctggtctggggccaggacgccagctgaggagggcaggagtgtctggagctatggctggtgcctcggtgaaagtggcagtgagggttcggccctttaacgcccgtgagaccagccaggatgccaagtgtgtggtcagcatgcagggcaacaccacctccatcatcaatcctaaacagagcaaggatgcccccaaaagcttcacctttgactactcctactggtcacacacttcgacggaggacccccagtttgcatctcagcagcaagtgtatcgggacattggagaagagatgctgctccacgcctttgaaggctacaacgtgtgcatctttgcctatgggcagaccggggctgggaaatcctataccatgatggggcgacaggagccagggcagcagggcatcgtgccccagctctgtgaggacctcttctctcgcgttagtgagaaccagagtgctcagctatcctactctgtggaggtgagctatatggagatctactgtgagcgggtacgagacctcttgaaccccaagagtcggggttctctgcgggtccgggagcaccccatcctgggcccgtacgtgcaggacctgtccaaattggctgtgacctcctacgcagacattgctgacctcatggactgtggaaataaagcacggactgtggctgccaccaacatgaatgagaccagcagccgttcccatgccgtctttaccatcgtcttcacacagcgctgccatgaccagctcacggggctggactcggagaaggtcagtaagatcagtttggtggaccttgctgggagtgagcgagccgactcctcaggggcccggggcatgcgcctgaaggaaggagccaacatcaataagtccctgactacactagggaaagtgatctcggcccttgcagatatgcaatcaaagaagcgaaagtcggattttatcccctacagggactctgtgctcacctggctgctcaaggaaaatttgggggggaactcacgcacagccatgattgcagccctgagccctgctgacatcaattacgaggagactctcagcaccctcaggtatgctgaccgcaccaagcaaatccgctgcaatgccatcatcaacgaggaccctaatgcccggctgattagagagctgcaggaggaagtagcccggctgcgggaactgctgatggctcagggactgtcagcctctgctctggaaggcctgaagacggaagaagggagtgtcagaggcgccctgccagctgtgtcatctcccccagctccagtttcaccctcatcacccaccacacataatggggagctggagccgtcattctcccccaacacggagtcccagattgggcctgaggaagccatggagaggctgcaggagacagagaagattatagctgagctgaacgagacatgggaggagaagctacgcaagacagaagccctgaggatggagagagaagcattgctggctgagatgggggtggccgtccgggaggatgggggaactgtgggcgtcttctctccaaagaagactccccacctggtgaacctgaacgaagaccctctgatgtctgagtgtctgctctaccacatcaaagatggcgtcaccagggtcggccaagtagatatggacatcaagctgaccggacagttcattcgggagcaacactgtctgttccggagcatcccccagccagatggagaagtggtggtcactctggagccttgtgaaggagctgagacatatgtgaatgggaagcttgtgacggagccgctggtgctgaagtcagggaataggattgtgatgggcaagaaccacgttttccgcttcaaccacccggagcaggcaaggctggaacgggaacgaggggtccccccacccccaggaccgccctctgagccagtcgactggaactttgcccagaaggaactgctggagcagcaaggcatcgacataaagctggaaatggagaagaggctgcaggatctggagaatcagtaccggaaagaaaaggaagaagccgatcttctgctggagcagcagcgactgtatgcagactcggacagcggggatgactctgacaagcgctcttgtgaagagagctggaggctcatctcctccttgcgggagcagctgccgcccaccacggtccagaccattgtcaaacgctgtggtctgcccagcagtggcaagcgcagggcccctcgcagggtttatcagatcccccagcgacgcaggctgcagggcaaagacccccgctgggccaccatggctgacctgaagatgcaggcggtgaaggagatctgctacgaggtggccctggctgacttccgccacgggcgggctgagattgaggccctggccgccctcaagatgcgggagctgtgtcgcacctatggcaagccagacggccccggagacgcctggagggctgtggcccgggatgtctgggacactgtaggcgaggaggaaggaggtggagctggcagtggtggtggcagtgaggagggagcccgaggggcggaggtggaggacctccgggcccacatcgacaagctgacggggattctgcaggaggtgaagctgcagaacagcagcaaggaccgggagctgcaggccctgcgggaccgcatgctccgcatggagagggtcatccccctggcccaggatcatgaggatgagaatgaagaaggtggtgaggtcccctgggccccgcctgaaggatcagaggcagcagaggaggcagcccccagtgaccgcatgccgtcagcccggcccccctcgccgccactgtcaagctgggagcgggtgtcacggctcatggaggaggaccctgccttccgtcgtggtcgtcttcgctggctcaagcaggagcagctacggctgcagggactgcagggctctgggggccggggcggggggctgcgcaggcccccagcccgctttgtgccccctcacgactgcaagctacgcttccccttcaagagcaacccccagcaccgggagtcttggccagggatggggagcggggaggctccaactccgctccaaccccctgaggaggtcactccccatccagccacccctgcccgccggcctccgagtccccgaaggtcccaccatccccgcaggaactccctggatggagggggccgatcccggggagcgggttctgcacagcctgaaccccagcacttccagcccaaaaagcacaactcttatccccagccaccccaaccctacccagcccagcggcccccagggccccgctaccccccatacactactcccccacgaatgagacggcagcgttctgcccctgacctcaaggagagtggggcagctgtgtgagtcccacatcctgggcagagggcctggtggggccccttgctaggagaagggaagacgcccgagacgctgcttccccagaagtgctggggcagggaggcccaggagatgagagagaaggtccgagtaggtgatagaagacaagggggagaccgagccggaggctgaggaaaggaagagggcacggagttgccaggagcaaaccaaagtgaagagagagataggaagctgcctcggggccaccccttgcaaagggggtgtgtcccacaaacgctgctatgggtggggtggggggctggggtgctgcgtagccagtgtttgactttcttttcaagtgggggaaagtgggagaggactgagagtgaggcaagttctccccagcccctgtccgtctgtctgtctgtctgtggtggtttctgtttcttgggaggcatggtaggatcataagtcattcccctccccttccaggcctcctgctatatttgggggacctgactggtttggctggagtcccatgaggatgtgggccctttaataaaggatagcaaacagggagcttgtggcctgtttgttttgggttttcatggaggtgtaggttatataaggcaatggcacaggtcttaagcatacttatcagtgaagtattgtatgtgtgctctgtgcaggcaccacccagatctggatataagaatgtttccatcttgtcttcctgaacttcaccctcctgtctcttccttcagggtgcgcagcccgatcttttccccgctttttttttttgggagacagggtcttgctttgttgcccaggctggaggtacagtcttggctcactgcagcctccgcctcctgagtagctgggattacaggcatgtgccaccacgcccggctcattactgttttttttgtagtgacgaggtttcaccgtgttggccaggctggtctcgaactcctgatgacctcaagtgatccgcccnccttggcctcccanagtggtgggattncagagacagtgatcttgctatgctgcccaggctggtctcaaccttatgggctcaagtgatcctcccacctcagcctcccaaagtgctaggattacctgcgtgagctanagcgccctgcctgttctgggcttcttgcagagcctcttcagctgcagagaagcagctctcctttctccaagtccagagccaacaggacgaataatgaagctgttgggaagatttactgataatacatgtaaagggtctagcacattttaggagctcaaggttggtgccttccctttttctttactctgaaccggatatgaggccttgagaaagaagagaggcgcttgcaaaacgaggtgaggtctcaggcacagtggctcacgcctgtaatcccagcactttaggagaccgaggcgggcggatcatgaggtcaggagttcgagaccagcctggccaacatggtgaaagcccgtctctactaaaaatacaaaaattagacgggcatggtggtgggcacctgtaatcccggctacttgggaggttgagggaggagaatcgcttgaacccaggaggtggaggttgcagtgagccgagactgcaccattgcactccagcctgggcaatagagcgagactccgtctcaagcaagcaagcaagcaaacaaacaaaataaaaaacgaggtcaagtttcaaaagatgtcacccccaacctggcaaaacttctcctcaagccctgtcgttccactcttgtccgccaggaggagaaaaggttccctcgaaggacgtctttgcttgcgcgttcacggagccttgagaacgagtggccgaggggacccctgcggccctgcgcgcctaagggaggacctgactcctttcagaantagcatttcttccccttcgtgggtgctcttgagttccaaagaaaaggaagagaagccttcattgagcagcttcttctgccttagggactgtgctagggggtagatcgaccttaggggaaacaatccccgcttattagaggaggttttggatcagggtttgctttatttgaaatttaacaaatacagaaaagcagaaggaagaaaattgaagtaatccatgtttccactgggcgcggcggctcacgcctataatcccagcactttgggaggccaaggcgggcggatcacgaggtcaggagttcgagaccagcctgaccaacatggtgaaaccccccgtctctactaaaattacaaaattagccggtcgtggtggcacacgcctgtaatcccagctactcaggaggctgaggcaggagaatcgcttgaacccgggaggcagaggttgcagtgagccgagattgcaccactgcactccagcctgagcaacagagtgagactccgttgtctttaaaggccaatcccatagcaaatgacagagactcacttgagtaagaaaggtttttgacaagaaaacccacagaagaagagntaagctgtggatataagaaaggcactacaatctgtatttaaatctaattgcacactagataatatatgtatgaaaaattattt

SEQ ID NO: 369126 - DNA, 4231 bp, Homo sapiens
cgctcccgccccagctcgcgctgcccgggcgggcgccggccgctggcgccgctactgctgccgcccccggggcgcgagtccgccgcccgccgcccgggcacccggcgaggggcgggggcagctccgaaccggccccagatccttcccgcttccgcctcacgcttcccggaaagcttgtccctctccgccgagctgctccgggagccccgccgcgccgagggtatctcccagagccccagctggtgtggccaggccccaggagtaggatggggctccccctacgagggccggtggcagccagaactgatacagcccccctggtctggggccaggacgccagctgaggagggcaggagtgtctggagctatggctggtgcctcggtgaaagtggcagtgagggttcggccctttaacgcccgtgagaccagccaggatgccaagtgtgtggtcagcatgcagggcaacaccacctccatcatcaatcctaaacagagcaaggatgcccccaaaagcttcacctttgactactcctactggtcacacacttcgacggaggacccccagtttgcatctcagcagcaagtgtatcgggacattggagaagagatgctgctccacgcctttgaaggctacaacgtgtgcatctttgcctatgggcagaccggggctgggaaatcctataccatgatggggcgacaggagccagggcagcagggcatcgtgccccagctctgtgaggacctcttctctcgcgttagtgagaaccagagtgctcagctatcctactctgtggaggtgagctatatggagatctactgtgagcgggtacgagacctcttgaaccccaagagtcggggttctctgcgggtccgggagcaccccatcctgggcccgtacgtgcaggacctgtccaaattggctgtgacctcctacgcagacattgctgacctcatggactgtggaaataaagcacggactgtggctgccaccaacatgaatgagaccagcagccgttcccatgccgtctttaccatcgtcttcacacagcgctgccatgaccagctcacggggctggactcggagaaggtcagtaagatcagtttggtggaccttgctgggagtgagcgagccgactcctcaggggcccggggcatgcgcctgaaggaaggagccaacatcaataagtccctgactacactagggaaagtgatctcggcccttgcagatatgcaatcaaagaagcgaaagtcggattttatcccctacagggactctgtgctcacctggctgctcaaggaaaatttgggggggaactcacgcacagccatgattgcagccctgagccctgctgacatcaattacgaggagactctcagcaccctcaggtatgctgaccgcaccaagcaaatccgctgcaatgccatcatcaacgaggaccctaatgcccggctgattagagagctgcaggaggaagtagcccggctgcgggaactgctgatggctcagggactgtcagcctctgctctggaaggcctgaagacggaagaagggagtgtcagaggcgccctgccagctgtgtcatctcccccagctccagtttcaccctcatcacccaccacacataatggggagctggagccgtcattctcccccaacacggagtcccagattgggcctgaggaagccatggagaggctgcaggagacagagaagattatagctgagctgaacgagacatgggaggagaagctacgcaagacagaagccctgaggatggagagagaagcattgctggctgagatgggggtggccgtccgggaggatgggggaactgtgggcgtcttctctccaaagaagactccccacctggtgaacctgaacgaagaccctctgatgtctgagtgtctgctctaccacatcaaagatggcgtcaccagggtcggccaagtagatatggacatcaagctgaccggacagttcattcgggagcaacactgtctgttccggagcatcccccagccagatggagaagtggtggtcactctggagccttgtgaaggagctgagacatatgtgaatgggaagcttgtgacggagccgctggtgctgaagtcagggaataggattgtgatgggcaagaaccacgttttccgcttcaaccacccggagcaggcaaggctggaacgggaacgaggggtccccccacccccaggaccgccctctgagccagtcgactggaactttgcccagaaggaactgctggagcagcaaggcatcgacataaagctggaaatggagaagaggctgcaggatctggagaatcagtaccggaaagaaaaggaagaagccgatcttctgctggagcagcagcgactgtatgcagactcggacagcggggatgactctgacaagcgctcttgtgaagagagctggaggctcatctcctccttgcgggagcagctgccgcccaccacggtccagaccattgtcaaacgctgtggtctgcccagcagtggcaagcgcagggcccctcgcagggtttatcagatcccccagcgacgcaggctgcagggcaaagacccccgctgggccaccatggctgacctgaagatgcaggcggtgaaggagatctgctacgaggtggccctggctgacttccgccacgggcgggctgagattgaggccctggccgccctcaagatgcgggagctgtgtcgcacctatggcaagccagacggccccggagacgcctggagggctgtggcccgggatgtctgggacactgtaggcgaggaggaaggaggtggagctggcagtggtggtggcagtgaggagggagcccgaggggcggaggtggaggacctccgggcccacatcgacaagctgacggggattctgcaggaggtgaagctgcagaacagcagcaaggaccgggagctgcaggccctgcgggaccgcatgctccgcatggagagggtcatccccctggcccaggatcatgaggatgagaatgaagaaggtggtgaggtcccctgggccccgcctgaaggatcagaggcagcagaggaggcagcccccagtgaccgcatgccgtcagcccggcccccctcgccgccactgtcaagctgggagcgggtgtcacggctcatggaggaggaccctgccttccgtcgtggtcgtcttcgctggctcaagcaggagcagctacggctgcagggactgcagggctctgggggccggggcggggggctgcgcaggcccccagcccgctttgtgccccctcacgactgcaagctacgcttccccttcaagagcaacccccagcaccgggagtcttggccagggatggggagcggggaggctccaactccgctccaaccccctgaggaggtcactccccatccagccacccctgcccgccggcctccgagtccccgaaggtcccaccatccccgcaggaactccctggatggagggggccgatcccggggagcgggttctgcacagcctgaaccccagcacttccagcccaaaaagcacaactcttatccccagccaccccaaccctacccagcccagcggcccccagggccccgctaccccccatacactactcccccacgaatgagacggcagcgttctgcccctgacctcaaggagagtggggcagctgtgtgagtcccacatcctgggcagagggcctggtggggccccttgctaggagaagggaagacgcccgagacgctgcttccccagaagtgctggggcagggaggcccaggagatgagagagaaggtccgagtaggtgatagaagacaagggggagaccgagccggaggctgaggaaaggaagagggcacggagttgccaggagcaaaccaaagtgaagagagagataggaagctgcctcggggccaccccttgcaaagggggtgtgtcccacaaacgctgctatgggtggggtggggggctggggtgctgcgtagccagtgtttgactttcttttcaagtgggggaaagtgggagaggactgagagtgaggcaagttctccccagcccctgtccgtctgtctgtctgtctgtggtggtttctgtttcttgggaggcatggtaggatcataagtcattcccctccccttccaggcctcctgctatatttgggggacctgactggtttggctggagtcccatgaggatgtgggccctttaataaaggatagcaaacaggga

SEQ ID NO: 369127 - DNA, 3918 bp, Homo sapiens
ggcaagaccagaaggactcctgcaacggtgactctggagggcccctgatctgcaacgggtacttgcagggccttgtgtctttcggaaaagcaccgtgtggccaagttggcgtgccaggtgtctacaccaacctctgcaaattcactgagtggatagagaaaaccgtccaggccagttaactctggggactgggaacccatgaaattgacccccaaatacatcctgcggaaggaattcacggaggacccccagtttgcatctcagcagcaagtgtatcgggacattggagaagagatgctgctccacgcctttgaaggctacaacgtgtgcatctttgcctatgggcagaccggggctgggaaatcctataccatgatggggcgacaggagccagggcagcagggcatcgtgccccagctctgtgaggacctcttctctcgcgttagtgagaaccagagtgctcagctatcctactctgtggaggtgagctatatggagatctactgtgagcgggtacgagacctcttgaaccccaagagtcggggttctctgcgggtccgggagcaccccatcctgggcccgtacgtgcaggacctgtccaaattggctgtgacctcctacgcagacattgctgacctcatggactgtggaaataaagcacggactgtggctgccaccaacatgaatgagaccagcagccgttcccatgccgtctttaccatcgtcttcacacagcgctgccatgaccagctcacggggctggactcggagaaggtcagtaagatcagtttggtggaccttgctgggagtgagcgagccgactcctcaggggcccggggcatgcgcctgaaggaaggagccaacatcaataagtccctgactacactagggaaagtgatctcggcccttgcagatatgcaatcaaagaagcgaaagtcggattttatcccctacagggactctgtgctcacctggctgctcaaggaaaatttgggggggaactcacgcacagccatgattgcagccctgagccctgctgacatcaattacgaggagactctcagcaccctcaggtatgctgaccgcaccaagcaaatccgctgcaatgccatcatcaacgaggaccctaatgcccggctgattagagagctgcaggaggaagtagcccggctgcgggaactgctgatggctcagggactgtcagcctctgctctggaaggcctgaagacggaagaagggagtgtcagaggcgccctgccagctgtgtcatctcccccagctccagtttcaccctcatcacccaccacacataatggggagctggagccgtcattctcccccaacacggagtcccagattgggcctgaggaagccatggagaggctgcaggagacagagaagattatagctgagctgaacgagacatgggaggagaagctacgcaagacagaagccctgaggatggagagagaagcattgctggctgagatgggggtggccgtccgggaggatgggggaactgtgggcgtcttctctccaaagaagactccccacctggtgaacctgaacgaagaccctctgatgtctgagtgtctgctctaccacatcaaagatggcgtcaccagggtcggccaagtagatatggacatcaagctgaccggacagttcattcgggagcaacactgtctgttccggagcatcccccagccagatggagaagtggtggtcactctggagccttgtgaaggagctgagacatatgtgaatgggaagcttgtgacggagccgctggtgctgaagtcagggaataggattgtgatgggcaagaaccacgttttccgcttcaaccacccggagcaggcaaggctggaacgggaacgaggggtccccccacccccaggaccgccctctgagccagtcgactggaactttgcccagaaggaactgctggagcagcaaggcatcgacataaagctggaaatggagaagaggctgcaggatctggagaatcagtaccggaaagaaaaggaagaagccgatcttctgctggagcagcagcgactgtatgcagactcggacagcggggatgactctgacaagcgctcttgtgaagagagctggaggctcatctcctccttgcgggagcagctgccgcccaccacggtccagaccattgtcaaacgctgtggtctgcccagcagtggcaagcgcagggcccctcgcagggtttatcagatcccccagcgacgcaggctgcagggcaaagacccccgctgggccaccatggctgacctgaagatgcaggcggtgaaggagatctgctacgaggtggccctggctgacttccgccacgggcgggctgagattgaggccctggccgccctcaagatgcgggagctgtgtcgcacctatggcaagccagacggccccggagacgcctggagggctgtggcccgggatgtctgggacactgtaggcgaggaggaaggaggtggagctggcagtggtggtggcagtgaggagggagcccgaggggcggaggtggaggacctccgggcccacatcgacaagctgacggggattctgcaggaggtgaagctgcagaacagcagcaaggaccgggagctgcaggccctgcgggaccgcatgctccgcatggagagggtcatccccctggcccaggatcatgaggatgagaatgaagaaggtggtgaggtcccctgggccccgcctgaaggatcagaggcagcagaggaggcagcccccagtgaccgcatgccgtcagcccggcccccctcgccgccactgtcaagctgggagcgggtgtcacggctcatggaggaggaccctgccttccgtcgtggtcgtcttcgctggctcaagcaggagcagctacggctgcagggactgcagggctctgggggccggggcggggggctgcgcaggcccccagcccgctttgtgccccctcacgactgcaagctacgcttccccttcaagagcaacccccagcaccgggagtcttggccagggatggggagcggggaggctccaactccgctccaaccccctgaggaggtcactccccatccagccacccctgcccgccggcctccgagtccccgaaggtcccaccatccccgcaggaactccctggatggagggggccgatcccggggagcgggttctgcacagcctgaaccccagcacttccagcccaaaaagcacaactcttatccccagccaccccaaccctacccagcccagcggcccccagggccccgctaccccccatacactactcccccacgaatgagacggcagcgttctgcccctgacctcaaggagagtggggcagctgtgtgagtcccacatcctgggcagagggcctggtggggccccttgctaggagaagggaagacgcccgagacgctgcttccccagaagtgctggggcagggaggcccaggagatgagagagaaggtccgagtaggtgatagaagacaagggggagaccgagccggaggctgaggaaaggaagagggcacggagttgccaggagcaaaccaaagtgaagagagagataggaagctgcctcggggccaccccttgcaaagggggtgtgtcccacaaacgctgctatgggtggggtggggggctggggtgctgcgtagccagtgtttgactttcttttcaagtgggggaaagtgggagaggactgagagtgaggcaagttctccccagcccctgtccgtctgtctgtctgtctgtggtggtttctgtttcttgggaggcatggtaggatcataagtcattcccctccccttccaggcctcctgctatatttgggggacctgactggtttggctggagtcccatgaggatgtgggccctttaataaaggatagcaaacaggga

SEQ ID NO: 369128 - DNA, 4119 bp, Homo sapiens
cgctcccgccccagctcgcgctgcccgggcgggcgccggccgctggcgccgctactgctgccgcccccggggcgcgagtccgccgcccgccgcccgggcacccggcgaggggcgggggcagctccgaaccggccccagatccttcccgcttccgcctcacgcttcccggaaagcttgtccctctccgccgagctgctccgggagccccgccgcgccgagggtatctcccagagccccagctggtgtggccaggccccaggagtaggatggggctccccctacgagggccggtggcagccagaactgatacagcccccctggtctggggccaggacgccagctgaggagggcaggagtgtctggagctatggctggtgcctcggtgaaagtggcagtgagggttcggccctttaacgcccgtgagaccagccaggatgccaagtgtgtggtcagcatgcagggcaacaccacctccatcatcaatcctaaacagagcaaggatgcccccaaaagcttcacctttgactactcctactggtcacacacttcgacggaggacccccagtttgcatctcagcagcaagtgtatcgggacattggagaagagatgctgctccacgcctttgaaggctacaacgtgtgcatctttgcctatgggcagaccggggctgggaaatcctataccatgatggggcgacaggagccagggcagcagggcatcgtgccccagctctgtgaggacctcttctctcgcgttagtgagaaccagagtgctcagctatcctactctgtggaggtgagctatatggagatctactgtgagcgggtacgagacctcttgaaccccaagagtcggggttctctgcgggtccgggagcaccccatcctgggcccgtacgtgcaggacctgtccaaattggctgtgacctcctacgcagacattgctgacctcatggactgtggaaataaagcacggactgtggctgccaccaacatgaatgagaccagcagccgttcccatgccgtctttaccatcgtcttcacacagcgctgccatgaccagctcacggggctggactcggagaaggtcagtaagatcagtttggtggaccttgctgggagtgagcgagccgactcctcaggggcccggggcatgcgcctgaaggaaggagccaacatcaataagtccctgactacactagggaaagtgatctcggcccttgcagatatgcaatcaaagaagcgaaagtcggattttatcccctacagggactctgtgctcacctggctgctcaaggaaaatttgggggggaactcacgcacagccatgattgcagccctgagccctgctgacatcaattacgaggagactctcagcaccctcaggtatgctgaccgcaccaagcaaatccgctgcaatgccatcatcaacgaggaccctaatgcccggctgattagagagctgcaggaggaagtagcccggctgcgggaactgctgatggctcagggactgtcagcctctgctctggaaggcctgaagacggaagaagggagtgtcagaggcgccctgccagctgtgtcatctcccccagctccagtttcaccctcatcacccaccacacataatggggagctggagccgtcattctcccccaacacggagtcccagattgggcctgaggaagccatggagaggctgcaggagacagagaagattatagctgagctgaacgagacatgggaggagaagctacgcaagacagaagccctgaggatggagagagaagcattgctggctgagatgggggtggccgtccgggaggatgggggaactgtgggcgtcttctctccaaagaagactccccacctggtgaacctgaacgaagaccctctgatgtctgagtgtctgctctaccacatcaaagatggcgtcaccagggtcggccaagtagatatggacatcaagctgaccggacagttcattcgggagcaacactgtctgttccggagcatcccccagccagatggagaagtggtggtcactctggagccttgtgaaggagctgagacatatgtgaatgggaagcttgtgacggagccgctggtgctgaagtcagggaataggattgtgatgggcaagaaccacgttttccgcttcaaccacccggagcaggcaaggctggaacgggaacgaggggtccccccacccccaggaccgccctctgagccagtcgactggaactttgcccagaaggaactgctggagcagcaaggcatcgacataaagctggaaatggagaagaggctgcaggatctggagaatcagtaccggaaagaaaaggaagaagccgatcttctgctggagcagcagcgactgtatgcagactcggacagcggggatgactctgacaagcgctcttgtgaagagagctggaggctcatctcctccttgcgggagcagctgccgcccaccacggtccagaccattgtcaaacgctgtggtctgcccagcagtggcaagcgcagggcccctcgcagggtttatcagatcccccagcgacgcaggctgcagggcaaagacccccgctgggccaccatggctgacctgaagatgcaggcggtgaaggagatctgctacgaggtggccctggctgacttccgccacgggcgggctgagattgaggccctggccgccctcaagatgcgggagctgtgtcgcacctatggcaagccagacggccccggagacgcctggagggctgtggcccgggatgtctgggacactgtaggcgaggaggaaggaggtggagctggcagtggtggtggcagtgaggagggagcccgaggggcggaggtggaggacctccgggcccacatcgacaagctgacggggattctgcaggaggtgaagctgcagaacagcagcaaggaccgggagctgcaggccctgcgggaccgcatgctccgcatggagagggtcatccccctggcccaggatcatgaggatgagaatgaagaaggtggtgaggtcccctgggccccgcctgaaggatcagaggcagcagaggaggcagcccccagtgaccgcatgccgtcagcccggcccccctcgccgccactgtcaagctgggagcgggtgtcacggctcatggaggaggaccctgccttccgtcgtggtcgtcttcgctggctcaagcaggagcagctacggctgcagggactgcagggctctgggggccggggcggggggctgcgcaggcccccagcccgctttgtgccccctcacgactgcaagctacgcttccccttcaagagcaacccccagcaccgggagtcttggccagggatggggagcggggaggctccaactccgctccaaccccctgaggaggtcactccccatccagccacccctgcccgccggcctccgagtccccgaaggtcccaccatccccgcaggaactccctggatggagggggccgatcccggggagcgggttctgcacagcctgaaccccagcacttccagcccaaaaagcacaactcttatccccagccaccccaaccctacccagcccagcggcccccagggccccgctaccccccatacactactcccccacgaatgagacggcagcgttctgcccctgacctcaaggagagtggggcagctgtgtgagtcccacatcctgggcagagggcctggtggggccccttgctaggagaagggaagacgcccgagacgctgcttccccagaagtgctggggcagggaggcccaggagatgagagagaaggtccgagtaggtgatagaagacaagggggagaccgagccggaggctgaggaaaggaagagggcacggagttgccagtagccagtgtttgactttcttttcaagtgggggaaagtgggagaggactgagagtgaggcaagttctccccagcccctgtccgtctgtctgtctgtctgtggtggtttctgtttcttgggaggcatggtaggatcataagtcattcccctccccttccaggcctcctgctatatttgggggacctgactggtttggctggagtcccatgaggatgtgggccctttaataaaggatagcaaacaggga

SEQ ID NO: 369129 - DNA, 2697 bp, Homo sapiens
agctcttggtctcctggatgtctctcatcagctccttctttccttagcctcattctttttcctctttctccctcccaggcctgaagacggaagaagggagtgtcagaggcgccctgccagctgtgtcatctcccccagctccagtttcaccctcatcacccaccacacataatggggagctggagccgtcattctcccccaacacggagtcccagattgggcctgaggaagccatggagaggctgcagagaagcattgctggctgagatgggggtggccgtccgggaggatgggggaactgtgggcgtcttctctccaaagaagactccccacctggtgaacctgaacgaagaccctctgatgtctgagtgtctgctctaccacatcaaagatggcgtcaccagggtcggccaagtagatatggacatcaagctgaccggacagttcattcgggagcaacactgtctgttccggagcatcccccagccagatggagaagtggtggtcactctggagccttgtgaaggagctgagacatatgtgaatgggaagcttgtgacggagccgctggtgctgaagtcagggaataggattgtgatgggcaagaaccacgttttccgcttcaaccacccggagcaggcaaggctggaacgggaacgaggggtccccccacccccaggaccgccctctgagccagtcgactggaactttgcccagaaggaactgctggagcagcaaggcatcgacataaagctggaaatggagaagaggctgcaggatctggagaatcagtaccggaaagaaaaggaagaagccgatcttctgctggagcagcagcgactgtatgcagactcggacagcggggatgactctgacaagcgctcttgtgaagagagctggaggctcatctcctccttgcgggagcagctgccgcccaccacggtccagaccattgtcaaacgctgtggtctgcccagcagtggcaagcgcagggcccctcgcagggtttatcagatcccccagcgacgcaggctgcagggcaaagacccccgctgggccaccatggctgacctgaagatgcaggcggtgaaggagatctgctacgaggtggccctggctgacttccgccacgggcgggctgagattgaggccctggccgccctcaagatgcgggagctgtgtcgcacctatggcaagccagacggccccggagacgcctggagggctgtggcccgggatgtctgggacactgtaggcgaggaggaaggaggtggagctggcagtggtggtggcagtgaggagggagcccgaggggcggaggtggaggacctccgggcccacatcgacaagctgacggggattctgcaggaggtgaagctgcagaacagcagcaaggaccgggagctgcaggccctgcgggaccgcatgctccgcatggagagggtcatccccctggcccaggatcatgaggatgagaatgaagaaggtggtgaggtcccctgggccccgcctgaaggatcagaggcagcagaggaggcagcccccagtgaccgcatgccgtcagcccggcccccctcgccgccactgtcaagctgggagcgggtgtcacggctcatggaggaggaccctgccttccgtcgtggtcgtcttcgctggctcaagcaggagcagctacggctgcagggactgcagggctctgggggccggggcggggggctgcgcaggcccccagcccgctttgtgccccctcacgactgcaagctacgcttccccttcaagagcaacccccagcaccgggagtcttggccagggatggggagcggggaggctccaactccgctccaaccccctgaggaggtcactccccatccagccacccctgcccgccggcctccgagtccccgaaggtcccaccatccccgcaggaactccctggatggagggggccgatcccggggagcgggttctgcacagcctgaaccccagcacttccagcccaaaaagcacaactcttatccccagccaccccaaccctacccagcccagcggcccccagggccccgctaccccccatacactactcccccacgaatgagacggcagcgttctgcccctgacctcaaggagagtggggcagctgtgtgagtcccacatcctgggcagagggcctggtggggccccttgctaggagaagggaagacgcccgagacgctgcttccccagaagtgctggggcagggaggcccaggagatgagagagaaggtccgagtaggtgatagaagacaagggggagaccgagccggaggctgaggaaaggaagagggcacggagttgccaggagcaaaccaaagtgaagagagagataggaagctgcctcggggccaccccttgcaaagggggtgtgtcccacaaacgctgctatgggtggggtggggggctggggtgctgcgtagccagtgtttgactttcttttcaagtgggggaaagtgggagaggactgagagtgaggcaagttctccccagcccctgtccgtctgtctgtctgtctgtggtggtttctgtttcttgggaggcatggtaggatcataagtcattcccctccccttccaggcctcctgctatatttgggggacctgactggtttggctggagtcccatgaggatgtgggccctttaataaaggatagcaaacaggga

SEQ ID NO: 369130 - DNA, 3382 bp, Homo sapiens
cgctcccgccccagctcgcgctgcccgggcgggcgccggccgctggcgccgctactgctgccgcccccggggcgcgagtccgccgcccgccgcccgggcacccggcgaggggcgggggcagctccgaaccggccccagatccttcccgcttccgcctcacgcttcccggaaagcttgtccctctccgccgagctgctccgggagccccgccgcgccgagggtatctcccagagccccagctggtgtggccaggccccaggagtaggatggggctccccctacgagggccggtggcagccagaactgatacagcccccctggtctggggccaggacgccagctgaggagggcaggagtgtctggagctatggctggtgcctcggtgaaagtggcagtgagggttcggccctttaacgcccgtgagaccagccaggatgccaagtgtgtggtcagcatgcagggcaacaccacctccatcatcaatcctaaacagagcaaggatgcccccaaaagcttcacctttgactactcctactggtcacacacttcgacggaggacccccagtttgcatctcagcagcaagtgtatcgggacattggagaagagatgctgctccacgcctttgaaggctacaacgtgtgcatctttgcctatgggcagaccggggctgggaaatcctataccatgatggggcgacaggagccagggcagcagggcatcgtgccccagctctgtgaggacctcttctctcgcgttagtgagaaccagagtgctcagctatcctactctgtggaggtgagctatatggagatctactgtgagcgggtacgagacctcttgaaccccaagagtcggggttctctgcgggtccgggagcaccccatcctgggcccgtacgtgcaggacctgtccaaattggctgtgacctcctacgcagacattgctgacctcatggactgtggaaataaagcacggactgtggctgccaccaacatgaatgagaccagcagccgttcccatgccgtctttaccatcgtcttcacacagcgctgccatgaccagctcacggggctggactcggagaaggtcagtaagatcagtttggtggaccttgctgggagtgagcgagccgactcctcaggggcccggggcatgcgcctgaaggaaggagccaacatcaataagtccctgactacactagggaaagtgatctcggcccttgcagatatgcaatcaaagaagcgaaagtcggattttatcccctacagggactctgtgctcacctggctgctcaaggaaaatttgggggggaactcacgcacagccatgattgcagccctgagccctgctgacatcaattacgaggagactctcagcaccctcaggtatgctgaccgcaccaagcaaatccgctgcaatgccatcatcaacgaggaccctaatgcccggctgattagagagctgcaggaggaagtagcccggctgcgggaactgctgatggctcagggactgtcagcctctgctctggaaggcctgaagacggaagaagggagtgtcagaggcgccctgccagctgtgtcatctcccccagctccagtttcaccctcatcacccaccacacataatggggagctggagccgtcattctcccccaacacggagtcccagattgggcctgaggaagccatggagaggctgcaggagacagagaagattatagctgagctgaacgagacatgggaggagaagctacgcaagacagaagccctgaggatggagagagaagcattgctggctgagatgggggtggccgtccgggaggatgggggaactgtgggcgtcttctctccaaagaagactccccacctggtgaacctgaacgaagaccctctgatgtctgagtgtctgctctaccacatcaaagatggcgtcaccagggtcggccaagtagatatggacatcaagctgaccggacagttcattcgggagcaacactgtctgttccggagcatcccccagccagatggagaagtggtggtcactctggagccttgtgaaggagctgagacatatgtgaatgggaagcttgtgacggagccgctggtgctgaagtcagggaataggattgtgatgggcaagaaccacgttttccgcttcaaccacccggagcaggcaaggctggaacgggaacgaggggtccccccacccccaggaccgccctctgagccagtcgactggaactttgcccagaaggaactgctggagcagcaaggcatcgacataaagctggaaatggagaagaggctgcaggatctggagaatcagtaccggaaagaaaaggaagaacaggagcagctacggctgcagggactgcagggctctgggggccggggcggggggctgcgcaggcccccagcccgctttgtgccccctcacgactgcaagctacgcttccccttcaagagcaacccccagcaccgggagtcttggccagggatggggagcggggaggctccaactccgctccaaccccctgaggaggtcactccccatccagccacccctgcccgccggcctccgagtccccgaaggtcccaccatccccgcaggaactccctggatggagggggccgatcccggggagcgggttctgcacagcctgaaccccagcacttccagcccaaaaagcacaactcttatccccagccaccccaaccctacccagcccagcggcccccagggccccgctaccccccatacactactcccccacgaatgagacggcagcgttctgcccctgacctcaaggagagtggggcagctgtgtgagtcccacatcctgggcagagggcctggtggggccccttgctaggagaagggaagacgcccgagacgctgcttccccagaagtgctggggcagggaggcccaggagatgagagagaaggtccgagtaggtgatagaagacaagggggagaccgagccggaggctgaggaaaggaagagggcacggagttgccaggagcaaaccaaagtgaagagagagataggaagctgcctcggggccaccccttgcaaagggggtgtgtcccacaaacgctgctatgggtggggtggggggctggggtgctgcgtagccagtgtttgactttcttttcaagtgggggaaagtgggagaggactgagagtgaggcaagttctccccagcccctgtccgtctgtctgtctgtctgtggtggtttctgtttcttgggaggcatggtaggatcataagtcattcccctccccttccaggcctcctgctatatttgggggacctgactggtttggctggagtcccatgaggatgtgggccctttaataaaggatagcaaacaggga

SEQ ID NO: 369131 - DNA, 2406 bp, Homo sapiens
cacaggcattcgtggctgtccttggtagtcatcttgggtagggagtgagctctcaggatcatcaacctaaggatgggtggaggcctgtggctgagggtgcccgtttctcccagggtcggccaagtagatatggacatcaagctgaccggacagttcattcgggagcaacactgtctgttccggagcatcccccagccagatggagaagtggtggtcactctggagccttgtgaaggagctgagacatatgtgaatgggaagcttgtgacggagccgctggtgctgaagtcagggaataggattgtgatgggcaagaaccacgttttccgcttcaaccacccggagcaggcaaggctggaacgggaacgaggggtccccccacccccaggaccgccctctgagccagtcgactggaactttgcccagaaggaactgctggagcagcaaggcatcgacataaagctggaaatggagaagaggctgcaggatctggagaatcagtaccggaaagaaaaggaagaagccgatcttctgctggagcagcagcgactgtatgcagactcggacagcggggatgactctgacaagcgctcttgtgaagagagctggaggctcatctcctccttgcgggagcagctgccgcccaccacggtccagaccattgtcaaacgctgtggtctgcccagcagtggcaagcgcagggcccctcgcagggtttatcagatcccccagcgacgcaggctgcagggcaaagacccccgctgggccaccatggctgacctgaagatgcaggcggtgaaggagatctgctacgaggtggccctggctgacttccgccacgggcgggctgagattgaggccctggccgccctcaagatgcgggagctgtgtcgcacctatggcaagccagacggccccggagacgcctggagggctgtggcccgggatgtctgggacactgtaggcgaggaggaaggaggtggagctggcagtggtggtggcagtgaggagggagcccgaggggcggaggtggaggacctccgggcccacatcgacaagctgacggggattctgcaggaggtgaagctgcagaacagcagcaaggaccgggagctgcaggccctgcgggaccgcatgctccgcatggagagggtcatccccctggcccaggatcatgaggatgagaatgaagaaggtggtgaggtcccctgggccccgcctgaaggatcagaggcagcagaggaggcagcccccagtgaccgcatgccgtcagcccggcccccctcgccgccactgtcaagctgggagcgggtgtcacggctcatggaggaggaccctgccttccgtcgtggtcgtcttcgctggctcaagcaggagcagctacggctgcagggactgcagggctctgggggccggggcggggggctgcgcaggcccccagcccgctttgtgccccctcacgactgcaagctacgcttccccttcaagagcaacccccagcaccgggagtcttggccagggatggggagcggggaggctccaactccgctccaaccccctgaggaggtcactccccatccagccacccctgcccgccggcctccgagtccccgaaggtcccaccatccccgcaggaactccctggatggagggggccgatcccggggagcgggttctgcacagcctgaaccccagcacttccagcccaaaaagcacaactcttatccccagccaccccaaccctacccagcccagcggcccccagggccccgctaccccccatacactactcccccacgaatgagacggcagcgttctgcccctgacctcaaggagagtggggcagctgtgtgagtcccacatcctgggcagagggcctggtggggccccttgctaggagaagggaagacgcccgagacgctgcttccccagaagtgctggggcagggaggcccaggagatgagagagaaggtccgagtaggtgatagaagacaagggggagaccgagccggaggctgaggaaaggaagagggcacggagttgccaggagcaaaccaaagtgaagagagagataggaagctgcctcggggccaccccttgcaaagggggtgtgtcccacaaacgctgctatgggtggggtggggggctggggtgctgcgtagccagtgtttgactttcttttcaagtgggggaaagtgggagaggactgagagtgaggcaagttctccccagcccctgtccgtctgtctgtctgtctgtggtggtttctgtttcttgggaggcatggtaggatcataagtcattcccctccccttccaggcctcctgctatatttgggggacctgactggtttggctggagtcccatgaggatgtgggccctttaataaaggatagcaaacaggga

SEQ ID NO: 369132 - DNA, 1923 bp, Homo sapiens
gcgcctgttacggtccggaattttgtggcatggaacgaagccgatcttctgctggagcagcagcgactgtatgcagactcggacagcggggatgactctgacaagcgctcttgtgaagagagctggaggctcatctcctccttgcgggagcagctgccgcccaccacggtccagaccattgtcaaacgctgtggtctgcccagcagtggcaagcgcagggcccctcgcagggtttatcagatcccccagcgacgcaggctgcagggcaaagacccccgctgggccaccatggctgacctgaagatgcaggcggtgaaggagatctgctacgaggtggccctggctgacttccgccacgggcgggctgagattgaggccctggccgccctcaagatgcgggagctgtgtcgcacctatggcaagccagacggccccggagacgcctggagggctgtggcccgggatgtctgggacactgtaggcgaggaggaaggaggtggagctggcagtggtggtggcagtgaggagggagcccgaggggcggaggtggaggacctccgggcccacatcgacaagctgacggggattctgcaggaggtgaagctgcagaacagcagcaaggaccgggagctgcaggccctgcgggaccgcatgctccgcatggagagggtcatccccctggcccaggatcatgaggatgagaatgaagaaggtggtgaggtcccctgggccccgcctgaaggatcagaggcagcagaggaggcagcccccagtgaccgcatgccgtcagcccggcccccctcgccgccactgtcaagctgggagcgggtgtcacggctcatggaggaggaccctgccttccgtcgtggtcgtcttcgctggctcaagcaggagcagctacggctgcagggactgcagggctctgggggccggggcggggggctgcgcaggcccccagcccgctttgtgccccctcacgactgcaagctacgcttccccttcaagagcaacccccagcaccgggagtcttggccagggatggggagcggggaggctccaactccgctccaaccccctgaggaggtcactccccatccagccacccctgcccgccggcctccgagtccccgaaggtcccaccatccccgcaggaactccctggatggagggggccgatcccggggagcgggttctgcacagcctgaaccccagcacttccagcccaaaaagcacaactcttatccccagccaccccaaccctacccagcccagcggcccccagggccccgctaccccccatacactactcccccacgaatgagacggcagcgttctgcccctgacctcaaggagagtggggcagctgtgtgagtcccacatcctgggcagagggcctggtggggccccttgctaggagaagggaagacgcccgagacgctgcttccccagaagtgctggggcagggaggcccaggagatgagagagaaggtccgagtaggtgatagaagacaagggggagaccgagccggaggctgaggaaaggaagagggcacggagttgccaggagcaaaccaaagtgaagagagagataggaagctgcctcggggccaccccttgcaaagggggtgtgtcccacaaacgctgctatgggtggggtggggggctggggtgctgcgtagccagtgtttgactttcttttcaagtgggggaaagtgggagaggactgagagtgaggcaagttctccccagcccctgtccgtctgtctgtctgtctgtggtggtttctgtttcttgggaggcatggtaggatcataagtcattcccctccccttccaggcctcctgctatatttgggggacctgactggtttggctggagtcccatgaggatgtgggccctttaataaaggatagcaaacaggga

SEQ ID NO: 369133 - DNA, 2375 bp, Homo sapiens
cgctcccgccccagctcgcgctgcccgggcgggcgccggccgctggcgccgctactgctgccgcccccggggcgcgagtccgccgcccgccgcccgggcacccggcgaggggcgggggcagctccgaaccggccccagatccttcccgcttccgcctcacgcttcccggaaagcttgtccctctccgccgagctgctccgggagccccgccgcgccgagggtatctcccagagccccagctggtgtggccaggccccaggagtaggatggggctccccctacgagggccggtggcagccagaactgatacagcccccctggtctggggccaggacgccagctgaggagggcaggagtgtctggagctatggctggtgcctcggtgaaagtggcagtgagggttcggccctttaacgcccgtgagaccagccaggatgccaagtgtgtggtcagcatgcagggcaacaccacctccatcatcaatcctaaacagagcaaggatgcccccaaaagcttcacctttgactactcctactggtcacacacttcgacggaggacccccagtttgcatctcagcagcaagtgtatcgggacattggagaagagatgctgctccacgcctttgaaggctacaacgtgtgcatctttgcctatgggcagaccggggctgggaaatcctataccatgatggggcgacaggagccagggcagcagggcatcgtgccccagctctgtgaggacctcttctctcgcgttagtgagaaccagagtgctcagctatcctactctgtggaggtgagctatatggagatctactgtgagcgggtacgagacctcttgaaccccaagagtcggggttctctgcgggtccgggagcaccccatcctgggcccgtacgtgcaggacctgtccaaattggctgtgacctcctacgcagacattgctgacctcatggactgtggaaataaagcacggactgtggctgccaccaacatgaatgagaccagcagccgttcccatgccgtctttaccatcgtcttcacacagcgctgccatgaccagctcacggggctggactcggagaaggtcagtaagatcagtttggtggaccttgctgggagtgagcgagccgactcctcaggggcccggggcatgcgcctgaaggaaggagccaacatcaataagtccctgactacactagggaaagtgatctcggcccttgcagatatgcaatcaaagaagcgaaagtcggattttatcccctacagggactctgtgctcacctggctgctcaaggaaaatttgggggggaactcacgcacagccatgattgcagccctgagccctgctgacatcaattacgaggagactctcagcaccctcaggtatgctgaccgcaccaagcaaatccgctgcaatgccatcatcaacgaggaccctaatgcccggctgattagagagctgcaggaggaagtagcccggctgcgggaactgctgatggctcagggactgtcagcctctgctctggaaggcctgaagacggaagaagggagtgtcagaggcgccctgccagctgtgtcatctcccccagctccagtttcaccctcatcacccaccacacataatggggagctggagccgtcattctcccccaacacggagtcccagattgggcctgaggaagccatggagaggctgcaggagacagagaagattatagctgagctgaacgagacatgggaggagaagctacgcaagacagaagccctgaggatggagagagaagcattgctggctgagatgggggtggccgtccgggaggatgggggaactgtgggcgtcttctctccaaagaaggtgagtgaggaatcgagcgaggaggcctagagagctctctggatgcctagaaaagaggcagcaggtgcagggtagtgagtgctgtccctgatcgctccctttgaggtccccggcttgtccctccatcatttctgtcccctcccctgccacctcctctccgtcttgtttagtcatccctgccttctcccttcagccattcaacagtcagcctcaggagagggagaggacctgggaaatcggaggttggttgcaatagagcatgcttttgtatcatttgagttttgtattctgtgcatgctcaaaaagataactaaagaaatctatttttcagaaggataacttgggaagacaagactaaagggaatagaggaggcatgagcactacattgtaagacagtggttgccagtgcagcgaggggttggttatagatggaggcacccgtgtagcttggagctatgctgcaactggtttcctggaggaggtggtttggaaagtggaacctgaaagatggacagg

SEQ ID NO: 369134 - DNA, 1450 bp, Homo sapiens
cgctcccgccccagctcgcgctgcccgggcgggcgccggccgctggcgccgctactgctgccgcccccggggcgcgagtccgccgcccgccgcccgggcacccggcgaggggcgggggcagctccgaaccggccccagatccttcccgcttccgcctcacgcttcccggaaagcttgtccctctccgccgagctgctccgggagccccgccgcgccgagggtatctcccagagccccagctggtgtggccaggccccaggagtaggatggggctccccctacgagggccggtggcagccagaactgatacagcccccctggtctggggccaggacgccagctgaggagggcaggagtgtctggagctatggctggtgcctcggtgaaagtggcagtgagggttcggccctttaacgcccgtgagaccagccaggatgccaagtgtgtggtcagcatgcagggcaacaccacctccatcatcaatcctaaacagagcaaggatgcccccaaaagcttcacctttgactactcctactggtcacacacttcgacggaggacccccagtttgcatctcagcagcaagtgtatcgggacattggagaagagatgctgctccacgcctttgaaggctacaacgtgtgcatctttgcctatgggcagaccggggctgggaaatcctataccatgatggggcgacaggagccagggcagcagggcatcgtgccccagctctgtgaggacctcttctctcgcgttagtgagaaccagagtgctcagctatcctactctgtggaggtgagctatatggagatctactgtgagcgggtacgagacctcttgaaccccaagagtcggggttctctgcgggtccgggagcaccccatcctgggcccgtacgtgcaggacctgtccaaattggctgtgacctcctacgcagacattgctgacctcatggactgtggaaataaagcacggactgtggctgccaccaacatgaatgagaccagcagcctggctctgaacttaggcatgctttatcttgccccctcggccctctctttctgacccccctttgctgctggttccctgagtctgtgccccttgaacccttcactctccctgatcacttgacttcactccctgccccctgcgccttcatggatctagagttcttagccccgtcctcccttaaacctgacttccgcccacagcaaccagctccctgaccacagggctgctcctcagcctcctggtcttattggtcctggtgatgcttggtgccagctactggtaccgtgcccgcctgcaccagcgactctgccagctcaagggacccacctgccagtacaggtacgagcatcacctccctgctaccacttccattcaactggggacagtgctgaagctgcctcacctctcagccctgccacctaagatcagagccggcgt

SEQ ID NO: 369135 - DNA, 433 bp, Homo sapiens
cgacaagctgacggggattctgcaggaggtgaagctgcagaacagcagcaaggaccgggagctgcaggccctgcgggaccgcatgctccgcatggagagggtcatccccctggcccaggtaggactggccttctgcctcccttctctcctccctcggctcttcactttaggagtctgaaccttccatctcagagcctaaccttccccaagtctggaaaaaattgcattgaagtatagtacgtttttttcaatattgtttacgaaccacatgcctcgctgtcaccaggctgctaattaaaatagattcccgggttccaccccagacctactgaatccacatctttggggacaaatctgcatttataataagctctgggtgtttctgaaatacagtgaagtctaagacccactgatataaagtttgcagttttgt

SEQ ID NO: 369136 - DNA, 356 bp, Homo sapiens
atccttctcaataatgtatagcttcagtctaatcctgagaaaacatcagacaaacccaaactgagatgcattctagaaaatagctgatattcttcagaagttccaaggtcatgaaagacaggatagactaagaaactgtgaaagatgagacaagaccaaggacataggacaactaaacatgatgtgggattctgaattgtatcctagaacagaaaaactaaaatcatgaaaaaaatggtgaaatgcaaataatttcttggttttgaaaattattttgtgggctgggcacggtggctcacacctgtaatcctaaaactttgggaggccaaggtgggtggatcacctgaggtcaagag

SEQ ID NO: 369137 - DNA, 1038 bp, Homo sapiens
  misc_feature (995)..(995): n is a, c, g, or t
aggggacaagtctaggaggtctctgaggttactgtacccatccctccttcatctccctccagcatttgtttctggaaggagtcaacaccaacagctctgacctgggcagccttcctgagaaaatgcagccattcctcctcctgttggcctttcttctgacccctggggctgggacagaggagatcatcgggggccatgaggccaagccccactcccgcccctacatggcctttgttcagtttctgcaagagaagagtcggaagaggtgtggcggcatcctagtgagaaaggactttgtgctgacagctgctcactgccagggaagctccataaatgtcaccttgggggcccacaatatcaaggaacaggagcggacccagcagtttatccctgtgaaaagacccatcccccatccagcctataatcctaagaacttctccaacgacatcatgctactgcagctggagagaaaggccaagtggaccacagctgtgcggcctctcaggctacctagcagcaaggcccaggtgaagccagggcagctgtgcagtgtggctggctggggttatgtctcaatgagcactttagcaaccacactgcaggaagtgttgctgacagtgcagaaggactgccagtgtgaacgtctcttccatggcaattacagcagagccactgagatttgtgtgggggatccaaagaagacacagaccggtttcaagggggactccggggggcccctcgtgtgtaaggacgtagcccaaggtattctctcctatggaaacaaaaaagggacacctccaggagtctacatcaaggtctcacacttcctgccctggataaagagaacaatgaagcgcctctaacagcaggcatgagactaaccttcctctgggcctgaccatctctgggacagaggcaagaatccccaaggggtgggcagtcggggttgcaggactgtaataaatggatctctggtgtaaataaagaccgatgcngccgaatacgccaccccgcattggcggcagctgagacctgaga

SEQ ID NO: 369138 - DNA, 621 bp, Homo sapiens
  misc_feature (578)..(578): n is a, c, g, or t
cctataatcctaagaacttctccaacgacatcatgctactgcagctggagagaaaggccaagtggaccacagctgtgcggcctctcaggctacctagcagcaaggcccaggtgaagccagggcagctgtgcagtgtggctggctggggttatgtctcaatgagcactttagcaaccacactgcaggaagtgttgctgacagtgcagaaggactgccagtgtgaacgtctcttccatggcaattacagcagagccactgagatttgtgtgggggatccaaagaagacacagaccggtttcaagggggactccggggggcccctcgtgtgtaaggacgtagcccaaggtattctctcctatggaaacaaaaaagggacacctccaggagtctacatcaaggtctcacacttcctgccctggataaagagaacaatgaagcgcctctaacagcaggcatgagactaaccttcctctgggcctgaccatctctgggacagaggcaagaatccccaaggggtgggcagtcggggttgcaggactgtaataaatggatctctggtgtaaataaagaccgatgcngccgaatacgccaccccgcattggcggcagctgagacctgaga

SEQ ID NO: 369139 - DNA, 917 bp, Homo sapiens
ctgaggttactgtacccatccctccttcatctccctccagcatttgtttctggaaggagtcaacaccaacagctctgacctgggcagccttcctgagaaaatgcagccattcctcctcctgttggcctttcttctgacccctggggctgggacaggtaagtgactatccctattccagaggcctgaacccatcttataagataccctgtacccatgagcactggtcaggaattttcctcaatctgagcccacctcccattccacacccagacttataaatctgaggctagatagacactcagcaaagatcgaaaaatgaagggtgttccctaaaaggtttaatgggtgttagcctctccctagacctctcctttatgacctggagtgtggattgttcttagaaaggcatttggtagggaatgtgaagctaaaaaagataagtaattattactctacactccaacccaggaaagaggagctcagacaccaagttgcagtcataggagttgttactggactcagcttaagaaccacttattcagtgcccccacccagtcacccctgccaggagggaagcccatggtgcaactgatctcagagatggcaagatgactgtgtccatagctctcccattaccttggctccacctgggctttgcgattcatttttagttgatttctccacttccttctgcctttgcaggccctcagctactccactgacctggtgataaccccctctaacatccctgaggtcctgaatcccaccagcactacccccactaaacctcagccaaaggctaattggaggctattcatttatgcaccaaacaacacttactgagaacctagaatgtgttcagccctggcacatgagaattttagaaaatccaactccagaagctcatgggtagatca

SEQ ID NO: 369140 - DNA, 846 bp, Homo sapiens
  misc_feature (803)..(803): n is a, c, g, or t
aggggacaagtctaggaggtctctgaggttactgtacccatccctccttcatctccctccagcatttgtttctggaaggagtcaacaccaacagctctgacctgggcagccttcctgagaaaatgcagccattcctcctcctgttggcctttcttctgacccctggggctgggacagaggagatcatcgggggccatgaggccaagccccactcccgcccctacatggcctttgttcagtttctgcaagagaagagtcggaagaggtgtggcggcatcctagtgagaaaggactttgtgctgacagctgctcactgccagggaagctccataaatgtcaccttgggggcccacaatatcaaggaacaggagcggacccagcagtttatccctgtgaaaagacccatcccccatccagcctataatcctaagaacttctccaacgacatcatgctactgcagctggagagaaaggccaagtggaccacagctgtgcggcctctcaggctacctagcagcaaggcccagggggactccggggggcccctcgtgtgtaaggacgtagcccaaggtattctctcctatggaaacaaaaaagggacacctccaggagtctacatcaaggtctcacacttcctgccctggataaagagaacaatgaagcgcctctaacagcaggcatgagactaaccttcctctgggcctgaccatctctgggacagaggcaagaatccccaaggggtgggcagtcggggttgcaggactgtaataaatggatctctggtgtaaataaagaccgatgcngccgaatacgccaccccgcattggcggcagctgagacctgaga

SEQ ID NO: 369141 - DNA, 1128 bp, Homo sapiens
gcgccgggttgaaatcggacgaggtaacgggagcagagtcggcgggattgagcatttccacagaaattacagttttgtcctttttgaaaaaatagaactgtatttcagaaaaaagaaactacagttttagcatgcagaaaggaaaagggagaacaagccggatcagaagacgaaaactctgcggaagttctgaatcaagaggagtgaatgagagccacaagtctgaatttatagagctgaggaagtggctgaaagctaggaagtttcaagattcaaacttagcgcctgcttgttttccaggtacaggaagagggctgatgagtcaaacatccctgcaggagggacagatgattatttcgttgcctgagagttgcctgctcaccacggacacagtgattcgaagctacttaggggcatacattactaagtggaagcctcctccatctcctctgctggcgctgtgcacctttttagtttcagaaaagcatgctgggcaccgatctctttggaagccttacctggagattttacccaaggcgtatacctgccctgtttgtttggagccggaagtggtgaaccttcttcccaaatctttaaaagcaaaggctgaagagcagagagcccacgtgcaggagttctttgcttcctccagagactttttctcttctctgcagcctctgtttgcggaggctgttgacagcatcttcagctacagtgccctgctgtgggcttggtgcaccgtcaacaccagagccgtgtacctgaggcccaggcagcgggaatgcctttctgcagagccggacacctgtgcactcgctccgtacctggacctgctgaatcatagcccacatgtccaggtaaaagcagcgtttaatgaagaaactcattcttacgaaattagaacgacttcacgttggagaaagcatgaagaggtattcatctgttacggccctcacgataatcaacggctgttcctggaatacggatttgtttctgtccataatcctcatgcttgtgtttatgtctcaagaggttggaatcaactttgttcttaacattaacactatataatttttttccccatttggagatgtgtattttcagttttaataaaaatatcaaaacctt

SEQ ID NO: 369142 - DNA, 1212 bp, Homo sapiens
gacagagggcttcaggcacgcggctgctgctgccactgctgctctgagacaaggtggatgagtctgctgccggatcaagaaaaagaactgtatttcagaaaaaagaaactacagttttagcatgcagaaaggaaaagggagaacaagccggatcagaagacgaaaactctgcggaagttctgaatcaagaggagagatggggtctttctgtgttgggcaggctgggctcaaactcctggcctcaagcagtcctcccgccttggcctcccaaatgctgggaatacagaatgaatgagagccacaagtctgaatttatagagctgaggaagtggctgaaagctaggaagtttcaagattcaaacttagcgcctgcttgttttccaggtacaggaagagggctgatgagtcaaacatccctgcaggagggacagatgattatttcgttgcctgagagttgcctgctcaccacggacacagtgattcgaagctacttaggggcatacattactaagtggaagcctcctccatctcctctgctggcgctgtgcacctttttagtttcagaaaagcatgctgggcaccgatctctttggaagccttacctggagattttacccaaggcgtatacctgccctgtttgtttggagccggaagtggtgaaccttcttcccaaatctttaaaagcaaaggctgaagagcagagagcccacgtgcaggagttctttgcttcctccagagactttttctcttctctgcagcctctgtttgcggaggctgttgacagcatcttcagctacagtgccctgctgtgggcttggtgcaccgtcaacaccagagccgtgtacctgaggcccaggcagcgggaatgcctttctgcagagccggacacctgtgcactcgctccgtacctggacctgctgaatcatagcccacatgtccaggtaaaagcagcgtttaatgaagaaactcattcttacgaaattagaacgacttcacgttggagaaagcatgaagaggtattcatctgttacggccctcacgataatcaacggctgttcctggaatacggatttgtttctgtccataatcctcatgcttgtgtttatgtctcaagaggttggaatcaactttgttcttaacattaacactatataatttttttccccatttggagatgtgtattttcagttttaataaaaatatcaaaacctt

SEQ ID NO: 369143 - DNA, 299 bp, Homo sapiens
aatttatgccctaacagtctgatttttttttttgaatatagaaatacttgttaaatatcttccatcaacagataaacagatggacaaaaagatttctattttaaaggatcatggctatatagagtaagtgtttctctttccctcttaaaattattcctttaggaaattttcatggaaaacctggggttaaattttccatgggggtgagacccctcctgaccctgtatcagctgacgggtaggtattgagcacttactatgtgcagtaaaactgcgcttgatgttgtggaggacaaaagg

SEQ ID NO: 369144 - DNA, 3145 bp, Homo sapiens
agctgccgcccgcggcggaaggggcggacccgggagactgaggacttggattgcttaaggacaccaggcaggcgcgacagccttcagcctctccctctgcagttttggccggttcctttaacttgccttcatctggggctgtttggtatttccacgtgccttgggcccgcccactgcagcctccatcttggaagcggccgccggcgcctaggtgagctagtaggacttccgggtcgggcctccagttgcccgggtaacgggagcagagtcggcgggattgagcatttccacagaaattacagttttgtcctttttgaaaaaatagaactgtatttcagaaaaaagaaactacagttttagcatgcagaaaggaaaagggagaacaagccggatcagaagacgaaaactctgcggaagttctgaatcaagaggagtgaatgagagccacaagtctgaatttatagagctgaggaagtggctgaaagctaggaagtttcaagattcaaacttagcgcctgcttgttttccaggtacaggaagagggctgatgagtcaaacatccctgcaggagggacagatgattatttcgttgcctgagagttgcctgctcaccacggacacagtgattcgaagctacttaggggcatacattactaagtggaagcctcctccatctcctctgctggcgctgtgcacctttttagtttcagaaaagcatgctgggcaccgatctctttggaagccttacctggagattttacccaaggcgtatacctgccctgtttgtttggagccggaagtggtgaaccttcttcccaaatctttaaaagcaaaggctgaagagcagagagcccacgtgcaggagttctttgcttcctccagagactttttctcttctctgcagcctctgtttgcggaggctgttgacagcatcttcagctacagtgccctgctgtgggcttggtgcaccgtcaacaccagagccgtgtacctgaggcccaggcagcgggaatgcctttctgcagagccggacacctgtgcactcgctccgtacctggacctgctgaatcatagcccacatgtccaggtaaaagcagcgtttaatgaagaaactcattcttacgaaattagaacgacttcacgttggagaaagcatgaagaggtattcatctgttacggccctcacgataatcaacggctgttcctggaatacggatttgtttctgtccataatcctcatgcttgtgtttatgtctcaagagaaatacttgttaaatatcttccatcaacagataaacagatggacaaaaagatttctattttaaaggatcatggctatatagaaaatttgacatttggatgggatggaccatcttggaggctactcacagcccttaagttgttatgtctggaagctgagaaatttacatgctggaaaaaagtacttcttggggaggtaatttcagatacgaatgagaagacaagtttggacatagcccagaaaatatgctattatttcatagaagagactaatgctgtgcttcaaaaggtgtctcatatgaaggatgaaaaagaggccctgataaaccaactaactttggtggaatccttgtggacggaagagctaaagattctcagggcatctgccgagaccctgcacagtttgcaaacagcttttacctgatttcaccgaagcgcatttggtcacctcctctgaaacaaaagttaattttgaagagcatcatcatgggctggggtggtggctgcccccaggacatgcaggatttctgcagggggcagcacaggttctgggattgtgaggctgtgagtgaaggtggacaagctgtctggatggcaggtctaatgctcttccgaataaagtgctgaactgtgaggagagaggcggactgtgaggcagccaggagccagctgcgtccgtgtgtggtctgtcaccacggggcctgcttcttatctgacacagcagctatcagagtctagtggttgtgcttttaagatgctctgataccattgggttaaggggcagattggcggtgggtgtggggcagtgtgaggtagtcctggatccccgccagggtggcccagacgccagcccttccctgtgtggctgcactgaggtgggtgttgaagagccccctaggggacacacagcttccaggaggagggaatgtcctctaagcatgctcctggcctctcaaggtggcgcttgtctaattattcacttgggaagaatgactagctcagccagcggctctttctgctttgttctggcgactttcctgggcaggcctttccacctggggagctggctcatcctgcacagctgggccgtggtgggcctgtctgcttgattctggggttcagtgtaggtcagctgatggcgaaccatggtggtggtttggcttctgttcttattcttgagttttgataccacgcagaccttgggtggggagagcttcctgcacagctctcagcggcctgtggccttggaactgcctgcgtaagtaacggaggggctgctggtcctgttcaggcccgtgctggggacgccgcttagacaatgttgcccagagtcctgtttaccctcccagggttcattcttcccaagaactcaaattcctttctcattggagcctagtgaaaccaaatgaacgggacctgctggcctcaggaggcaggcagagtttaaaataaaactttctcatgatttcttgaacatctttccctgtttgtatatacactttgtgtttatttttcagtagctgcagtatattttttttcaatattcagtataatgcagtgtatttcatcatatgctgtatggagagtgggcagacttctgtggagggcccgatagtaaccatttgaagctttctggacctgtggtcttagtcccagcgattctgcagagcggccatcggcagcatgtcaaccatttgcatggctgggctccagggaaactactgacaacgacaggtggtgggccatagtttcctgacccctgtgctatgccagaatttctttttcctcttccctatgagtggacctaaatatgttaattccttttcacctttcaaaacggacagccccttgaacattaaaaactttgcagaccctaaaaaaaaat

SEQ ID NO: 369145 - DNA, 3239 bp, Homo sapiens
agctgccgcccgcggcggaaggggcggacccgggagactgaggacttggattgcttaaggacaccaggcaggcgcgacagccttcagcctctccctctgcagttttggccggttcctttaacttgccttcatctggggctgtttggtatttccacgtgccttgggcccgcccactgcagcctccatcttggaagcggccgccggcgcctaggtgagctagtaggacttccgggtcgggcctccagttgcccgggtaacgggagcagagtcggcgggattgagcatttccacagaaattacagttttgtcctttttgaaaaaatagaactgtatttcagaaaaaagaaactacagttttagcatgcagaaaggaaaagggagaacaagccggatcagaagacgaaaactctgcggaagttctgaatcaagaggagagatggggtctttctgtgttgggcaggctgggctcaaactcctggcctcaagcagtcctcccgccttggcctcccaaatgctgggaatacagaatgaatgagagccacaagtctgaatttatagagctgaggaagtggctgaaagctaggaagtttcaagattcaaacttagcgcctgcttgttttccaggtacaggaagagggctgatgagtcaaacatccctgcaggagggacagatgattatttcgttgcctgagagttgcctgctcaccacggacacagtgattcgaagctacttaggggcatacattactaagtggaagcctcctccatctcctctgctggcgctgtgcacctttttagtttcagaaaagcatgctgggcaccgatctctttggaagccttacctggagattttacccaaggcgtatacctgccctgtttgtttggagccggaagtggtgaaccttcttcccaaatctttaaaagcaaaggctgaagagcagagagcccacgtgcaggagttctttgcttcctccagagactttttctcttctctgcagcctctgtttgcggaggctgttgacagcatcttcagctacagtgccctgctgtgggcttggtgcaccgtcaacaccagagccgtgtacctgaggcccaggcagcgggaatgcctttctgcagagccggacacctgtgcactcgctccgtacctggacctgctgaatcatagcccacatgtccaggtaaaagcagcgtttaatgaagaaactcattcttacgaaattagaacgacttcacgttggagaaagcatgaagaggtattcatctgttacggccctcacgataatcaacggctgttcctggaatacggatttgtttctgtccataatcctcatgcttgtgtttatgtctcaagagaaatacttgttaaatatcttccatcaacagataaacagatggacaaaaagatttctattttaaaggatcatggctatatagaaaatttgacatttggatgggatggaccatcttggaggctactcacagcccttaagttgttatgtctggaagctgagaaatttacatgctggaaaaaagtacttcttggggaggtaatttcagatacgaatgagaagacaagtttggacatagcccagaaaatatgctattatttcatagaagagactaatgctgtgcttcaaaaggtgtctcatatgaaggatgaaaaagaggccctgataaaccaactaactttggtggaatccttgtggacggaagagctaaagattctcagggcatctgccgagaccctgcacagtttgcaaacagcttttacctgatttcaccgaagcgcatttggtcacctcctctgaaacaaaagttaattttgaagagcatcatcatgggctggggtggtggctgcccccaggacatgcaggatttctgcagggggcagcacaggttctgggattgtgaggctgtgagtgaaggtggacaagctgtctggatggcaggtctaatgctcttccgaataaagtgctgaactgtgaggagagaggcggactgtgaggcagccaggagccagctgcgtccgtgtgtggtctgtcaccacggggcctgcttcttatctgacacagcagctatcagagtctagtggttgtgcttttaagatgctctgataccattgggttaaggggcagattggcggtgggtgtggggcagtgtgaggtagtcctggatccccgccagggtggcccagacgccagcccttccctgtgtggctgcactgaggtgggtgttgaagagccccctaggggacacacagcttccaggaggagggaatgtcctctaagcatgctcctggcctctcaaggtggcgcttgtctaattattcacttgggaagaatgactagctcagccagcggctctttctgctttgttctggcgactttcctgggcaggcctttccacctggggagctggctcatcctgcacagctgggccgtggtgggcctgtctgcttgattctggggttcagtgtaggtcagctgatggcgaaccatggtggtggtttggcttctgttcttattcttgagttttgataccacgcagaccttgggtggggagagcttcctgcacagctctcagcggcctgtggccttggaactgcctgcgtaagtaacggaggggctgctggtcctgttcaggcccgtgctggggacgccgcttagacaatgttgcccagagtcctgtttaccctcccagggttcattcttcccaagaactcaaattcctttctcattggagcctagtgaaaccaaatgaacgggacctgctggcctcaggaggcaggcagagtttaaaataaaactttctcatgatttcttgaacatctttccctgtttgtatatacactttgtgtttatttttcagtagctgcagtatattttttttcaatattcagtataatgcagtgtatttcatcatatgctgtatggagagtgggcagacttctgtggagggcccgatagtaaccatttgaagctttctggacctgtggtcttagtcccagcgattctgcagagcggccatcggcagcatgtcaaccatttgcatggctgggctccagggaaactactgacaacgacaggtggtgggccatagtttcctgacccctgtgctatgccagaatttctttttcctcttccctatgagtggacctaaatatgttaattccttttcacctttcaaaacggacagccccttgaacattaaaaactttgcagaccctaaaaaaaaat

SEQ ID NO: 369146 - DNA, 2999 bp, Homo sapiens
gacagagggcttcaggcacgcggctgctgctgccactgctgctctgagacaaggtggatgagtctgctgccggatcaagaaaaagaactgtatttcagaaaaaagaaactacagttttagcatgcagaaaggaaaagggagaacaagccggatcagaagacgaaaactctgcggaagttctgaatcaagaggagagatggggtctttctgtgttgggcaggctgggctcaaactcctggcctcaagcagtcctcccgccttggcctcccaaatgctgggaatacagaatgaatgagagccacaagtctgaatttatagagctgaggaagtggctgaaagctaggaagtttcaagattcaaacttagcgcctgcttgttttccaggtacaggaagagggctgatgagtcaaacatccctgcaggagggacagatgattatttcgttgcctgagagttgcctgctcaccacggacacagtgattcgaagctacttaggggcatacattactaagtggaagcctcctccatctcctctgctggcgctgtgcacctttttagtttcagaaaagcatgctgggcaccgatctctttggaagccttacctggagattttacccaaggcgtatacctgccctgtttgtttggagccggaagtggtgaaccttcttcccaaatctttaaaagcaaaggctgaagagcagagagcccacgtgcaggagttctttgcttcctccagagactttttctcttctctgcagcctctgtttgcggaggctgttgacagcatcttcagctacagtgccctgctgtgggcttggtgcaccgtcaacaccagagccgtgtacctgaggcccaggcagcgggaatgcctttctgcagagccggacacctgtgcactcgctccgtacctggacctgctgaatcatagcccacatgtccaggtaaaagcagcgtttaatgaagaaactcattcttacgaaattagaacgacttcacgttggagaaagcatgaagaggtattcatctgttacggccctcacgataatcaacggctgttcctggaatacggatttgtttctgtccataatcctcatgcttgtgtttatgtctcaagagaaatacttgttaaatatcttccatcaacagataaacagatggacaaaaagatttctattttaaaggatcatggctatatagaaaatttgacatttggatgggatggaccatcttggaggctactcacagcccttaagttgttatgtctggaagctgagaaatttacatgctggaaaaaagtacttcttggggaggtaatttcagatacgaatgagaagacaagtttggacatagcccagaaaatatgctattatttcatagaagagactaatgctgtgcttcaaaaggtgtctcatatgaaggatgaaaaagaggccctgataaaccaactaactttggtggaatccttgtggacggaagagctaaagattctcagggcatctgccgagaccctgcacagtttgcaaacagcttttacctgatttcaccgaagcgcatttggtcacctcctctgaaacaaaagttaattttgaagagcatcatcatgggctggggtggtggctgcccccaggacatgcaggatttctgcagggggcagcacaggttctgggattgtgaggctgtgagtgaaggtggacaagctgtctggatggcaggtctaatgctcttccgaataaagtgctgaactgtgaggagagaggcggactgtgaggcagccaggagccagctgcgtccgtgtgtggtctgtcaccacggggcctgcttcttatctgacacagcagctatcagagtctagtggttgtgcttttaagatgctctgataccattgggttaaggggcagattggcggtgggtgtggggcagtgtgaggtagtcctggatccccgccagggtggcccagacgccagcccttccctgtgtggctgcactgaggtgggtgttgaagagccccctaggggacacacagcttccaggaggagggaatgtcctctaagcatgctcctggcctctcaaggtggcgcttgtctaattattcacttgggaagaatgactagctcagccagcggctctttctgctttgttctggcgactttcctgggcaggcctttccacctggggagctggctcatcctgcacagctgggccgtggtgggcctgtctgcttgattctggggttcagtgtaggtcagctgatggcgaaccatggtggtggtttggcttctgttcttattcttgagttttgataccacgcagaccttgggtggggagagcttcctgcacagctctcagcggcctgtggccttggaactgcctgcgtaagtaacggaggggctgctggtcctgttcaggcccgtgctggggacgccgcttagacaatgttgcccagagtcctgtttaccctcccagggttcattcttcccaagaactcaaattcctttctcattggagcctagtgaaaccaaatgaacgggacctgctggcctcaggaggcaggcagagtttaaaataaaactttctcatgatttcttgaacatctttccctgtttgtatatacactttgtgtttatttttcagtagctgcagtatattttttttcaatattcagtataatgcagtgtatttcatcatatgctgtatggagagtgggcagacttctgtggagggcccgatagtaaccatttgaagctttctggacctgtggtcttagtcccagcgattctgcagagcggccatcggcagcatgtcaaccatttgcatggctgggctccagggaaactactgacaacgacaggtggtgggccatagtttcctgacccctgtgctatgccagaatttctttttcctcttccctatgagtggacctaaatatgttaattccttttcacctttcaaaacggacagccccttgaacattaaaaactttgcagaccctaaaaaaaaat

SEQ ID NO: 369147 - DNA, 2472 bp, Homo sapiens
tttgaaaggattgtgaaaatacaacaacttgtgacagagaccacatagtgctggcaaagctgaacgtatttactctctagctttttacagataaagtttattggcaccaccatgtcctccttccctgggctgtgagtggacgtgaccaataaactgctgatgatctcatctgtgctgtgtcgggtgtcgtggtgtggccacccccagagccctagggcaggactccctccgtcatcaatggggtgaagtcgaggtggatgaaaccggaagtggcattttccctatgcgtagttacatttattgatgggtgtttgaaagctgcacctgactcacattaatattatgtaataacttaatcagctttggagttttacaccttactttaaaaaataccttaacagtttttctttctaggtaaaagcagcgtttaatgaagaaactcattcttacgaaattagaacgacttcacgttggagaaagcatgaagaggtattcatctgttacggccctcacgataatcaacggctgttcctggaatacggatttgtttctgtccataatcctcatgcttgtgtttatgtctcaagagaaatacttgttaaatatcttccatcaacagataaacagatggacaaaaagatttctattttaaaggatcatggctatatagaaaatttgacatttggatgggatggaccatcttggaggctactcacagcccttaagttgttatgtctggaagctgagaaatttacatgctggaaaaaagtacttcttggggaggtaatttcagatacgaatgagaagacaagtttggacatagcccagaaaatatgctattatttcatagaagagactaatgctgtgcttcaaaaggtgtctcatatgaaggatgaaaaagaggccctgataaaccaactaactttggtggaatccttgtggacggaagagctaaagattctcagggcatctgccgagaccctgcacagtttgcaaacagcttttacctgatttcaccgaagcgcatttggtcacctcctctgaaacaaaagttaattttgaagagcatcatcatgggctggggtggtggctgcccccaggacatgcaggatttctgcagggggcagcacaggttctgggattgtgaggctgtgagtgaaggtggacaagctgtctggatggcaggtctaatgctcttccgaataaagtgctgaactgtgaggagagaggcggactgtgaggcagccaggagccagctgcgtccgtgtgtggtctgtcaccacggggcctgcttcttatctgacacagcagctatcagagtctagtggttgtgcttttaagatgctctgataccattgggttaaggggcagattggcggtgggtgtggggcagtgtgaggtagtcctggatccccgccagggtggcccagacgccagcccttccctgtgtggctgcactgaggtgggtgttgaagagccccctaggggacacacagcttccaggaggagggaatgtcctctaagcatgctcctggcctctcaaggtggcgcttgtctaattattcacttgggaagaatgactagctcagccagcggctctttctgctttgttctggcgactttcctgggcaggcctttccacctggggagctggctcatcctgcacagctgggccgtggtgggcctgtctgcttgattctggggttcagtgtaggtcagctgatggcgaaccatggtggtggtttggcttctgttcttattcttgagttttgataccacgcagaccttgggtggggagagcttcctgcacagctctcagcggcctgtggccttggaactgcctgcgtaagtaacggaggggctgctggtcctgttcaggcccgtgctggggacgccgcttagacaatgttgcccagagtcctgtttaccctcccagggttcattcttcccaagaactcaaattcctttctcattggagcctagtgaaaccaaatgaacgggacctgctggcctcaggaggcaggcagagtttaaaataaaactttctcatgatttcttgaacatctttccctgtttgtatatacactttgtgtttatttttcagtagctgcagtatattttttttcaatattcagtataatgcagtgtatttcatcatatgctgtatggagagtgggcagacttctgtggagggcccgatagtaaccatttgaagctttctggacctgtggtcttagtcccagcgattctgcagagcggccatcggcagcatgtcaaccatttgcatggctgggctccagggaaactactgacaacgacaggtggtgggccatagtttcctgacccctgtgctatgccagaatttctttttcctcttccctatgagtggacctaaatatgttaattccttttcacctttcaaaacggacagccccttgaacattaaaaactttgcagaccctaaaaaaaaat

SEQ ID NO: 369148 - DNA, 1452 bp, Homo sapiens
agctgccgcccgcggcggaaggggcggacccgggagactgaggacttggattgcttaaggacaccaggcaggcgcgacagccttcagcctctccctctgcagttttggccggttcctttaacttgccttcatctggggctgtttggtatttccacgtgccttgggcccgcccactgcagcctccatcttggaagcggccgccggcgcctaggtgagctagtaggacttccgggtcgggcctccagttgcccgggtaacgggagcagagtcggcgggattgagcatttccacagaaattacagttttgtcctttttgaaaaaatagaactgtatttcagaaaaaagaaactacagttttagcatgcagaaaggaaaagggagaacaagccggatcagaagacgaaaactctgcggaagttctgaatcaagaggagagatggggtctttctgtgttgggcaggctgggctcaaactcctggcctcaagcagtcctcccgccttggcctcccaaatgctgggaatacagaatgaatgagagccacaagtctgaatttatagagctgaggaagtggctgaaagctaggaagtttcaagattcaaacttagcgcctgcttgttttccaggtacaggaagagggctgatgagtcaaacatccctgcaggagggacagatgattatttcgttgcctgagagttgcctgctcaccacggacacagtgattcgaagctacttaggggcatacattactaagtggaagcctcctccatctcctctgctggcgctgtgcacctttttagtttcagaaaagcatgctgggcaccgatctctttggaagccttacctggagattttacccaaggcgtatacctgccctgtttgtttggagccggaagtggtgaaccttcttcccaaatctttaaaagcaaaggctgaagagcagagagcccacgtgcaggagttctttgcttcctccagagactttttctcttctctgcagcctctgtttgcggaggctgttgacagcatcttcagctacagtgccctgctgtgggcttggtgcaccgtcaacaccagagccgtgtacctgaggcccaggcagcgggaatgcctttctgcagagccggacacctgtgcactcgctccgtacctggacctgctgaatcatagcccacatgtccaggtaaaagcagcgtttaatgaagaaactcattcttacgaaattagaacgacttcacgttggagaaagcatgaagaggtattcatctgttacggccctcacgataatcaacggctgttcctggaatacggatttgtttctgtccataatcctcatgcttgtgtttatgtctcaagaggttggaatcaactttgttcttaacattaacactatataatttttttccccatttggagatgtgtattttcagttttaataaaaatatcaaaacctt

SEQ ID NO: 369149 - DNA, 1481 bp, Homo sapiens
tttagactaaggtttgatggactaaatttatatagtttagagtcgatgagttgtgtctactcaacaattaggaacttaatccttttccttttgcttttcctacagaaacgacatgcaggatttctgcagggggcagcacaggttctgggattgtgaggctgtgagtgaaggtggacaagctgtctggatggcaggtctaatgctcttccgaataaagtgctgaactgtgaggagagaggcggactgtgaggcagccaggagccagctgcgtccgtgtgtggtctgtcaccacggggcctgcttcttatctgacacagcagctatcagagtctagtggttgtgcttttaagatgctctgataccattgggttaaggggcagattggcggtgggtgtggggcagtgtgaggtagtcctggatccccgccagggtggcccagacgccagcccttccctgtgtggctgcactgaggtgggtgttgaagagccccctaggggacacacagcttccaggaggagggaatgtcctctaagcatgctcctggcctctcaaggtggcgcttgtctaattattcacttgggaagaatgactagctcagccagcggctctttctgctttgttctggcgactttcctgggcaggcctttccacctggggagctggctcatcctgcacagctgggccgtggtgggcctgtctgcttgattctggggttcagtgtaggtcagctgatggcgaaccatggtggtggtttggcttctgttcttattcttgagttttgataccacgcagaccttgggtggggagagcttcctgcacagctctcagcggcctgtggccttggaactgcctgcgtaagtaacggaggggctgctggtcctgttcaggcccgtgctggggacgccgcttagacaatgttgcccagagtcctgtttaccctcccagggttcattcttcccaagaactcaaattcctttctcattggagcctagtgaaaccaaatgaacgggacctgctggcctcaggaggcaggcagagtttaaaataaaactttctcatgatttcttgaacatctttccctgtttgtatatacactttgtgtttatttttcagtagctgcagtatattttttttcaatattcagtataatgcagtgtatttcatcatatgctgtatggagagtgggcagacttctgtggagggcccgatagtaaccatttgaagctttctggacctgtggtcttagtcccagcgattctgcagagcggccatcggcagcatgtcaaccatttgcatggctgggctccagggaaactactgacaacgacaggtggtgggccatagtttcctgacccctgtgctatgccagaatttctttttcctcttccctatgagtggacctaaatatgttaattccttttcacctttcaaaacggacagccccttgaacattaaaaactttgcagaccctaaaaaaaaat

SEQ ID NO: 369150 - DNA, 3033 bp, Homo sapiens
agctgccgcccgcggcggaaggggcggacccgggagactgaggacttggattgcttaaggacaccaggcaggcgcgacagccttcagcctctccctctgcagttttggccggttcctttaacttgccttcatctggggctgtttggtatttccacgtgccttgggcccgcccactgcagcctccatcttggaagcggccgccggcgcctagaactgtatttcagaaaaaagaaactacagttttagcatgcagaaaggaaaagggagaacaagccggatcagaagacgaaaactctgcggaagttctgaatcaagaggagtgaatgagagccacaagtctgaatttatagagctgaggaagtggctgaaagctaggaagtttcaagattcaaacttagcgcctgcttgttttccaggtacaggaagagggctgatgagtcaaacatccctgcaggagggacagatgattatttcgttgcctgagagttgcctgctcaccacggacacagtgattcgaagctacttaggggcatacattactaagtggaagcctcctccatctcctctgctggcgctgtgcacctttttagtttcagaaaagcatgctgggcaccgatctctttggaagccttacctggagattttacccaaggcgtatacctgccctgtttgtttggagccggaagtggtgaaccttcttcccaaatctttaaaagcaaaggctgaagagcagagagcccacgtgcaggagttctttgcttcctccagagactttttctcttctctgcagcctctgtttgcggaggctgttgacagcatcttcagctacagtgccctgctgtgggcttggtgcaccgtcaacaccagagccgtgtacctgaggcccaggcagcgggaatgcctttctgcagagccggacacctgtgcactcgctccgtacctggacctgctgaatcatagcccacatgtccaggtaaaagcagcgtttaatgaagaaactcattcttacgaaattagaacgacttcacgttggagaaagcatgaagaggtattcatctgttacggccctcacgataatcaacggctgttcctggaatacggatttgtttctgtccataatcctcatgcttgtgtttatgtctcaagagaaatacttgttaaatatcttccatcaacagataaacagatggacaaaaagatttctattttaaaggatcatggctatatagaaaatttgacatttggatgggatggaccatcttggaggctactcacagcccttaagttgttatgtctggaagctgagaaatttacatgctggaaaaaagtacttcttggggaggtaatttcagatacgaatgagaagacaagtttggacatagcccagaaaatatgctattatttcatagaagagactaatgctgtgcttcaaaaggtgtctcatatgaaggatgaaaaagaggccctgataaaccaactaactttggtggaatccttgtggacggaagagctaaagattctcagggcatctgccgagaccctgcacagtttgcaaacagcttttacctgatttcaccgaagcgcatttggtcacctcctctgaaacaaaagttaattttgaagagcatcatcatgggctggggtggtggctgcccccaggacatgcaggatttctgcagggggcagcacaggttctgggattgtgaggctgtgagtgaaggtggacaagctgtctggatggcaggtctaatgctcttccgaataaagtgctgaactgtgaggagagaggcggactgtgaggcagccaggagccagctgcgtccgtgtgtggtctgtcaccacggggcctgcttcttatctgacacagcagctatcagagtctagtggttgtgcttttaagatgctctgataccattgggttaaggggcagattggcggtgggtgtggggcagtgtgaggtagtcctggatccccgccagggtggcccagacgccagcccttccctgtgtggctgcactgaggtgggtgttgaagagccccctaggggacacacagcttccaggaggagggaatgtcctctaagcatgctcctggcctctcaaggtggcgcttgtctaattattcacttgggaagaatgactagctcagccagcggctctttctgctttgttctggcgactttcctgggcaggcctttccacctggggagctggctcatcctgcacagctgggccgtggtgggcctgtctgcttgattctggggttcagtgtaggtcagctgatggcgaaccatggtggtggtttggcttctgttcttattcttgagttttgataccacgcagaccttgggtggggagagcttcctgcacagctctcagcggcctgtggccttggaactgcctgcgtaagtaacggaggggctgctggtcctgttcaggcccgtgctggggacgccgcttagacaatgttgcccagagtcctgtttaccctcccagggttcattcttcccaagaactcaaattcctttctcattggagcctagtgaaaccaaatgaacgggacctgctggcctcaggaggcaggcagagtttaaaataaaactttctcatgatttcttgaacatctttccctgtttgtatatacactttgtgtttatttttcagtagctgcagtatattttttttcaatattcagtataatgcagtgtatttcatcatatgctgtatggagagtgggcagacttctgtggagggcccgatagtaaccatttgaagctttctggacctgtggtcttagtcccagcgattctgcagagcggccatcggcagcatgttcactatcgttatgttggggtcaagtgcagatgcctcagaatgtcagaaggtgggccatagtcatgtttttttcctgtgctgatgtgtagggtatattctagtattcctaatgagtggccttatgatatgatgattcctttttcacctttcatctacgtagatcccctatgtcatatagaataaggcaatacttaaaaaa

SEQ ID NO: 369151 - DNA, 1334 bp, Homo sapiens
agctgccgcccgcggcggaaggggcggacccgggagactgaggacttggattgcttaaggacaccaggcaggcgcgacagccttcagcctctccctctgcagttttggccggttcctttaacttgccttcatctggggctgtttggtatttccacgtgccttgggcccgcccactgcagcctccatcttggaagcggccgccggcgcctagaactgtatttcagaaaaaagaaactacagttttagcatgcagaaaggaaaagggagaacaagccggatcagaagacgaaaactctgcggaagttctgaatcaagaggagtgaatgagagccacaagtctgaatttatagagctgaggaagtggctgaaagctaggaagtttcaagattcaaacttagcgcctgcttgttttccaggtacaggaagagggctgatgagtcaaacatccctgcaggagggacagatgattatttcgttgcctgagagttgcctgctcaccacggacacagtgattcgaagctacttaggggcatacattactaagtggaagcctcctccatctcctctgctggcgctgtgcacctttttagtttcagaaaagcatgctgggcaccgatctctttggaagccttacctggagattttacccaaggcgtatacctgccctgtttgtttggagccggaagtggtgaaccttcttcccaaatctttaaaagcaaaggctgaagagcagagagcccacgtgcaggagttctttgcttcctccagagactttttctcttctctgcagcctctgtttgcggaggctgttgacagcatcttcagctacagtgccctgctgtgggcttggtgcaccgtcaacaccagagccgtgtacctgaggcccaggcagcgggaatgcctttctgcagagccggacacctgtgcactcgctccgtacctggacctgctgaatcatagcccacatgtccaggtgagaagctgacaagggggcagctattctatttggataggaaggcttccgctgcccagaacctgtggctgtagatgtgggtggcaccacagggagaggtgtcggcggcttcaggtgaccctgtcaggttggcctgacgtcaggaggctcctgttgttcttctagaccccactatccctcccgcagtgcttgccttggccccttttcttcactctgctcttcaggcctacagagcctcgtgctgcatcctctgtccggtctttcccagcagcctgtggtgcggagccttccttccttctccctcgttcctccttccgggactgaagcttagcttgctttcctgccccgtcccttttaaact

SEQ ID NO: 369152 - DNA, 719 bp, Homo sapiens
tttgaaaggattgtgaaaatacaacaacttgtgacagagaccacatagtgctggcaaagctgaacgtatttactctctagctttttacagataaagtttattggcaccaccatgtcctccttccctgggctgtgagtggacgtgaccaataaactgctgatgatctcatctgtgctgtgtcgggtgtcgtggtgtggccacccccagagccctagggcaggactccctccgtcatcaatggggtgaagtcgaggtggatgaaaccggaagtggcattttccctatgcgtagttacatttattgatgggtgtttgaaagctgcacctgactcacattaatattatgtaataacttaatcagctttggagttttacaccttactttaaaaaataccttaacagtttttctttctaggtaaaagcagcgtttaatgaagaaactcattcttacgaaattagaacgacttcacgttggagaaagcatgaagaggtattcatctgttacggccctcacgataatcaacggctgttcctggaatacggatttgtttctgtccataatcctcatgcttgtgtttatgtctcaagaggttggaatcaactttgttcttaacattaacactatataatttttttccccatttggagatgtgtattttcagttttaataaaaatatcaaaaccttaagactgacatacatatcactaattttcttctag

SEQ ID NO: 369153 - DNA, 279 bp, Homo sapiens
gtaggacttccgggtcgggcctccagttgcccgggtaacgggagcagagtcggcggggtgcgttccttagtctttcattcatcagcgtaaaaagaactgagtttaggtcgcaggtcccctccagggcaggcattatcgtgtgcgctgcagtaacctctcatcttgtggagtcctacacttagcgcatgttgctccggcgcgctgcgtaaagctgaggagcctgaggcccgaggtccgatgctcgcctggctggcctatggctgcgggagcggtgtgtgt

SEQ ID NO: 369154 - DNA, 373 bp, Homo sapiens
ggtgctctttaggtctcacctctgaagctgactgcccttcaaggattataactcactggaggtcaagacattttctggaatagctttctgactccctgtttcccctgggaatcaaaggctgagagacatccagcttcagccttgtgtaattttgaagttcacattttttttttccataatagttatctctgggaccttgaagttatggtaggatttactctctttctgtctttgctttcctaggtacaggaagagggctgatgagtcaaacatccctgcaggtgagaactgttctttgatccttgaaacccaatgtagattttgctgctttgtttttgcggttcaaacgaagtgaattaaaaaaatttcagac

SEQ ID NO: 369155 - DNA, 3031 bp, Homo sapiens
agctgccgcccgcggcggaaggggcggacccgggagactgaggacttggattgcttaaggacaccaggcaggcgcgacagccttcagcctctccctctgcagttttggccggttcctttaacttgccttcatctggggctgtttggtatttccacgtgccttgggcccgcccactgcagcctccatcttggaagcggccgccggcgcctagaactgtatttcagaaaaaagaaactacagttttagcatgcagaaaggaaaagggagaacaagccggatcagaagacgaaaactctgcggaagttctgaatcaagaggagtgaatgagagccacaagtctgaatttatagagctgaggaagtggctgaaagctaggaagtttcaagattcaaacttagcgcctgcttgttttccaggtacaggaagagggctgatgagtcaaacatccctgcaggagggacagatgattatttcgttgcctgagagttgcctgctcaccacggacacagtgattcgaagctacttaggggcatacattactaagtggaagcctcctccatctcctctgctggcgctgtgcacctttttagtttcagaaaagcatgctgggcaccgatctctttggaagccttacctggagattttacccaaggcgtatacctgccctgtttgtttggagccggaagtggtgaaccttcttcccaaatctttaaaagcaaaggctgaagagcagagagcccacgtgcaggagttctttgcttcctccagagactttttctcttctctgcagcctctgtttgcggaggctgttgacagcatcttcagctacagtgccctgctgtgggcttggtgcaccgtcaacaccagagccgtgtacctgaggcccaggcagcgggaatgcctttctgcagagccggacacctgtgcactcgctccgtacctggacctgctgaatcatagcccacatgtccaggtaaaagcagcgtttaatgaagaaactcattcttacgaaattagaacgacttcacgttggagaaagcatgaagaggtattcatctgttacggccctcacgataatcaacggctgttcctggaatacggatttgtttctgtccataatcctcatgcttgtgtttatgtctcaagagaaatacttgttaaatatcttccatcaacagataaacagatggacaaaaagatttctattttaaaggatcatggctatatagaaaatttgacatttggatgggatggaccatcttggaggctactcacagcccttaagttgttatgtctggaagctgagaaatttacatgctggaaaaaagtacttcttggggaggtaatttcagatacgaatgagaagacaagtttggacatagcccagaaaatatgctattatttcatagaagagactaatgctgtgcttcaaaaggtgtctcatatgaaggatgaaaaagaggccctgataaaccaactaactttggtggaatccttgtggacggaagagctaaagattctcagggcatctgccgagaccctgcacagtttgcaaacagcttttacctgatttcaccgaagcgcatttggtcacctcctctgaaacaaaagttaattttgaagagcatcatcatgggctggggtggtggctgcccccaggacatgcaggatttctgcagggggcagcacaggttctgggattgtgaggctgtgagtgaaggtggacaagctgtctggatggcaggtctaatgctcttccgaataaagtgctgaactgtgaggagagaggcggactgtgaggcagccaggagccagctgcgtccgtgtgtggtctgtcaccacggggcctgcttcttatctgacacagcagctatcagagtctagtggttgtgcttttaagatgctctgataccattgggttaaggggcagattggcggtgggtgtggggcagtgtgaggtagtcctggatccccgccagggtggcccagacgccagcccttccctgtgtggctgcactgaggtgggtgttgaagagccccctaggggacacacagcttccaggaggagggaatgtcctctaagcatgctcctggcctctcaaggtggcgcttgtctaattattcacttgggaagaatgactagctcagccagcggctctttctgctttgttctggcgactttcctgggcaggcctttccacctggggagctggctcatcctgcacagctgggccgtggtgggcctgtctgcttgattctggggttcagtgtaggtcagctgatggcgaaccatggtggtggtttggcttctgttcttattcttgagttttgataccacgcagaccttgggtggggagagcttcctgcacagctctcagcggcctgtggccttggaactgcctgcgtaagtaacggaggggctgctggtcctgttcaggcccgtgctggggacgccgcttagacaatgttgcccagagtcctgtttaccctcccagggttcattcttcccaagaactcaaattcctttctcattggagcctagtgaaaccaaatgaacgggacctgctggcctcaggaggcaggcagagtttaaaataaaactttctcatgatttcttgaacatctttccctgtttgtatatacactttgtgtttatttttcagtagctgcagtatattttttttcaatattcagtataatgcagtgtatttcatcatatgctgtatggagagtgggcagacttctgtggagggcccgatagtaaccatttgaagctttctggacctgtggtcttagtcccagcgattctgcagagcggccatcggcagcatgtcaaccatttgcatggctgggctccagggaaactactgacaacgacaggtggtgggccatagtttcctgacccctgtgctatgccagaatttctttttcctcttccctatgagtggacctaaatatgttaattccttttcacctttcaaaacggacagccccttgaacattaaaaactttgcagaccctaaaaaaaaat

SEQ ID NO: 369156 - DNA, 730 bp, Homo sapiens
tcctttaaactggcttttaattttcaaaggtggaagcctcctccatctcctctgctggcgctgtgcacctttttagtttcagaaaagcatgctgggcaccgatctctttggaagccttacctggagattttacccaaggcgtatacctgccctgtttgtttggagccggaagtggtgaaccttcttcccaaatctttaaaagcaaaggctgaagagcagagagcccacgtgcaggagttctttgcttcctccagagactttttctcttctctgcagcctctgtttgcggaggctgttgacagcatcttcagctacagtgccctgctgtgggcttggtgcaccgtcaacaccagagccgtgtacctgaggcccaggcagcgggaatgcctttctgcagagccggacacctgtgcactcgctccgtacctggacctgctgaatcatagcccacatgtccaggtaaaagcagcgtttaatgaagaaactcattcttacgaaattagaacgacttcacgttggagaaagcatgaagaggtattcatctgttacggccctcacgataatcaacggctgttcctggaatacggatttgtttctgtccataatcctcatgcttgtgtttatgtctcaagaggttggaatcaactttgttcttaacattaacactatataatttttttccccatttggagatgtgtattttcagttttaataaaaatatcaaaacctt

SEQ ID NO: 369157 - DNA, 3125 bp, Homo sapiens
agctgccgcccgcggcggaaggggcggacccgggagactgaggacttggattgcttaaggacaccaggcaggcgcgacagccttcagcctctccctctgcagttttggccggttcctttaacttgccttcatctggggctgtttggtatttccacgtgccttgggcccgcccactgcagcctccatcttggaagcggccgccggcgcctagaactgtatttcagaaaaaagaaactacagttttagcatgcagaaaggaaaagggagaacaagccggatcagaagacgaaaactctgcggaagttctgaatcaagaggagagatggggtctttctgtgttgggcaggctgggctcaaactcctggcctcaagcagtcctcccgccttggcctcccaaatgctgggaatacagaatgaatgagagccacaagtctgaatttatagagctgaggaagtggctgaaagctaggaagtttcaagattcaaacttagcgcctgcttgttttccaggtacaggaagagggctgatgagtcaaacatccctgcaggagggacagatgattatttcgttgcctgagagttgcctgctcaccacggacacagtgattcgaagctacttaggggcatacattactaagtggaagcctcctccatctcctctgctggcgctgtgcacctttttagtttcagaaaagcatgctgggcaccgatctctttggaagccttacctggagattttacccaaggcgtatacctgccctgtttgtttggagccggaagtggtgaaccttcttcccaaatctttaaaagcaaaggctgaagagcagagagcccacgtgcaggagttctttgcttcctccagagactttttctcttctctgcagcctctgtttgcggaggctgttgacagcatcttcagctacagtgccctgctgtgggcttggtgcaccgtcaacaccagagccgtgtacctgaggcccaggcagcgggaatgcctttctgcagagccggacacctgtgcactcgctccgtacctggacctgctgaatcatagcccacatgtccaggtaaaagcagcgtttaatgaagaaactcattcttacgaaattagaacgacttcacgttggagaaagcatgaagaggtattcatctgttacggccctcacgataatcaacggctgttcctggaatacggatttgtttctgtccataatcctcatgcttgtgtttatgtctcaagagaaatacttgttaaatatcttccatcaacagataaacagatggacaaaaagatttctattttaaaggatcatggctatatagaaaatttgacatttggatgggatggaccatcttggaggctactcacagcccttaagttgttatgtctggaagctgagaaatttacatgctggaaaaaagtacttcttggggaggtaatttcagatacgaatgagaagacaagtttggacatagcccagaaaatatgctattatttcatagaagagactaatgctgtgcttcaaaaggtgtctcatatgaaggatgaaaaagaggccctgataaaccaactaactttggtggaatccttgtggacggaagagctaaagattctcagggcatctgccgagaccctgcacagtttgcaaacagcttttacctgatttcaccgaagcgcatttggtcacctcctctgaaacaaaagttaattttgaagagcatcatcatgggctggggtggtggctgcccccaggacatgcaggatttctgcagggggcagcacaggttctgggattgtgaggctgtgagtgaaggtggacaagctgtctggatggcaggtctaatgctcttccgaataaagtgctgaactgtgaggagagaggcggactgtgaggcagccaggagccagctgcgtccgtgtgtggtctgtcaccacggggcctgcttcttatctgacacagcagctatcagagtctagtggttgtgcttttaagatgctctgataccattgggttaaggggcagattggcggtgggtgtggggcagtgtgaggtagtcctggatccccgccagggtggcccagacgccagcccttccctgtgtggctgcactgaggtgggtgttgaagagccccctaggggacacacagcttccaggaggagggaatgtcctctaagcatgctcctggcctctcaaggtggcgcttgtctaattattcacttgggaagaatgactagctcagccagcggctctttctgctttgttctggcgactttcctgggcaggcctttccacctggggagctggctcatcctgcacagctgggccgtggtgggcctgtctgcttgattctggggttcagtgtaggtcagctgatggcgaaccatggtggtggtttggcttctgttcttattcttgagttttgataccacgcagaccttgggtggggagagcttcctgcacagctctcagcggcctgtggccttggaactgcctgcgtaagtaacggaggggctgctggtcctgttcaggcccgtgctggggacgccgcttagacaatgttgcccagagtcctgtttaccctcccagggttcattcttcccaagaactcaaattcctttctcattggagcctagtgaaaccaaatgaacgggacctgctggcctcaggaggcaggcagagtttaaaataaaactttctcatgatttcttgaacatctttccctgtttgtatatacactttgtgtttatttttcagtagctgcagtatattttttttcaatattcagtataatgcagtgtatttcatcatatgctgtatggagagtgggcagacttctgtggagggcccgatagtaaccatttgaagctttctggacctgtggtcttagtcccagcgattctgcagagcggccatcggcagcatgtcaaccatttgcatggctgggctccagggaaactactgacaacgacaggtggtgggccatagtttcctgacccctgtgctatgccagaatttctttttcctcttccctatgagtggacctaaatatgttaattccttttcacctttcaaaacggacagccccttgaacattaaaaactttgcagaccctaaaaaaaaat

SEQ ID NO: 369158 - DNA, 2826 bp, Homo sapiens
gcgccgggttgaaatcggacgaggtaacgggagcagagtcggcgggattgagcatttccacagaaattacagttttgtcctttttgaaaaaatagaactgtatttcagaaaaaagaaactacagttttagcatgcagaaaggaaaagggagaacaagccggatcagaagacgaaaactctgcggaagttctgaatcaagaggagtgaatgagagccacaagtctgaatttatagagctgaggaagtggctgaaagctaggaagtttcaagattcaaacttagcgcctgcttgttttccaggtacaggaagagggctgatgagtcaaacatccctgcaggtggaagcctcctccatctcctctgctggcgctgtgcacctttttagtttcagaaaagcatgctgggcaccgatctctttggaagccttacctggagattttacccaaggcgtatacctgccctgtttgtttggagccggaagtggtgaaccttcttcccaaatctttaaaagcaaaggctgaagagcagagagcccacgtgcaggagttctttgcttcctccagagactttttctcttctctgcagcctctgtttgcggaggctgttgacagcatcttcagctacagtgccctgctgtgggcttggtgcaccgtcaacaccagagccgtgtacctgaggcccaggcagcgggaatgcctttctgcagagccggacacctgtgcactcgctccgtacctggacctgctgaatcatagcccacatgtccaggtaaaagcagcgtttaatgaagaaactcattcttacgaaattagaacgacttcacgttggagaaagcatgaagaggtattcatctgttacggccctcacgataatcaacggctgttcctggaatacggatttgtttctgtccataatcctcatgcttgtgtttatgtctcaagagaaatacttgttaaatatcttccatcaacagataaacagatggacaaaaagatttctattttaaaggatcatggctatatagaaaatttgacatttggatgggatggaccatcttggaggctactcacagcccttaagttgttatgtctggaagctgagaaatttacatgctggaaaaaagtacttcttggggaggtaatttcagatacgaatgagaagacaagtttggacatagcccagaaaatatgctattatttcatagaagagactaatgctgtgcttcaaaaggtgtctcatatgaaggatgaaaaagaggccctgataaaccaactaactttggtggaatccttgtggacggaagagctaaagattctcagggcatctgccgagaccctgcacagtttgcaaacagcttttacctgatttcaccgaagcgcatttggtcacctcctctgaaacaaaagttaattttgaagagcatcatcatgggctggggtggtggctgcccccaggacatgcaggatttctgcagggggcagcacaggttctgggattgtgaggctgtgagtgaaggtggacaagctgtctggatggcaggtctaatgctcttccgaataaagtgctgaactgtgaggagagaggcggactgtgaggcagccaggagccagctgcgtccgtgtgtggtctgtcaccacggggcctgcttcttatctgacacagcagctatcagagtctagtggttgtgcttttaagatgctctgataccattgggttaaggggcagattggcggtgggtgtggggcagtgtgaggtagtcctggatccccgccagggtggcccagacgccagcccttccctgtgtggctgcactgaggtgggtgttgaagagccccctaggggacacacagcttccaggaggagggaatgtcctctaagcatgctcctggcctctcaaggtggcgcttgtctaattattcacttgggaagaatgactagctcagccagcggctctttctgctttgttctggcgactttcctgggcaggcctttccacctggggagctggctcatcctgcacagctgggccgtggtgggcctgtctgcttgattctggggttcagtgtaggtcagctgatggcgaaccatggtggtggtttggcttctgttcttattcttgagttttgataccacgcagaccttgggtggggagagcttcctgcacagctctcagcggcctgtggccttggaactgcctgcgtaagtaacggaggggctgctggtcctgttcaggcccgtgctggggacgccgcttagacaatgttgcccagagtcctgtttaccctcccagggttcattcttcccaagaactcaaattcctttctcattggagcctagtgaaaccaaatgaacgggacctgctggcctcaggaggcaggcagagtttaaaataaaactttctcatgatttcttgaacatctttccctgtttgtatatacactttgtgtttatttttcagtagctgcagtatattttttttcaatattcagtataatgcagtgtatttcatcatatgctgtatggagagtgggcagacttctgtggagggcccgatagtaaccatttgaagctttctggacctgtggtcttagtcccagcgattctgcagagcggccatcggcagcatgtcaaccatttgcatggctgggctccagggaaactactgacaacgacaggtggtgggccatagtttcctgacccctgtgctatgccagaatttctttttcctcttccctatgagtggacctaaatatgttaattccttttcacctttcaaaacggacagccccttgaacattaaaaactttgcagaccctaaaaaaaaat

SEQ ID NO: 369159 - DNA, 1278 bp, Homo sapiens
agctgccgcccgcggcggaaggggcggacccgggagactgaggacttggattgcttaaggacaccaggcaggcgcgacagccttcagcctctccctctgcagttttggccggttcctttaacttgccttcatctggggctgtttggtatttccacgtgccttgggcccgcccactgcagcctccatcttggaagcggccgccggcgcctagaactgtatttcagaaaaaagaaactacagttttagcatgcagaaaggaaaagggagaacaagccggatcagaagacgaaaactctgcggaagttctgaatcaagaggagtgaatgagagccacaagtctgaatttatagagctgaggaagtggctgaaagctaggaagtttcaagattcaaacttagcgcctgcttgttttccaggtacaggaagagggctgatgagtcaaacatccctgcaggagggacagatgattatttcgttgcctgagagttgcctgctcaccacggacacagtgattcgaagctacttaggggcatacattactaagtggaagcctcctccatctcctctgctggcgctgtgcacctttttagtttcagaaaagcatgctgggcaccgatctctttggaagccttacctggagattttacccaaggcgtatacctgccctgtttgtttggagccggaagtggtgaaccttcttcccaaatctttaaaagcaaaggctgaagagcagagagcccacgtgcaggagttctttgcttcctccagagactttttctcttctctgcagcctctgtttgcggaggctgttgacagcatcttcagctacagtgccctgctgtgggcttggtgcaccgtcaacaccagagccgtgtacctgaggcccaggcagcgggaatgcctttctgcagagccggacacctgtgcactcgctccgtacctggacctgctgaatcatagcccacatgtccaggtaaaagcagcgtttaatgaagaaactcattcttacgaaattagaacgacttcacgttggagaaagcatgaagaggtattcatctgttacggccctcacgataatcaacggctgttcctggaatacggatttgtttctgtccataatcctcatgcttgtgtttatgtctcaagaggttggaatcaactttgttcttaacattaacactatataatttttttccccatttggagatgtgtattttcagttttaataaaaatatcaaaaccttaagactgacatacatatcactaattttcttctag

SEQ ID NO: 369160 - DNA, 468 bp, Homo sapiens
tcacagataatattaattccttcctcataggattattgtaaggacttaagaatggtgcctggcagataaaaagtcttaagaagatgaatgtctgtttggaagttgaaaagtactctgtgtttggaaagagtggattaaaggatgggaagaggtggagtgggattcatcttgtggaaaaatcagaacaagactgccaatggagactgccgcagagacccccgggagcggagccgcagccccatcgagcgcgctgtggcccccaccatgagcctgcacggcagccacctgtacacctccctccccagccttggcctggagcagcccctcgcactgaccaagaacagcctggacgccagcaggccagccggcctctcgcccacactgaccccgggggagcggcagcaggtcatcactgaggccaactcgagctggctttggctcaagcaaaatgcttccagttaattgccg

SEQ ID NO: 369161 - DNA, 477 bp, Homo sapiens
  misc_feature (6)..(6): n is a, c, g, or t
ctctangtatccccgatgaagatgccgttttcgttccgcctgggagggattctgagtagctgagattacaggcgtgtgccaccacacctagctaatttttctatttcttttttttgtagagatggggtttcatcatgttgcccaggctggtctcaaactcctggcctccagcagtccatccgccttggcctcccaaactgctgtgattacaggtgtgagctaccatgcctagccgaacattcttttgactcaaatgactccagttgctttagagatgggctggcataattctagaatccctgtatcatggtttcagcttcttaggatcattttttacatttgaatgagaggaaaaaagtccaaagatgtcttcaattattattaacatttttgggaaacctttcttactcttgtgttatgtgtaccactctcaagtatgctgagctcgaaaaccaggcattgtattttctgttacct

SEQ ID NO: 369162 - DNA, 2007 bp, Homo sapiens
ggcacgaggccgggttgtggacgccaggagtttgccaaacacagcaaacactggtgtgtgagcggctgaaggggactctttccactccgatctccctccctcccagcctgttttgatttactaggacttcctcctccgggcgaggcgggggaaggacgccgccgagcgcctggagttgtgcgcgtgtgcgtgtgcgcgtgtgcgagtgtgaagtgcagcgctggagtgcaacatgctgtaatgggaggaaacccagcggcgtcggagcgcccgggaccgccgcggccgttctgagcgcagtggcgccgagcagcccctcccgcagccggtgtgacctgtcccttcaggctccaaccaggaatggagacgccattggatgttttgtccagggcagcatctctggtgcatgctgatgacgaaaaaccgtcacctgggaacttgttagaaatgcagaatcgtagtcctcgctgcggaactgatgactgagaatacgcattttgacaaaatccctgagtcctgtgcactcaaaagttggagacatccaggtctgcaccatggcgaagctgctctcaggggagaacccagaatgcagaccctgccggtggcctctgccctcagcagtcaccgcaccggccctcccccaatcagccccagcaagaggaagttcagcatggagccaggtgacgaggacctagactgtgacaacgaccacgtctccaaaatgagtcgcatcttcaacccccatctgaacaagactgccaatggagactgccgcagagacccccgggagcggagccgcagccccatcgagcgcgctgtggcccccaccatgagcctgcacggcagccacctgtacacctccctccccagccttggcctggagcagcccctcgcactgaccaagaacagcctggacgccagcaggccagccggcctctcgcccacactgaccccgggggagcggcagcagaaccggccctccgtgatcacctgtgcctcggctggcgcccgcaactgcaacctctcgcactgccccatcgcgcacagcggctgtgccgcgcccgggcctgccagctaccggaggccaccgagcgctgccaccacctgtgaccccgtggtggaggagcatttccgcaggagcctgggcaagaattacaaggagcccgagccggcacccaactccgtgtccatcacgggctccgtggacgaccactttgccaaagctctgggtgacacgtggctccagatcaaagcggccaaggacggagcatccagcagccctgagtccgcctctcgcaggggccagcccgccagcccctctgcccacatggtcagccacagtcactccccctctgtggtctcctgaagggagcgcctcctccaacaacacgtggatctgcatggtttgcctgagctttgaacagtcagtacttaaaaaaaaaaaaatcatgggggtggggtggggggaagggaagggatggtttatttgcaaaaaccatgttgttgggatttgtgttctgtttttgtacttgcttggtatccgtacaagggggccctcaaacatgatagcaggaactacgcgtggaacatctgtctaatgtagcatccttacttcctgcctcagttaccaaagaaacctctgatgcaggtctgctgccccgacggggccaggactccacagcgctttctcagtcacaagccatgatgaattggtgactcagacgctttgtgctttttcctttgcttcttgagaccggggtgtgtgtggctcagcttccacggcgtgtttggttcggtccatgtgtgacacgtggctccagatcaaagcggccaaggacggagcatccagcagccctgagtccgcctctcgcaggggccagcccgccagcccctctgcccacatggtcagccacagtcactccccctctgtggtctcctgaagggagcgcctcctccaacgacacgtggatctgcatggtttgcgtgagctttgaacagtccccactt

SEQ ID NO: 369163 - DNA, 3719 bp, Homo sapiens
ggcacgaggccgggttgtggacgccaggagtttgccaaacacagcaaacactggtgtgtgagcggctgaaggggactctttccactccgatctccctccctcccagcctgttttgatttactaggacttcctcctccgggcgaggcgggggaaggacgccgccgagcgcctggagttgtgcgcgtgtgcgtgtgcgcgtgtgcgagtgtgaagtgcagcgctggagtgcaacatgctgtaatgggaggaaacccagcggcgtcggagcgcccgggaccgccgcggccgttctgagcgcagtggcgccgagcagcccctcccgcagccggtgtgacctgtcccttcaggctccaaccaggaatggagacgccattggatgttttgtccagggcagcatctctggtgcatgctgatgacgaaaaacgcgaagctgctctcaggggagaacccagaatgcagaccctgccggtggcctctgccctcagcagtcaccgcaccggccctcccccaatcagccccagcaagaggaagttcagcatggagccaggtgacgaggacctagactgtgacaacgaccacgtctccaaaatgagtcgcatcttcaacccccatctgaacaagactgccaatggagactgccgcagagacccccgggagcggagccgcagccccatcgagcgcgctgtggcccccaccatgagcctgcacggcagccacctgtacacctccctccccagccttggcctggagcagcccctcgcactgaccaagaacagcctggacgccagcaggccagccggcctctcgcccacactgaccccgggggagcggcagcagaaccggccctccgtgatcacctgtgcctcggctggcgcccgcaactgcaacctctcgcactgccccatcgcgcacagcggctgtgccgcgcccgggcctgccagctaccggaggccaccgagcgctgccaccacctgtgaccccgtggtggaggagcatttccgcaggagcctgggcaagaattacaaggagcccgagccggcacccaactccgtgtccatcacgggctccgtggacgaccactttgccaaagctctgggtgacacgtggctccagatcaaagcggccaaggacggagcatccagcagccctgagtccgcctctcgcaggggccagcccgccagcccctctgcccacatggtcagccacagtcactccccctctgtggtctcctgaagggagcgcctcctccaacaacacgtggatctgcatggtttgcctgagctttgaacagtcagtacttaaaaaaaaaaaaatcatgggggtggggtggggggaagggaagggatggtttatttgcaaaaaccatgttgttgggatttgtgttctgtttttgtacttgcttggtatccgtacaagggggccctcaaacatgatagcaggaactacgcgtggaacatctgtctaatgtagcatccttacttcctgcctcagttaccaaagaaacctctgatgcaggtctgctgccccgacggggccaggactccacagcgctttctcagtcacaagccatgatgaattggtgactcagacgctttgtgctttttcctttgcttcttgagaccggggtgtgtgtggctcagcttccacggcgtgtttggttcggtccatgtgtgtgcgtgtgtatacttgaagagaactgtcgtgtctgatttgcactattggaggaggactaaagttgcctgacaactttatgtgttatgccagaactctgagggcaaactgctgaaaaacaaagggtttaaggatgacatttctgaccatttgtgtgtttgttgttgttactgtttttgttttttttaatgtagacaatacagctttggaaggggaagtctcatacaggttataggtctttctctctctagatttcaggtgcttgcaactggactgcagactctaccaatcacgggcattttatcttctctgaacactgcagtttgttagactagagctgaggttggaggattccatagtgctttaaacgtgatgcatgttttaatggagaaaaaatagctggtttctattaattatatagacagtaaacaaaaaccttaatacttactatcttcttttcagaattagtttatttttgtcagttacagtcctagatatacttactgctggtacagttgtactctaagattggtatttgatattcactttactcacaagtagtgcgggaggccagctcctggcaggccctcgcgatgagcagtgggtcagctgcggtgtgggatgctggagtttggctgcaggctgacatcatttatttttgcatccctgtctgctttgttacaagctcccaggggaggtggggtttgtgtcttccaacttccctacatgcagaaactgctccctttgaactctcttggctgaacagcagattactgacagacaatctgtgatatggtgttttatacgcttcctcgtacgctggggccaaggcagtatacattcctctgactttatactgttattactgcatttattatttgctatattaatagctactaactagaaattagatgaagcaagcatgacagacacagctgtggaggtcacagctgctcctttttggtcaatgagcgtttctatcccctccccctggggtgtgctgtgtcccacctggcccaccagaggctcacgacgatggcacctgaccaggtgacgtgggcgtggtcacctcacctgcaaggctttgtggactctgcacaccgtatgacccccggttttacagtttttagctgttgaattttggaaattggcactgggtgaaaaggtcggaggactggctcttgtagtcacagagtggctgcaggcctttgaaaagtggaggaaagaaaagcccttctccttgccccgcacacatttcactcccactgtactgggcttccaagctttggcattcaggcccctatattttctgtaggaaaaatcgttgagaacacttttctatatgggtgattttgagaccatcgttacgctgtgcgtaaagaatgtacagagaaatttgtaggtattttttgaagaacattaatttgttaatgatatgtagctatttaatttttccctttcctattgtaatcattcattttttttgttgttcggaaaaaaaaagttgatctttttttttgtcgtagatttgtctgtaaaagtgcaggaacagttattctatgagaacactgcatctgcattcatagccacgagtttgttattgctacaggctactgagcgtcgtaacaggaaaaccacccacagctgaccggctcggtggaggacactcctgggacaggtctctttgtcagtgaacaagggcgtcactctgggaggggtcggcggtgctggcggccgggtccctggtgcactgacctatctgggataggcagtaccctggaggggggcctggggcagaggaggcagcagaaaaccaaacatttcactgagaaagccccctccctgctctaagaaggggctccgtgaagttcttcccagagccgcgctgcctgcagtgcgctctgaccttctcttcatgtgtgtaaatctgtaatataccattctctgtggcctgtttttcctggaagaagaaaaaaaaaggtttggcaggccatctttttttgtacttaaaagtagccttaagaacaataataaagtgctcttaaacc

SEQ ID NO: 369164 - DNA, 3579 bp, Homo sapiens
tcccgcgctcccgtccgccggcccggtccgcgcgtgcgtgtgcgtgtgcgtgtttggcgggggcccgtgcgggggctcgggcgcgagcccgcctgtgcgtctgcgcgccctcggggtgcgccccgcgtgcccaggtcccgtccccgcccctgggtcccccgcagggccaggccggccccaggcgggcgcgcccagagccgccgggcggctccaaccaggaatggagacgccattggatgttttgtccagggcagcatctctggtgcatgctgatgacgaaaaacgcgaagctgctctcaggggagaacccagaatgcagaccctgccggtggcctctgccctcagcagtcaccgcaccggccctcccccaatcagccccagcaagaggaagttcagcatggagccaggtgacgaggacctagactgtgacaacgaccacgtctccaaaatgagtcgcatcttcaacccccatctgaacaagactgccaatggagactgccgcagagacccccgggagcggagccgcagccccatcgagcgcgctgtggcccccaccatgagcctgcacggcagccacctgtacacctccctccccagccttggcctggagcagcccctcgcactgaccaagaacagcctggacgccagcaggccagccggcctctcgcccacactgaccccgggggagcggcagcagaaccggccctccgtgatcacctgtgcctcggctggcgcccgcaactgcaacctctcgcactgccccatcgcgcacagcggctgtgccgcgcccgggcctgccagctaccggaggccaccgagcgctgccaccacctgtgaccccgtggtggaggagcatttccgcaggagcctgggcaagaattacaaggagcccgagccggcacccaactccgtgtccatcacgggctccgtggacgaccactttgccaaagctctgggtgacacgtggctccagatcaaagcggccaaggacggagcatccagcagccctgagtccgcctctcgcaggggccagcccgccagcccctctgcccacatggtcagccacagtcactccccctctgtggtctcctgaagggagcgcctcctccaacaacacgtggatctgcatggtttgcctgagctttgaacagtcagtacttaaaaaaaaaaaaatcatgggggtggggtggggggaagggaagggatggtttatttgcaaaaaccatgttgttgggatttgtgttctgtttttgtacttgcttggtatccgtacaagggggccctcaaacatgatagcaggaactacgcgtggaacatctgtctaatgtagcatccttacttcctgcctcagttaccaaagaaacctctgatgcaggtctgctgccccgacggggccaggactccacagcgctttctcagtcacaagccatgatgaattggtgactcagacgctttgtgctttttcctttgcttcttgagaccggggtgtgtgtggctcagcttccacggcgtgtttggttcggtccatgtgtgtgcgtgtgtatacttgaagagaactgtcgtgtctgatttgcactattggaggaggactaaagttgcctgacaactttatgtgttatgccagaactctgagggcaaactgctgaaaaacaaagggtttaaggatgacatttctgaccatttgtgtgtttgttgttgttactgtttttgttttttttaatgtagacaatacagctttggaaggggaagtctcatacaggttataggtctttctctctctagatttcaggtgcttgcaactggactgcagactctaccaatcacgggcattttatcttctctgaacactgcagtttgttagactagagctgaggttggaggattccatagtgctttaaacgtgatgcatgttttaatggagaaaaaatagctggtttctattaattatatagacagtaaacaaaaaccttaatacttactatcttcttttcagaattagtttatttttgtcagttacagtcctagatatacttactgctggtacagttgtactctaagattggtatttgatattcactttactcacaagtagtgcgggaggccagctcctggcaggccctcgcgatgagcagtgggtcagctgcggtgtgggatgctggagtttggctgcaggctgacatcatttatttttgcatccctgtctgctttgttacaagctcccaggggaggtggggtttgtgtcttccaacttccctacatgcagaaactgctccctttgaactctcttggctgaacagcagattactgacagacaatctgtgatatggtgttttatacgcttcctcgtacgctggggccaaggcagtatacattcctctgactttatactgttattactgcatttattatttgctatattaatagctactaactagaaattagatgaagcaagcatgacagacacagctgtggaggtcacagctgctcctttttggtcaatgagcgtttctatcccctccccctggggtgtgctgtgtcccacctggcccaccagaggctcacgacgatggcacctgaccaggtgacgtgggcgtggtcacctcacctgcaaggctttgtggactctgcacaccgtatgacccccggttttacagtttttagctgttgaattttggaaattggcactgggtgaaaaggtcggaggactggctcttgtagtcacagagtggctgcaggcctttgaaaagtggaggaaagaaaagcccttctccttgccccgcacacatttcactcccactgtactgggcttccaagctttggcattcaggcccctatattttctgtaggaaaaatcgttgagaacacttttctatatgggtgattttgagaccatcgttacgctgtgcgtaaagaatgtacagagaaatttgtaggtattttttgaagaacattaatttgttaatgatatgtagctatttaatttttccctttcctattgtaatcattcattttttttgttgttcggaaaaaaaaagttgatctttttttttgtcgtagatttgtctgtaaaagtgcaggaacagttattctatgagaacactgcatctgcattcatagccacgagtttgttattgctacaggctactgagcgtcgtaacaggaaaaccacccacagctgaccggctcggtggaggacactcctgggacaggtctctttgtcagtgaacaagggcgtcactctgggaggggtcggcggtgctggcggccgggtccctggtgcactgacctatctgggataggcagtaccctggaggggggcctggggcagaggaggcagcagaaaaccaaacatttcactgagaaagccccctccctgctctaagaaggggctccgtgaagttcttcccagagccgcgctgcctgcagtgcgctctgaccttctcttcatgtgtgtaaatctgtaatataccattctctgtggcctgtttttcctggaagaagaaaaaaaaaggtttggcaggccatctttttttgtacttaaaagtagccttaagaacaataataaagtgctcttaaacc

SEQ ID NO: 369165 - DNA, 3831 bp, Homo sapiens
tcccgcgctcccgtccgccggcccggtccgcgcgtgcgtgtgcgtgtgcgtgtttggcgggggcccgtgcgggggctcgggcgcgagcccgcctgtgcgtctgcgcgccctcggggtgcgccccgcgtgcccaggtcccgtccccgcccctgggtcccccgcagggccaggccggccccaggcgggcgcgcccagagccgccgggcggctccaaccaggaatggagacgccattggatgttttgtccagggcagcatctctggtgcatgctgatgacgaaaaacggtcttgctctgttgcccagactggagtatagtggcacaatcttggctcactgcaagctccgccccctggggctcaagtgatcctcccacctcagcctctcgagtagctgggaccacagcgtcacctgggaacttgttagaaatgcagaatcgtagtcctcgctgcggaactgatgactgagaatacgcattttgacaaaatccctgagtcctgtgcactcaaaagttggagacatccaggtctgcaccatggcgaagctgctctcaggggagaacccagaatgcagaccctgccggtggcctctgccctcagcagtcaccgcaccggccctcccccaatcagccccagcaagaggaagttcagcatggagccaggtgacgaggacctagactgtgacaacgaccacgtctccaaaatgagtcgcatcttcaacccccatctgaacaagactgccaatggagactgccgcagagacccccgggagcggagccgcagccccatcgagcgcgctgtggcccccaccatgagcctgcacggcagccacctgtacacctccctccccagccttggcctggagcagcccctcgcactgaccaagaacagcctggacgccagcaggccagccggcctctcgcccacactgaccccgggggagcggcagcagaaccggccctccgtgatcacctgtgcctcggctggcgcccgcaactgcaacctctcgcactgccccatcgcgcacagcggctgtgccgcgcccgggcctgccagctaccggaggccaccgagcgctgccaccacctgtgaccccgtggtggaggagcatttccgcaggagcctgggcaagaattacaaggagcccgagccggcacccaactccgtgtccatcacgggctccgtggacgaccactttgccaaagctctgggtgacacgtggctccagatcaaagcggccaaggacggagcatccagcagccctgagtccgcctctcgcaggggccagcccgccagcccctctgcccacatggtcagccacagtcactccccctctgtggtctcctgaagggagcgcctcctccaacaacacgtggatctgcatggtttgcctgagctttgaacagtcagtacttaaaaaaaaaaaaatcatgggggtggggtggggggaagggaagggatggtttatttgcaaaaaccatgttgttgggatttgtgttctgtttttgtacttgcttggtatccgtacaagggggccctcaaacatgatagcaggaactacgcgtggaacatctgtctaatgtagcatccttacttcctgcctcagttaccaaagaaacctctgatgcaggtctgctgccccgacggggccaggactccacagcgctttctcagtcacaagccatgatgaattggtgactcagacgctttgtgctttttcctttgcttcttgagaccggggtgtgtgtggctcagcttccacggcgtgtttggttcggtccatgtgtgtgcgtgtgtatacttgaagagaactgtcgtgtctgatttgcactattggaggaggactaaagttgcctgacaactttatgtgttatgccagaactctgagggcaaactgctgaaaaacaaagggtttaaggatgacatttctgaccatttgtgtgtttgttgttgttactgtttttgttttttttaatgtagacaatacagctttggaaggggaagtctcatacaggttataggtctttctctctctagatttcaggtgcttgcaactggactgcagactctaccaatcacgggcattttatcttctctgaacactgcagtttgttagactagagctgaggttggaggattccatagtgctttaaacgtgatgcatgttttaatggagaaaaaatagctggtttctattaattatatagacagtaaacaaaaaccttaatacttactatcttcttttcagaattagtttatttttgtcagttacagtcctagatatacttactgctggtacagttgtactctaagattggtatttgatattcactttactcacaagtagtgcgggaggccagctcctggcaggccctcgcgatgagcagtgggtcagctgcggtgtgggatgctggagtttggctgcaggctgacatcatttatttttgcatccctgtctgctttgttacaagctcccaggggaggtggggtttgtgtcttccaacttccctacatgcagaaactgctccctttgaactctcttggctgaacagcagattactgacagacaatctgtgatatggtgttttatacgcttcctcgtacgctggggccaaggcagtatacattcctctgactttatactgttattactgcatttattatttgctatattaatagctactaactagaaattagatgaagcaagcatgacagacacagctgtggaggtcacagctgctcctttttggtcaatgagcgtttctatcccctccccctggggtgtgctgtgtcccacctggcccaccagaggctcacgacgatggcacctgaccaggtgacgtgggcgtggtcacctcacctgcaaggctttgtggactctgcacaccgtatgacccccggttttacagtttttagctgttgaattttggaaattggcactgggtgaaaaggtcggaggactggctcttgtagtcacagagtggctgcaggcctttgaaaagtggaggaaagaaaagcccttctccttgccccgcacacatttcactcccactgtactgggcttccaagctttggcattcaggcccctatattttctgtaggaaaaatcgttgagaacacttttctatatgggtgattttgagaccatcgttacgctgtgcgtaaagaatgtacagagaaatttgtaggtattttttgaagaacattaatttgttaatgatatgtagctatttaatttttccctttcctattgtaatcattcattttttttgttgttcggaaaaaaaaagttgatctttttttttgtcgtagatttgtctgtaaaagtgcaggaacagttattctatgagaacactgcatctgcattcatagccacgagtttgttattgctacaggctactgagcgtcgtaacaggaaaaccacccacagctgaccggctcggtggaggacactcctgggacaggtctctttgtcagtgaacaagggcgtcactctgggaggggtcggcggtgctggcggccgggtccctggtgcactgacctatctgggataggcagtaccctggaggggggcctggggcagaggaggcagcagaaaaccaaacatttcactgagaaagccccctccctgctctaagaaggggctccgtgaagttcttcccagagccgcgctgcctgcagtgcgctctgaccttctcttcatgtgtgtaaatctgtaatataccattctctgtggcctgtttttcctggaagaagaaaaaaaaaggtttggcaggccatctttttttgtacttaaaagtagccttaagaacaataataaagtgctcttaaacc

SEQ ID NO: 369166 - DNA, 3164 bp, Homo sapiens
gctttcttgtgggaggacgctgggctgtcttcatgctctttggcaatgattaaagtgaggaacaagactgccaatggagactgccgcagagacccccgggagcggagccgcagccccatcgagcgcgctgtggcccccaccatgagcctgcacggcagccacctgtacacctccctccccagccttggcctggagcagcccctcgcactgaccaagaacagcctggacgccagcaggccagccggcctctcgcccacactgaccccgggggagcggcagcagaaccggccctccgtgatcacctgtgcctcggctggcgcccgcaactgcaacctctcgcactgccccatcgcgcacagcggctgtgccgcgcccgggcctgccagctaccggaggccaccgagcgctgccaccacctgtgaccccgtggtggaggagcatttccgcaggagcctgggcaagaattacaaggagcccgagccggcacccaactccgtgtccatcacgggctccgtggacgaccactttgccaaagctctgggtgacacgtggctccagatcaaagcggccaaggacggagcatccagcagccctgagtccgcctctcgcaggggccagcccgccagcccctctgcccacatggtcagccacagtcactccccctctgtggtctcctgaagggagcgcctcctccaacaacacgtggatctgcatggtttgcctgagctttgaacagtcagtacttaaaaaaaaaaaaatcatgggggtggggtggggggaagggaagggatggtttatttgcaaaaaccatgttgttgggatttgtgttctgtttttgtacttgcttggtatccgtacaagggggccctcaaacatgatagcaggaactacgcgtggaacatctgtctaatgtagcatccttacttcctgcctcagttaccaaagaaacctctgatgcaggtctgctgccccgacggggccaggactccacagcgctttctcagtcacaagccatgatgaattggtgactcagacgctttgtgctttttcctttgcttcttgagaccggggtgtgtgtggctcagcttccacggcgtgtttggttcggtccatgtgtgtgcgtgtgtatacttgaagagaactgtcgtgtctgatttgcactattggaggaggactaaagttgcctgacaactttatgtgttatgccagaactctgagggcaaactgctgaaaaacaaagggtttaaggatgacatttctgaccatttgtgtgtttgttgttgttactgtttttgttttttttaatgtagacaatacagctttggaaggggaagtctcatacaggttataggtctttctctctctagatttcaggtgcttgcaactggactgcagactctaccaatcacgggcattttatcttctctgaacactgcagtttgttagactagagctgaggttggaggattccatagtgctttaaacgtgatgcatgttttaatggagaaaaaatagctggtttctattaattatatagacagtaaacaaaaaccttaatacttactatcttcttttcagaattagtttatttttgtcagttacagtcctagatatacttactgctggtacagttgtactctaagattggtatttgatattcactttactcacaagtagtgcgggaggccagctcctggcaggccctcgcgatgagcagtgggtcagctgcggtgtgggatgctggagtttggctgcaggctgacatcatttatttttgcatccctgtctgctttgttacaagctcccaggggaggtggggtttgtgtcttccaacttccctacatgcagaaactgctccctttgaactctcttggctgaacagcagattactgacagacaatctgtgatatggtgttttatacgcttcctcgtacgctggggccaaggcagtatacattcctctgactttatactgttattactgcatttattatttgctatattaatagctactaactagaaattagatgaagcaagcatgacagacacagctgtggaggtcacagctgctcctttttggtcaatgagcgtttctatcccctccccctggggtgtgctgtgtcccacctggcccaccagaggctcacgacgatggcacctgaccaggtgacgtgggcgtggtcacctcacctgcaaggctttgtggactctgcacaccgtatgacccccggttttacagtttttagctgttgaattttggaaattggcactgggtgaaaaggtcggaggactggctcttgtagtcacagagtggctgcaggcctttgaaaagtggaggaaagaaaagcccttctccttgccccgcacacatttcactcccactgtactgggcttccaagctttggcattcaggcccctatattttctgtaggaaaaatcgttgagaacacttttctatatgggtgattttgagaccatcgttacgctgtgcgtaaagaatgtacagagaaatttgtaggtattttttgaagaacattaatttgttaatgatatgtagctatttaatttttccctttcctattgtaatcattcattttttttgttgttcggaaaaaaaaagttgatctttttttttgtcgtagatttgtctgtaaaagtgcaggaacagttattctatgagaacactgcatctgcattcatagccacgagtttgttattgctacaggctactgagcgtcgtaacaggaaaaccacccacagctgaccggctcggtggaggacactcctgggacaggtctctttgtcagtgaacaagggcgtcactctgggaggggtcggcggtgctggcggccgggtccctggtgcactgacctatctgggataggcagtaccctggaggggggcctggggcagaggaggcagcagaaaaccaaacatttcactgagaaagccccctccctgctctaagaaggggctccgtgaagttcttcccagagccgcgctgcctgcagtgcgctctgaccttctcttcatgtgtgtaaatctgtaatataccattctctgtggcctgtttttcctggaagaagaaaaaaaaaggtttggcaggccatctttttttgtacttaaaagtagccttaagaacaataataaagtgctcttaaacc

SEQ ID NO: 369167 - DNA, 3759 bp, Homo sapiens
ggcacgaggccgggttgtggacgccaggagtttgccaaacacagcaaacactggtgtgtgagcggctgaaggggactctttccactccgatctccctccctcccagcctgttttgatttactaggacttcctcctccgggcgaggcgggggaaggacgccgccgagcgcctggagttgtgcgcgtgtgcgtgtgcgcgtgtgcgagtgtgaagtgcagcgctggagtgcaacatgctgtaatgggaggaaacccagcggcgtcggagcgcccgggaccgccgcggccgttctgagcgcagtggcgccgagcagcccctcccgcagccggtgtgacctgtcccttcaggctccaaccaggaatggagacgccattggatgttttgtccagggcagcatctctggtgcatgctgatgacgaaaaacgcgaagctgctctcaggggagaacccagaatgcagaccctgccggtggcctctgccctcagcagtcaccgcaccggccctcccccaatcagccccagcaagaggaagttcagcatggagccaggtgacgaggacctagactgtgacaacgaccacgtctccaaaatgagtcgcatcttcaacccccatctgaacaagactgccaatggagactgccgcagagacccccgggagcggagccgcagccccatcgagcgcgctgtggcccccaccatgagcctgcacggcagccacctgtacacctccctccccagccttggcctggagcagcccctcgcactgaccaagaacagcctggacgccagcaggccagccggcctctcgcccacactgaccccgggggagcggcagcagaaccggccctccgtgatcacctgtgcctcggctggcgcccgcaactgcaacctctcgcactgccccatcgcgcacagcggctgtgccgcgcccgggcctgccagctaccggaggccaccgagcgccacctgtgtctgactgcctgccttcctgcttgcctgcagctgccaccacctgtgaccccgtggtggaggagcatttccgcaggagcctgggcaagaattacaaggagcccgagccggcacccaactccgtgtccatcacgggctccgtggacgaccactttgccaaagctctgggtgacacgtggctccagatcaaagcggccaaggacggagcatccagcagccctgagtccgcctctcgcaggggccagcccgccagcccctctgcccacatggtcagccacagtcactccccctctgtggtctcctgaagggagcgcctcctccaacaacacgtggatctgcatggtttgcctgagctttgaacagtcagtacttaaaaaaaaaaaaatcatgggggtggggtggggggaagggaagggatggtttatttgcaaaaaccatgttgttgggatttgtgttctgtttttgtacttgcttggtatccgtacaagggggccctcaaacatgatagcaggaactacgcgtggaacatctgtctaatgtagcatccttacttcctgcctcagttaccaaagaaacctctgatgcaggtctgctgccccgacggggccaggactccacagcgctttctcagtcacaagccatgatgaattggtgactcagacgctttgtgctttttcctttgcttcttgagaccggggtgtgtgtggctcagcttccacggcgtgtttggttcggtccatgtgtgtgcgtgtgtatacttgaagagaactgtcgtgtctgatttgcactattggaggaggactaaagttgcctgacaactttatgtgttatgccagaactctgagggcaaactgctgaaaaacaaagggtttaaggatgacatttctgaccatttgtgtgtttgttgttgttactgtttttgttttttttaatgtagacaatacagctttggaaggggaagtctcatacaggttataggtctttctctctctagatttcaggtgcttgcaactggactgcagactctaccaatcacgggcattttatcttctctgaacactgcagtttgttagactagagctgaggttggaggattccatagtgctttaaacgtgatgcatgttttaatggagaaaaaatagctggtttctattaattatatagacagtaaacaaaaaccttaatacttactatcttcttttcagaattagtttatttttgtcagttacagtcctagatatacttactgctggtacagttgtactctaagattggtatttgatattcactttactcacaagtagtgcgggaggccagctcctggcaggccctcgcgatgagcagtgggtcagctgcggtgtgggatgctggagtttggctgcaggctgacatcatttatttttgcatccctgtctgctttgttacaagctcccaggggaggtggggtttgtgtcttccaacttccctacatgcagaaactgctccctttgaactctcttggctgaacagcagattactgacagacaatctgtgatatggtgttttatacgcttcctcgtacgctggggccaaggcagtatacattcctctgactttatactgttattactgcatttattatttgctatattaatagctactaactagaaattagatgaagcaagcatgacagacacagctgtggaggtcacagctgctcctttttggtcaatgagcgtttctatcccctccccctggggtgtgctgtgtcccacctggcccaccagaggctcacgacgatggcacctgaccaggtgacgtgggcgtggtcacctcacctgcaaggctttgtggactctgcacaccgtatgacccccggttttacagtttttagctgttgaattttggaaattggcactgggtgaaaaggtcggaggactggctcttgtagtcacagagtggctgcaggcctttgaaaagtggaggaaagaaaagcccttctccttgccccgcacacatttcactcccactgtactgggcttccaagctttggcattcaggcccctatattttctgtaggaaaaatcgttgagaacacttttctatatgggtgattttgagaccatcgttacgctgtgcgtaaagaatgtacagagaaatttgtaggtattttttgaagaacattaatttgttaatgatatgtagctatttaatttttccctttcctattgtaatcattcattttttttgttgttcggaaaaaaaaagttgatctttttttttgtcgtagatttgtctgtaaaagtgcaggaacagttattctatgagaacactgcatctgcattcatagccacgagtttgttattgctacaggctactgagcgtcgtaacaggaaaaccacccacagctgaccggctcggtggaggacactcctgggacaggtctctttgtcagtgaacaagggcgtcactctgggaggggtcggcggtgctggcggccgggtccctggtgcactgacctatctgggataggcagtaccctggaggggggcctggggcagaggaggcagcagaaaaccaaacatttcactgagaaagccccctccctgctctaagaaggggctccgtgaagttcttcccagagccgcgctgcctgcagtgcgctctgaccttctcttcatgtgtgtaaatctgtaatataccattctctgtggcctgtttttcctggaagaagaaaaaaaaaggtttggcaggccatctttttttgtacttaaaagtagccttaagaacaataataaagtgctcttaaacc

SEQ ID NO: 369168 - DNA, 3449 bp, Homo sapiens
ggcacgaggccgggttgtggacgccaggagtttgccaaacacagcaaacactggtgtgtgagcggctgaaggggactctttccactccgatctccctccctcccagcctgttttgatttactaggacttcctcctccgggcgaggcgggggaaggacgccgccgagcgcctggagttgtgcgcgtgtgcgtgtgcgcgtgtgcgagtgtgaagtgcagcgctggagtgcaacatgctgtaatgggaggaaacccagcggcgtcggagcgcccgggaccgccgcggccgttctgagcgcagtggcgccgagcagcccctcccgcagccggtgtgacctgtcccttcaggctccaaccaggaatggagacgccattggatgttttgtccagggcagcatctctggtgcatgctgatgacgaaaaacgcgaagctgctctcaggggagaacccagaatgcagaccctgccggtggcctctgccctcagcagtcaccgcaccggccctcccccaatcagccccagcaagaggaagttcagcatggagccaggtgacgaggacctagactgtgacaacgaccacgtctccaaaatgagtcgcatcttcaacccccatctgaacaagactgccaatggagactgccgcagagacccccgggagcggagccgcagccccatcgagcgcgctgtggcccccaccatgagcctgcacggcagccacctgtacacctccctccccagccttggcctggagcagcccctcgcactgaccaagaacagcctggacgccagcaggccagccggcctctcgcccacactgaccccgggggagcggcagcagaaccggccctccgtgatcacctgtgcctcggctggcgcccgcaactgcaacctctcgcagggccagcccgccagcccctctgcccacatggtcagccacagtcactccccctctgtggtctcctgaagggagcgcctcctccaacaacacgtggatctgcatggtttgcctgagctttgaacagtcagtacttaaaaaaaaaaaaatcatgggggtggggtggggggaagggaagggatggtttatttgcaaaaaccatgttgttgggatttgtgttctgtttttgtacttgcttggtatccgtacaagggggccctcaaacatgatagcaggaactacgcgtggaacatctgtctaatgtagcatccttacttcctgcctcagttaccaaagaaacctctgatgcaggtctgctgccccgacggggccaggactccacagcgctttctcagtcacaagccatgatgaattggtgactcagacgctttgtgctttttcctttgcttcttgagaccggggtgtgtgtggctcagcttccacggcgtgtttggttcggtccatgtgtgtgcgtgtgtatacttgaagagaactgtcgtgtctgatttgcactattggaggaggactaaagttgcctgacaactttatgtgttatgccagaactctgagggcaaactgctgaaaaacaaagggtttaaggatgacatttctgaccatttgtgtgtttgttgttgttactgtttttgttttttttaatgtagacaatacagctttggaaggggaagtctcatacaggttataggtctttctctctctagatttcaggtgcttgcaactggactgcagactctaccaatcacgggcattttatcttctctgaacactgcagtttgttagactagagctgaggttggaggattccatagtgctttaaacgtgatgcatgttttaatggagaaaaaatagctggtttctattaattatatagacagtaaacaaaaaccttaatacttactatcttcttttcagaattagtttatttttgtcagttacagtcctagatatacttactgctggtacagttgtactctaagattggtatttgatattcactttactcacaagtagtgcgggaggccagctcctggcaggccctcgcgatgagcagtgggtcagctgcggtgtgggatgctggagtttggctgcaggctgacatcatttatttttgcatccctgtctgctttgttacaagctcccaggggaggtggggtttgtgtcttccaacttccctacatgcagaaactgctccctttgaactctcttggctgaacagcagattactgacagacaatctgtgatatggtgttttatacgcttcctcgtacgctggggccaaggcagtatacattcctctgactttatactgttattactgcatttattatttgctatattaatagctactaactagaaattagatgaagcaagcatgacagacacagctgtggaggtcacagctgctcctttttggtcaatgagcgtttctatcccctccccctggggtgtgctgtgtcccacctggcccaccagaggctcacgacgatggcacctgaccaggtgacgtgggcgtggtcacctcacctgcaaggctttgtggactctgcacaccgtatgacccccggttttacagtttttagctgttgaattttggaaattggcactgggtgaaaaggtcggaggactggctcttgtagtcacagagtggctgcaggcctttgaaaagtggaggaaagaaaagcccttctccttgccccgcacacatttcactcccactgtactgggcttccaagctttggcattcaggcccctatattttctgtaggaaaaatcgttgagaacacttttctatatgggtgattttgagaccatcgttacgctgtgcgtaaagaatgtacagagaaatttgtaggtattttttgaagaacattaatttgttaatgatatgtagctatttaatttttccctttcctattgtaatcattcattttttttgttgttcggaaaaaaaaagttgatctttttttttgtcgtagatttgtctgtaaaagtgcaggaacagttattctatgagaacactgcatctgcattcatagccacgagtttgttattgctacaggctactgagcgtcgtaacaggaaaaccacccacagctgaccggctcggtggaggacactcctgggacaggtctctttgtcagtgaacaagggcgtcactctgggaggggtcggcggtgctggcggccgggtccctggtgcactgacctatctgggataggcagtaccctggaggggggcctggggcagaggaggcagcagaaaaccaaacatttcactgagaaagccccctccctgctctaagaaggggctccgtgaagttcttcccagagccgcgctgcctgcagtgcgctctgaccttctcttcatgtgtgtaaatctgtaatataccattctctgtggcctgtttttcctggaagaagaaaaaaaaaggtttggcaggccatctttttttgtacttaaaagtagccttaagaacaataataaagtgctcttaaacc

SEQ ID NO: 369169 - DNA, 815 bp, Homo sapiens
cagttacctatgggggcaaaagctaaaaggggtaatagagatagcaataagggagccaaagctgtgaggaaagtccttggcagagagatgagaaagaactagattggggaggacgcacaaagaaacagagcgaaagggaaactgagaagctgtgcagtcgatgggtgcccacctggactggatttaagtcagaagagaaggaagatgtgagtattcattaaacgtctctgcgaagcctgtaaccccacaccggctcttcgaagaagcattatctctgttttacggatgagaaaactgaggacttcctcctccgggcgaggcgggggaaggacgccgccgagcgcctggagttgtgcgcgtgtgcgtgtgcgcgtgtgcgagtgtgaagtgcagcgctggagtgcaacatgctgtaatgggaggaaacccagcggcgtcggagcgcccgggaccgccgcggccgttctgagcgcagtggcgccgagcagcccctcccgcagccggtgtgacctgtcccttcaggctccaaccaggaatggagacgccattggatgttttgtccagggcagcatctctggtgcatgctgatgacgaaaaacagataacatcttaagggacactgaagcttgtgcgtgtgtgccttggaagtggccgttgtggacccagagatcatcctttctgatctgacaccttcttcactgccctggcccagtgtcttttctgcaaggctggaagcccccttagactggtcatgtcccatctctttccggagggaagatgatcccaaagacgacttttctctccacggtgctacc

SEQ ID NO: 369170 - DNA, 957 bp, Homo sapiens
cagttacctatgggggcaaaagctaaaaggggtaatagagatagcaataagggagccaaagctgtgaggaaagtccttggcagagagatgagaaagaactagattggggaggacgcacaaagaaacagagcgaaagggaaactgagaagctgtgcagtcgatgggtgcccacctggactggatttaagtcagaagagaaggaagatgtgagtattcattaaacgtctctgcgaagcctgtaaccccacaccggctcttcgaagaagcattatctctgttttacggatgagaaaactgaggacttcctcctccgggcgaggcgggggaaggacgccgccgagcgcctggagttgtgcgcgtgtgcgtgtgcgcgtgtgcgagtgtgaagtgcagcgctggagtgcaacatgctgtaatgggaggaaacccagcggcgtcggagcgcccgggaccgccgcggccgttctgagcgcagtggcgccgagcagcccctcccgcagccggtgtgacctgtcccttcaggctccaaccaggaatggagacgccattggatgttttgtccagggcagcatctctggtgcatgctgatgacgaaaaacagatggggtttcatcatgttgcccaggctggtctcaaactcctggcctccagcagtccatccgccttggcctcccaaactgctgtgattacaggtgtgagctaccatgcctagccgaacattcttttgactcaaatgactccagttgctttagagatgggctggcataattctagaatccctgtatcatggtttcagcttcttaggatcattttttacatttgaatgagaggaaaaaagtccaaagatgtcttcaattattattaacatttttgggaaacctttcttactcttgtgttatgtgtaccactctcaagtatgctgagctcgaaaaccaggcattgtattttctgttacct

SEQ ID NO: 369171 - DNA, 489 bp, Homo sapiens
atttcctccatttcctctctgtcccgatttgtaggtcatcactgaggccaactcgagctggctttggctcaagcaaaatgcttccagttaattgccgtgtattgaagtgtcctggatggctccaggcacacccgcggctcagtggacatgatgggaagggctctggggacgttaacgggagaatcgaggtccctcctgcaaccctctgtcctccacaggatgcccggtgtttgtcttaacagatttgagagatggggacagaccaactcaacagttgagcttttgtcctttgtaccctcactgatccaaacagccacgaccaagggccactacacacacccttggagctgcgctcactctgtggattggctgtgtttagcaacaggactccagtattgaagtgggaggtggcagactgggtcaggaagggcaccaggacagagcctgaagggtgctggggagggccccaggggtggtgcccggtactga

SEQ ID NO: 369172 - DNA, 818 bp, Homo sapiens
agaggaaatcgcgtgctgtaattctgacagcaaatctattttctcaccaaatggaactgtaatgatgcgtgtagcgttttggcaaggcaccctctataaataaaccctcccaggagttcctgacctaccccaggacccataggaaacttttattgcagtgcagggggcaagcaggccccttacctcgcaaccctcctttcagggaggacttttattctgacaagcgcccgcccatccagttttgtgcctgagactgcttgccaagtttgtgaggcccaaggctttcttgtgggaggacgctgggctgtcttcatgctctttggcaatgattaaagtgaggttagtaccaagaaccctttcattttattcccttatccttgctttttcaaaccagatggcaaccctgtattttcagctgtaattaatttaaactgcgagacagcaagtgctgggagaggtagagtagtctttgcttagaagggacagcagtgattttccttctcgtccctcccttctccccaaacgccaccttgtcccaatcagatttgtgccatgcacagtttctcctaagcggggactggaatgggagagagggctgctgagagcagctgcagcatggctgcctgcagtagctggaagggttaaggcacactagtgattgtttccttcatggattggaagtaaccaagtttcaggtgatggctgtcatgtgaccgcctctagacaatggtgcatagtttggctgctgattcggggagtacaaggtgctttttcttcccactcagtccagctgccaagatcgcctccaaaagggggta

SEQ ID NO: 369173 - DNA, 3787 bp, Homo sapiens
gtcatgccaagcatagccctcatgtcagcgctgccggcttgcagcgggctgtgagaggggccggcgccgctttgtcctaggaaacgggctgcgcgtttctctttttcactcttttccatttccaggaaggacttgtaaggacttctgaaacgctgttttcatactcgatcggggatacagtacatacaccgtctaccagtaagcccttgaagggtttcgtgtgagctcgatttttttgtgcctgattttttttttttttaacttttgcatactttgttttgatagtctgaggctgggcctctgcctttgtgaagttgaagagccaggagctactcagcaacaattgatttttgaaacttaactcttttggggcaaaagcaaagagctggttttctttgctagcccaataaatgctatttatgaagatggacctgttgaactatcagtacttggacaagatgaacaacaatatcggcattctgtgctacgaaggcgaagctgctctcaggggagaacccagaatgcagaccctgccggtggcctctgccctcagcagtcaccgcaccggccctcccccaatcagccccagcaagaggaagttcagcatggagccaggtgacgaggacctagactgtgacaacgaccacgtctccaaaatgagtcgcatcttcaacccccatctgaacaagactgccaatggagactgccgcagagacccccgggagcggagccgcagccccatcgagcgcgctgtggcccccaccatgagcctgcacggcagccacctgtacacctccctccccagccttggcctggagcagcccctcgcactgaccaagaacagcctggacgccagcaggccagccggcctctcgcccacactgaccccgggggagcggcagcagaaccggccctccgtgatcacctgtgcctcggctggcgcccgcaactgcaacctctcgcactgccccatcgcgcacagcggctgtgccgcgcccgggcctgccagctaccggaggccaccgagcgctgccaccacctgtgaccccgtggtggaggagcatttccgcaggagcctgggcaagaattacaaggagcccgagccggcacccaactccgtgtccatcacgggctccgtggacgaccactttgccaaagctctgggtgacacgtggctccagatcaaagcggccaaggacggagcatccagcagccctgagtccgcctctcgcaggggccagcccgccagcccctctgcccacatggtcagccacagtcactccccctctgtggtctcctgaagggagcgcctcctccaacaacacgtggatctgcatggtttgcctgagctttgaacagtcagtacttaaaaaaaaaaaaatcatgggggtggggtggggggaagggaagggatggtttatttgcaaaaaccatgttgttgggatttgtgttctgtttttgtacttgcttggtatccgtacaagggggccctcaaacatgatagcaggaactacgcgtggaacatctgtctaatgtagcatccttacttcctgcctcagttaccaaagaaacctctgatgcaggtctgctgccccgacggggccaggactccacagcgctttctcagtcacaagccatgatgaattggtgactcagacgctttgtgctttttcctttgcttcttgagaccggggtgtgtgtggctcagcttccacggcgtgtttggttcggtccatgtgtgtgcgtgtgtatacttgaagagaactgtcgtgtctgatttgcactattggaggaggactaaagttgcctgacaactttatgtgttatgccagaactctgagggcaaactgctgaaaaacaaagggtttaaggatgacatttctgaccatttgtgtgtttgttgttgttactgtttttgttttttttaatgtagacaatacagctttggaaggggaagtctcatacaggttataggtctttctctctctagatttcaggtgcttgcaactggactgcagactctaccaatcacgggcattttatcttctctgaacactgcagtttgttagactagagctgaggttggaggattccatagtgctttaaacgtgatgcatgttttaatggagaaaaaatagctggtttctattaattatatagacagtaaacaaaaaccttaatacttactatcttcttttcagaattagtttatttttgtcagttacagtcctagatatacttactgctggtacagttgtactctaagattggtatttgatattcactttactcacaagtagtgcgggaggccagctcctggcaggccctcgcgatgagcagtgggtcagctgcggtgtgggatgctggagtttggctgcaggctgacatcatttatttttgcatccctgtctgctttgttacaagctcccaggggaggtggggtttgtgtcttccaacttccctacatgcagaaactgctccctttgaactctcttggctgaacagcagattactgacagacaatctgtgatatggtgttttatacgcttcctcgtacgctggggccaaggcagtatacattcctctgactttatactgttattactgcatttattatttgctatattaatagctactaactagaaattagatgaagcaagcatgacagacacagctgtggaggtcacagctgctcctttttggtcaatgagcgtttctatcccctccccctggggtgtgctgtgtcccacctggcccaccagaggctcacgacgatggcacctgaccaggtgacgtgggcgtggtcacctcacctgcaaggctttgtggactctgcacaccgtatgacccccggttttacagtttttagctgttgaattttggaaattggcactgggtgaaaaggtcggaggactggctcttgtagtcacagagtggctgcaggcctttgaaaagtggaggaaagaaaagcccttctccttgccccgcacacatttcactcccactgtactgggcttccaagctttggcattcaggcccctatattttctgtaggaaaaatcgttgagaacacttttctatatgggtgattttgagaccatcgttacgctgtgcgtaaagaatgtacagagaaatttgtaggtattttttgaagaacattaatttgttaatgatatgtagctatttaatttttccctttcctattgtaatcattcattttttttgttgttcggaaaaaaaaagttgatctttttttttgtcgtagatttgtctgtaaaagtgcaggaacagttattctatgagaacactgcatctgcattcatagccacgagtttgttattgctacaggctactgagcgtcgtaacaggaaaaccacccacagctgaccggctcggtggaggacactcctgggacaggtctctttgtcagtgaacaagggcgtcactctgggaggggtcggcggtgctggcggccgggtccctggtgcactgacctatctgggataggcagtaccctggaggggggcctggggcagaggaggcagcagaaaaccaaacatttcactgagaaagccccctccctgctctaagaaggggctccgtgaagttcttcccagagccgcgctgcctgcagtgcgctctgaccttctcttcatgtgtgtaaatctgtaatataccattctctgtggcctgtttttcctggaagaagaaaaaaaaaggtttggcaggccatctttttttgtacttaaaagtagccttaagaacaataataaagtgctcttaaacc

SEQ ID NO: 369174 - DNA, 3852 bp, Homo sapiens
ggcacgaggccgggttgtggacgccaggagtttgccaaacacagcaaacactggtgtgtgagcggctgaaggggactctttccactccgatctccctccctcccagcctgttttgatttactaggacttcctcctccgggcgaggcgggggaaggacgccgccgagcgcctggagttgtgcgcgtgtgcgtgtgcgcgtgtgcgagtgtgaagtgcagcgctggagtgcaacatgctgtaatgggaggaaacccagcggcgtcggagcgcccgggaccgccgcggccgttctgagcgcagtggcgccgagcagcccctcccgcagccggtgtgacctgtcccttcaggctccaaccaggaatggagacgccattggatgttttgtccagggcagcatctctggtgcatgctgatgacgaaaaaccgtcacctgggaacttgttagaaatgcagaatcgtagtcctcgctgcggaactgatgactgagaatacgcattttgacaaaatccctgagtcctgtgcactcaaaagttggagacatccaggtctgcaccatggcgaagctgctctcaggggagaacccagaatgcagaccctgccggtggcctctgccctcagcagtcaccgcaccggccctcccccaatcagccccagcaagaggaagttcagcatggagccaggtgacgaggacctagactgtgacaacgaccacgtctccaaaatgagtcgcatcttcaacccccatctgaacaagactgccaatggagactgccgcagagacccccgggagcggagccgcagccccatcgagcgcgctgtggcccccaccatgagcctgcacggcagccacctgtacacctccctccccagccttggcctggagcagcccctcgcactgaccaagaacagcctggacgccagcaggccagccggcctctcgcccacactgaccccgggggagcggcagcagaaccggccctccgtgatcacctgtgcctcggctggcgcccgcaactgcaacctctcgcactgccccatcgcgcacagcggctgtgccgcgcccgggcctgccagctaccggaggccaccgagcgctgccaccacctgtgaccccgtggtggaggagcatttccgcaggagcctgggcaagaattacaaggagcccgagccggcacccaactccgtgtccatcacgggctccgtggacgaccactttgccaaagctctgggtgacacgtggctccagatcaaagcggccaaggacggagcatccagcagccctgagtccgcctctcgcaggggccagcccgccagcccctctgcccacatggtcagccacagtcactccccctctgtggtctcctgaagggagcgcctcctccaacaacacgtggatctgcatggtttgcctgagctttgaacagtcagtacttaaaaaaaaaaaaatcatgggggtggggtggggggaagggaagggatggtttatttgcaaaaaccatgttgttgggatttgtgttctgtttttgtacttgcttggtatccgtacaagggggccctcaaacatgatagcaggaactacgcgtggaacatctgtctaatgtagcatccttacttcctgcctcagttaccaaagaaacctctgatgcaggtctgctgccccgacggggccaggactccacagcgctttctcagtcacaagccatgatgaattggtgactcagacgctttgtgctttttcctttgcttcttgagaccggggtgtgtgtggctcagcttccacggcgtgtttggttcggtccatgtgtgtgcgtgtgtatacttgaagagaactgtcgtgtctgatttgcactattggaggaggactaaagttgcctgacaactttatgtgttatgccagaactctgagggcaaactgctgaaaaacaaagggtttaaggatgacatttctgaccatttgtgtgtttgttgttgttactgtttttgttttttttaatgtagacaatacagctttggaaggggaagtctcatacaggttataggtctttctctctctagatttcaggtgcttgcaactggactgcagactctaccaatcacgggcattttatcttctctgaacactgcagtttgttagactagagctgaggttggaggattccatagtgctttaaacgtgatgcatgttttaatggagaaaaaatagctggtttctattaattatatagacagtaaacaaaaaccttaatacttactatcttcttttcagaattagtttatttttgtcagttacagtcctagatatacttactgctggtacagttgtactctaagattggtatttgatattcactttactcacaagtagtgcgggaggccagctcctggcaggccctcgcgatgagcagtgggtcagctgcggtgtgggatgctggagtttggctgcaggctgacatcatttatttttgcatccctgtctgctttgttacaagctcccaggggaggtggggtttgtgtcttccaacttccctacatgcagaaactgctccctttgaactctcttggctgaacagcagattactgacagacaatctgtgatatggtgttttatacgcttcctcgtacgctggggccaaggcagtatacattcctctgactttatactgttattactgcatttattatttgctatattaatagctactaactagaaattagatgaagcaagcatgacagacacagctgtggaggtcacagctgctcctttttggtcaatgagcgtttctatcccctccccctggggtgtgctgtgtcccacctggcccaccagaggctcacgacgatggcacctgaccaggtgacgtgggcgtggtcacctcacctgcaaggctttgtggactctgcacaccgtatgacccccggttttacagtttttagctgttgaattttggaaattggcactgggtgaaaaggtcggaggactggctcttgtagtcacagagtggctgcaggcctttgaaaagtggaggaaagaaaagcccttctccttgccccgcacacatttcactcccactgtactgggcttccaagctttggcattcaggcccctatattttctgtaggaaaaatcgttgagaacacttttctatatgggtgattttgagaccatcgttacgctgtgcgtaaagaatgtacagagaaatttgtaggtattttttgaagaacattaatttgttaatgatatgtagctatttaatttttccctttcctattgtaatcattcattttttttgttgttcggaaaaaaaaagttgatctttttttttgtcgtagatttgtctgtaaaagtgcaggaacagttattctatgagaacactgcatctgcattcatagccacgagtttgttattgctacaggctactgagcgtcgtaacaggaaaaccacccacagctgaccggctcggtggaggacactcctgggacaggtctctttgtcagtgaacaagggcgtcactctgggaggggtcggcggtgctggcggccgggtccctggtgcactgacctatctgggataggcagtaccctggaggggggcctggggcagaggaggcagcagaaaaccaaacatttcactgagaaagccccctccctgctctaagaaggggctccgtgaagttcttcccagagccgcgctgcctgcagtgcgctctgaccttctcttcatgtgtgtaaatctgtaatataccattctctgtggcctgtttttcctggaagaagaaaaaaaaaggtttggcaggccatctttttttgtacttaaaagtagccttaagaacaataataaagtgctcttaaacc

SEQ ID NO: 369175 - DNA, 3894 bp, Homo sapiens
cagttacctatgggggcaaaagctaaaaggggtaatagagatagcaataagggagccaaagctgtgaggaaagtccttggcagagagatgagaaagaactagattggggaggacgcacaaagaaacagagcgaaagggaaactgagaagctgtgcagtcgatgggtgcccacctggactggatttaagtcagaagagaaggaagatgtgagtattcattaaacgtctctgcgaagcctgtaaccccacaccggctcttcgaagaagcattatctctgttttacggatgagaaaactgaggacttcctcctccgggcgaggcgggggaaggacgccgccgagcgcctggagttgtgcgcgtgtgcgtgtgcgcgtgtgcgagtgtgaagtgcagcgctggagtgcaacatgctgtaatgggaggaaacccagcggcgtcggagcgcccgggaccgccgcggccgttctgagcgcagtggcgccgagcagcccctcccgcagccggtgtgacctgtcccttcaggctccaaccaggaatggagacgccattggatgttttgtccagggcagcatctctggtgcatgctgatgacgaaaaacgcgaagctgctctcaggggagaacccagaatgcagaccctgccggtggcctctgccctcagcagtcaccgcaccggccctcccccaatcagccccagcaagaggaagttcagcatggagccaggtgacgaggacctagactgtgacaacgaccacgtctccaaaatgagtcgcatcttcaacccccatctgaacaagactgccaatggagactgccgcagagacccccgggagcggagccgcagccccatcgagcgcgctgtggcccccaccatgagcctgcacggcagccacctgtacacctccctccccagccttggcctggagcagcccctcgcactgaccaagaacagcctggacgccagcaggccagccggcctctcgcccacactgaccccgggggagcggcagcagaaccggccctccgtgatcacctgtgcctcggctggcgcccgcaactgcaacctctcgcactgccccatcgcgcacagcggctgtgccgcgcccgggcctgccagctaccggaggccaccgagcgctgccaccacctgtgaccccgtggtggaggagcatttccgcaggagcctgggcaagaattacaaggagcccgagccggcacccaactccgtgtccatcacgggctccgtggacgaccactttgccaaagctctgggtgacacgtggctccagatcaaagcggccaaggacggagcatccagcagccctgagtccgcctctcgcaggggccagcccgccagcccctctgcccacatggtcagccacagtcactccccctctgtggtctcctgaagggagcgcctcctccaacaacacgtggatctgcatggtttgcctgagctttgaacagtcagtacttaaaaaaaaaaaaatcatgggggtggggtggggggaagggaagggatggtttatttgcaaaaaccatgttgttgggatttgtgttctgtttttgtacttgcttggtatccgtacaagggggccctcaaacatgatagcaggaactacgcgtggaacatctgtctaatgtagcatccttacttcctgcctcagttaccaaagaaacctctgatgcaggtctgctgccccgacggggccaggactccacagcgctttctcagtcacaagccatgatgaattggtgactcagacgctttgtgctttttcctttgcttcttgagaccggggtgtgtgtggctcagcttccacggcgtgtttggttcggtccatgtgtgtgcgtgtgtatacttgaagagaactgtcgtgtctgatttgcactattggaggaggactaaagttgcctgacaactttatgtgttatgccagaactctgagggcaaactgctgaaaaacaaagggtttaaggatgacatttctgaccatttgtgtgtttgttgttgttactgtttttgttttttttaatgtagacaatacagctttggaaggggaagtctcatacaggttataggtctttctctctctagatttcaggtgcttgcaactggactgcagactctaccaatcacgggcattttatcttctctgaacactgcagtttgttagactagagctgaggttggaggattccatagtgctttaaacgtgatgcatgttttaatggagaaaaaatagctggtttctattaattatatagacagtaaacaaaaaccttaatacttactatcttcttttcagaattagtttatttttgtcagttacagtcctagatatacttactgctggtacagttgtactctaagattggtatttgatattcactttactcacaagtagtgcgggaggccagctcctggcaggccctcgcgatgagcagtgggtcagctgcggtgtgggatgctggagtttggctgcaggctgacatcatttatttttgcatccctgtctgctttgttacaagctcccaggggaggtggggtttgtgtcttccaacttccctacatgcagaaactgctccctttgaactctcttggctgaacagcagattactgacagacaatctgtgatatggtgttttatacgcttcctcgtacgctggggccaaggcagtatacattcctctgactttatactgttattactgcatttattatttgctatattaatagctactaactagaaattagatgaagcaagcatgacagacacagctgtggaggtcacagctgctcctttttggtcaatgagcgtttctatcccctccccctggggtgtgctgtgtcccacctggcccaccagaggctcacgacgatggcacctgaccaggtgacgtgggcgtggtcacctcacctgcaaggctttgtggactctgcacaccgtatgacccccggttttacagtttttagctgttgaattttggaaattggcactgggtgaaaaggtcggaggactggctcttgtagtcacagagtggctgcaggcctttgaaaagtggaggaaagaaaagcccttctccttgccccgcacacatttcactcccactgtactgggcttccaagctttggcattcaggcccctatattttctgtaggaaaaatcgttgagaacacttttctatatgggtgattttgagaccatcgttacgctgtgcgtaaagaatgtacagagaaatttgtaggtattttttgaagaacattaatttgttaatgatatgtagctatttaatttttccctttcctattgtaatcattcattttttttgttgttcggaaaaaaaaagttgatctttttttttgtcgtagatttgtctgtaaaagtgcaggaacagttattctatgagaacactgcatctgcattcatagccacgagtttgttattgctacaggctactgagcgtcgtaacaggaaaaccacccacagctgaccggctcggtggaggacactcctgggacaggtctctttgtcagtgaacaagggcgtcactctgggaggggtcggcggtgctggcggccgggtccctggtgcactgacctatctgggataggcagtaccctggaggggggcctggggcagaggaggcagcagaaaaccaaacatttcactgagaaagccccctccctgctctaagaaggggctccgtgaagttcttcccagagccgcgctgcctgcagtgcgctctgaccttctcttcatgtgtgtaaatctgtaatataccattctctgtggcctgtttttcctggaagaagaaaaaaaaaggtttggcaggccatctttttttgtacttaaaagtagccttaagaacaataataaagtgctcttaaacc

SEQ ID NO: 369176 - DNA, 3645 bp, Homo sapiens
tcccgcgctcccgtccgccggcccggtccgcgcgtgcgtgtgcgtgtgcgtgtttggcgggggcccgtgcgggggctcgggcgcgagcccgcctgtgcgtctgcgcgccctcggggtgcgccccgcgtgcccaggtcccgtccccgcccctgggtcccccgcagggccaggccggccccaggcgggcgcgcccagagccgccgggcggaacacctggcagtttgaatgtgattcctccgatgctcacccccctggcctccacatctagacaaggctccaaccaggaatggagacgccattggatgttttgtccagggcagcatctctggtgcatgctgatgacgaaaaacgcgaagctgctctcaggggagaacccagaatgcagaccctgccggtggcctctgccctcagcagtcaccgcaccggccctcccccaatcagccccagcaagaggaagttcagcatggagccaggtgacgaggacctagactgtgacaacgaccacgtctccaaaatgagtcgcatcttcaacccccatctgaacaagactgccaatggagactgccgcagagacccccgggagcggagccgcagccccatcgagcgcgctgtggcccccaccatgagcctgcacggcagccacctgtacacctccctccccagccttggcctggagcagcccctcgcactgaccaagaacagcctggacgccagcaggccagccggcctctcgcccacactgaccccgggggagcggcagcagaaccggccctccgtgatcacctgtgcctcggctggcgcccgcaactgcaacctctcgcactgccccatcgcgcacagcggctgtgccgcgcccgggcctgccagctaccggaggccaccgagcgctgccaccacctgtgaccccgtggtggaggagcatttccgcaggagcctgggcaagaattacaaggagcccgagccggcacccaactccgtgtccatcacgggctccgtggacgaccactttgccaaagctctgggtgacacgtggctccagatcaaagcggccaaggacggagcatccagcagccctgagtccgcctctcgcaggggccagcccgccagcccctctgcccacatggtcagccacagtcactccccctctgtggtctcctgaagggagcgcctcctccaacaacacgtggatctgcatggtttgcctgagctttgaacagtcagtacttaaaaaaaaaaaaatcatgggggtggggtggggggaagggaagggatggtttatttgcaaaaaccatgttgttgggatttgtgttctgtttttgtacttgcttggtatccgtacaagggggccctcaaacatgatagcaggaactacgcgtggaacatctgtctaatgtagcatccttacttcctgcctcagttaccaaagaaacctctgatgcaggtctgctgccccgacggggccaggactccacagcgctttctcagtcacaagccatgatgaattggtgactcagacgctttgtgctttttcctttgcttcttgagaccggggtgtgtgtggctcagcttccacggcgtgtttggttcggtccatgtgtgtgcgtgtgtatacttgaagagaactgtcgtgtctgatttgcactattggaggaggactaaagttgcctgacaactttatgtgttatgccagaactctgagggcaaactgctgaaaaacaaagggtttaaggatgacatttctgaccatttgtgtgtttgttgttgttactgtttttgttttttttaatgtagacaatacagctttggaaggggaagtctcatacaggttataggtctttctctctctagatttcaggtgcttgcaactggactgcagactctaccaatcacgggcattttatcttctctgaacactgcagtttgttagactagagctgaggttggaggattccatagtgctttaaacgtgatgcatgttttaatggagaaaaaatagctggtttctattaattatatagacagtaaacaaaaaccttaatacttactatcttcttttcagaattagtttatttttgtcagttacagtcctagatatacttactgctggtacagttgtactctaagattggtatttgatattcactttactcacaagtagtgcgggaggccagctcctggcaggccctcgcgatgagcagtgggtcagctgcggtgtgggatgctggagtttggctgcaggctgacatcatttatttttgcatccctgtctgctttgttacaagctcccaggggaggtggggtttgtgtcttccaacttccctacatgcagaaactgctccctttgaactctcttggctgaacagcagattactgacagacaatctgtgatatggtgttttatacgcttcctcgtacgctggggccaaggcagtatacattcctctgactttatactgttattactgcatttattatttgctatattaatagctactaactagaaattagatgaagcaagcatgacagacacagctgtggaggtcacagctgctcctttttggtcaatgagcgtttctatcccctccccctggggtgtgctgtgtcccacctggcccaccagaggctcacgacgatggcacctgaccaggtgacgtgggcgtggtcacctcacctgcaaggctttgtggactctgcacaccgtatgacccccggttttacagtttttagctgttgaattttggaaattggcactgggtgaaaaggtcggaggactggctcttgtagtcacagagtggctgcaggcctttgaaaagtggaggaaagaaaagcccttctccttgccccgcacacatttcactcccactgtactgggcttccaagctttggcattcaggcccctatattttctgtaggaaaaatcgttgagaacacttttctatatgggtgattttgagaccatcgttacgctgtgcgtaaagaatgtacagagaaatttgtaggtattttttgaagaacattaatttgttaatgatatgtagctatttaatttttccctttcctattgtaatcattcattttttttgttgttcggaaaaaaaaagttgatctttttttttgtcgtagatttgtctgtaaaagtgcaggaacagttattctatgagaacactgcatctgcattcatagccacgagtttgttattgctacaggctactgagcgtcgtaacaggaaaaccacccacagctgaccggctcggtggaggacactcctgggacaggtctctttgtcagtgaacaagggcgtcactctgggaggggtcggcggtgctggcggccgggtccctggtgcactgacctatctgggataggcagtaccctggaggggggcctggggcagaggaggcagcagaaaaccaaacatttcactgagaaagccccctccctgctctaagaaggggctccgtgaagttcttcccagagccgcgctgcctgcagtgcgctctgaccttctcttcatgtgtgtaaatctgtaatataccattctctgtggcctgtttttcctggaagaagaaaaaaaaaggtttggcaggccatctttttttgtacttaaaagtagccttaagaacaataataaagtgctcttaaacc

SEQ ID NO: 369177 - DNA, 3386 bp, Homo sapiens
tgaggctgcacagtcttaggatgaggcgttgtctgattgcagaggccatgggttcttgcctccagctaacctgttaactggaggatcttgggcgaagctgctctcaggggagaacccagaatgcagaccctgccggtggcctctgccctcagcagtcaccgcaccggccctcccccaatcagccccagcaagaggaagttcagcatggagccaggtgacgaggacctagactgtgacaacgaccacgtctccaaaatgagtcgcatcttcaacccccatctgaacaagactgccaatggagactgccgcagagacccccgggagcggagccgcagccccatcgagcgcgctgtggcccccaccatgagcctgcacggcagccacctgtacacctccctccccagccttggcctggagcagcccctcgcactgaccaagaacagcctggacgccagcaggccagccggcctctcgcccacactgaccccgggggagcggcagcagaaccggccctccgtgatcacctgtgcctcggctggcgcccgcaactgcaacctctcgcactgccccatcgcgcacagcggctgtgccgcgcccgggcctgccagctaccggaggccaccgagcgctgccaccacctgtgaccccgtggtggaggagcatttccgcaggagcctgggcaagaattacaaggagcccgagccggcacccaactccgtgtccatcacgggctccgtggacgaccactttgccaaagctctgggtgacacgtggctccagatcaaagcggccaaggacggagcatccagcagccctgagtccgcctctcgcaggggccagcccgccagcccctctgcccacatggtcagccacagtcactccccctctgtggtctcctgaagggagcgcctcctccaacaacacgtggatctgcatggtttgcctgagctttgaacagtcagtacttaaaaaaaaaaaaatcatgggggtggggtggggggaagggaagggatggtttatttgcaaaaaccatgttgttgggatttgtgttctgtttttgtacttgcttggtatccgtacaagggggccctcaaacatgatagcaggaactacgcgtggaacatctgtctaatgtagcatccttacttcctgcctcagttaccaaagaaacctctgatgcaggtctgctgccccgacggggccaggactccacagcgctttctcagtcacaagccatgatgaattggtgactcagacgctttgtgctttttcctttgcttcttgagaccggggtgtgtgtggctcagcttccacggcgtgtttggttcggtccatgtgtgtgcgtgtgtatacttgaagagaactgtcgtgtctgatttgcactattggaggaggactaaagttgcctgacaactttatgtgttatgccagaactctgagggcaaactgctgaaaaacaaagggtttaaggatgacatttctgaccatttgtgtgtttgttgttgttactgtttttgttttttttaatgtagacaatacagctttggaaggggaagtctcatacaggttataggtctttctctctctagatttcaggtgcttgcaactggactgcagactctaccaatcacgggcattttatcttctctgaacactgcagtttgttagactagagctgaggttggaggattccatagtgctttaaacgtgatgcatgttttaatggagaaaaaatagctggtttctattaattatatagacagtaaacaaaaaccttaatacttactatcttcttttcagaattagtttatttttgtcagttacagtcctagatatacttactgctggtacagttgtactctaagattggtatttgatattcactttactcacaagtagtgcgggaggccagctcctggcaggccctcgcgatgagcagtgggtcagctgcggtgtgggatgctggagtttggctgcaggctgacatcatttatttttgcatccctgtctgctttgttacaagctcccaggggaggtggggtttgtgtcttccaacttccctacatgcagaaactgctccctttgaactctcttggctgaacagcagattactgacagacaatctgtgatatggtgttttatacgcttcctcgtacgctggggccaaggcagtatacattcctctgactttatactgttattactgcatttattatttgctatattaatagctactaactagaaattagatgaagcaagcatgacagacacagctgtggaggtcacagctgctcctttttggtcaatgagcgtttctatcccctccccctggggtgtgctgtgtcccacctggcccaccagaggctcacgacgatggcacctgaccaggtgacgtgggcgtggtcacctcacctgcaaggctttgtggactctgcacaccgtatgacccccggttttacagtttttagctgttgaattttggaaattggcactgggtgaaaaggtcggaggactggctcttgtagtcacagagtggctgcaggcctttgaaaagtggaggaaagaaaagcccttctccttgccccgcacacatttcactcccactgtactgggcttccaagctttggcattcaggcccctatattttctgtaggaaaaatcgttgagaacacttttctatatgggtgattttgagaccatcgttacgctgtgcgtaaagaatgtacagagaaatttgtaggtattttttgaagaacattaatttgttaatgatatgtagctatttaatttttccctttcctattgtaatcattcattttttttgttgttcggaaaaaaaaagttgatctttttttttgtcgtagatttgtctgtaaaagtgcaggaacagttattctatgagaacactgcatctgcattcatagccacgagtttgttattgctacaggctactgagcgtcgtaacaggaaaaccacccacagctgaccggctcggtggaggacactcctgggacaggtctctttgtcagtgaacaagggcgtcactctgggaggggtcggcggtgctggcggccgggtccctggtgcactgacctatctgggataggcagtaccctggaggggggcctggggcagaggaggcagcagaaaaccaaacatttcactgagaaagccccctccctgctctaagaaggggctccgtgaagttcttcccagagccgcgctgcctgcagtgcgctctgaccttctcttcatgtgtgtaaatctgtaatataccattctctgtggcctgtttttcctggaagaagaaaaaaaaaggtttggcaggccatctttttttgtacttaaaagtagccttaagaacaataataaagtgctcttaaacc

SEQ ID NO: 369178 - DNA, 3284 bp, Homo sapiens
ctgaccaggagcggaggcgacttccatctcccgggcaggatgcgtgcggttttctgccgtccccgggagcacatgacgcctgggaagcagtggccgggaggtgattcatccgggcgagcggggcctggaaaacaatgtctgtcttgaagctccgggaaccaggaaaatgagctggaaatgaacaagactgccaatggagactgccgcagagacccccgggagcggagccgcagccccatcgagcgcgctgtggcccccaccatgagcctgcacggcagccacctgtacacctccctccccagccttggcctggagcagcccctcgcactgaccaagaacagcctggacgccagcaggccagccggcctctcgcccacactgaccccgggggagcggcagcagaaccggccctccgtgatcacctgtgcctcggctggcgcccgcaactgcaacctctcgcactgccccatcgcgcacagcggctgtgccgcgcccgggcctgccagctaccggaggccaccgagcgctgccaccacctgtgaccccgtggtggaggagcatttccgcaggagcctgggcaagaattacaaggagcccgagccggcacccaactccgtgtccatcacgggctccgtggacgaccactttgccaaagctctgggtgacacgtggctccagatcaaagcggccaaggacggagcatccagcagccctgagtccgcctctcgcaggggccagcccgccagcccctctgcccacatggtcagccacagtcactccccctctgtggtctcctgaagggagcgcctcctccaacaacacgtggatctgcatggtttgcctgagctttgaacagtcagtacttaaaaaaaaaaaaatcatgggggtggggtggggggaagggaagggatggtttatttgcaaaaaccatgttgttgggatttgtgttctgtttttgtacttgcttggtatccgtacaagggggccctcaaacatgatagcaggaactacgcgtggaacatctgtctaatgtagcatccttacttcctgcctcagttaccaaagaaacctctgatgcaggtctgctgccccgacggggccaggactccacagcgctttctcagtcacaagccatgatgaattggtgactcagacgctttgtgctttttcctttgcttcttgagaccggggtgtgtgtggctcagcttccacggcgtgtttggttcggtccatgtgtgtgcgtgtgtatacttgaagagaactgtcgtgtctgatttgcactattggaggaggactaaagttgcctgacaactttatgtgttatgccagaactctgagggcaaactgctgaaaaacaaagggtttaaggatgacatttctgaccatttgtgtgtttgttgttgttactgtttttgttttttttaatgtagacaatacagctttggaaggggaagtctcatacaggttataggtctttctctctctagatttcaggtgcttgcaactggactgcagactctaccaatcacgggcattttatcttctctgaacactgcagtttgttagactagagctgaggttggaggattccatagtgctttaaacgtgatgcatgttttaatggagaaaaaatagctggtttctattaattatatagacagtaaacaaaaaccttaatacttactatcttcttttcagaattagtttatttttgtcagttacagtcctagatatacttactgctggtacagttgtactctaagattggtatttgatattcactttactcacaagtagtgcgggaggccagctcctggcaggccctcgcgatgagcagtgggtcagctgcggtgtgggatgctggagtttggctgcaggctgacatcatttatttttgcatccctgtctgctttgttacaagctcccaggggaggtggggtttgtgtcttccaacttccctacatgcagaaactgctccctttgaactctcttggctgaacagcagattactgacagacaatctgtgatatggtgttttatacgcttcctcgtacgctggggccaaggcagtatacattcctctgactttatactgttattactgcatttattatttgctatattaatagctactaactagaaattagatgaagcaagcatgacagacacagctgtggaggtcacagctgctcctttttggtcaatgagcgtttctatcccctccccctggggtgtgctgtgtcccacctggcccaccagaggctcacgacgatggcacctgaccaggtgacgtgggcgtggtcacctcacctgcaaggctttgtggactctgcacaccgtatgacccccggttttacagtttttagctgttgaattttggaaattggcactgggtgaaaaggtcggaggactggctcttgtagtcacagagtggctgcaggcctttgaaaagtggaggaaagaaaagcccttctccttgccccgcacacatttcactcccactgtactgggcttccaagctttggcattcaggcccctatattttctgtaggaaaaatcgttgagaacacttttctatatgggtgattttgagaccatcgttacgctgtgcgtaaagaatgtacagagaaatttgtaggtattttttgaagaacattaatttgttaatgatatgtagctatttaatttttccctttcctattgtaatcattcattttttttgttgttcggaaaaaaaaagttgatctttttttttgtcgtagatttgtctgtaaaagtgcaggaacagttattctatgagaacactgcatctgcattcatagccacgagtttgttattgctacaggctactgagcgtcgtaacaggaaaaccacccacagctgaccggctcggtggaggacactcctgggacaggtctctttgtcagtgaacaagggcgtcactctgggaggggtcggcggtgctggcggccgggtccctggtgcactgacctatctgggataggcagtaccctggaggggggcctggggcagaggaggcagcagaaaaccaaacatttcactgagaaagccccctccctgctctaagaaggggctccgtgaagttcttcccagagccgcgctgcctgcagtgcgctctgaccttctcttcatgtgtgtaaatctgtaatataccattctctgtggcctgtttttcctggaagaagaaaaaaaaaggtttggcaggccatctttttttgtacttaaaagtagccttaagaacaataataaagtgctcttaaacc

SEQ ID NO: 369179 - DNA, 2936 bp, Homo sapiens
agaaaagtgacctgcccaagtgcctgacttagccgggggaggtgggttctgtctgcagagcccacgctgaccgtggcagccagtccggctctgggctgcctgagggagggtgctgcaaccgtgcctgtctgtctgcagccacctgtgtctgactgcctgccttcctgcttgcctgcagctgccaccacctgtgaccccgtggtggaggagcatttccgcaggagcctgggcaagaattacaaggagcccgagccggcacccaactccgtgtccatcacgggctccgtggacgaccactttgccaaagctctgggtgacacgtggctccagatcaaagcggccaaggacggagcatccagcagccctgagtccgcctctcgcaggggccagcccgccagcccctctgcccacatggtcagccacagtcactccccctctgtggtctcctgaagggagcgcctcctccaacaacacgtggatctgcatggtttgcctgagctttgaacagtcagtacttaaaaaaaaaaaaatcatgggggtggggtggggggaagggaagggatggtttatttgcaaaaaccatgttgttgggatttgtgttctgtttttgtacttgcttggtatccgtacaagggggccctcaaacatgatagcaggaactacgcgtggaacatctgtctaatgtagcatccttacttcctgcctcagttaccaaagaaacctctgatgcaggtctgctgccccgacggggccaggactccacagcgctttctcagtcacaagccatgatgaattggtgactcagacgctttgtgctttttcctttgcttcttgagaccggggtgtgtgtggctcagcttccacggcgtgtttggttcggtccatgtgtgtgcgtgtgtatacttgaagagaactgtcgtgtctgatttgcactattggaggaggactaaagttgcctgacaactttatgtgttatgccagaactctgagggcaaactgctgaaaaacaaagggtttaaggatgacatttctgaccatttgtgtgtttgttgttgttactgtttttgttttttttaatgtagacaatacagctttggaaggggaagtctcatacaggttataggtctttctctctctagatttcaggtgcttgcaactggactgcagactctaccaatcacgggcattttatcttctctgaacactgcagtttgttagactagagctgaggttggaggattccatagtgctttaaacgtgatgcatgttttaatggagaaaaaatagctggtttctattaattatatagacagtaaacaaaaaccttaatacttactatcttcttttcagaattagtttatttttgtcagttacagtcctagatatacttactgctggtacagttgtactctaagattggtatttgatattcactttactcacaagtagtgcgggaggccagctcctggcaggccctcgcgatgagcagtgggtcagctgcggtgtgggatgctggagtttggctgcaggctgacatcatttatttttgcatccctgtctgctttgttacaagctcccaggggaggtggggtttgtgtcttccaacttccctacatgcagaaactgctccctttgaactctcttggctgaacagcagattactgacagacaatctgtgatatggtgttttatacgcttcctcgtacgctggggccaaggcagtatacattcctctgactttatactgttattactgcatttattatttgctatattaatagctactaactagaaattagatgaagcaagcatgacagacacagctgtggaggtcacagctgctcctttttggtcaatgagcgtttctatcccctccccctggggtgtgctgtgtcccacctggcccaccagaggctcacgacgatggcacctgaccaggtgacgtgggcgtggtcacctcacctgcaaggctttgtggactctgcacaccgtatgacccccggttttacagtttttagctgttgaattttggaaattggcactgggtgaaaaggtcggaggactggctcttgtagtcacagagtggctgcaggcctttgaaaagtggaggaaagaaaagcccttctccttgccccgcacacatttcactcccactgtactgggcttccaagctttggcattcaggcccctatattttctgtaggaaaaatcgttgagaacacttttctatatgggtgattttgagaccatcgttacgctgtgcgtaaagaatgtacagagaaatttgtaggtattttttgaagaacattaatttgttaatgatatgtagctatttaatttttccctttcctattgtaatcattcattttttttgttgttcggaaaaaaaaagttgatctttttttttgtcgtagatttgtctgtaaaagtgcaggaacagttattctatgagaacactgcatctgcattcatagccacgagtttgttattgctacaggctactgagcgtcgtaacaggaaaaccacccacagctgaccggctcggtggaggacactcctgggacaggtctctttgtcagtgaacaagggcgtcactctgggaggggtcggcggtgctggcggccgggtccctggtgcactgacctatctgggataggcagtaccctggaggggggcctggggcagaggaggcagcagaaaaccaaacatttcactgagaaagccccctccctgctctaagaaggggctccgtgaagttcttcccagagccgcgctgcctgcagtgcgctctgaccttctcttcatgtgtgtaaatctgtaatataccattctctgtggcctgtttttcctggaagaagaaaaaaaaaggtttggcaggccatctttttttgtacttaaaagtagccttaagaacaataataaagtgctcttaaacc

SEQ ID NO: 369180 - DNA, 4166 bp, Homo sapiens
  misc_feature (29)..(29): n is a, c, g, or t
cccgccctcggcgcccccgcccctccagnaaggggaggaggcgaggggagcccgccgcggaggccgagcgagcggcgcccagcccagcctggcgactggggaccccggcacatgaggtggacgcccccggggaagacttgggtgcacagccaggcgagaaggtcttgagtcagacagagcaccagccttggggaccctggaccactatcatggagactgagagcgagcagaactccaattccaccaatgggagttctagctcagggggcagctctcggccccagatagctcaaatgtcactttatgaacgacaagcagtgcaggctctgcaagcactgcagcggcagcccaatgcagctcagtatttccaccagttcatgctccagcagcagctcagtaatgcccagctgcatagcctggctgccgtccagcaggccacaattgctgccagtcggcaggccagctccccaaacaccagcactacacagcagcagactaccaccacccaggcctcgatcaatctggccaccacatcggccgcccagctcatcagccgatcccagagtgtgagctctcccagtgctaccaccttgacccaatctgtgctactggggaacaccacctccccacccctcaaccagtctcaggcccagatgtatctacggccacagctgggaaacctattgcaggtaaaccgaacccctgggtcggaatgtgcctctagcctcccaactcatcctgatgcctaatggggcggtggctgcagtccagcaggaggtgccatctgctcagtctcctggagttcatgcagatgcagatcaggttcagaacttggcagtaaggaatcaacaggcctcagctcaaggacctcagatgcaaggctccactcagaaggccattcctccaggagcctcccctgtctctagcctctcccaggcctctagccaggccctagcggtggcacaggcttcctctggggccacaaaccagtccctcaaccttagtcaagctggtggaggcagtgggaatagcatcccagggtccatgggtccaggtggaggtgggcaggcacatggtggtttgggtcagttgccttcctcaggaatgggtggtgggagctgtcccaggaagggtacaggagtggtgcagcccttgcctgcagcccaaacagtgactgtgagccagggcagccagacagaggcagaaagtgcagcagccaagaaggcagaagcagatgggagtggccagcagaatgtgggcatgaacctgacacggacagccacacctgcgcccagccagacacttattagctcagccacctacacacagatccagccccattcactgattcagcaacagcaacagatccacctccagcagaaacaggtggtgatccagcagcagattgccatccaccaccagcagcagttccagcaccggcagtcccagctccttcacacagctacacacctccagttggcgcagcagcagcagcagcaacaacagcaacagcagcaacagcagcagccgcaagccaccaccctcactgcccctcagccaccacaggtcccacctactcagcaggtcccaccttcccagtcccagcagcaagcccaaaccctggtcgttcagcccatgcttcagtcttcacccttgtctcttccacctgatgcagcccctaagccaccaattcccatccaatccaaaccacctgtagcacctatcaagccgcctcagttaggggccgctaagatgtcagctgcccagcaaccaccaccccatatccctgtgcaagttgtaggcactcgacagccaggtacagcccaggcacaggctttggggttggcacagctggcagctgctgtacctacttcccgggggatgccaggtacagtgcagtctggtcaggcccatttggcctcctcgccaccttcatcccaggctcctggtgcactgcaggagtgccctcccacattggcccctgggatgacccttgctcctgtgcaggggacagcacatgtggtaaagggtggggctaccacctcctcacctgttgtagcccaggtccctgctgccttctatatgcagtctgtgcacttgccgggtaaaccccagacattggctgtcaaacgcaaggctgactctgaggaggagagagatgatgtctccacattgggttcaatgcttcctgccaaggcatctccagtagcagaaagcccaaaagtcatggacgagaagagcagtcttggagaaaaagctgaatcagtggctaatgtgaatgctaatactccaagcagtgaactagtagccttgacccccgccccttcagtaccgcctcctacactagccatggtgtctagacaaatgggtgactcaaaacccccacaggccatcgtgaagccccagattctcacccacatcattgaaggctttgttatccaggaaggagcagaacctttcccggtgggttgttctcagttactgaaggagtctgagaagccactacagactggccttccgacagggctgactgagaatcagtcaggtggccctttgggagtggacagcccatctgctgagttagataagaaggcgaatctcctgaagtgcgagtactgtgggaagtacgcccccgcagagcagtttcgtggctctaagaggttctgctccatgacttgcgctaagaggtacaatgtgagctgtagccatcagttccggctgaagaggaaaaaaatgaaagagtttcaagaagccaactatgctcgcgttcgcaggcgtggaccccgccgcagctcctctgacattgcccgtgccaagattcagggcaagtgccaccggggtcaagaagactctagccggggttcagataattccagttatgatgaagcactctctccaacatctcctgggcctttatcagtaagagctgggcatggagaacgtgacctggggaatcccaatacagctccacctacaccggaattacatggcatcaaccctgtgttcctgtccagtaatcccagccgttggagtgtagaggaggtgtacgagtttattgcttctctccaaggctgccaagagattgcagaggaatttcgctcacaggagattgatggacaggcccttttattacttaaagaagaacatcttatgagtgccatgaacatcaagctgggccctgccctcaagatctgcgccaagataaatgtcctcaaggagacctaaggtggccctcttgcacaaaccagcctaaggcagacactctccactgtccaggttataacctggtaccagcagactttgcagggaagaaagagttgttccaatcatgtaaccttctgtaggggattactgagacagggaagagaagtgcaagaattggttgctggtgctacatggcggcagctttgacattttctctgggttctactttattttttaaaatctttacagttctcaccatttcacgtaccttaatccaatctttataaaagaggcagtctagagaactaggactgctcagccttatcctggagtggagcatttagcccaggtcttaattctccaagaggaggaatacatagtatggtaaggcaaggaactgggtggaatgtcaggttgcctgcccaatgggagaggtagggtttttctagcttgtgtgacagaagtagcaaaatctggtcctcccccctcccagtgtagctgtggctcagagttttttctttttgttgtcacttactcccttgtgattgaattttttctcctgcatccatggcaggatccccagccagtatagagacttggttggcatcttctgctgcagggactaaaagtatttgactggggcacatgtggctgttgtcattctttctgcatcccactgttcccctccaatttatgttattttctaccctgtttttcagttccatctctgctctgtcctatagctttataaaaccagagtgtgtggggctgaggtcaggagtataagtacctgccttaggcactattccttatataacaaaaatattaaatatttttttcctcagtaaaaggatgaaaattggtttcagttgtcttactctattccagtctttgcccactttcacacaaatgacaaggccaatatgttttgtttgttttttaatcattaagagtttttgtac

SEQ ID NO: 369181 - DNA, 3661 bp, Homo sapiens
  misc_feature (29)..(29): n is a, c, g, or t
cccgccctcggcgcccccgcccctccagnaaggggaggaggcgaggggagcccgccgcggaggccgagcgagcggcgcccagcccagcctggcgactggggaccccggcacatgaggtggacgcccccggggaagacttgggtgcacagccaggcgagaaggtcttgagtcagacagagcaccagccttggggaccctggaccactatcatggagactgagagcgagcagaactccaattccaccaatgggagttctagctcagggggcagctctcggccccagatagctcaaatgtcactttatgaacgacaagcagtgcaggctctgcaagcactgcagcggcagcccaatgcagctcagtatttccaccagttcatgctccagcagcagctcagtaatgcccagctgcatagcctggctgccgtccagcaggccacaattgctgccagtcggcaggccagctccccaaacaccagcactacacagcagcagactaccaccacccaggcctcgatcaatctggccaccacatcggccgcccagctcatcagccgatcccagagtgtgagctctcccagtgctaccaccttgacccaatctgtgctactggggaacaccacctccccacccctcaaccagtctcaggcccagatgtatctacggccacagctgggaaacctattgcaggtaaaccgaacccctgggtcggaatgtgcctctagcctcccaactcatcctgatgcctaatggggcggtggctgcagtccagcaggaggtgccatctgctcagtctcctggagttcatgcagatgcagatcaggttcagaacttggcagtaaggaatcaacaggcctcagctcaaggacctcagatgcaaggctccactcagaaggccattcctccaggagcctcccctgtctctagcctctcccaggcctctagccaggccctagcggtggcacaggcttcctctggggccacaaaccagtccctcaaccttagtcaagctggtggaggcagtgggaatagcatcccagggtccatgggtccaggtggaggtgggcaggcacatggtggtttgggtcagttgccttcctcaggaatgggtggtgggagctgtcccaggaagggtacaggagtggtgcagcccttgcctgcagcccaaacagtgactgtgagccagggcagccagacagaggcagaaagtgcagcagccaagaaggcagaagcagatgggagtggccagcagaatgtgggcatgaacctgacacggacagccacacctgcgcccagccagacacttattagctcagccacctacacacagatccagccccattcactgattcagcaacagcaacagatccacctccagcagaaacaggtggtgatccagcagcagattgccatccaccaccagcagcagttccagcaccggcagtcccagctccttcacacagctacacacctccagttggcgcagcagcagcagcagcaacaacagcaacagcagcaacagcagcagccgcaagccaccaccctcactgcccctcagccaccacaggtcccacctactcagcaggtcccaccttcccaggtaaaccccagacattggctgtcaaacgcaaggctgactctgaggaggagagagatgatgtctccacattgggttcaatgcttcctgccaaggcatctccagtagcagaaagcccaaaagtcatggacgagaagagcagtcttggagaaaaagctgaatcagtggctaatgtgaatgctaatactccaagcagtgaactagtagccttgacccccgccccttcagtaccgcctcctacactagccatggtgtctagacaaatgggtgactcaaaacccccacaggccatcgtgaagccccagattctcacccacatcattgaaggctttgttatccaggaaggagcagaacctttcccggtgggttgttctcagttactgaaggagtctgagaagccactacagactggccttccgacagggctgactgagaatcagtcaggtggccctttgggagtggacagcccatctgctgagttagataagaaggcgaatctcctgaagtgcgagtactgtgggaagtacgcccccgcagagcagtttcgtggctctaagaggttctgctccatgacttgcgctaagaggtacaatgtgagctgtagccatcagttccggctgaagaggaaaaaaatgaaagagtttcaagaagccaactatgctcgcgttcgcaggcgtggaccccgccgcagctcctctgacattgcccgtgccaagattcagggcaagtgccaccggggtcaagaagactctagccggggttcagataattccagttatgatgaagcactctctccaacatctcctgggcctttatcagtaagagctgggcatggagaacgtgacctggggaatcccaatacagctccacctacaccggaattacatggcatcaaccctgtgttcctgtccagtaatcccagccgttggagtgtagaggaggtgtacgagtttattgcttctctccaaggctgccaagagattgcagaggaatttcgctcacaggagattgatggacaggcccttttattacttaaagaagaacatcttatgagtgccatgaacatcaagctgggccctgccctcaagatctgcgccaagataaatgtcctcaaggagacctaaggtggccctcttgcacaaaccagcctaaggcagacactctccactgtccaggttataacctggtaccagcagactttgcagggaagaaagagttgttccaatcatgtaaccttctgtaggggattactgagacagggaagagaagtgcaagaattggttgctggtgctacatggcggcagctttgacattttctctgggttctactttattttttaaaatctttacagttctcaccatttcacgtaccttaatccaatctttataaaagaggcagtctagagaactaggactgctcagccttatcctggagtggagcatttagcccaggtcttaattctccaagaggaggaatacatagtatggtaaggcaaggaactgggtggaatgtcaggttgcctgcccaatgggagaggtagggtttttctagcttgtgtgacagaagtagcaaaatctggtcctcccccctcccagtgtagctgtggctcagagttttttctttttgttgtcacttactcccttgtgattgaattttttctcctgcatccatggcaggatccccagccagtatagagacttggttggcatcttctgctgcagggactaaaagtatttgactggggcacatgtggctgttgtcattctttctgcatcccactgttcccctccaatttatgttattttctaccctgtttttcagttccatctctgctctgtcctatagctttataaaaccagagtgtgtggggctgaggtcaggagtataagtacctgccttaggcactattccttatataacaaaaatattaaatatttttttcctcagtaaaaggatgaaaattggtttcagttgtcttactctattccagtctttgcccactttcacacaaatgacaaggccaatatgttttgtttgttttttaatcattaagagtttttgtac

SEQ ID NO: 369182 - DNA, 2384 bp, Homo sapiens
ctattctgggtttttgggtatgtaataagttagatcaagatagccttaaccaaatcagtctttgaaaaaacaacagttcttggttggtctacgtgaatacagggtctcaagacctaggtcaggactaaatcatgttacattttcttttgtcctgatggaaagttactaggaatgaccaggaattttagtgtaccatgggaagtagataaattgggaaatctggaactaagaaaattttctttgaacatatggtaataattgtggttccttattatccttcatttgtacatctttgtttctttcctattctttacggtatagggtaaaccccagacattggctgtcaaacgcaaggctgactctgaggaggagagagatgatgtctccacattgggttcaatgcttcctgccaaggcatctccagtagcagaaagcccaaaagtcatggacgagaagagcagtcttggagaaaaagctgaatcagtggctaatgtgaatgctaatactccaagcagtgaactagtagccttgacccccgccccttcagtaccgcctcctacactagccatggtgtctagacaaatgggtgactcaaaacccccacaggccatcgtgaagccccagattctcacccacatcattgaaggctttgttatccaggaaggagcagaacctttcccggtgggttgttctcagttactgaaggagtctgagaagccactacagactggccttccgacagggctgactgagaatcagtcaggtggccctttgggagtggacagcccatctgctgagttagataagaaggcgaatctcctgaagtgcgagtactgtgggaagtacgcccccgcagagcagtttcgtggctctaagaggttctgctccatgacttgcgctaagaggtacaatgtgagctgtagccatcagttccggctgaagaggaaaaaaatgaaagagtttcaagaagccaactatgctcgcgttcgcaggcgtggaccccgccgcagctcctctgacattgcccgtgccaagattcagggcaagtgccaccggggtcaagaagactctagccggggttcagataattccagttatgatgaagcactctctccaacatctcctgggcctttatcagtaagagctgggcatggagaacgtgacctggggaatcccaatacagctccacctacaccggaattacatggcatcaaccctgtgttcctgtccagtaatcccagccgttggagtgtagaggaggtgtacgagtttattgcttctctccaaggctgccaagagattgcagaggaatttcgctcacaggagattgatggacaggcccttttattacttaaagaagaacatcttatgagtgccatgaacatcaagctgggccctgccctcaagatctgcgccaagataaatgtcctcaaggagacctaaggtggccctcttgcacaaaccagcctaaggcagacactctccactgtccaggttataacctggtaccagcagactttgcagggaagaaagagttgttccaatcatgtaaccttctgtaggggattactgagacagggaagagaagtgcaagaattggttgctggtgctacatggcggcagctttgacattttctctgggttctactttattttttaaaatctttacagttctcaccatttcacgtaccttaatccaatctttataaaagaggcagtctagagaactaggactgctcagccttatcctggagtggagcatttagcccaggtcttaattctccaagaggaggaatacatagtatggtaaggcaaggaactgggtggaatgtcaggttgcctgcccaatgggagaggtagggtttttctagcttgtgtgacagaagtagcaaaatctggtcctcccccctcccagtgtagctgtggctcagagttttttctttttgttgtcacttactcccttgtgattgaattttttctcctgcatccatggcaggatccccagccagtatagagacttggttggcatcttctgctgcagggactaaaagtatttgactggggcacatgtggctgttgtcattctttctgcatcccactgttcccctccaatttatgttattttctaccctgtttttcagttccatctctgctctgtcctatagctttataaaaccagagtgtgtggggctgaggtcaggagtataagtacctgccttaggcactattccttatataacaaaaatattaaatatttttttcctcagtaaaaggatgaaaattggtttcagttgtcttactctattccagtctttgcccactttcacacaaatgacaaggccaatatgttttgtttgttttttaatcattaagagtttttgtac

SEQ ID NO: 369183 - DNA, 1611 bp, Homo sapiens
  misc_feature (29)..(29): n is a, c, g, or t
cccgccctcggcgcccccgcccctccagnaaggggaggaggcgaggggagcccgccgcggaggccgagcgagcggcgcccagcccagcctggcgactggggaccccggcacatgaggtggacgcccccggggaagacttgggtgcacagccaggcgagaaggtcttgagtcagacagagcaccagccttggggaccctggaccactatcatggagactgagagcgagcagaactccaattccaccaatgggagttctagctcagggggcagctctcggccccagatagctcaaatgtcactttatgaacgacaagcagtgcaggctctgcaagcactgcagcggcagcccaatgcagctcagtatttccaccagttcatgctccagcagcagctcagtaatgcccagctgcatagcctggctgccgtccagcaggccacaattgctgccagtcggcaggccagctccccaaacaccagcactacacagcagcagactaccaccacccaggcctcgatcaatctggccaccacatcggccgcccagctcatcagccgatcccagagtgtgagctctcccagtgctaccaccttgacccaatctgtgctactggggaacaccacctccccacccctcaaccagtctcaggcccagatgtatctacggccacagctgggaaacctattgcaggtaaaccgaacccctgggtcggaatgtgcctctagcctcccaactcatcctgatgcctaatggggcggtggctgcagtccagcaggaggtgccatctgctcagtctcctggagttcatgcagatgcagatcaggttcagaacttggcagtaaggaatcaacaggcctcagctcaaggacctcagatgcaaggctccactcagaaggccattcctccaggagcctcccctgtctctagcctctcccaggcctctagccaggccctagcggtggcacaggcttcctctggggccacaaaccagtccctcaaccttagtcaagctggtggaggcagtgggaatagcatcccagggtccatgggtccaggtggaggtgggcaggcacatggtggtttgggtcagttgccttcctcaggaatgggtggtgggagctgtcccaggaagggtacaggagtggtgcagcccttgcctgcagcccaaacagtgactgtgagccagggcagccagacagaggcagaaagtgcagcagccaagaaggcagaagcagatgggagtggccagcagaatgtgggcatgaacctgacacggacagccacacctgcgcccagccagacacttattagctcagccacctacacacagatccagccccattcactgattcagcaacagcaacagatccacctccagcagaaacaggtggtgatccagcagcagattgccatccaccaccagcagcagttccagcaccggcagtcccagctccttcacacagctacacacctccagttggcgcagcagcagcagcagcaacaacagcaacagcagcaacagcagcagccgcaagccaccacccttagtggacaaaaaatctaaaacaggtcacaacgtaatgagcagtccaacatttccgagcttcccgta

SEQ ID NO: 369184 - DNA, 1590 bp, Homo sapiens
  misc_feature (29)..(29): n is a, c, g, or t
cccgccctcggcgcccccgcccctccagnaaggggaggaggcgaggggagcccgccgcggaggccgagcgagcggcgcccagcccagcctggcgactggggaccccggcacatgaggtggacgcccccggggaagacttgggtgcacagccaggcgagaaggtcttgagtcagacagagcaccagccttggggaccctggaccactatcatggagactgagagcgagcagaactccaattccaccaatgggagttctagctcagggggcagctctcggccccagatagctcaaatgtcactttatgaacgacaagcagtgcaggctctgcaagcactgcagcggcagcccaatgcagctcagtatttccaccagttcatgctccagcagcagctcagtaatgcccagctgcatagcctggctgccgtccagcaggccacaattgctgccagtcggcaggccagctccccaaacaccagcactacacagcagcagactaccaccacccaggcctcgatcaatctggccaccacatcggccgcccagctcatcagccgatcccagagtgtgagctctcccagtgctaccaccttgacccaatctgtgctactggggaacaccacctccccacccctcaaccagtctcaggcccagatgtatctacggccacagctgggaaacctattgcaggtaaaccgaacccctgggtcggaatgtgcctctagcctcccaactcatcctgatgcctaatggggcggtggctgcagtccagcaggaggtgccatctgctcagtctcctggagttcatgcagatgcagatcaggttcagaacttggcagtaaggaatcaacaggcctcagctcaaggacctcagatgcaaggctccactcagaaggccattcctccaggagcctcccctgtctctagcctctcccaggcctctagccaggccctagcggtggcacaggcttcctctggggccacaaaccagtccctcaaccttagtcaagctggtggaggcagtgggaatagcatcccagggtccatgggcccaatgggagaggtagggtttttctagcttgtgtgacagaagtagcaaaatctggtcctcccccctcccagtgtagctgtggctcagagttttttctttttgttgtcacttactcccttgtgattgaattttttctcctgcatccatggcaggatccccagccagtatagagacttggttggcatcttctgctgcagggactaaaagtatttgactggggcacatgtggctgttgtcattctttctgcatcccactgttcccctccaatttatgttattttctaccctgtttttcagttccatctctgctctgtcctatagctttataaaaccagagtgtgtggggctgaggtcaggagtataagtacctgccttaggcactattccttatataacaaaaatattaaatatttttttcctcagtaaaaggatgaaaattggtttcagttgtcttactctattccagtctttgcccactttcacacaaatgacaaggccaatatgttttgtttgttttttaatcattaagagtttttgtac

SEQ ID NO: 369185 - DNA, 3458 bp, Homo sapiens
aactcaggggcgagctgctaactcaggggcgagctgctaactcaggggcgagctgcagtccagcaggaggtgccatctgctcagtctcctggagttcatgcagatgcagatcaggttcagaacttggcagtaaggaatcaacaggcctcagctcaaggacctcagatgcaaggctccactcagaaggccattcctccaggagcctcccctgtctctagcctctcccaggcctctagccaggccctagcggtggcacaggcttcctctggggccacaaaccagtccctcaaccttagtcaagctggtggaggcagtgggaatagcatcccagggtccatgggtccaggtggaggtgggcaggcacatggtggtttgggtcagttgccttcctcaggaatgggtggtgggagctgtcccaggaagggtacaggagtggtgcagcccttgcctgcagcccaaacagtgactgtgagccagggcagccagacagaggcagaaagtgcagcagccaagaaggcagaagcagatgggagtggccagcagaatgtgggcatgaacctgacacggacagccacacctgcgcccagccagacacttattagctcagccacctacacacagatccagccccattcactgattcagcaacagcaacagatccacctccagcagaaacaggtggtgatccagcagcagattgccatccaccaccagcagcagttccagcaccggcagtcccagctccttcacacagctacacacctccagttggcgcagcagcagcagcagcaacaacagcaacagcagcaacagcagcagccgcaagccaccaccctcactgcccctcagccaccacaggtcccacctactcagcaggtcccaccttcccagtcccagcagcaagcccaaaccctggtcgttcagcccatgcttcagtcttcacccttgtctcttccacctgatgcagcccctaagccaccaattcccatccaatccaaaccacctgtagcacctatcaagccgcctcagttaggggccgctaagatgtcagctgcccagcaaccaccaccccatatccctgtgcaagttgtaggcactcgacagccaggtacagcccaggcacaggctttggggttggcacagctggcagctgctgtacctacttcccgggggatgccaggtacagtgcagtctggtcaggcccatttggcctcctcgccaccttcatcccaggctcctggtgcactgcaggagtgccctcccacattggcccctgggatgacccttgctcctgtgcaggggacagcacatgtggtaaagggtggggctaccacctcctcacctgttgtagcccaggtccctgctgccttctatatgcagtctgtgcacttgccgggtaaaccccagacattggctgtcaaacgcaaggctgactctgaggaggagagagatgatgtctccacattgggttcaatgcttcctgccaaggcatctccagtagcagaaagcccaaaagtcatggacgagaagagcagtcttggagaaaaagctgaatcagtggctaatgtgaatgctaatactccaagcagtgaactagtagccttgacccccgccccttcagtaccgcctcctacactagccatggtgtctagacaaatgggtgactcaaaacccccacaggccatcgtgaagccccagattctcacccacatcattgaaggctttgttatccaggaaggagcagaacctttcccggtgggttgttctcagttactgaaggagtctgagaagccactacagactggccttccgacagggctgactgagaatcagtcaggtggccctttgggagtggacagcccatctgctgagttagataagaaggcgaatctcctgaagtgcgagtactgtgggaagtacgcccccgcagagcagtttcgtggctctaagaggttctgctccatgacttgcgctaagaggtacaatgtgagctgtagccatcagttccggctgaagaggaaaaaaatgaaagagtttcaagaagccaactatgctcgcgttcgcaggcgtggaccccgccgcagctcctctgacattgcccgtgccaagattcagggcaagtgccaccggggtcaagaagactctagccggggttcagataattccagttatgatgaagcactctctccaacatctcctgggcctttatcagtaagagctgggcatggagaacgtgacctggggaatcccaatacagctccacctacaccggaattacatggcatcaaccctgtgttcctgtccagtaatcccagccgttggagtgtagaggaggtgtacgagtttattgcttctctccaaggctgccaagagattgcagaggaatttcgctcacaggagattgatggacaggcccttttattacttaaagaagaacatcttatgagtgccatgaacatcaagctgggccctgccctcaagatctgcgccaagataaatgtcctcaaggagacctaaggtggccctcttgcacaaaccagcctaaggcagacactctccactgtccaggttataacctggtaccagcagactttgcagggaagaaagagttgttccaatcatgtaaccttctgtaggggattactgagacagggaagagaagtgcaagaattggttgctggtgctacatggcggcagctttgacattttctctgggttctactttattttttaaaatctttacagttctcaccatttcacgtaccttaatccaatctttataaaagaggcagtctagagaactaggactgctcagccttatcctggagtggagcatttagcccaggtcttaattctccaagaggaggaatacatagtatggtaaggcaaggaactgggtggaatgtcaggttgcctgcccaatgggagaggtagggtttttctagcttgtgtgacagaagtagcaaaatctggtcctcccccctcccagtgtagctgtggctcagagttttttctttttgttgtcacttactcccttgtgattgaattttttctcctgcatccatggcaggatccccagccagtatagagacttggttggcatcttctgctgcagggactaaaagtatttgactggggcacatgtggctgttgtcattctttctgcatcccactgttcccctccaatttatgttattttctaccctgtttttcagttccatctctgctctgtcctatagctttataaaaccagagtgtgtggggctgaggtcaggagtataagtacctgccttaggcactattccttatataacaaaaatattaaatatttttttcctcagtaaaaggatgaaaattggtttcagttgtcttactctattccagtctttgcccactttcacacaaatgacaaggccaatatgttttgtttgttttttaatcattaagagtttttgtac

SEQ ID NO: 369186 - DNA, 2186 bp, Homo sapiens
  misc_feature (29)..(29): n is a, c, g, or t
cccgccctcggcgcccccgcccctccagnaaggggaggaggcgaggggagcccgccgcggaggccgagcgagcggcgcccagcccagcctggcgactggggaccccggcacatgaggtggacgcccccggggaagacttgggtgcacagccaggcgagaaggtcttgagtcagacagagcaccagccttggggaccctggaccactatcatggagactgagagcgagcagaactccaattccaccaatgggagttctagctcagggggcagctctcggccccagatagctcaaatgtcactttatgaacgacaagcagtgcaggctctgcaagcactgcagcggcagcccaatgcagctcagtatttccaccagttcatgctccagcagcagctcagtaatgcccagctgcatagcctggctgccgtccagcaggccacaattgctgccagtcggcaggccagctccccaaacaccagcactacacagcagcagactaccaccacccaggcctcgatcaatctggccaccacatcggccgcccagctcatcagccgatcccagagtgtgagctctcccagtgctaccaccttgacccaatctgtgctactggggaacaccacctccccacccctcaaccagtctcaggcccagatgtatctacggccacagctgggaaacctattgcaggtaaaccgaacccctgggtcggaatgtgcctctagcctcccaactcatcctgatgcctaatggggcggtggctgcagtccagcaggaggtgccatctgctcagtctcctggagttcatgcagatgcagatcaggttcagaacttggcagtaaggaatcaacaggcctcagctcaaggacctcagatgcaaggctccactcagaaggccattcctccaggagcctcccctgtctctagcctctcccaggcctctagccaggccctagcggtggcacaggcttcctctggggccacaaaccagtccctcaaccttagtcaagctggtggaggcagtgggaatagcatcccagggtccatgggtccaggtggaggtgggcaggcacatggtggtttgggtcagttgccttcctcaggaatgggtggtgggagctgtcccaggaagggtacaggagtggtgcagcccttgcctgcagcccaaacagtgactgtgagccagggcagccagacagaggcagaaagtgcagcagccaagaaggcagaagcagatgggagtggccagcagaatgtgggcatgaacctgacacggacagccacacctgcgcccagccagacacttattagctcagccacctacacacagatccagccccattcactgattcagcaacagcaacagatccacctccagcagaaacaggtggtgatccagcagcagattgccatccaccaccagcagcagttccagcaccggcagtcccagctccttcacacagctacacacctccagttggcgcagcagcagcagcagcaacaacagcaacagcagcaacagcagcagccgcaagccaccaccctcactgcccctcagccaccacaggtcccacctactcagcaggtcccaccttcccagtcccagcagcaagcccaaaccctggtcgttcagcccatgcttcagtcttcacccttgtctcttccacctgatgcagcccctaagccaccaattcccatccaatccaaaccacctgtagcacctatcaagccgcctcagttaggggccgctaagatgtcagctgcccagcaaccaccaccccatatccctgtgcaagttgtaggcactcgacagccaggtacagcccaggcacaggctttggggttggcacagctggcagctgctgtacctacttcccgggggatgccaggtacagtgcagtctggtcaggcccatttggcctcctcgccaccttcatcccaggctcctggtgcactgcaggagtgccctcccacattggcccctgggatgacccttgctcctgtgcaggggacagcacatgtggtaaagggtggggctaccacctcctcacctgttgtagcccaggtccctgctgccttctatatgcagtctgtgcacttgccggtgagtgatgtctgatggttttgagggcactattatgcatgagagtggacctgggctaagtggaaatagagcttaattgaata

SEQ ID NO: 369187 - DNA, 1661 bp, Homo sapiens
  misc_feature (29)..(29): n is a, c, g, or t
cccgccctcggcgcccccgcccctccagnaaggggaggaggcgaggggagcccgccgcggaggccgagcgagcggcgcccagcccagcctggcgactggggaccccggcacatgaggtggacgcccccggggaagacttgggtgcacagccaggcgagaaggtcttgagtcagacagagcaccagccttggggaccctggaccactatcatggagactgagagcgagcagaactccaattccaccaatgggagttctagctcagggggcagctctcggccccagatagctcaaatgtcactttatgaacgacaagcagtgcaggctctgcaagcactgcagcggcagcccaatgcagctcagtatttccaccagttcatgctccagcagcagctcagtaatgcccagctgcatagcctggctgccgtccagcaggccacaattgctgccagtcggcaggccagctccccaaacaccagcactacacagcagcagactaccaccacccaggcctcgatcaatctggccaccacatcggccgcccagctcatcagccgatcccagagtgtgagctctcccagtgctaccaccttgacccaatctgtgctactggggaacaccacctccccacccctcaaccagtctcaggcccagatgtatctacggccacagctgggaaacctattgcaggtaaaccgaacccctgggtcggaatgtgcctctagcctcccaactcatcctgatgcctaatggggcggtggctgcagtccagcaggaggtgccatctgctcagtctcctggagttcatgcagatgcagatcaggttcagaacttggcagtaaggaatcaacaggcctcagctcaaggacctcagatgcaaggctccactcagaaggccattcctccaggagcctcccctgtctctagcctctcccaggcctctagccaggccctagcggtggcacaggcttcctctggggccacaaaccagtccctcaaccttagtcaagctggtggaggcagtgggaatagcatcccagggtccatgggtccaggtggaggtgggcaggcacatggtggtttgggtcagttgccttcctcaggaatgggtggtgggagctgtcccaggaagggtacaggagtggtgcagcccttgcctgcagcccaaacagtgactgtgagccagggcagccagacagaggcagaaagtgcagcagccaagaaggcagaagcagatgggagtggccagcagaatgtgggcatgaacctgacacggacagccacacctgcgcccagccagacacttattagctcagccacctacacacagatccagccccattcaatgtggctgttgtcattctttctgcatcccactgttcccctccaatttatgttattttctaccctgtttttcagttccatctctgctctgtcctatagctttataaaaccagagtgtgtggggctgaggtcaggagtataagtacctgccttaggcactattccttatataacaaaaatattaaatatttttttcctcagtaaaaggatgaaaattggtttcagttgtcttactctattccagtctttgcccactttcacacaaatgacaaggccaatatgttttgtttgttttttaatcattaagagtttttgtac

SEQ ID NO: 369188 - DNA, 418 bp, Homo sapiens
actgatggtattataaggggcttcccccttcagtgggcactcattcttctccttcccgccattatgtgaagaaggacatgtttgcttccccttctgccatgattgtaagtttcctgaggcctccccagccatgctgaactgtgagttaattacacctctttcgtttataaattgttcagtctcaggtatgtcttatttagcagtgtaagaacagactaatatagtaaattggtgctgcagagagtggggtgctactgtaaaaatacctgaaaatgtggaagcgactttggaactgggtaacaggcagaggttggaacagtttgtaggactcagaagaagacaggaagatgtgggaaagtttggaacttcctagagacttgttgaatggctttgaccaaaagcctgatagcaatatgga

SEQ ID NO: 369189 - DNA, 4908 bp, Homo sapiens
atttgacctcgacagggaacgcaagcaaaaccacacatttaaaacagacttggtaaaatcagctcgttatttaaagaaacggacgattcctttttctctcctggtttagtcttcgacccacaggccccttgcttctttcgaacggcggctgtatcccatgaccttttcactttccaagccaacggactgggggtcgttacacacgcggagggcccggaacgcacggctcctcgcctgcaaattccgagcagtccggattttggggctgcctcccggccacaccagccagcagctcgcacccacatggaggcagggccctggccctcgccccggaccggcgcgtggcggggcgcgtgggtcttcgagggcccgcgacgcggcgcacatgccggtgcccgcctcccgcgtcggcgagaagacagggagctcggacacggggaggctgacccggagcctacccatgaggcagcgcgccggctgcacgagagcccccccctttccacggctcggctgccagctccgcaatgggagccgccgccgtcgccgcagtgtagtttttcgtgctcctccttttcctcctcctctttctcctcctcctcagggctccagtcaggccgatccgctccgctcacggaaggaaaacagaaataacttgctggcttgtctggagtcacatggtaattcaaaaatggcagaactgtttatggaatgtgaagaagaggagctggaaccatggcagaagaaagtaaaagaagttgaggatgacgatgatgatgagccaatctttgttggcgagatatcaagttcaaaaccagcaatttcaaatattttgaacagagttaaccccagctcatattcaaggggactaaagaatggtgcactcagtcgaggtattactgctgcattcaagcctacaagtcaacactacacgaatccaacatcaaatccagtgcctgcctcaccaataaattttcatcctgagtctagatcttcagatagttctgttattgttcagcctttttctaaacctggttatataacaaactcatcacgagttgtgtctaataagtcatcagagttactgtttgacttgacccaggatacaggattatcacattaccaagggggaccaacactttctatggcaggtatgagtgaaagttcatttttatcaaaacgtccttctacttctgaagtaaataatgttaatccaaagaagcctaaacccagcgaaagtgtttctggagcaaattcctcagctgtattaccttcagttaaatctccttcagtgacttcttcccaggctatgctagcaaaaggtacaaatacctcatcaaatcagtctaaaaatggaacaccttttccaagagcttgtccaaagtgcaacattcatttcaatcttttggatcctttgaaaaatcacatgaagtattgttgtccagacatgataaataactttttgggactggctaaaacagaattttcaagtacagtaaataaaaacacaactattgattcagagaaaggaaaattgatcatgttagttaatgacttttattatggaaaacatgaaggagatgtccaggaggaacagaagactcacacaacctttaaatgcttcagttgcttgaaaattctaaaaaataacattaggtttatgaaccacatgaaacaccatttggaacttgagaagcagagcagtgagagctgggaaaaccataccacctgccagcactgctaccgtcagtttcccacaccatttcagttgcagtgtcacatcgaaagtacacatacgccccatgaattttctactatttgtaaaatctgtgaattgtcatttgaaacagaacatgttcttttacaacatatgaaggacaatcataaacctggtgaaatgccatatgtctgccaggtttgtaattatagatcatcatcattttctgatgtagaaactcattttagaacatcccatgaaaacactaagaacttgctatgcccgttttgcctcaaagttattaaaattgcaacaccatatatgcatcattatatgaagcatcagaaaaaaggaatacatcgttgtacaaaatgcaggctgcagtttttgacatgcaaggagaaaatggatcataagactcaacaccatcgaacatttataaaacctaaacaactagaaggattgcctcctggaacaaaagttactattcgagcttcagttggacctctgcaatcaggagcttcacctacaccttccattagtgcaagtgcttctacccttcagctctcacctccaaggactaaaaatataactgctaaaaatcctgcaaaatctaatacaagtaaacctaatacaatcaaatccaacgcaagtaaacctaatacaagtaagcctaatggaagtaaatctaaatacaaaccaaaaatctctaatatgcaaaagaaacaaagcacattggctagtagcaataaaaaaagtaaagtcaatacagcattgaggaatttaaggtatcgtcggggcattcacaaatgcattgagtgttgttccgaaataaaagattttgcaaaccactttcctacgtacgtccactgtagtttttgcagatacaacactagctgtagcaaagcctatgtaaatcatatgatgagctttcatagtaaccgtccaagcaaaaggttttgtatttttaagaagcattcagaaaatctccggggcattactctagtgtgccttaattgtgatttcctaagtgatgtttctggcttagataatatggctacacacttaagtcaacataaaactcatacttgccaagttgtaatgcagaaagtttctgtttgtatcccaacttctgagcacctttctgaattaaaaaaagaagctcccgcaaaggaacaagaacctgtgtctaaggaaattgcaagacctaacatggctgaaagagaaacagaaacatcaaattctgaaagtaaacaagataaagctgcttcttcaaaagaaaaaaatggatgtaatgcaaattcatttgaaggctcatcaacaacaaaaagtgaagaaagcataacagtttcagataaggaaaatgaaacctgtcttgcagaccaggaaactggctcaaaaaacatcgtcagttgtgattcaaatattggtgcagataaagtggaaaagaaaaaacaaatacaacacgtttgtcaggaaatggagttgaagatgtgccaaagttcagaaaacataatcttatctgatcagattaaagatcacaactccagtgaagccagattttcttcaaagaatattaaggatttgcgattagcatcagataatgtaagcattgatcagtttttgagaaaaagacatgaacctgaatctgttagttctgatgttagcgagcaaggcagtattcatttggaacctctgactccatccgaggtacttgagtatgaagccacagagattcttcagaaaggtagtggtgatccttcagccaagactgatgaagtagtgtctgatcaaacagatgacattcctggaggaaataaccctagcacaacagaggcaacagtagacctggaagatgaaaaagaaagaagttgaaattagtcattttaagtttcagtgtaccaacgataagggcatttggaacagtgctatcaggtgagctcagtggtgctgttgtaggttcagaaatggaaatatgtaagggaggtcacacatacactttacctgtatgttcaacctatgttatcaaacaaatcaattcaccaataatagcatgattagtagggattcccaaaaagtttttaaaaacacgaacaggattttaatgataattaaatttgcagtggaaaggtctcatttaatggttttcaaggaaatgggatttggttgctgacatgaattgatgatattagtaatatttataaagcctttcaaacttccatcaatcctaagctaaaaatctttattacctgtatatccttttcagttaactgagaggaagggatttggaaaccatgtacttttggggagtaattgattaaaaacaatggctgattggcattgttaatgaaggctttatttgtgaggatgatgctggtaaatggagcatgcttagagtactaaattgatctaatgagaatttggatgaacataaacttaattttggatttaatataacattccagtcagacgcatgtaaacagaatatttgaatctttgtacctccatacaagtgttagcctgccaggctgtaagcttaccttaattaaactttcagtgaaagtggaattattaagatataaatttatatttgtgctttttgtcagtgtgtaagctgtgtagaaattctttgatgtattagttgtattaatgtaaagtagaaacccattgttgaaactcctgtagctattatgcttttaatattgttttaatgatcttccttagaaataggcccataaaaatggtctggaagccaaaccaaagtatggtataatgtagatattgtaaagcagtaaactgaaaacatgtcctggcatgtattcagccatgtttaagtgacttttctgtaattgtaaaataaaaacttcaaatgggacctaaaacagtgatgtaaaagaactggttttggaaatttagcctaatttatctataagatggctgctaaattgatttttcagttctttttatcatctagaatataatagatatagaaatgaataatatgaagaacagtagtttgctttgaaatactaataaacttttatttaaaatgcttcatttttacttcttaaaatgtgctttggattcttaaattttgtttcactgaatgttcaatgttttaaatggcgattaaaatactctgctgtatatagtagtttttgagtaaatatttgcaataaaaatctgcccccgaa

SEQ ID NO: 369190 - DNA, 2776 bp, Homo sapiens
  misc_feature (752)..(752): n is a, c, g, or t
ggttaagaggtagatatagatttgaatctttactacttattgtggtattgccttgggttcccactcaagtcttatttctcatatattgaaatagtgtttataaaatctaatatgtagattaaatgagatagtgcatgtaaagttcttaatatactgcttcatgcatcatatgtactccatagctggtaattgttacaagctgttaggttggcctatggcttactgaggttttacacttttcttgcttccctgtaaaacatttgaaataagtagaatgtttcttactttgtgtactgtttcatgtttttggtttgacagtggaagggttaccatgactcaatatgaaatcataaattcagaaatgttttatctaaatacctgtgcctaatatatttatataaaatactgtggatgcatcttgttattcaaattcaagttgtgttttactagttttctatttaagtaattgtaattatgatccacatttgaaatagaggttacgaaaagcagatattgacatgagtgggtaactgcttttttaccttgaatcagaaacttttggtacactgaaacttttataggtttaaaaacattttcaaaacctgcatataattatggagtattctaattatattttatatttaataaattatttttctatttctttgttatattaagttgcacacttgtttcttttatccagaaagtttagtataataaaaatagttttaagattaactgtgaatgtaaangaaaagtattattaattatttcaggaaattgcaagacctaacatggctgaaagagaaacagaaacatcaaattctgaaagtaaacaagataaagctgcttcttcaaaagaaaaaaatggatgtaatgcaaattcatttgaaggctcatcaacaacaaaaagtgaagaaagcataacagtttcagataaggaaaatgaaacctgtcttgcagaccaggaaactggctcaaaaaacatcgtcagttgtgattcaaatattggtgcagataaagtggaaaagaaaaaacaaatacaacacgtttgtcaggaaatggagttgaagatgtgccaaagttcagaaaacataatcttatctgatcagattaaagatcacaactccagtgaagccagattttcttcaaagaatattaaggatttgcgattagcatcagataatgtaagcattgatcagtttttgagaaaaagacatgaacctgaatctgttagttctgatgttagcgagcaaggcagtattcatttggaacctctgactccatccgaggtacttgagtatgaagccacagagattcttcagaaaggtagtggtgatccttcagccaagactgatgaagtagtgtctgatcaaacagatgacattcctggaggaaataaccctagcacaacagaggcaacagtagacctggaagatgaaaaagaaagaagttgaaattagtcattttaagtttcagtgtaccaacgataagggcatttggaacagtgctatcaggtgagctcagtggtgctgttgtaggttcagaaatggaaatatgtaagggaggtcacacatacactttacctgtatgttcaacctatgttatcaaacaaatcaattcaccaataatagcatgattagtagggattcccaaaaagtttttaaaaacacgaacaggattttaatgataattaaatttgcagtggaaaggtctcatttaatggttttcaaggaaatgggatttggttgctgacatgaattgatgatattagtaatatttataaagcctttcaaacttccatcaatcctaagctaaaaatctttattacctgtatatccttttcagttaactgagaggaagggatttggaaaccatgtacttttggggagtaattgattaaaaacaatggctgattggcattgttaatgaaggctttatttgtgaggatgatgctggtaaatggagcatgcttagagtactaaattgatctaatgagaatttggatgaacataaacttaattttggatttaatataacattccagtcagacgcatgtaaacagaatatttgaatctttgtacctccatacaagtgttagcctgccaggctgtaagcttaccttaattaaactttcagtgaaagtggaattattaagatataaatttatatttgtgctttttgtcagtgtgtaagctgtgtagaaattctttgatgtattagttgtattaatgtaaagtagaaacccattgttgaaactcctgtagctattatgcttttaatattgttttaatgatcttccttagaaataggcccataaaaatggtctggaagccaaaccaaagtatggtataatgtagatattgtaaagcagtaaactgaaaacatgtcctggcatgtattcagccatgtttaagtgacttttctgtaattgtaaaataaaaacttcaaatgggacctaaaacagtgatgtaaaagaactggttttggaaatttagcctaatttatctataagatggctgctaaattgatttttcagttctttttatcatctagaatataatagatatagaaatgaataatatgaagaacagtagtttgctttgaaatactaataaacttttatttaaaatgcttcatttttacttcttaaaatgtgctttggattcttaaattttgtttcactgaatgttcaatgttttaaatggcgattaaaatactctgctgtatatagtagtttttgagtaaatatttgcaataaaaatctgcccccgaa

SEQ ID NO: 369191 - DNA, 742 bp, Homo sapiens
caagacccatggtcctcacaccacagcccacccccgtgtctcttcagtcgtaggaaaggagaccaaaggggattcgggatttgcaggcacagggcccctcattttgcccagatgaccggtcgttccacgtttgcaccctcatttttgtcaaagagacctcccctcctctgccatagaattcccgttattgtctacagaagaagggccctgaggagaaacgtggagttggagacaaaattttctgagctttgcaaggttcacttactgagacggaaagaatgatctcactctgaggttttagcctgctccagcgatggaaggaattcctcccaacttatctcaagttttaacgcttttaaggagaaatctgctggagaggaaaaacgtcaaggtgaacccgcttctgcaagcacgggagacctttggccaaaggcctttgtttgcgaagatttgttaaaaaaaaaaaaatctgtcatcttaaatatttggctttattttcaggtttggacagaatttgtcttttttagtgccatgaaacataaaatggaacgctagaaggacagttttaaagcacaaaagctgcctcttagcatctgtaaggtgtcctgctttgggggactgctgtgccaactccagctgtctccacgcagaaacttaaccagggaaggcactggtttgcttataccattgttagggctgtgtgcctctgatgttttaacatcactacaaatactgttgtaaa

SEQ ID NO: 369192 - DNA, 5089 bp, Homo sapiens
atttgacctcgacagggaacgcaagcaaaaccacacatttaaaacagacttggtaaaatcagctcgttatttaaagaaacggacgattcctttttctctcctggtttagtcttcgacccacaggccccttgcttctttcgaacggcggctgtatcccatgaccttttcactttccaagccaacggactgggggtcgttacacacgcggagggcccggaacgcacggctcctcgcctgcaaattccgagcagtccggattttggggctgcctcccggccacaccagccagcagctcgcacccacatggaggcagggccctggccctcgccccggaccggcgcgtggcggggcgcgtgggtcttcgagggcccgcgacgcggcgcacatgccggtgcccgcctcccgcgtcggcgagaagacagggagctcggacacggggaggctgacccggagcctacccatgaggcagcgcgccggctgcacgagagcccccccctttccacggctcggctgccagctccgcaatgggagccgccgccgtcgccgcagtgtagtttttcgtgctcctccttttcctcctcctctttctcctcctcctcagggctccagtcaggccgatccgctccgctcacggaaggaaaacagaaataacttgctggcttgtctggagtcacatgtacttaggtgacaatttacagaaagtcatctctgcagcttgatgggcgacaacccttttcaaccaaaaagtaattcaaaaatggcagaactgtttatggaatgtgaagaagaggagctggaaccatggcagaagaaagtaaaagaagttgaggatgacgatgatgatgagccaatctttgttggcgagatatcaagttcaaaaccagcaatttcaaatattttgaacagagttaaccccagctcatattcaaggggactaaagaatggtgcactcagtcgaggtattactgctgcattcaagcctacaagtcaacactacacgaatccaacatcaaatccagtgcctgcctcaccaataaattttcatcctgagtctagatcttcagatagttctgttattgttcagcctttttctaaacctggttatataacaaactcatcacgagttgtgtctaataagtcatcagagttactgtttgacttgacccaggatacaggattatcacattaccaagggggaccaacactttctatggcaggtatgagtgaaagttcatttttatcaaaacgtccttctacttctgaagtaaataatgttaatccaaagaagcctaaacccagcgaaagtgtttctggagcaaattcctcagctgtattaccttcagttaaatctccttcagtgacttcttcccaggctatgctagcaaaaggtacaaatacctcatcaaatcagtctaaaaatggaacaccttttccaagagcttgtccaaagtgcaacattcatttcaatcttttggatcctttgaaaaatcacatgaagtattgttgtccagacatgataaataactttttgggactggctaaaacagaattttcaagtacagtaaataaaaacacaactattgattcagagaaaggaaaattgatcatgttagttaatgacttttattatggaaaacatgaaggagatgtccaggaggaacagaagactcacacaacctttaaatgcttcagttgcttgaaaattctaaaaaataacattaggtttatgaaccacatgaaacaccatttggaacttgagaagcagagcagtgagagctgggaaaaccataccacctgccagcactgctaccgtcagtttcccacaccatttcagttgcagtgtcacatcgaaagtacacatacgccccatgaattttctactatttgtaaaatctgtgaattgtcatttgaaacagaacatgttcttttacaacatatgaaggacaatcataaacctggtgaaatgccatatgtctgccaggtttgtaattatagatcatcatcattttctgatgtagaaactcattttagaacatcccatgaaaacactaagaacttgctatgcccgttttgcctcaaagttattaaaattgcaacaccatatatgcatcattatatgaagcatcagaaaaaaggaatacatcgttgtacaaaatgcaggctgcagtttttgacatgcaaggagaaaatggatcataagactcaacaccatcgaacatttataaaacctaaacaactagaaggattgcctcctggaacaaaagttactattcgagcttcagttggacctctgcaatcaggagcttcacctacaccttccattagtgcaagtgcttctacccttcagctctcacctccaaggactaaaaatataactgctaaaaatcctgcaaaatctaatacaagtaaacctaatacaatcaaatccaacgcaagtaaacctaatacaagtaagcctaatggaagtaaatctaaatacaaaccaaaaatctctaatatgcaaaagaaacaaagcacattggctagtagcaataaaaaaagtaaagtcaatacagcattgaggaatttaaggtatcgtcggggcattcacaaatgcattgagtgttgttccgaaataaaagattttgcaaaccactttcctacgtacgtccactgtagtttttgcagatacaacactagctgtagcaaagcctatgtaaatcatatgatgagctttcatagtaaccgtccaagcaaaaggttttgtatttttaagaagcattcagaaaatctccgatgcgtgggaggacaaatagaatgtgacttgcctaagttacacaagttggttgtggagccaagactgactctaggtcttctgactcctaacttttaacaattggtatgacaggggcattactctagtgtgccttaattgtgatttcctaagtgatgtttctggcttagataatatggctacacacttaagtcaacataaaactcatacttgccaagttgtaatgcagaaagtttctgtttgtatcccaacttctgagcacctttctgaattaaaaaaagaagctcccgcaaaggaacaagaacctgtgtctaaggaaattgcaagacctaacatggctgaaagagaaacagaaacatcaaattctgaaagtaaacaagataaagctgcttcttcaaaagaaaaaaatggatgtaatgcaaattcatttgaaggctcatcaacaacaaaaagtgaagaaagcataacagtttcagataaggaaaatgaaacctgtcttgcagaccaggaaactggctcaaaaaacatcgtcagttgtgattcaaatattggtgcagataaagtggaaaagaaaaaacaaatacaacacgtttgtcaggaaatggagttgaagatgtgccaaagttcagaaaacataatcttatctgatcagattaaagatcacaactccagtgaagccagattttcttcaaagaatattaaggatttgcgattagcatcagataatgtaagcattgatcagtttttgagaaaaagacatgaacctgaatctgttagttctgatgttagcgagcaaggcagtattcatttggaacctctgactccatccgaggtacttgagtatgaagccacagagattcttcagaaaggtagtggtgatccttcagccaagactgatgaagtagtgtctgatcaaacagatgacattcctggaggaaataaccctagcacaacagaggcaacagtagacctggaagatgaaaaagaaagaagttgaaattagtcattttaagtttcagtgtaccaacgataagggcatttggaacagtgctatcaggtgagctcagtggtgctgttgtaggttcagaaatggaaatatgtaagggaggtcacacatacactttacctgtatgttcaacctatgttatcaaacaaatcaattcaccaataatagcatgattagtagggattcccaaaaagtttttaaaaacacgaacaggattttaatgataattaaatttgcagtggaaaggtctcatttaatggttttcaaggaaatgggatttggttgctgacatgaattgatgatattagtaatatttataaagcctttcaaacttccatcaatcctaagctaaaaatctttattacctgtatatccttttcagttaactgagaggaagggatttggaaaccatgtacttttggggagtaattgattaaaaacaatggctgattggcattgttaatgaaggctttatttgtgaggatgatgctggtaaatggagcatgcttagagtactaaattgatctaatgagaatttggatgaacataaacttaattttggatttaatataacattccagtcagacgcatgtaaacagaatatttgaatctttgtacctccatacaagtgttagcctgccaggctgtaagcttaccttaattaaactttcagtgaaagtggaattattaagatataaatttatatttgtgctttttgtcagtgtgtaagctgtgtagaaattctttgatgtattagttgtattaatgtaaagtagaaacccattgttgaaactcctgtagctattatgcttttaatattgttttaatgatcttccttagaaataggcccataaaaatggtctggaagccaaaccaaagtatggtataatgtagatattgtaaagcagtaaactgaaaacatgtcctggcatgtattcagccatgtttaagtgacttttctgtaattgtaaaataaaaacttcaaatgggacctaaaacagtgatgtaaaagaactggttttggaaatttagcctaatttatctataagatggctgctaaattgatttttcagttctttttatcatctagaatataatagatatagaaatgaataatatgaagaacagtagtttgctttgaaatactaataaacttttatttaaaatgcttcatttttacttcttaaaatgtgctttggattcttaaattttgtttcactgaatgttcaatgttttaaatggcgattaaaatactctgctgtatatagtagtttttgagtaaatatttgcaataaaaatctgcccccgaa

SEQ ID NO: 369193 - DNA, 5020 bp, Homo sapiens
atttgacctcgacagggaacgcaagcaaaaccacacatttaaaacagacttggtaaaatcagctcgttatttaaagaaacggacgattcctttttctctcctggtttagtcttcgacccacaggccccttgcttctttcgaacggcggctgtatcccatgaccttttcactttccaagccaacggactgggggtcgttacacacgcggagggcccggaacgcacggctcctcgcctgcaaattccgagcagtccggattttggggctgcctcccggccacaccagccagcagctcgcacccacatggaggcagggccctggccctcgccccggaccggcgcgtggcggggcgcgtgggtcttcgagggcccgcgacgcggcgcacatgccggtgcccgcctcccgcgtcggcgagaagacagggagctcggacacggggaggctgacccggagcctacccatgaggcagcgcgccggctgcacgagagcccccccctttccacggctcggctgccagctccgcaatgggagccgccgccgtcgccgcagtgtagtttttcgtgctcctccttttcctcctcctctttctcctcctcctcagggctccagtcaggccgatccgctccgctcacggaaggaaaacagaaataacttgctggcttgtctggagtcacatggtaattcaaaaatggcagaactgtttatggaatgtgaagaagaggagctggaaccatggcagaagaaagtaaaagaagttgaggatgacgatgatgatgagccaatctttgttggcgagatatcaagttcaaaaccagcaatttcaaatattttgaacagagttaaccccagctcatattcaaggggactaaagaatggtgcactcagtcgaggtattactgctgcattcaagcctacaagtcaacactacacgaatccaacatcaaatccagtgcctgcctcaccaataaattttcatcctgagtctagatcttcagatagttctgttattgttcagcctttttctaaacctggttatataacaaactcatcacgagttgtgtctaataagtcatcagagttactgtttgacttgacccaggatacaggattatcacattaccaagggggaccaacactttctatggcaggtatgagtgaaagttcatttttatcaaaacgtccttctacttctgaagtaaataatgttaatccaaagaagcctaaacccagcgaaagtgtttctggagcaaattcctcagctgtattaccttcagttaaatctccttcagtgacttcttcccaggctatgctagcaaaaggtacaaatacctcatcaaatcagtctaaaaatggaacaccttttccaagagcttgtccaaagtgcaacattcatttcaatcttttggatcctttgaaaaatcacatgaagtattgttgtccagacatgataaataactttttgggactggctaaaacagaattttcaagtacagtaaataaaaacacaactattgattcagagaaaggaaaattgatcatgttagttaatgacttttattatggaaaacatgaaggagatgtccaggaggaacagaagactcacacaacctttaaatgcttcagttgcttgaaaattctaaaaaataacattaggtttatgaaccacatgaaacaccatttggaacttgagaagcagagcagtgagagctgggaaaaccataccacctgccagcactgctaccgtcagtttcccacaccatttcagttgcagtgtcacatcgaaagtacacatacgccccatgaattttctactatttgtaaaatctgtgaattgtcatttgaaacagaacatgttcttttacaacatatgaaggacaatcataaacctggtgaaatgccatatgtctgccaggtttgtaattatagatcatcatcattttctgatgtagaaactcattttagaacatcccatgaaaacactaagaacttgctatgcccgttttgcctcaaagttattaaaattgcaacaccatatatgcatcattatatgaagcatcagaaaaaaggaatacatcgttgtacaaaatgcaggctgcagtttttgacatgcaaggagaaaatggatcataagactcaacaccatcgaacatttataaaacctaaacaactagaaggattgcctcctggaacaaaagttactattcgagcttcagttggacctctgcaatcaggagcttcacctacaccttccattagtgcaagtgcttctacccttcagctctcacctccaaggactaaaaatataactgctaaaaatcctgcaaaatctaatacaagtaaacctaatacaatcaaatccaacgcaagtaaacctaatacaagtaagcctaatggaagtaaatctaaatacaaaccaaaaatctctaatatgcaaaagaaacaaagcacattggctagtagcaataaaaaaagtaaagtcaatacagcattgaggaatttaaggtatcgtcggggcattcacaaatgcattgagtgttgttccgaaataaaagattttgcaaaccactttcctacgtacgtccactgtagtttttgcagatacaacactagctgtagcaaagcctatgtaaatcatatgatgagctttcatagtaaccgtccaagcaaaaggttttgtatttttaagaagcattcagaaaatctccgatgcgtgggaggacaaatagaatgtgacttgcctaagttacacaagttggttgtggagccaagactgactctaggtcttctgactcctaacttttaacaattggtatgacaggggcattactctagtgtgccttaattgtgatttcctaagtgatgtttctggcttagataatatggctacacacttaagtcaacataaaactcatacttgccaagttgtaatgcagaaagtttctgtttgtatcccaacttctgagcacctttctgaattaaaaaaagaagctcccgcaaaggaacaagaacctgtgtctaaggaaattgcaagacctaacatggctgaaagagaaacagaaacatcaaattctgaaagtaaacaagataaagctgcttcttcaaaagaaaaaaatggatgtaatgcaaattcatttgaaggctcatcaacaacaaaaagtgaagaaagcataacagtttcagataaggaaaatgaaacctgtcttgcagaccaggaaactggctcaaaaaacatcgtcagttgtgattcaaatattggtgcagataaagtggaaaagaaaaaacaaatacaacacgtttgtcaggaaatggagttgaagatgtgccaaagttcagaaaacataatcttatctgatcagattaaagatcacaactccagtgaagccagattttcttcaaagaatattaaggatttgcgattagcatcagataatgtaagcattgatcagtttttgagaaaaagacatgaacctgaatctgttagttctgatgttagcgagcaaggcagtattcatttggaacctctgactccatccgaggtacttgagtatgaagccacagagattcttcagaaaggtagtggtgatccttcagccaagactgatgaagtagtgtctgatcaaacagatgacattcctggaggaaataaccctagcacaacagaggcaacagtagacctggaagatgaaaaagaaagaagttgaaattagtcattttaagtttcagtgtaccaacgataagggcatttggaacagtgctatcaggtgagctcagtggtgctgttgtaggttcagaaatggaaatatgtaagggaggtcacacatacactttacctgtatgttcaacctatgttatcaaacaaatcaattcaccaataatagcatgattagtagggattcccaaaaagtttttaaaaacacgaacaggattttaatgataattaaatttgcagtggaaaggtctcatttaatggttttcaaggaaatgggatttggttgctgacatgaattgatgatattagtaatatttataaagcctttcaaacttccatcaatcctaagctaaaaatctttattacctgtatatccttttcagttaactgagaggaagggatttggaaaccatgtacttttggggagtaattgattaaaaacaatggctgattggcattgttaatgaaggctttatttgtgaggatgatgctggtaaatggagcatgcttagagtactaaattgatctaatgagaatttggatgaacataaacttaattttggatttaatataacattccagtcagacgcatgtaaacagaatatttgaatctttgtacctccatacaagtgttagcctgccaggctgtaagcttaccttaattaaactttcagtgaaagtggaattattaagatataaatttatatttgtgctttttgtcagtgtgtaagctgtgtagaaattctttgatgtattagttgtattaatgtaaagtagaaacccattgttgaaactcctgtagctattatgcttttaatattgttttaatgatcttccttagaaataggcccataaaaatggtctggaagccaaaccaaagtatggtataatgtagatattgtaaagcagtaaactgaaaacatgtcctggcatgtattcagccatgtttaagtgacttttctgtaattgtaaaataaaaacttcaaatgggacctaaaacagtgatgtaaaagaactggttttggaaatttagcctaatttatctataagatggctgctaaattgatttttcagttctttttatcatctagaatataatagatatagaaatgaataatatgaagaacagtagtttgctttgaaatactaataaacttttatttaaaatgcttcatttttacttcttaaaatgtgctttggattcttaaattttgtttcactgaatgttcaatgttttaaatggcgattaaaatactctgctgtatatagtagtttttgagtaaatatttgcaataaaaatctgcccccgaa

SEQ ID NO: 369194 - DNA, 2670 bp, Homo sapiens
atttgacctcgacagggaacgcaagcaaaaccacacatttaaaacagacttggtaaaatcagctcgttatttaaagaaacggacgattcctttttctctcctggtttagtcttcgacccacaggccccttgcttctttcgaacggcggctgtatcccatgaccttttcactttccaagccaacggactgggggtcgttacacacgcggagggcccggaacgcacggctcctcgcctgcaaattccgagcagtccggattttggggctgcctcccggccacaccagccagcagctcgcacccacatggaggcagggccctggccctcgccccggaccggcgcgtggcggggcgcgtgggtcttcgagggcccgcgacgcggcgcacatgccggtgcccgcctcccgcgtcggcgagaagacagggagctcggacacggggaggctgacccggagcctacccatgaggcagcgcgccggctgcacgagagcccccccctttccacggctcggctgccagctccgcaatgggagccgccgccgtcgccgcagtgtagtttttcgtgctcctccttttcctcctcctctttctcctcctcctcagggctccagtcaggccgatccgctccgctcacggaaggaaaacagaaataacttgctggcttgtctggagtcacatgtacttaggtgacaatttacagaaagtcatctctgcagcttgatgggcgacaacccttttcaaccaaaaagtaattcaaaaatggcagaactgtttatggaatgtgaagaagaggagctggaaccatggcagaagaaagtaaaagaagttgaggatgacgatgatgatgagccaatctttgttggcgagatatcaagttcaaaaccagcaatttcaaatattttgaacagagttaaccccagctcatattcaaggggactaaagaatggtgcactcagtcgaggtattactgctgcattcaagcctacaagtcaacactacacgaatccaacatcaaatccagtgcctgcctcaccaataaattttcatcctgagtctagatcttcagatagttctgttattgttcagcctttttctaaacctgtaagtgtttctaaaactatacggccagctcagggatccattggatgttgtttatcaatatcaacagtacccagttacaattctggactgtcataagtagtcatccagtagaagcatagttagcatcagaaaatgtcaccatattttcgctagctcaagcagtaccccaagtaataactgaaggagctaactacccaacctgttaataacaggcagtatgcctaaataggtacagtaatgaaaactatactatcaaaatgtgaataaaattatagtcagccataaacattgcataatgacaaatatttaagattgcagacgggaccaggtattcttaattgggaaaacagtcaagtgaccatcatagctttttattctgaaaacattccttcatagttcagttagttaaaaaaaaacaaacattttttcctattacaaaaaactcccactttttttgttacaaaaagtaatagaaaatggtaatagttaacattcattgagctgttaatatgtataagtgtttgtgctaaatgctataggtaaattcatttcatttagttcttaaacatccccatgaagtaaacactattattatcctcattttttagttgaggaaactgaggctcatagaggttgaaagatttattcaagatcccaaagctggcagttgatggatctgggatttcaatccagcctaacccatagtttatatgtatatgcacacatacatacatatatgttgtgtataaatgtacacttttttagacatgaaagaattgccttagttgaacagttctcagattgtagtttgcaatcccctggggttccccaagaccctttcagaggtttgagggtcaacagtgttgtcattataatcaaagactgttttccttttccactgtgttggcatttgcactggtgatgctaaagtaatggtggataagctgctggtgccttagtgtgaatcaaggtagtgccaccaaagtgtacttgtagtttctgtattagtcacctgccgtgcactcacagtaaactacattactcaactgagtattacccagttatacccaatccctgatgaagtattaaaatgttattagttttattaactctctacacttgaatgtgtgttttttaaaatattctgtgtgatgacatgggtagtgtgcataaagtacctctgtgtctgaagtatgatagttgtcttgaggaaaagcacttgtgtgattgaattgtgaggtaaactacctgatttttttttgttgttacatgaaagaatgactgacaaatctttaaagtatttacaatatcactccagaaaagaaaacaaatcaaataaatattgactcaaaactctccaagtacatatcaaaatctcaggaagggaaaaaagagtctaaagaacaaaatataacactattttatttcagtcatgttagttcagtttccacagtttgaactgggtatagattaatatctaaaaccaaaaaatgaacatgtgtatagtgatgctgaaaaatgtgcattattttttatttatattttaggaataataaagttagttattaaag

SEQ ID NO: 369195 - DNA, 2849 bp, Homo sapiens
ccttcaggcgcccgatgtgagtggcgatccgctccggtcacggaacgcaatgagagaattactttgcgagggttgttctgaagttacatgtgtttgggtgacagctttacaggagataggtcactcgtgctgtcatgcttgactggtgggactaaccgcgttttcaatgcgaccagaagtaaacttgcatccaagtgaggaacgagactcgtgtactggcatatgtgacgtagaccaggagctgtggaacctaggtgccgaaggacacagtcagtggacacgttcgaggatgacgatgatgatgactcgttctcggttggcagagatatcaagttcaataaccagcaagttatcaagatattttgaacagagttaaccccagctcatattcaaggggactaaagaatggtgcactcagtcgaggtattactgctgcattcaagcctacaagtcaacactacacgaatccaacatcaaatccagtgcctgcctcaccaataaattttcatcctgagtctagatcttcagatagttctgttattgttcagcctttttctaaacctgtaagtgtttctaaaactatacggccagctcagggatccattggatgttgtttatcaatatcaacagtacccagttacaattctggactgtcataagtagtcatccagtagaagcatagttagcatcagaaaatgtcaccatattttcgctagctcaagcagtaccccaagtaataactgaaggagctaactacccaacctgttaataacaggcagtatgcctaaataggtacagtaatgaaaactatactatcaaaatgtgaataaaattatagtcagccataaacattgcataatgacaaatatttaagattgcagacgggaccaggtattcttaattgggaaaacagtcaagtgaccatcatagctttttattctgaaaacattccttcatagttcagttagttaaaaaaaaacaaacattttttcctattacaaaaaactcccactttttttgttacaaaaagtaatagaaaatggtaatagttaacattcattgagctgttaatatgtataagtgtttgtgctaaatgctataggtaaattcatttcatttagttcttaaacatccccatgaagtaaacactattattatcctcattttttagttgaggaaactgaggctcatagaggttgaaagatttattcaagatcccaaagctggcagttgatggatctgggatttcaatccagcctaacccatagtttatatgtatatgcacacatacatacatatatgttgtgtataaatgtacacttttttagacatgaaagaattgccttagttgaacagttctcagattgtagtttgcaatcccctggggttccccaagaccctttcagaggtttgagggtcaacagtgttgtcattataatcaaagactgttttccttttccactgtgttggcatttgcactggtgatgctaaagtaatggtggataagctgctggtgccttagtgtgaatcaaggtagtgccaccaaagtgtacttgtagtttctgtattagtcacctgccgtgcactcacagtaaactacattactcaactgagtattacccagttatacccaatccctgatgaagtattaaaatgttattagttttattaactctctacacttgaatgtgtgttttttaaaatattctgtgtgatgacatgggtagtgtgcataaagtacctctgtgtctgaagtatgatagttgtcttgaggaaaagcacttgtgtgattgaattgtgaggtaaactacctgatttttttttgttgttacatgaaagaatgactgacaaatctttaaagtatttacaatatcactccagaaaagaaaacaaatcaaataaatattgactcaaaactctccaagtacatatcaaaatctcaggaagggaaaaaagagtctaaagaacaaaatataacactattttatttcagtcatgttagttcagtttccacagtttgaactgggtatagattaatatctaaaaccaaaaaatgaacatgtgtatagtgatgctgaaaaatgtgcattattttttatttatattttaggaataataaagttagttattaaagaatttagtgattttgattgagtgagaggtgtgagctatatttgcttctttcctgtatgatatacatacattgtttccaatctcatttctattaaataactataggagagcccacagccttgttattttacatatcactatttagatatttgttatttatttatttgtgttggcctgaagtaaatgttacttttttacgatatttgaaggatagatttattttataaattaatagtttaaataagattttgccagcatttgaaatgatatttatttctgtgtatcaatattaccacaaacttacacagcttaaaacaacatacactctttatctcatgatctcacaatttctgtgggtcaggaatcaggtcatggcttaggtgggttttctgcttaaggatctcacaaggctgcattcaagatgtggtgcctgaagttgcagtttcatctgaaattctgttggggaagtatttgcttccaagttcacatggttgttggtagcattcagttccttaagggatgttggactgagaatctctgtatcttgttggcttttggctggctccttgccacgtaggtcttcccaataaggctgcttgcttcctcaaagctagcaggtgagagtgagtccttagcaagatgcccttacagtcttagggtaacataatcacgtacacaaaaatcatatatatcctgtcacctttgttgtgttctat

SEQ ID NO: 369196 - DNA, 1328 bp, Homo sapiens
gcacgagtcatctgaagccaccgactttcagtgtaccaacgataagggcatttggaacagtgctatcaggtgagctcagtggtgctgttgtaggttcagaaatggaaatatgtaagggaggtcacacatacactttacctgtatgttcaacctatgttatcaaacaaatcaattcaccaataatagcatgattagtagggattcccaaaaagtttttaaaaacacgaacaggattttaatgataattaaatttgcagtggaaaggtctcatttaatggttttcaaggaaatgggatttggttgctgacatgaattgatgatattagtaatatttataaagcctttcaaacttccatcaatcctaagctaaaaatctttattacctgtatatccttttcagttaactgagaggaagggatttggaaaccatgtacttttggggagtaattgattaaaaacaatggctgattggcattgttaatgaaggctttatttgtgaggatgatgctggtaaatggagcatgcttagagtactaaattgatctaatgagaatttggatgaacataaacttaattttggatttaatataacattccagtcagacgcatgtaaacagaatatttgaatctttgtacctccatacaagtgttagcctgccaggctgtaagcttaccttaattaaactttcagtgaaagtggaattattaagatataaatttatatttgtgctttttgtcagtgtgtaagctgtgtagaaattctttgatgtattagttgtattaatgtaaagtagaaacccattgttgaaactcctgtagctattatgcttttaatattgttttaatgatcttccttagaaataggcccataaaaatggtctggaagccaaaccaaagtatggtataatgtagatattgtaaagcagtaaactgaaaacatgtcctggcatgtattcagccatgtttaagtgacttttctgtaattgtaaaataaaaacttcaaatgggacctaaaacagtgatgtaaaagaactggttttggaaatttagcctaatttatctataagatggctgctaaattgatttttcagttctttttatcatctagaatataatagatatagaaatgaataatatgaagaacagtagtttgctttgaaatactaataaacttttatttaaaatgcttcatttttacttcttaaaatgtgctttggattcttaaattttgtttcactgaatgttcaatgttttaaatggcgattaaaatactctgctgtatatagtagtttttgagtaaatatttgcaataaaaatctgcccccgaa

SEQ ID NO: 369197 - DNA, 294 bp, Homo sapiens
ctttttggtgggcaaatgtaccttgactttttattttttagaacacgtctttattttgacagtgttcaaaaacattgctttatgaagaaatacataataaatgactttatttttcagtaaacaagataaagctgcttcttcaaaagaaaaaaatggatgtaatgcaaattcatttgaaggctcatcaacaacaaaaagtgaagaaagcataacagtttcagataaggaaaatgaaacctgtcttgcagaccaggaaactggctcaaaaaacatcgtcagttgtgattcaaatat

SEQ ID NO: 369198 - DNA, 446 bp, Homo sapiens
tgtctcaaagatggtcttttggtgttgccttagtgagattcttggttgcaaaggcatcagagctagattagtagtacataatgttctcctgacaaattatccatcattgttcctttgtaattgcatatcagttttaaattttcaagttaaactaagccttctttctttttttaggtttgtaattatagatcatcatcattttctgatgtagaaactcattttagaacatcccatgaaaacactaagaacttgctatgcccgttttgcctcaaagttattaaaattgcaacaccatatatgcatcattatatgaagcatcaggtgagatttaccagttcttatttgtttattatgttgtcttagtgaaaaaactgattatgacttggagaatctttagatttgttctgcaagagaagcagagttgttccaaatgacactattaattt

SEQ ID NO: 369199 - DNA, 1328 bp, Homo sapiens
atttgacctcgacagggaacgcaagcaaaaccacacatttaaaacagacttggtaaaatcagctcgttatttaaagaaacggacgattcctttttctctcctggtttagtcttcgacccacaggccccttgcttctttcgaacggcggctgtatcccatgaccttttcactttccaagccaacggactgggggtcgttacacacgcggagggcccggaacgcacggctcctcgcctgcaaattccgagcagtccggattttggggctgcctcccggccacaccagccagcagctcgcacccacatggaggcagggccctggccctcgccccggaccggcgcgtggcggggcgcgtgggtcttcgagggcccgcgacgcggcgcacatgccggtgcccgcctcccgcgtcggcgagaagacagggagctcggacacggggaggctgacccggagcctacccatgaggcagcgcgccggctgcacgagagcccccccctttccacggctcggctgccagctccgcaatgggagccgccgccgtcgccgcagtgtagtttttcgtgctcctccttttcctcctcctctttctcctcctcctcagggctccagtcaggccgatccgctccgctcacgtcgtaggaaaggagaccaaaggggattcgggatttgcaggcacagggcccctcattttgcccagatgaccggtcgttccacgtttgcaccctcatttttgtcaaagagacctcccctcctctgccatagaattcccgttattgtctacagaagaagggccctgaggagaaacgtggagttggagacaaaattttctgagctttgcaaggttcacttactgagacggaaagaatgatctcactctgaggttttagcctgctccagcgatggaaggaattcctcccaacttatctcaagttttaacgcttttaaggagaaatctgctggagaggaaaaacgtcaaggtgaacccgcttctgcaagcacgggagacctttggccaaaggcctttgtttgcgaagatttgttaaaaaaaaaaaaatctgtcatcttaaatatttggctttattttcaggtttggacagaatttgtcttttttagtgccatgaaacataaaatggaacgctagaaggacagttttaaagcacaaaagctgcctcttagcatctgtaaggtgtcctgctttgggggactgctgtgccaactccagctgtctccacgcagaaacttaaccagggaaggcactggtttgcttataccattgttagggctgtgtgcctctgatgttttaacatcactacaaatactgttgtaaa

SEQ ID NO: 369200 - DNA, 4923 bp, Homo sapiens
atttgacctcgacagggaacgcaagcaaaaccacacatttaaaacagacttggtaaaatcagctcgttatttaaagaaacggacgattcctttttctctcctggtttagtcttcgacccacaggccccttgcttctttcgaacggcggctgtatcccatgaccttttcactttccaagccaacggactgggggtcgttacacacgcggagggcccggaacgcacggctcctcgcctgcaaattccgagcagtccggattttggggctgcctcccggccacaccagccagcagctcgcacccacatggaggcagggccctggccctcgccccggaccggcgcgtggcggggcgcgtgggtcttcgagggcccgcgacgcggcgcacatgccggtgcccgcctcccgcgtcggcgagaagacagggagctcggacacggggaggctgacccggagcctacccatgaggcagcgcgccggctgcacgagagcccccccctttccacggctcggctgccagctccgcaatgggagccgccgccgtcgccgcagtgtagtttttcgtgctcctccttttcctcctcctctttctcctcctcctcagggctccagtcaggccgatccgctccgctcacggaaggaaaacagaaataacttgctggcttgtctggagtcacatgtacttaggtgacaatttacagaaagtcatctctgcagcttgatgggcgacaacccttttcaaccaaaaagtaattcaaaaatggcagaactgtttatggaatgtgaagaagaggagctggaaccatggcagaagaaagtaaaagaagttgaggatgacgatgatgatgagccaatctttgttggcgagatatcaagttcaaaaccagcaatttcaaatattttgaacagagttaaccccagctcatattcaaggggactaaagaatggtgcactcagtcgaggtattactgctgcattcaagcctacaagtcaacactacacgaatccaacatcaaatccagtgcctgcctcaccaataaattttcatcctgagtctagatcttcagatagttctgttattgttcagcctttttctaaacctggttatataacaaactcatcacgagttgtgtctaataagtcatcagagttactgtttgacttgacccaggatacaggattatcacattaccaagggggaccaacactttctatggcaggtatgagtgaaagttcatttttatcaaaacgtccttctacttctgaagtaaataatgttaatccaaagaagcctaaacccagcgaaagtgtttctggagcaaattcctcagctgtattaccttcagttaaatctccttcagtgacttcttcccaggctatgctagcaaaaggtacaaatacctcatcaaatcagtctaaaaatggaacaccttttccaagagcttgtccaaagtgcaacattcatttcaatcttttggatcctttgaaaaatcacatgaagtattgttgtccagacatgataaataactttttgggactggctaaaacagaattttcaagtacagtaaataaaaacacaactattgattcagagaaaggaaaattgatcatgttagttaatgacttttattatggaaaacatgaaggagatgtccaggaggaacagaagactcacacaacctttaaatgcttcagttgcttgaaaattctaaaaaataacattaggtttatgaaccacatgaaacaccatttggaacttgagaagcagagcagtgagagctgggaaaaccataccacctgccagcactgctaccgtcagtttcccacaccatttcagttgcagtgtcacatcgaaagtacacatacgccccatgaattttctactatttgtaaaatctgtgaattgtcatttgaaacagaacatgttcttttacaacatatgaaggacaatcataaacctggtgaaatgccatatgtctgccaggtttgtaattatagatcatcatcattttctgatgtagaaactcattttagaacatcccatgaaaacactaagaacttgctatgcccgttttgcctcaaagttattaaaattgcaacaccatatatgcatcattatatgaagcatcagaaaaaaggaatacatcgttgtacaaaatgcaggctgcagtttttgacatgcaaggagaaaatggatcataagactcaacaccatcgaacatttataaaacctaaacaactagaaggattgcctcctggaacaaaagttactattcgagcttcagttggacctctgcaatcaggagcttcacctacaccttccattagtgcaagtgcttctacccttcagctctcacctccaaggactaaaaatataactgctaaaaatcctgcaaaatctaatacaagtaaacctaatacaatcaaatccaacgcaagtaaacctaatacaagtaagcctaatggaagtaaatctaaatacaaaccaaaaatctctaatatgcaaaagaaacaaagcacattggctagtagcaataaaaaaagtaaagtcaatacagcattgaggaatttaaggtatcgtcggggcattcacaaatgcattgagtgttgttccgaaataaaagattttgcaaaccactttcctacgtacgtccactgtagtttttgcagatacaacactagctgtagcaaagcctatgtaaatcatatgatgagctttcatagtaaccgtccaagcaaaaggttttgtatttttaagaagcattcagaaaatctccggggcattactctagtgtgccttaattgtgatttcctaagtgatgtttctggcttagataatatggctacacacttaagtcaacataaaactcatacttgccaagttgtaatgcagaaagtttctgtttgtatcccaacttctgagcacctttctgaattaaaaaaagaagctcccgcaaaggaacaagaacctgtgtctaaggaaattgcaagacctaacatggctgaaagagaaacagaaacatcaaattctgaaagtaaacaagataaagctgcttcttcaaaagaaaaaaatggatgtaatgcaaattcatttgaaggctcatcaacaacaaaaagtgaagaaagcataacagtttcagataaggaaaatgaaacctgtcttgcagaccaggaaactggctcaaaaaacatcgtcagttgtgattcaaatattggtgcagataaagtggaaaagaaaaaacaaatacaacacgtttgtcaggaaatggagttgaagatgtgccaaagttcattttcttcaaagaatattaaggatttgcgattagcatcagataatgtaagcattgatcagtttttgagaaaaagacatgaacctgaatctgttagttctgatgttagcgagcaaggcagtattcatttggaacctctgactccatccgaggtacttgagtatgaagccacagagattcttcagaaaggtagtggtgatccttcagccaagactgatgaagtagtgtctgatcaaacagatgacattcctggaggaaataaccctagcacaacagaggcaacagtagacctggaagatgaaaaagaaagaagttgaaattagtcattttaagtttcagtgtaccaacgataagggcatttggaacagtgctatcaggtgagctcagtggtgctgttgtaggttcagaaatggaaatatgtaagggaggtcacacatacactttacctgtatgttcaacctatgttatcaaacaaatcaattcaccaataatagcatgattagtagggattcccaaaaagtttttaaaaacacgaacaggattttaatgataattaaatttgcagtggaaaggtctcatttaatggttttcaaggaaatgggatttggttgctgacatgaattgatgatattagtaatatttataaagcctttcaaacttccatcaatcctaagctaaaaatctttattacctgtatatccttttcagttaactgagaggaagggatttggaaaccatgtacttttggggagtaattgattaaaaacaatggctgattggcattgttaatgaaggctttatttgtgaggatgatgctggtaaatggagcatgcttagagtactaaattgatctaatgagaatttggatgaacataaacttaattttggatttaatataacattccagtcagacgcatgtaaacagaatatttgaatctttgtacctccatacaagtgttagcctgccaggctgtaagcttaccttaattaaactttcagtgaaagtggaattattaagatataaatttatatttgtgctttttgtcagtgtgtaagctgtgtagaaattctttgatgtattagttgtattaatgtaaagtagaaacccattgttgaaactcctgtagctattatgcttttaatattgttttaatgatcttccttagaaataggcccataaaaatggtctggaagccaaaccaaagtatggtataatgtagatattgtaaagcagtaaactgaaaacatgtcctggcatgtattcagccatgtttaagtgacttttctgtaattgtaaaataaaaacttcaaatgggacctaaaacagtgatgtaaaagaactggttttggaaatttagcctaatttatctataagatggctgctaaattgatttttcagttctttttatcatctagaatataatagatatagaaatgaataatatgaagaacagtagtttgctttgaaatactaataaacttttatttaaaatgcttcatttttacttcttaaaatgtgctttggattcttaaattttgtttcactgaatgttcaatgttttaaatggcgattaaaatactctgctgtatatagtagtttttgagtaaatatttgcaataaaaatctgcccccgaa

SEQ ID NO: 369201 - DNA, 3385 bp, Homo sapiens
atttgacctcgacagggaacgcaagcaaaaccacacatttaaaacagacttggtaaaatcagctcgttatttaaagaaacggacgattcctttttctctcctggtttagtcttcgacccacaggccccttgcttctttcgaacggcggctgtatcccatgaccttttcactttccaagccaacggactgggggtcgttacacacgcggagggcccggaacgcacggctcctcgcctgcaaattccgagcagtccggattttggggctgcctcccggccacaccagccagcagctcgcacccacatggaggcagggccctggccctcgccccggaccggcgcgtggcggggcgcgtgggtcttcgagggcccgcgacgcggcgcacatgccggtgcccgcctcccgcgtcggcgagaagacagggagctcggacacggggaggctgacccggagcctacccatgaggcagcgcgccggctgcacgagagcccccccctttccacggctcggctgccagctccgcaatgggagccgccgccgtcgccgcagtgtagtttttcgtgctcctccttttcctcctcctctttctcctcctcctcagggctccagtcaggccgatccgctccgctcacggaaggaaaacagaaataacttgctggcttgtctggagtcacatgtacttaggtgacaatttacagaaagtcatctctgcagcttgatgggcgacaacccttttcaaccaaaaagtaattcaaaaatggcagaactgtttatggaatgtgaagaagaggagctggaaccatggcagaagaaagtaaaagaagttgaggatgacgatgatgatgagccaatctttgttggcgagatatcaagttcaaaaccagcaatttcaaatattttgaacagagttaaccccagctcatattcaaggggactaaagaatggtgcactcagtcgaggtattactgctgcattcaagcctacaagtcaacactacacgaatccaacatcaaatccagtgcctgcctcaccaataaattttcatcctgagtctagatcttcagatagttctgttattgttcagcctttttctaaacctgtaagtgtttctaaaactatacggccagctcagggatccattggatgttgtttatcaatatcaacagtacccagttacaattctggactgtcataagtagtcatccagtagaagcatagttagcatcagaaaatgtcaccatattttcgctagctcaagcagtaccccaagtaataactgaaggagctaactacccaacctgttaataacaggcagtatgcctaaataggtacagtaatgaaaactatactatcaaaatgtgaataaaattatagtcagccataaacattgcataatgacaaatatttaagattgcagacgggaccaggtattcttaattgggaaaacagtcaagtgaccatcatagctttttattctgaaaacattccttcatagttcagttagttaaaaaaaaacaaacattttttcctattacaaaaaactcccactttttttgttacaaaaagtaatagaaaatggtaatagttaacattcattgagctgttaatatgtataagtgtttgtgctaaatgctataggtaaattcatttcatttagttcttaaacatccccatgaagtaaacactattattatcctcattttttagttgaggaaactgaggctcatagaggttgaaagatttattcaagatcccaaagctggcagttgatggatctgggatttcaatccagcctaacccatagtttatatgtatatgcacacatacatacatatatgttgtgtataaatgtacacttttttagacatgaaagaattgccttagttgaacagttctcagattgtagtttgcaatcccctggggttccccaagaccctttcagaggtttgagggtcaacagtgttgtcattataatcaaagactgttttccttttccactgtgttggcatttgcactggtgatgctaaagtaatggtggataagctgctggtgccttagtgtgaatcaaggtagtgccaccaaagtgtacttgtagtttctgtattagtcacctgccgtgcactcacagtaaactacattactcaactgagtattacccagttatacccaatccctgatgaagtattaaaatgttattagttttattaactctctacacttgaatgtgtgttttttaaaatattctgtgtgatgacatgggtagtgtgcataaagtacctctgtgtctgaagtatgatagttgtcttgaggaaaagcacttgtgtgattgaattgtgaggtaaactacctgatttttttttgttgttacatgaaagaatgactgacaaatctttaaagtatttacaatatcactccagaaaagaaaacaaatcaaataaatattgactcaaaactctccaagtacatatcaaaatctcaggaagggaaaaaagagtctaaagaacaaaatataacactattttatttcagtcatgttagttcagtttccacagtttgaactgggtatagattaatatctaaaaccaaaaaatgaacatgtgtatagtgatgctgaaaaatgtgcattattttttatttatattttaggaataataaagttagttattaaagaatttagtgattttgattgagtgagaggtgtgagctatatttgcttctttcctgtatgatatacatacattgtttccaatctcatttctattaaataactataggagagcccacagccttgttattttacatatcactatttagatatttgttatttatttatttgtgttggcctgaagtaaatgttacttttttacgatatttgaaggatagatttattttataaattaatagtttaaataagattttgccagcatttgaaatgatatttatttctgtgtatcaatattaccacaaacttacacagcttaaaacaacatacactctttatctcatgatctcacaatttctgtgggtcaggaatcaggtcatggcttaggtgggttttctgcttaaggatctcacaaggctgcattcaagatgtggtgcctgaagttgcagtttcatctgaaattctgttggggaagtatttgcttccaagttcacatggttgttggtagcattcagttccttaagggatgttggactgagaatctctgtatcttgttggcttttggctggctccttgccacgtaggtcttcccaataaggctgcttgcttcctcaaagctagcaggtgagagtgagtccttagcaagatgcccttacagtcttagggtaacataatcacgtacacaaaaatcatatatatcctgtcacctttgttgtgttctat

SEQ ID NO: 369202 - DNA, 2193 bp, Homo sapiens
acagaggtcaatttactattaaagtataaaatgtacattagtttcgatctacattttaattattttaggctggcagagaaagaactgtttcatattttaccatcgtacatataaaataaaatattcaatacttatcttgttttcaagattaaaaaaagaagctcccgcaaaggaacaagaacctgtgtctaaggaaattgcaagacctaacatggctgaaagagaaacagaaacatcaaattctgaaagtaaacaagataaagctgcttcttcaaaagaaaaaaatggatgtaatgcaaattcatttgaaggctcatcaacaacaaaaagtgaagaaagcataacagtttcagataaggaaaatgaaacctgtcttgcagaccaggaaactggctcaaaaaacatcgtcagttgtgattcaaatattggtgcagataaagtggaaaagaaaaaacaaatacaacacgtttgtcaggaaatggagttgaagatgtgccaaagttcagaaaacataatcttatctgatcagattaaagatcacaactccagtgaagccagattttcttcaaagaatattaaggatttgcgattagcatcagataatgtaagcattgatcagtttttgagaaaaagacatgaacctgaatctgttagttctgatgttagcgagcaaggcagtattcatttggaacctctgactccatccgaggtacttgagtatgaagccacagagattcttcagaaaggtagtggtgatccttcagccaagactgatgaagtagtgtctgatcaaacagatgacattcctggaggaaataaccctagcacaacagaggcaacagtagacctggaagatgaaaaagaaagaagttgaaattagtcattttaagtttcagtgtaccaacgataagggcatttggaacagtgctatcaggtgagctcagtggtgctgttgtaggttcagaaatggaaatatgtaagggaggtcacacatacactttacctgtatgttcaacctatgttatcaaacaaatcaattcaccaataatagcatgattagtagggattcccaaaaagtttttaaaaacacgaacaggattttaatgataattaaatttgcagtggaaaggtctcatttaatggttttcaaggaaatgggatttggttgctgacatgaattgatgatattagtaatatttataaagcctttcaaacttccatcaatcctaagctaaaaatctttattacctgtatatccttttcagttaactgagaggaagggatttggaaaccatgtacttttggggagtaattgattaaaaacaatggctgattggcattgttaatgaaggctttatttgtgaggatgatgctggtaaatggagcatgcttagagtactaaattgatctaatgagaatttggatgaacataaacttaattttggatttaatataacattccagtcagacgcatgtaaacagaatatttgaatctttgtacctccatacaagtgttagcctgccaggctgtaagcttaccttaattaaactttcagtgaaagtggaattattaagatataaatttatatttgtgctttttgtcagtgtgtaagctgtgtagaaattctttgatgtattagttgtattaatgtaaagtagaaacccattgttgaaactcctgtagctattatgcttttaatattgttttaatgatcttccttagaaataggcccataaaaatggtctggaagccaaaccaaagtatggtataatgtagatattgtaaagcagtaaactgaaaacatgtcctggcatgtattcagccatgtttaagtgacttttctgtaattgtaaaataaaaacttcaaatgggacctaaaacagtgatgtaaaagaactggttttggaaatttagcctaatttatctataagatggctgctaaattgatttttcagttctttttatcatctagaatataatagatatagaaatgaataatatgaagaacagtagtttgctttgaaatactaataaacttttatttaaaatgcttcatttttacttcttaaaatgtgctttggattcttaaattttgtttcactgaatgttcaatgttttaaatggcgattaaaatactctgctgtatatagtagtttttgagtaaatatttgcaataaaaatctgcccccgaa

SEQ ID NO: 369203 - DNA, 398 bp, Homo sapiens
tcacgcctgtaattccagcactttgggaggccgaggcgggtggatcactttaggtcagaagttcaagactagcctggccaacatggtgaaaccctttctctaccaaaaaaatacaaaaactagccgggtgtggtggtacatgcttgtagtcccagctattcgagcctgggtgacacggcaaaaccctagctccaaaaaaacatttttttaaaaaagaagccaggcctggtagtgcacgcctgtagtcccagctactcaggtgggtaaagtaagaggatggcttgagcctgggagttcaaggttgcaatgaaacatgattgcaccactgtactctagtctgggtgacagagtgagaccctgtctcacactctgtccccaaccccccctccaaaaaaaaa

SEQ ID NO: 369204 - DNA, 311 bp, Homo sapiens
tggaactttgatttattttatttactctagatgtgctcatcctcccagaagaggtggaatggatcaaatttaatgtgggcatgaatggctattacattgtgcattacgaggatgatggatgggactctttgactggccttttaaaaggaacacacacagcagtcagcagtaatgatcgggcaagtctcattaacaatgcatttcagctcgtcaggtaatacacgctgcacaaagtcgcggtttatttctgaaagcagctgttattgttcaaattcttgatttctaaagacaaaaatgatcgattgataaca

SEQ ID NO: 369205 - DNA, 4986 bp, Homo sapiens
accaattcccttcctgggagttgcggcttccctcgctcggccccactcccgtttaccctttccccagctcccgccttagccaggggcttccccgcctgccgctagggctcgggccgaagcgccgctcagcgccagcctgccgctccccgggctccactttcactttcggtcctgggggagctaggccggcggcagtggtggtggcggcggcgcaagggtgagggcggccccagaaccccaggtaggtagagcaagaagatggtgtttctgcccctcaaatggtcccttgcaaccatgtcatttctactttcctcactgttggctctcttaactgtgtccactccttcatggtgtcagagcactgaagcatctccaaaacgtagtgatgggacaccatttccttggaataaaatacgacttcctgagtacgtcatcccagttcattatgatctcttgatccatgcaaaccttaccacgctgaccttctggggaaccacgaaagtagaaatcacagccagtcagcccaccagcaccatcatcctgcatagtcaccacctgcagatatctagggccaccctcaggaagggagctggagagaggctatcggaagaacccctgcaggtcctggaacacccccgtcaggagcaaattgcactgctggctcccgagcccctccttgtcgggctcccgtacacagttgtcattcactatgctggcaatctttcggagactttccacggattttacaaaagcacctacagaaccaaggaaggggaactgaggatactagcatcaacacaatttgaacccactgcagctagaatggcctttccctgctttgatgaacctgccttcaaagcaagtttctcaatcaaaattagaagagagccaaggcacctagccatctccaatatgccattggtgaaatctgtgactgttgctgaaggactcatagaagaccattttgatgtcactgtgaagatgagcacctatctggtggccttcatcatttcagattttgagtctgtcagcaagataaccaagagtggagtcaaggtttctgtttatgctgtgccagacaagataaatcaagcagattatgcactggatgctgcggtgactcttctagaattttatgaggattatttcagcataccgtatcccctacccaaacaagatcttgctgctattcccgactttcagtctggtgctatggaaaactggggactgacaacatatagagaatctgctctgttgtttgatgcagaaaagtcttctgcatcaagtaagcttggcatcacaatgactgtggcccatgaactggctcaccagtggtttgggaacctggtcactatggaatggtggaatgatctttggctaaatgaaggatttgccaaatttatggagtttgtgtctgtcagtgtgacccatcctgaactgaaagttggagattatttctttggcaaatgttttgacgcaatggaggtagatgctttaaattcctcacaccctgtgtctacacctgtggaaaatcctgctcagatccgggagatgtttgatgatgtttcttatgataagggagcttgtattctgaatatgctaagggagtatcttagtgctgacgcatttaaaagtggtattgtacagtatctccagaagcatagctataaaaatacaaaaaacgaggacctgtgggatagtatggcaagtatttgccctacagatggtgtaaaagggatggatggcttttgctctagaagtcaacattcatcttcatcctcacattggcatcaggaaggggtggatgtgaaaaccatgatgaacacttggacactgcagaagggttttcccctaataaccatcacagtgagggggaggaatgtacacatgaagcaagagcactacatgaagggctctgacggcgccccggacactgggtacctgtggcatgttccattgacattcatcaccagcaaatccgacatggtccatcgatttttgctaaaaacaaaaacagatgtgctcatcctcccagaagaggtggaatggatcaaatttaatgtgggcatgaatggctattacattgtgcattacgaggatgatggatgggactctttgactggccttttaaaaggaacacacacagcagtcagcagtaatgatcgggcaagtctcattaacaatgcatttcagctcgtcagcattgggaagctgtccattgaaaaggccttggatttatccctgtacttgaaacatgaaactgaaattatgcccgtgtttcaaggtttgaatgagctgattcctatgtataagttaatggagaaaagagatatgaatgaagtggaaactcaattcaaggccttcctcatcaggctgctaagggacctcattgataagcagacatggacagacgagggctcagtctcagagcgaatgctgcggagtcaactactactcctcgcctgtgtgcacaactatcagccgtgcgtacagagggcagaaggctatttcagaaagtggaaggaatccaatggaaacttgagcctgcctgtcgacgtgaccttggcagtgtttgctgtgggggcccagagcacagaaggctgggattttctttatagtaaatatcagttttctttgtccagtactgagaaaagccaaattgaatttgccctctgcagaacccaaaataaggaaaagcttcaatggctactagatgaaagctttaagggagataaaataaaaactcaggagtttccacaaattcttacactcattggcaggaacccagtaggatacccactggcctggcaatttctgaggaaaaactggaacaaacttgtacaaaagtttgaacttggctcatcttccatagcccacatggtaatgggtacaacaaatcaattctccacaagaacacggcttgaagaggtaaaaggattcttcagctctttgaaagaaaatggttctcagctccgttgtgtccaacagacaattgaaaccattgaagaaaacatcggttggatggataagaattttgataaaatcagagtgtggctgcaaagtgaaaagcttgaacgtatgtaaaaattcctcccttgccaggttcctgttatctctaatcaccaacattttgttgagtgtattttcaaactagagatggctgttttggctccaactggagatacttttttcccttcaactcattttttgactatccctgtgaaaagaatagctgttagtttttcatgaatgggctatcgctaccatgtgttttgttcatcacaggtgttgccctgcaacgtaaacccaagtgttgggttccctgccacagaagaataaagtaccttattcttctcattttatagtttatgcttaagcacccgtgtccaaaaccctgtaccccatgtttatcattcataaactgtttcatcagtctcctcgaaagactctgaatagtcgactactgaacaatgaacacctggatctgagactaagccggacgatgactgggttaaagctctcccggctcacccctccagacccgctgcccatccctcttccttgctccatgcccaggggctgacttgtaaaggccaagtcatcaagctttcttgccctttggatgttggtcagtggggagccggagagctggagctggggtcggaggaggtagtaggtggaggtgttcttccctgattcccttgcgggatgcctcgggctggcctcccctgagggtcttagctccgagaggggaccctcttttccacacagccttctccacctctggattttggtaactgctccctcctcatcccttcaggattagtggcctcagtgggagtctggcttttactagtcctggcggacttgtggtttctacataatgtgctcgcacttttgcaaaaaatctttttatagaaccctcctcagataattctgagtgtcatctatttccctgactggtacagtatctcttctgaaaaagcagagtgcattcaagtctgtaggaaaacccttttcttagggaggtgattttttttctctctctgcttcttatttggcctactttacaatttctaactaactagttattggcatttactgacagtaaattattgcagtcaccaataaatgatagtacattgtgaaacaaaatatttgctcatattagcaaataggacattctttggctttgaagtctttcttttgtgaagacttcacacacggttgcttcagcacacagttgctgctcaggttttatgtatagatgataataatagaaagcacagtttactaacatggtaaaccaacggagttcaagtcaagtcagttaataccctaagaattagattttatttcttattctgaaaacttgctacacagggacttatctaacccatagtgtgctctgttgctgacttgattcaagttgcagcgtgttttgcgctgactctaaggtgcggaaatcctcacacctggcaaaggagaattcaaactgaactttttgaatataaggcaaaaacttcaagataagggaatatgattgatgattggtacgaaaaatgtcaaaatgtgttcccctaatacacgacaaaatagagtgacttctggacataaatctgccatttattaaaccattcactacaacaaataaataggtataaaagtggaattggaatttttatacttatttgttgtagtgaatggtttaataaaaatagaaatcactggtaatttccaccccaaactaaactatttcccttcttttaaaaaaatacacaaccaagattttaatgtaaaatattttgctttaattgtattttatgccttgattaatgaaacatggaaatattgattttcagttttggtcacctgaggaacctatctttgtttgcttttggaaaagcccattttctaaacagatacaatattgccacaacaatgtgcagaaacctttttgataataaaaaattgttctttgcctct

SEQ ID NO: 369206 - DNA, 475 bp, Homo sapiens
ccaagtgtttcctcagcttttctgcaccttcctctccattgacctagagtgtctatggaacactcagagtgtcccctgtgtaaaccacctaccacaagattatcaacttcaggcaatggaccacgcaccaggattccacctctttctagcacctatcagtgttgcgcacatcataggccctcaacaaacagtgtgagagaaacctgtgacttgcttctaacccataggatatggcaaggaactagtcatatctgagagcagcctccagaaaacagtcagcaaaacactgaggttctcaatccgatagtcaatgaggaacggaatgctggaacaatgatgtgagcttggaagcagatccttcccttctgctgggcctcaggtgagactgcagctccagtcatcatcttgattgcagcccacagaaactaccaacccacagaaactgtgagttaataaatgtgttgttttaaaatga

SEQ ID NO: 369207 - DNA, 6765 bp, Homo sapiens
  misc_feature (5820)..(5820): n is a, c, g, or t
accaattcccttcctgggagttgcggcttccctcgctcggccccactcccgtttaccctttccccagctcccgccttagccaggggcttccccgcctgccgctagggctcgggccgaagcgccgctcagcgccagcctgccgctccccgggctccactttcactttcggtcctgggggagctaggccggcggcagtggtggtggcggcggcgcaagggtgagggcggccccagaaccccaggtaggtagagcaagaagatggtgtttctgcccctcaaatggtcccttgcaaccatgtcatttctactttcctcactgttggctctcttaactgtgtccactccttcatggtgtcagagcactgaagcatctccaaaacgtagtgatgggacaccatttccttggaataaaatacgacttcctgagtacgtcatcccagttcattatgatctcttgatccatgcaaaccttaccacgctgaccttctggggaaccacgaaagtagaaatcacagccagtcagcccaccagcaccatcatcctgcatagtcaccacctgcagatatctagggccaccctcaggaagggagctggagagaggctatcggaagaacccctgcaggtcctggaacacccccgtcaggagcaaattgcactgctggctcccgagcccctccttgtcgggctcccgtacacagttgtcattcactatgctggcaatctttcggagactttccacggattttacaaaagcacctacagaaccaaggaaggggaactgaggatactagcatcaacacaatttgaacccactgcagctagaatggcctttccctgctttgatgaacctgccttcaaagcaagtttctcaatcaaaattagaagagagccaaggcacctagccatctccaatatgccattggtgaaatctgtgactgttgctgaaggactcatagaagaccattttgatgtcactgtgaagatgagcacctatctggtggccttcatcatttcagattttgagtctgtcagcaagataaccaagagtggagtcaaggtttctgtttatgctgtgccagacaagataaatcaagcagattatgcactggatgctgcggtgactcttctagaattttatgaggattatttcagcataccgtatcccctacccaaacaagatcttgctgctattcccgactttcagtctggtgctatggaaaactggggactgacaacatatagagaatctgctctgttgtttgatgcagaaaagtcttctgcatcaagtaagcttggcatcacaatgactgtggcccatgaactggctcaccagtggtttgggaacctggtcactatggaatggtggaatgatctttggctaaatgaaggatttgccaaatttatggagtttgtgtctgtcagtgtgacccatcctgaactgaaagttggagattatttctttggcaaatgttttgacgcaatggaggtagatgctttaaattcctcacaccctgtgtctacacctgtggaaaatcctgctcagatccgggagatgtttgatgatgtttcttatgataagggagcttgtattctgaatatgctaagggagtatcttagtgctgacgcatttaaaagtggtattgtacagtatctccagaagcatagctataaaaatacaaaaaacgaggacctgtgggatagtatggcaagtatttgccctacagatggtgtaaaagggatggatggcttttgctctagaagtcaacattcatcttcatcctcacattggcatcaggaaggggtggatgtgaaaaccatgatgaacacttggacactgcagaagggttttcccctaataaccatcacagtgagggggaggaatgtacacatgaagcaagagcactacatgaagggctctgacggcgccccggacactgggtacctgtggcatgttccattgacattcatcaccagcaaatccgacatggtccatcgatttttgctaaaaacaaaaacagatgtgctcatcctcccagaagaggtggaatggatcaaatttaatgtgggcatgaatggctattacattgtgcattacgaggatgatggatgggactctttgactggccttttaaaaggaacacacacagcagtcagcagtaatgatcgggcaagtctcattaacaatgcatttcagctcgtcagcattgggaagctgtccattgaaaaggccttggatttatccctgtacttgaaacatgaaactgaaattatgcccgtgtttcaaggtttgaatgagctgattcctatgtataagttaatggagaaaagagatatgaatgaagtggaaactcaattcaaggccttcctcatcaggctgctaagggacctcattgataagcagacatggacagacgagggctcagtctcagagcgaatgctgcggagtcaactactactcctcgcctgtgtgcacaactatcagccgtgcgtacagagggcagaaggctatttcagaaagtggaaggaatccaatggaaacttgagcctgcctgtcgacgtgaccttggcagtgtttgctgtgggggcccagagcacagaaggctgggattttctttatagtaaatatcagttttctttgtccagtactgagaaaagccaaattgaatttgccctctgcagaacccaaaataaggaaaagcttcaatggctactagatgaaagctttaagggagataaaataaaaactcaggagtttccacaaattcttacactcattggcaggaacccagtaggatacccactggcctggcaatttctgaggaaaaactggaacaaacttgtacaaaagtttgaacttggctcatcttccatagcccacatggtaatgggtacaacaaatcaattctccacaagaacacggcttgaagaggtaaaaggattcttcagctctttgaaagaaaatggttctcagctccgttgtgtccaacagacaattgaaaccattgaagaaaacatcggttggatggataagaattttgataaaatcagagtgtggctgcaaagtgaaaagcttgaacatgatcctgaagctgacgcaacaggatgaaaatccatcagaatctcagactacagcactaaatatgctttgatgctacatcaaacggaatggaagcatagctgacttcgctaaagttacttcatctccatctagcaaatgaggcactgttctcaaccaaaggagatggggatctggtttagggcaatccctttataatttgatgtgctgtggtctccttggtaatgtataatttggtattgcacaggtgattagtcaaggaagtctggaaaagctttggtcccacagccttgcctcacagcatgtaaataattaaaacaatattgatgctgaggttcttctactgctagtatgaaagtgacaaatttttactggtgtgaattgggaagaaaacaatgctattccatgacgtttgtaaaatgtttgtaaaagctcaaacatgacgattccataaaataaacttgaggttaaataatgggtagtaaattatagaatgtataagaaaaaatataaaggagaaaatcaattatcaggaaagctaaagaacttttcaaatctagtaatttgaatatagacacaatgcactttattgcactttcaattcttataaagcaacaataatattaaggtccttgactatgtgtacaatgttttcacatatatagtttcatttaatcatttcaaagttaatctctgccatctcgctaaatcatcagtctcggctcttctgaaatagaaggtgcctgatcttcctaataattctgcctattttcatttgctttaaacaggcgccctattttctttctagttgtggctgcgcaaaaacatttatctcccaaataagatgtgctgcttaccgaggtatcacggggtggggctccagcttgggtcgttgaagctggggtttgggaaaccacttcagagatggcagcagcaagtttagcatcttcaaatttcttttattgaaaaaaattttattagtaacatgttgtatataaaattatgagcacaatgccatcacttaactataactcttaaagatagcttaatgactgtttattctcttgaccaaatagactcataataacatataattttaaaagaaatttaaattctttcttctctattgtattattttatacaatttgctatttctatttccttctcatattgattattctaaatactatgcaataatataacttagagttccacggtttgtttacacatttcctgttgtacatttaggttattcaaagttttcagctcttttaaaattgctctgaataagttctagtgagtgagttatggtgctggctatattttgctaaactgccctctcaaatgttgctaggaattcatactgcgaaaagcaatgaataagcatgcctgttttcccatggccttgcttgccagaatttgacttttattatgataatcagtgtaaaatgatatactactattgcttgtatattgtggtatacggtgtcaggtttcagggttttttttcaacgttaaatattctagaaactttctgaaataatttctgtttaaaaatattgaatatttgcttcatttcaaatactcccttttgacaaaaaaacttaggtataactgttgatgaaaaaccagaaaaaagtccagaactctttggtgactccaactatggatagcttattttgaaaaaggagaattgcaaattttaccaaaagatggagaaaagcacattaaaaagataccaacattcagaaattcatttcagcatgttattattggaaattatttaaactaatttagataactataagatacttattgtccatttataccctgtaaagccgttttagaatgtaatattttaggtaatccaaaatgtactaaattaaattcatttttagttatgagaaatctttgcttatatgacaaatgaaaagaataacaagttgtcaaatgaaaagaatgacattgaaacatttgtattgtctcttcttaaactatcttattgacttattatttaagccttttaatactaagtatgaaacaacctatggtctggaaatttgtatcgcaaagctatatgtgcatatgttatttaattcatctaacgctacacaaaagcataaaataatgatttttcactctctttaaaaatactaaatcatttatgtccatttctcaattttttcattgatctatgctttgagtttgctttctcaacattattgtattttccacttattattactgtataacatatgctagtgtttagttggattaatcttacctaaaagtactgaaaaatgctttttagtactttttcatattttatacatttattttccgaatgtatcattgaataattttattgagttataaaagtatcttattgctatttaataaaaaattaacacataaaatgacttgaattgtcatcattctttttaagatatttagttaaactgacttaatgtatggccttcaatttttttgtgtccttatttttctgatcatttctccttttatagtttacattaagtctgatctcatattaattacattttctcatctgttgttactaataaacatggcataatgttacttacaaatgtattatctacaagtagtgctatccacaaatatattcaaatgttcccttttaatgtttgtcatttttttcatgtgttgttaatgattcttccatgtgataataagcagaaatgacaataaacttttcatagtttctgnttttaaggaaaatgcctccagcatgatattgaatatttgattctgaaaactaaagactctttaacagattaggggattgcctactttttaaaaagtttttatttataatatgagtatatgtaaaattttaaatagatcttttacatggacatgattatttgtttctatttgatataccactacaatatattgacagttttcctgctactgaatcaatacttataatggcaaataatttaactgtttgttatattctatgtatgctgtatgtaatttttacatctacacatttaagtaactttagctgataccgttatatttgtcagattttaagattagcaccataattactcatagaagcaactatgtgaccccatctttttcatgacatatttatgccacataagaactgagtgttcaacagttagagtcatctttaaaccttcagtagaaggacagtttgaaaatcattgcaatattttcttcagtctttttttaggttttgtgaattacgcagtttaatatttttgtttaatcttagaaaattgttgtacatagtgtttcctaataatttatttgtgctctgtactgattattgtattttctcacatttatgttaaattttattagtaagattattttctctatttatcagttttgtaaaatgttaaaaattcataaaagccaactgactattggctttaaactaccaataatttagttgatctctatattattatattactctgttaaaatttaattgtattttttgtaaggttttttttcctcttttatatttgctagtattttataaagtatttgttatttcaaaagaaacaactattggccagttaactttcatgccgctattttcatttcctggtatgcttattgctactttgtttttggtggctaccttattaaaacttttagaaatttcagttt

SEQ ID NO: 369208 - DNA, 6968 bp, Homo sapiens
  misc_feature (6023)..(6023): n is a, c, g, or t
ccaagtgtttcctcagcttttctgcaccttcctctccattgacctagagtgtctatggaacactcagagtgtcccctgtgtaaaccacctaccacaagattatcaacttcaggcaatggaccacgcaccaggattccacctctttctagcacctatcagtgttgcgcacatcataggccctcaacaaacagtgtgagagaaacctgtgacttgcttctaacccataggatatggcaaggaactagtcatatctgagagcagcctccagaaaacagtcagcaaaacactgaggttctcaatccgatagtcaatgaggaacggaatgctggaacaatgatgtgagcttggaagcagatccttcccttctgctgggcctcaggtgagactgcagctccagtcatcatcttgattgcagcccacagaaactaccaacccacagaaactgtaggtagagcaagaagatggtgtttctgcccctcaaatggtcccttgcaaccatgtcatttctactttcctcactgttggctctcttaactgtgtccactccttcatggtgtcagagcactgaagcatctccaaaacgtagtgatgggacaccatttccttggaataaaatacgacttcctgagtacgtcatcccagttcattatgatctcttgatccatgcaaaccttaccacgctgaccttctggggaaccacgaaagtagaaatcacagccagtcagcccaccagcaccatcatcctgcatagtcaccacctgcagatatctagggccaccctcaggaagggagctggagagaggctatcggaagaacccctgcaggtcctggaacacccccgtcaggagcaaattgcactgctggctcccgagcccctccttgtcgggctcccgtacacagttgtcattcactatgctggcaatctttcggagactttccacggattttacaaaagcacctacagaaccaaggaaggggaactgaggatactagcatcaacacaatttgaacccactgcagctagaatggcctttccctgctttgatgaacctgccttcaaagcaagtttctcaatcaaaattagaagagagccaaggcacctagccatctccaatatgccattggtgaaatctgtgactgttgctgaaggactcatagaagaccattttgatgtcactgtgaagatgagcacctatctggtggccttcatcatttcagattttgagtctgtcagcaagataaccaagagtggagtcaaggtttctgtttatgctgtgccagacaagataaatcaagcagattatgcactggatgctgcggtgactcttctagaattttatgaggattatttcagcataccgtatcccctacccaaacaagatcttgctgctattcccgactttcagtctggtgctatggaaaactggggactgacaacatatagagaatctgctctgttgtttgatgcagaaaagtcttctgcatcaagtaagcttggcatcacaatgactgtggcccatgaactggctcaccagtggtttgggaacctggtcactatggaatggtggaatgatctttggctaaatgaaggatttgccaaatttatggagtttgtgtctgtcagtgtgacccatcctgaactgaaagttggagattatttctttggcaaatgttttgacgcaatggaggtagatgctttaaattcctcacaccctgtgtctacacctgtggaaaatcctgctcagatccgggagatgtttgatgatgtttcttatgataagggagcttgtattctgaatatgctaagggagtatcttagtgctgacgcatttaaaagtggtattgtacagtatctccagaagcatagctataaaaatacaaaaaacgaggacctgtgggatagtatggcaagtatttgccctacagatggtgtaaaagggatggatggcttttgctctagaagtcaacattcatcttcatcctcacattggcatcaggaaggggtggatgtgaaaaccatgatgaacacttggacactgcagaagggttttcccctaataaccatcacagtgagggggaggaatgtacacatgaagcaagagcactacatgaagggctctgacggcgccccggacactgggtacctgtggcatgttccattgacattcatcaccagcaaatccgacatggtccatcgatttttgctaaaaacaaaaacagatgtgctcatcctcccagaagaggtggaatggatcaaatttaatgtgggcatgaatggctattacattgtgcattacgaggatgatggatgggactctttgactggccttttaaaaggaacacacacagcagtcagcagtaatgatcgggcaagtctcattaacaatgcatttcagctcgtcagcattgggaagctgtccattgaaaaggccttggatttatccctgtacttgaaacatgaaactgaaattatgcccgtgtttcaaggtttgaatgagctgattcctatgtataagttaatggagaaaagagatatgaatgaagtggaaactcaattcaaggccttcctcatcaggctgctaagggacctcattgataagcagacatggacagacgagggctcagtctcagagcgaatgctgcggagtcaactactactcctcgcctgtgtgcacaactatcagccgtgcgtacagagggcagaaggctatttcagaaagtggaaggaatccaatggaaacttgagcctgcctgtcgacgtgaccttggcagtgtttgctgtgggggcccagagcacagaaggctgggattttctttatagtaaatatcagttttctttgtccagtactgagaaaagccaaattgaatttgccctctgcagaacccaaaataaggaaaagcttcaatggctactagatgaaagctttaagggagataaaataaaaactcaggagtttccacaaattcttacactcattggcaggaacccagtaggatacccactggcctggcaatttctgaggaaaaactggaacaaacttgtacaaaagtttgaacttggctcatcttccatagcccacatggtaatgggtacaacaaatcaattctccacaagaacacggcttgaagaggtaaaaggattcttcagctctttgaaagaaaatggttctcagctccgttgtgtccaacagacaattgaaaccattgaagaaaacatcggttggatggataagaattttgataaaatcagagtgtggctgcaaagtgaaaagcttgaacatgatcctgaagctgacgcaacaggatgaaaatccatcagaatctcagactacagcactaaatatgctttgatgctacatcaaacggaatggaagcatagctgacttcgctaaagttacttcatctccatctagcaaatgaggcactgttctcaaccaaaggagatggggatctggtttagggcaatccctttataatttgatgtgctgtggtctccttggtaatgtataatttggtattgcacaggtgattagtcaaggaagtctggaaaagctttggtcccacagccttgcctcacagcatgtaaataattaaaacaatattgatgctgaggttcttctactgctagtatgaaagtgacaaatttttactggtgtgaattgggaagaaaacaatgctattccatgacgtttgtaaaatgtttgtaaaagctcaaacatgacgattccataaaataaacttgaggttaaataatgggtagtaaattatagaatgtataagaaaaaatataaaggagaaaatcaattatcaggaaagctaaagaacttttcaaatctagtaatttgaatatagacacaatgcactttattgcactttcaattcttataaagcaacaataatattaaggtccttgactatgtgtacaatgttttcacatatatagtttcatttaatcatttcaaagttaatctctgccatctcgctaaatcatcagtctcggctcttctgaaatagaaggtgcctgatcttcctaataattctgcctattttcatttgctttaaacaggcgccctattttctttctagttgtggctgcgcaaaaacatttatctcccaaataagatgtgctgcttaccgaggtatcacggggtggggctccagcttgggtcgttgaagctggggtttgggaaaccacttcagagatggcagcagcaagtttagcatcttcaaatttcttttattgaaaaaaattttattagtaacatgttgtatataaaattatgagcacaatgccatcacttaactataactcttaaagatagcttaatgactgtttattctcttgaccaaatagactcataataacatataattttaaaagaaatttaaattctttcttctctattgtattattttatacaatttgctatttctatttccttctcatattgattattctaaatactatgcaataatataacttagagttccacggtttgtttacacatttcctgttgtacatttaggttattcaaagttttcagctcttttaaaattgctctgaataagttctagtgagtgagttatggtgctggctatattttgctaaactgccctctcaaatgttgctaggaattcatactgcgaaaagcaatgaataagcatgcctgttttcccatggccttgcttgccagaatttgacttttattatgataatcagtgtaaaatgatatactactattgcttgtatattgtggtatacggtgtcaggtttcagggttttttttcaacgttaaatattctagaaactttctgaaataatttctgtttaaaaatattgaatatttgcttcatttcaaatactcccttttgacaaaaaaacttaggtataactgttgatgaaaaaccagaaaaaagtccagaactctttggtgactccaactatggatagcttattttgaaaaaggagaattgcaaattttaccaaaagatggagaaaagcacattaaaaagataccaacattcagaaattcatttcagcatgttattattggaaattatttaaactaatttagataactataagatacttattgtccatttataccctgtaaagccgttttagaatgtaatattttaggtaatccaaaatgtactaaattaaattcatttttagttatgagaaatctttgcttatatgacaaatgaaaagaataacaagttgtcaaatgaaaagaatgacattgaaacatttgtattgtctcttcttaaactatcttattgacttattatttaagccttttaatactaagtatgaaacaacctatggtctggaaatttgtatcgcaaagctatatgtgcatatgttatttaattcatctaacgctacacaaaagcataaaataatgatttttcactctctttaaaaatactaaatcatttatgtccatttctcaattttttcattgatctatgctttgagtttgctttctcaacattattgtattttccacttattattactgtataacatatgctagtgtttagttggattaatcttacctaaaagtactgaaaaatgctttttagtactttttcatattttatacatttattttccgaatgtatcattgaataattttattgagttataaaagtatcttattgctatttaataaaaaattaacacataaaatgacttgaattgtcatcattctttttaagatatttagttaaactgacttaatgtatggccttcaatttttttgtgtccttatttttctgatcatttctccttttatagtttacattaagtctgatctcatattaattacattttctcatctgttgttactaataaacatggcataatgttacttacaaatgtattatctacaagtagtgctatccacaaatatattcaaatgttcccttttaatgtttgtcatttttttcatgtgttgttaatgattcttccatgtgataataagcagaaatgacaataaacttttcatagtttctgnttttaaggaaaatgcctccagcatgatattgaatatttgattctgaaaactaaagactctttaacagattaggggattgcctactttttaaaaagtttttatttataatatgagtatatgtaaaattttaaatagatcttttacatggacatgattatttgtttctatttgatataccactacaatatattgacagttttcctgctactgaatcaatacttataatggcaaataatttaactgtttgttatattctatgtatgctgtatgtaatttttacatctacacatttaagtaactttagctgataccgttatatttgtcagattttaagattagcaccataattactcatagaagcaactatgtgaccccatctttttcatgacatatttatgccacataagaactgagtgttcaacagttagagtcatctttaaaccttcagtagaaggacagtttgaaaatcattgcaatattttcttcagtctttttttaggttttgtgaattacgcagtttaatatttttgtttaatcttagaaaattgttgtacatagtgtttcctaataatttatttgtgctctgtactgattattgtattttctcacatttatgttaaattttattagtaagattattttctctatttatcagttttgtaaaatgttaaaaattcataaaagccaactgactattggctttaaactaccaataatttagttgatctctatattattatattactctgttaaaatttaattgtattttttgtaaggttttttttcctcttttatatttgctagtattttataaagtatttgttatttcaaaagaaacaactattggccagttaactttcatgccgctattttcatttcctggtatgcttattgctactttgtttttggtggctaccttattaaaacttttagaaatttcagttt

SEQ ID NO: 369209 - DNA, 5165 bp, Homo sapiens
accaattcccttcctgggagttgcggcttccctcgctcggccccactcccgtttaccctttccccagctcccgccttagccaggggcttccccgcctgccgctagggctcgggccgaagcgccgctcagcgccagcctgccgctccccgggctccactttcactttcggtcctgggggagctaggccggcggcagtggtggtggcggcggcgcaagggtgagggcggccccagaaccccaggtaggtagagcaagaagatggtgtttctgcccctcaaatggtcccttgcaaccatgtcatttctactttcctcactgttggctctcttaactgtgtccactccttcatggtgtcagagcactgaagcatctccaaaacgtagtgatgggacaccatttccttggaataaaatacgacttcctgagtacgtcatcccagttcattatgatctcttgatccatgcaaaccttaccacgctgaccttctggggaaccacgaaagtagaaatcacagccagtcagcccaccagcaccatcatcctgcatagtcaccacctgcagatatctagggccaccctcaggaagggagctggagagaggctatcggaagaacccctgcaggtcctggaacacccccgtcaggagcaaattgcactgctggctcccgagcccctccttgtcgggctcccgtacacagttgtcattcactatgctggcaatctttcggagactttccacggattttacaaaagcacctacagaaccaaggaaggggaactgaggatactagcatcaacacaatttgaacccactgcagctagaatggcctttccctgctttgatgaacctgccttcaaagcaagtttctcaatcaaaattagaagagagccaaggcacctagccatctccaatatgccattggtgaaatctgtgactgttgctgaaggactcatagaagaccattttgatgtcactgtgaagatgagcacctatctggtggccttcatcatttcagattttgagtctgtcagcaagataaccaagagtggagtcaaggtttctgtttatgctgtgccagacaagataaatcaagcagattatgcactggatgctgcggtgactcttctagaattttatgaggattatttcagcataccgtatcccctacccaaacaagatcttgctgctattcccgactttcagtctggtgctatggaaaactggggactgacaacatatagagaatctgctctgttgtttgatgcagaaaagtcttctgcatcaagtaagcttggcatcacaatgactgtggcccatgaactggctcaccagtggtttgggaacctggtcactatggaatggtggaatgatctttggctaaatgaaggatttgccaaatttatggagtttgtgtctgtcagtgtgacccatcctgaactgaaagttggagattatttctttggcaaatgttttgacgcaatggaggtagatgctttaaattcctcacaccctgtgtctacacctgtggaaaatcctgctcagatccgggagatgtttgatgatgtttcttatgataagggagcttgtattctgaatatgctaagggagtatcttagtgctgacgcatttaaaagtggtattgtacagtatctccagaagcatagctataaaaatacaaaaaacgaggacctgtgggatagtatggcaagtatttgccctacagatggtgtaaaagggatggatggcttttgctctagaagtcaacattcatcttcatcctcacattggcatcaggaaggggtggatgtgaaaaccatgatgaacacttggacactgcagaagggttttcccctaataaccatcacagtgagggggaggaatgtacacatgaagcaagagcactacatgaagggctctgacggcgccccggacactgggtacctgtggcatgttccattgacattcatcaccagcaaatccgacatggtccatcgatttttgctaaaaacaaaaacagatgtgctcatcctcccagaagaggtggaatggatcaaatttaatgtgggcatgaatggctattacattgtgcattacgaggatgatggatgggactctttgactggccttttaaaaggaacacacacagcagtcagcagtaatgatcgggcaagtctcattaacaatgcatttcagctcgtcagcattgggaagctgtccattgaaaaggccttggatttatccctgtacttgaaacatgaaactgaaattatgcccgtgtttcaaggtttgaatgagctgattcctatgtataagttaatggagaaaagagatatgaatgaagtggaaactcaattcaaggccttcctcatcaggctgctaagggacctcattgataagcagacatggacagacgagggctcagtctcagagcgaatgctgcggagtcaactactactcctcgcctgtgtgcacaactatcagccgtgcgtacagagggcagaaggctatttcagaaagtggaaggaatccaatggaaacttgagcctgcctgtcgacgtgaccttggcagtgtttgctgtgggggcccagagcacagaaggctgggattttctttatagtaaatatcagttttctttgtccagtactgagaaaagccaaattgaatttgccctctgcagaacccaaaataaggaaaagcttcaatggctactagatgaaagctttaagggagataaaataaaaactcaggagtttccacaaattcttacactcattggcaggaacccagtaggatacccactggcctggcaatttctgaggaaaaactggaacaaacttgtacaaaagtttgaacttggctcatcttccatagcccacatggtaatgggtacaacaaatcaattctccacaagaacacggcttgaagaggtaaaaggattcttcagctctttgaaagaaaatggttctcagctccgttgtgtccaacagacaattgaaaccattgaagaaaacatcggttggatggataagaattttgataaaatcagagtgtggctgcaaagtgaaaagcttgaacgtatgtaaaaattcctcccttgccaggttcctgttatctctaatcaccaacattttgttgagtgtattttcaaactagagatggctgttttggctccaactggagatacttttttcccttcaactcattttttgactatccctgtgaaaagaatagctgttagtttttcatgaatgggctatcgctaccatgtgttttgttcatcacaggtgttgccctgcaacgtaaacccaagtgttgggttccctgccacagaagaataaagtaccttattcttctcattttatagtttatgcttaagcacccgtgtccaaaacctctgaatagtcgactactgaacaatgaacacctggatctgagactaagccggacgatgactgggttaaagctctcccggctcacccctccagacccgctgcccatccctcttccttgctccatgcccaggggctgacttgtaaaggccaagtcatcaagctttcttgccctttggatgttggtcagtggggagccggagagctggagctggggtcggaggaggtagtaggtggaggtgttcttccctgattcccttgcgggatgcctcgggctggcctcccctgagggtcttagctccgagaggggaccctcttttccacacagccttctccacctctggattttggtaactgctccctcctcatcccttcaggattagtggcctcagtgggagtctggcttttactagtcctggcggacttgtggtttctacataatgtgctcgcacttttgcaaaaaatctttttatagaaccctcctcagataattctgagtgtcatctatttccctgactggtacagtatctcttctgaaaaagcagagtgcattcaagtctgtaggaaaacccttttcttagggaggtgattttttttctctctctgcttcttatttggcctactttacaatttctaactaactagttattggcatttactgacagtaaattattgcagtcaccaataaatgatagtacattgtgaaacaaaatatttgctcatattagcaaataggacattctttggctttgaagtctttcttttgtgaagacttcacacacggttgcttcagcacacagttgctgctcaggttttatgtatagatgataataatagaaagcacagtttactaacatggtaaaccaacggagttcaagtcaagtcagttaataccctaagaattagattttatttcttattctgaaaacttgctacacagggacttatctaacccatagtgtgctctgttgctgacttgattcaagttgcagcgtgttttgcgctgactctaaggtgcggaaatcctcacacctggcaaaggagaattcaaactgaactttttgaatggtttaataaaaatagaaatcactggtaatttccaccccaaactaaactatttcccttcttttaaaaaaatacacaaccaagattttaatgtaaaatattttgctttaattgtattttatgccttgattaatgaaacatggaaatattgattttcagttttggtcacctgaggaacctatctttgtttgcttttggaaaagcccattttctaaacagatacaatattgccacaacaatgtgcagaaacctttttgataataaaaaattgttctttgcctctaagtggatatttgcaattattttctctctcctaactagactgtaaaaagggctgctttagatcctgtagcttactccagttattagttattaacaaacacccaagtctcgaagatatttctaattaaaaaagaaggcatattcagagttctttttaaataaatgttgtttacttttataggcatctttaaacttctggattttggtatgccatttaaaaatacttccagatacacatggaaattagtaatactgcagccgtatccttgcaaacacatctgtcagtgtcaaaggtttcaaggtttttcttaaaaaaagaaaacaaaaaagcaaacacctatactgcccaaatgggaggattagatacatggttagaaatccctcaggaaaagtgttttttcttttcttgttgctgccttaaaaataga

SEQ ID NO: 369210 - DNA, 2650 bp, Homo sapiens
ttttgctttttagatatcatgtttttaaaaaacgaagtttgcatctgtgagaacagaacagaataacacattaaatagacacaattaaaccttaattataaaatggtaaacagtgaagtcttttaaagtctggcaactgagaataaacaaaagaactgcagacaaaaaacagaacttgacatcatgaggcatgagctcatttcatacagcttatgtgtacataatcctattcagacagctgggactgccttctatatagaattttgacaaatgctggaattttggcttcagttttaactaaagttacatctgattaatgtgataaaattaattttttaaaacccactttttcctcacaaggtaaaaggattcttcagctctttgaaagaaaatggttctcagctccgttgtgtccaacagacaattgaaaccattgaagaaaacatcggttggatggataagaattttgataaaatcagagtgtggctgcaaagtgaaaagcttgaacgtatgtaaaaattcctcccttgccaggttcctgttatctctaatcaccaacattttgttgagtgtattttcaaactagagatggctgttttggctccaactggagatacttttttcccttcaactcattttttgactatccctgtgaaaagaatagctgttagtttttcatgaatgggctatcgctaccatgtgttttgttcatcacaggtgttgccctgcaacgtaaacccaagtgttgggttccctgccacagaagaataaagtaccttattcttctcattttatagtttatgcttaagcacccgtgtccaaaaccctgtaccccatgtttatcattcataaactgtttcatcagtctcctcgaaagactctgaatagtcgactactgaacaatgaacacctggatctgagactaagccggacgatgactgggttaaagctctcccggctcacccctccagacccgctgcccatccctcttccttgctccatgcccaggggctgacttgtaaaggccaagtcatcaagctttcttgccctttggatgttggtcagtggggagccggagagctggagctggggtcggaggaggtagtaggtggaggtgttcttccctgattcccttgcgggatgcctcgggctggcctcccctgagggtcttagctccgagaggggaccctcttttccacacagccttctccacctctggattttggtaactgctccctcctcatcccttcaggattagtggcctcagtgggagtctggcttttactagtcctggcggacttgtggtttctacataatgtgctcgcacttttgcaaaaaatctttttatagaaccctcctcagataattctgagtgtcatctatttccctgactggtacagtatctcttctgaaaaagcagagtgcattcaagtctgtaggaaaacccttttcttagggaggtgattttttttctctctctgcttcttatttggcctactttacaatttctaactaactagttattggcatttactgacagtaaattattgcagtcaccaataaatgatagtacattgtgaaacaaaatatttgctcatattagcaaataggacattctttggctttgaagtctttcttttgtgaagacttcacacacggttgcttcagcacacagttgctgctcaggttttatgtatagatgataataatagaaagcacagtttactaacatggtaaaccaacggagttcaagtcaagtcagttaataccctaagaattagattttatttcttattctgaaaacttgctacacagggacttatctaacccatagtgtgctctgttgctgacttgattcaagttgcagcgtgttttgcgctgactctaaggtgcggaaatcctcacacctggcaaaggagaattcaaactgaactttttgaatggtttaataaaaatagaaatcactggtaatttccaccccaaactaaactatttcccttcttttaaaaaaatacacaaccaagattttaatgtaaaatattttgctttaattgtattttatgccttgattaatgaaacatggaaatattgattttcagttttggtcacctgaggaacctatctttgtttgcttttggaaaagcccattttctaaacagatacaatattgccacaacaatgtgcagaaacctttttgataataaaaaattgttctttgcctctaagtggatatttgcaattattttctctctcctaactagactgtaaaaagggctgctttagatcctgtagcttactccagttattagttattaacaaacacccaagtctcgaagatatttctaattaaaaaagaaggcatattcagagttctttttaaataaatgttgtttacttttataggcatctttaaacttctggattttggtatgccatttaaaaatacttccagatacacatggaaattagtaatactgcagccgtatccttgcaaacacatctgtcagtgtcaaaggtttcaaggtttttcttaaaaaaagaaaacaaaaaagcaaacacctatactgcccaaatgggaggattagatacatggttagaaatccctcaggaaaagtgttttttcttttcttgttgctgccttaaaaataga

SEQ ID NO: 369211 - DNA, 2646 bp, Homo sapiens
catgaacacatttgcttgttcacatctgtctttgtctaactcttatagcatttcctgcttctgtcattttctgttggatacttaaccttttattaggctgttggtgtgtattattctttacagctagatcttaacccattggatagacatcatattttgtatttttcacaccgatcagtttttagctgaaagctattatatataggaggcccttaaaatatatgttaaatgaataagtatttcacaacccgtttttgaatatttccctctctaggtttgaacttggctcatcttccatagcccacatggtaatgggtacaacaaatcaattctccacaagaacacggcttgaagaggtaaaaggattcttcagctctttgaaagaaaatggttctcagctccgttgtgtccaacagacaattgaaaccattgaagaaaacatcggttggatggataagaattttgataaaatcagagtgtggctgcaaagtgaaaagcttgaacgtatgtaaaaattcctcccttgccaggttcctgttatctctaatcaccaacattttgttgagtgtattttcaaactagagatggctgttttggctccaactggagatacttttttcccttcaactcattttttgactatccctgtgaaaagaatagctgttagtttttcatgaatgggctatcgctaccatgtgttttgttcatcacaggtgttgccctgcaacgtaaacccaagtgttgggttccctgccacagaagaataaagtaccttattcttctcattttatagtttatgcttaagcacccgtgtccaaaaccctgtaccccatgtttatcattcataaactgtttcatcagtctcctcgaaagactctgaatagtcgactactgaacaatgaacacctggatctgagactaagccggacgatgactgggttaaagctctcccggctcacccctccagacccgctgcccatccctcttccttgctccatgcccaggggctgacttgtaaaggccaagtcatcaagctttcttgccctttggatgttggtcagtggggagccggagagctggagctggggtcggaggaggtagtaggtggaggtgttcttccctgattcccttgcgggatgcctcgggctggcctcccctgagggtcttagctccgagaggggaccctcttttccacacagccttctccacctctggattttggtaactgctccctcctcatcccttcaggattagtggcctcagtgggagtctggcttttactagtcctggcggacttgtggtttctacataatgtgctcgcacttttgcaaaaaatctttttatagaaccctcctcagataattctgagtgtcatctatttccctgactggtacagtatctcttctgaaaaagcagagtgcattcaagtctgtaggaaaacccttttcttagggaggtgattttttttctctctctgcttcttatttggcctactttacaatttctaactaactagttattggcatttactgacagtaaattattgcagtcaccaataaatgatagtacattgtgaaacaaaatatttgctcatattagcaaataggacattctttggctttgaagtctttcttttgtgaagacttcacacacggttgcttcagcacacagttgctgctcaggttttatgtatagatgataataatagaaagcacagtttactaacatggtaaaccaacggagttcaagtcaagtcagttaataccctaagaattagattttatttcttattctgaaaacttgctacacagggacttatctaacccatagtgtgctctgttgctgacttgattcaagttgcagcgtgttttgcgctgactctaaggtgcggaaatcctcacacctggcaaaggagaattcaaactgaactttttgaatggtttaataaaaatagaaatcactggtaatttccaccccaaactaaactatttcccttcttttaaaaaaatacacaaccaagattttaatgtaaaatattttgctttaattgtattttatgccttgattaatgaaacatggaaatattgattttcagttttggtcacctgaggaacctatctttgtttgcttttggaaaagcccattttctaaacagatacaatattgccacaacaatgtgcagaaacctttttgataataaaaaattgttctttgcctctaagtggatatttgcaattattttctctctcctaactagactgtaaaaagggctgctttagatcctgtagcttactccagttattagttattaacaaacacccaagtctcgaagatatttctaattaaaaaagaaggcatattcagagttctttttaaataaatgttgtttacttttataggcatctttaaacttctggattttggtatgccatttaaaaatacttccagatacacatggaaattagtaatactgcagccgtatccttgcaaacacatctgtcagtgtcaaaggtttcaaggtttttcttaaaaaaagaaaacaaaaaagcaaacacctatactgcccaaatgggaggattagatacatggttagaaatccctcaggaaaagtgttttttcttttcttgttgctgccttaaaaataga

SEQ ID NO: 369212 - DNA, 1511 bp, Homo sapiens
gttgactctagcactggacgccgaggataacatctataactgggggaaccttttagagacacagccttctccacctctggattttggtaactgctccctcctcatcccttcaggattagtggcctcagtgggagtctggcttttactagtcctggcggacttgtggtttctacataatgtgctcgcacttttgcaaaaaatctttttatagaaccctcctcagataattctgagtgtcatctatttccctgactggtacagtatctcttctgaaaaagcagagtgcattcaagtctgtaggaaaacccttttcttagggaggtgattttttttctctctctgcttcttatttggcctactttacaatttctaactaactagttattggcatttactgacagtaaattattgcagtcaccaataaatgatagtacattgtgaaacaaaatatttgctcatattagcaaataggacattctttggctttgaagtctttcttttgtgaagacttcacacacggttgcttcagcacacagttgctgctcaggttttatgtatagatgataataatagaaagcacagtttactaacatggtaaaccaacggagttcaagtcaagtcagttaataccctaagaattagattttatttcttattctgaaaacttgctacacagggacttatctaacccatagtgtgctctgttgctgacttgattcaagttgcagcgtgttttgcgctgactctaaggtgcggaaatcctcacacctggcaaaggagaattcaaactgaactttttgaatggtttaataaaaatagaaatcactggtaatttccaccccaaactaaactatttcccttcttttaaaaaaatacacaaccaagattttaatgtaaaatattttgctttaattgtattttatgccttgattaatgaaacatggaaatattgattttcagttttggtcacctgaggaacctatctttgtttgcttttggaaaagcccattttctaaacagatacaatattgccacaacaatgtgcagaaacctttttgataataaaaaattgttctttgcctctaagtggatatttgcaattattttctctctcctaactagactgtaaaaagggctgctttagatcctgtagcttactccagttattagttattaacaaacacccaagtctcgaagatatttctaattaaaaaagaaggcatattcagagttctttttaaataaatgttgtttacttttataggcatctttaaacttctggattttggtatgccatttaaaaatacttccagatacacatggaaattagtaatactgcagccgtatccttgcaaacacatctgtcagtgtcaaaggtttcaaggtttttcttaaaaaaagaaaacaaaaaagcaaacacctatactgcccaaatgggaggattagatacatggttagaaatccctcaggaaaagtgttttttcttttcttgttgctgccttaaaaataga

SEQ ID NO: 369213 - DNA, 516 bp, Homo sapiens
tacaagtaattttattgcagtgattcataactgtttcatcacctattcattgctaacatttcttttcttaatccttctaggctactagatgaaagctttaagggagataaaataaaaactcaggagtttccacaaattcttacactcattggcaggaacccagtaggatacccactggcctggcaatttctgaggaaaaactggaacaaacttgtacaaaagtaagtggtgccaaaaattgtgctgtgactggataagttcataaccttactgtgttttagccttgctgtttgtaaaagaacagtaacagtctaaaggtactttttgattgaagataggcagtagaaatacctaaaatatttgtagaaaacataaaactggacttcagtgctaactagtgaatctggacagggatgttttccattccatctggcataaccccttcctgagcccatggacatatctgaagccttcctcctcacagttcagcccaggccttccatgaacacatttgct

SEQ ID NO: 369214 - DNA, 315 bp, Homo sapiens
aaaaaaaaaaaaaaaaaaaaggcctgagatgcaagtctgactttgccacatttatagcaaagtgatgctgagtcactaagcctctttttctccattgtgaaaggttcttccagtctagagctccatgattatgcacgggcagctggttcaaacacctatccattctgaagattagtgtttgggagaatgtatagcttagagactggtaatgtattttattacttccttcccaagatcttgctgctattcccgactttcagtctggtgctatggaaaactggggactgacaacatatagagaatctgctctgttgt

SEQ ID NO: 369215 - DNA, 346 bp, Homo sapiens
taagagtgatgtgtttatttttggtttttagatttgccctacagatggtgtaaaagggatggatggcttttgctctagaagtcaacattcatcttcatcctcagtaagtttctatatctgtacatgttcccccaagcacattcttttactgcatattctttgaaaggcagctctgtgccaaactttctgaggtccttgattatatcaccctcattccagataagactgcatttaaactattccatactcataatctttttcaatttttcttaaagtgtatctatactggagggttgcagagctttccttggtaatgcttctcactgatactaatttctctagcttc

SEQ ID NO: 369216 - DNA, 5413 bp, Homo sapiens
accaattcccttcctgggagttgcggcttccctcgctcggccccactcccgtttaccctttccccagctcccgccttagccaggggcttccccgcctgccgctagggctcgggccgaagcgccgctcagcgccagcctgccgctccccgggctccactttcactttcggtcctgggggagctaggccggcggcagtggtggtggcggcggcgcaagggtgagggcggccccagaaccccaggtaggtagagcaagaagatggtgtttctgcccctcaaatggtcccttgcaaccatgtcatttctactttcctcactgttggctctcttaactgtgtccactccttcatggtgtcagagcactgaagcatctccaaaacgtagtgatgggacaccatttccttggaataaaatacgacttcctgagtacgtcatcccagttcattatgatctcttgatccatgcaaaccttaccacgctgaccttctggggaaccacgaaagtagaaatcacagccagtcagcccaccagcaccatcatcctgcatagtcaccacctgcagatatctagggccaccctcaggaagggagctggagagaggctatcggaagaacccctgcaggtcctggaacacccccgtcaggagcaaattgcactgctggctcccgagcccctccttgtcgggctcccgtacacagttgtcattcactatgctggcaatctttcggagactttccacggattttacaaaagcacctacagaaccaaggaaggggaactgaggatactagcatcaacacaatttgaacccactgcagctagaatggcctttccctgctttgatgaacctgccttcaaagcaagtttctcaatcaaaattagaagagagccaaggcacctagccatctccaatatgccattggtgaaatctgtgactgttgctgaaggactcatagaagaccattttgatgtcactgtgaagatgagcacctatctggtggccttcatcatttcagattttgagtctgtcagcaagataaccaagagtggagtcaaggtttctgtttatgctgtgccagacaagataaatcaagcagattatgcactggatgctgcggtgactcttctagaattttatgaggattatttcagcataccgtatcccctacccaaacaagatcttgctgctattcccgactttcagtctggtgctatggaaaactggggactgacaacatatagagaatctgctctgttgtttgatgcagaaaagtcttctgcatcaagtaagcttggcatcacaatgactgtggcccatgaactggctcaccagtggtttgggaacctggtcactatggaatggtggaatgatctttggctaaatgaaggatttgccaaatttatggagtttgtgtctgtcagtgtgacccatcctgaactgaaagttggagattatttctttggcaaatgttttgacgcaatggaggtagatgctttaaattcctcacaccctgtgtctacacctgtggaaaatcctgctcagatccgggagatgtttgatgatgtttcttatgataagggagcttgtattctgaatatgctaagggagtatcttagtgctgacgcatttaaaagtggtattgtacagtatctccagaagcatagctataaaaatacaaaaaacgaggacctgtgggatagtatggcaagtatttgccctacagatggtgtaaaagggatggatggcttttgctctagaagtcaacattcatcttcatcctcacattggcatcaggaaggggtggatgtgaaaaccatgatgaacacttggacactgcagaagggttttcccctaataaccatcacagtgagggggaggaatgtacacatgaagcaagagcactacatgaagggctctgacggcgccccggacactgggtacctgtggcatgttccattgacattcatcaccagcaaatccgacatggtccatcgatttttgctaaaaacaaaaacagatgtgctcatcctcccagaagaggtggaatggatcaaatttaatgtgggcatgaatggctattacattgtgcattacgaggatgatggatgggactctttgactggccttttaaaaggaacacacacagcagtcagcagtaatgatcgggcaagtctcattaacaatgcatttcagctcgtcagcattgggaagctgtccattgaaaaggccttggatttatccctgtacttgaaacatgaaactgaaattatgcccgtgtttcaaggtttgaatgagctgattcctatgtataagttaatggagaaaagagatatgaatgaagtggaaactcaattcaaggccttcctcatcaggctgctaagggacctcattgataagcagacatggacagacgagggctcagtctcagagcgaatgctgcggagtcaactactactcctcgcctgtgtgcacaactatcagccgtgcgtacagagggcagaaggctatttcagaaagtggaaggaatccaatggaaacttgagcctgcctgtcgacgtgaccttggcagtgtttgctgtgggggcccagagcacagaaggctgggattttctttatagtaaatatcagttttctttgtccagtactgagaaaagccaaattgaatttgccctctgcagaacccaaaataaggaaaagcttcaatggctactagatgaaagctttaagggagataaaataaaaactcaggagtttccacaaattcttacactcattggcaggaacccagtaggatacccactggcctggcaatttctgaggaaaaactggaacaaacttgtacaaaagtttgaacttggctcatcttccatagcccacatggtaatgggtacaacaaatcaattctccacaagaacacggcttgaagaggtaaaaggattcttcagctctttgaaagaaaatggttctcagctccgttgtgtccaacagacaattgaaaccattgaagaaaacatcggttggatggataagaattttgataaaatcagagtgtggctgcaaagtgaaaagcttgaacgtatgtaaaaattcctcccttgccaggttcctgttatctctaatcaccaacattttgttgagtgtattttcaaactagagatggctgttttggctccaactggagatacttttttcccttcaactcattttttgactatccctgtgaaaagaatagctgttagtttttcatgaatgggctatcgctaccatgtgttttgttcatcacaggtgttgccctgcaacgtaaacccaagtgttgggttccctgccacagaagaataaagtaccttattcttctcattttatagtttatgcttaagcacccgtgtccaaaaccctgtaccccatgtttatcattcataaactgtttcatcagtctcctcgaaagactctgaatagtcgactactgaacaatgaacacctggatctgagactaagccggacgatgactgggttaaagctctcccggctcacccctccagacccgctgcccatccctcttccttgctccatgcccaggggctgacttgtaaaggccaagtcatcaagctttcttgccctttggatgttggtcagtggggagccggagagctggagctggggtcggaggaggtagtaggtggaggtgttcttccctgattcccttgcgggatgcctcgggctggcctcccctgagggtcttagctccgagaggggaccctcttttccacacagccttctccacctctggattttggtaactgctccctcctcatcccttcaggattagtggcctcagtgggagtctggcttttactagtcctggcggacttgtggtttctacataatgtgctcgcacttttgcaaaaaatctttttatagaaccctcctcagataattctgagtgtcatctatttccctgactggtacagtatctcttctgaaaaagcagagtgcattcaagtctgtaggaaaacccttttcttagggaggtgattttttttctctctctgcttcttatttggcctactttacaatttctaactaactagttattggcatttactgacagtaaattattgcagtcaccaataaatgatagtacattgtgaaacaaaatatttgctcatattagcaaataggacattctttggctttgaagtctttcttttgtgaagacttcacacacggttgcttcagcacacagttgctgctcaggttttatgtatagatgataataatagaaagcacagtttactaacatggtaaaccaacggagttcaagtcaagtcagttaataccctaagaattagattttatttcttattctgaaaacttgctacacagggacttatctaacccatagtgtgctctgttgctgacttgattcaagttgcagcgtgttttgcgctgactctaaggtgcggaaatcctcacacctggcaaaggagaattcaaactgaactttttgaatataaggcaaaaacttcaagataagggaatatgattgatgattggtacgaaaaatgtcaaaatgtgttcccctaatacacgacaaaatagagtgacttctggacataaatctgccatttattaaaccattcactacaacaaataaataggtataaaagtggaattggaatttttatacttatttgttgtagtgaatggtttaataaaaatagaaatcactggtaatttccaccccaaactaaactatttcccttcttttaaaaaaatacacaaccaagattttaatgtaaaatattttgctttaattgtattttatgccttgattaatgaaacatggaaatattgattttcagttttggtcacctgaggaacctatctttgtttgcttttggaaaagcccattttctaaacagatacaatattgccacaacaatgtgcagaaacctttttgataataaaaaattgttctttgcctctaagtggatatttgcaattattttctctctcctaactagactgtaaaaagggctgctttagatcctgtagcttactccagttattagttattaacaaacacccaagtctcgaagatatttctaattaaaaaagaaggcatattcagagttctttttaaataaatgttgtttacttttataggcatctttaaacttctggattttggtatgccatttaaaaatacttccagatacacatggaaattagtaatactgcagccgtatccttgcaaacacatctgtcagtgtcaaaggtttcaaggtttttcttaaaaaaagaaaacaaaaaagcaaacacctatactgcccaaatgggaggattagatacatggttagaaatccctcaggaaaagtgttttttcttttcttgttgctgccttaaaaataga

SEQ ID NO: 369217 - DNA, 603 bp, Homo sapiens
accaattcccttcctgggagttgcggcttccctcgctcggccccactcccgtttaccctttccccagctcccgccttagccaggggcttccccgcctgccgctagggctcgggccgaagcgccgctcagcgccagcctgccgctccccgggctccactttcactttcggtcctgggggagctaggccggcggcagtggtggtggcggcggcgcaagggtgagggcggccccagaaccccaggtaggtagagcaagaagatggtgtttctgcccctcaaatggtcccttgcaaccatgtcatttctactttcctcactgttggctctcttaactgtgtccactccttcatggtgtcagagcactgaagcatctccaaaacgtagtgatgggacaccatttccttggaataaaatacgacttcctgagtacgtcatcccagttcattatgatctcttgatccatgcaaaccttaccacgcacgctgccgtcgcctacgcacgtgcctaggcgacggcgcgcggtggccgcctcagaggatcacgcaggccgagcagcagccctcatcgccgttgggctgcgccgcgtagtcatctaagcacgccg

SEQ ID NO: 369218 - DNA, 5218 bp, Homo sapiens
accaattcccttcctgggagttgcggcttccctcgctcggccccactcccgtttaccctttccccagctcccgccttagccaggggcttccccgcctgccgctagggctcgggccgaagcgccgctcagcgccagcctgccgctccccgggctccactttcactttcggtcctgggggagctaggccggcggcagtggtggtggcggcggcgcaagggtgagggcggccccagaaccccaggtaggtagagcaagaagatggtgtttctgcccctcaaatggtcccttgcaaccatgtcatttctactttcctcactgttggctctcttaactgtgtccactccttcatggtgtcagagcactgaagcatctccaaaacgtagtgatgggacaccatttccttggaataaaatacgacttcctgagtacgtcatcccagttcattatgatctcttgatccatgcaaaccttaccacgctgaccttctggggaaccacgaaagtagaaatcacagccagtcagcccaccagcaccatcatcctgcatagtcaccacctgcagatatctagggccaccctcaggaagggagctggagagaggctatcggaagaacccctgcaggtcctggaacacccccgtcaggagcaaattgcactgctggctcccgagcccctccttgtcgggctcccgtacacagttgtcattcactatgctggcaatctttcggagactttccacggattttacaaaagcacctacagaaccaaggaaggggaactgaggatactagcatcaacacaatttgaacccactgcagctagaatggcctttccctgctttgatgaacctgccttcaaagcaagtttctcaatcaaaattagaagagagccaaggcacctagccatctccaatatgccattggtgaaatctgtgactgttgctgaaggactcatagaagaccattttgatgtcactgtgaagatgagcacctatctggtggccttcatcatttcagattttgagtctgtcagcaagataaccaagagtggagtcaaggtttctgtttatgctgtgccagacaagataaatcaagcagattatgcactggatgctgcggtgactcttctagaattttatgaggattatttcagcataccgtatcccctacccaaacaagatcttgctgctattcccgactttcagtctggtgctatggaaaactggggactgacaacatatagagaatctgctctgttgtttgatgcagaaaagtcttctgcatcaagtaagcttggcatcacaatgactgtggcccatgaactggctcaccagtggtttgggaacctggtcactatggaatggtggaatgatctttggctaaatgaaggatttgccaaatttatggagtttgtgtctgtcagtgtgacccatcctgaactgaaagttggagattatttctttggcaaatgttttgacgcaatggaggtagatgctttaaattcctcacaccctgtgtctacacctgtggaaaatcctgctcagatccgggagatgtttgatgatgtttcttatgataagggagcttgtattctgaatatgctaagggagtatcttagtgctgacgcatttaaaagtggtattgtacagtatctccagaagcatagctataaaaatacaaaaaacgaggacctgtgggatagtatggcaagtatttgccctacagatggtgtaaaagggatggatggcttttgctctagaagtcaacattcatcttcatcctcacattggcatcaggaaggggtggatgtgaaaaccatgatgaacacttggacactgcagaagggttttcccctaataaccatcacagtgagggggaggaatgtacacatgaagcaagagcactacatgaagggctctgacggcgccccggacactgggtacctgtggcatgttccattgacattcatcaccagcaaatccgacatggtccatcgatttttgctaaaaacaaaaacagatgtgctcatcctcccagaagaggtggaatggatcaaatttaatgtgggcatgaatggctattacattgtgcattacgaggatgatggatgggactctttgactggccttttaaaaggaacacacacagcagtcagcagtaatgatcgggcaagtctcattaacaatgcatttcagctcgtcagcattgggaagctgtccattgaaaaggccttggatttatccctgtacttgaaacatgaaactgaaattatgcccgtgtttcaaggtttgaatgagctgattcctatgtataagttaatggagaaaagagatatgaatgaagtggaaactcaattcaaggccttcctcatcaggctgctaagggacctcattgataagcagacatggacagacgagggctcagtctcagagcgaatgctgcggagtcaactactactcctcgcctgtgtgcacaactatcagccgtgcgtacagagggcagaaggctatttcagaaagtggaaggaatccaatggaaacttgagcctgcctgtcgacgtgaccttggcagtgtttgctgtgggggcccagagcacagaaggctgggattttctttatagtaaatatcagttttctttgtccagtactgagaaaagccaaattgaatttgccctctgcagaacccaaaataaggaaaagcttcaatggctactagatgaaagctttaagggagataaaataaaaactcaggagtttccacaaattcttacactcattggcaggaacccagtaggatacccactggcctggcaatttctgaggaaaaactggaacaaacttgtacaaaagtttgaacttggctcatcttccatagcccacatggtaatgggtacaacaaatcaattctccacaagaacacggcttgaagaggtaaaaggattcttcagctctttgaaagaaaatggttctcagctccgttgtgtccaacagacaattgaaaccattgaagaaaacatcggttggatggataagaattttgataaaatcagagtgtggctgcaaagtgaaaagcttgaacgtatgtaaaaattcctcccttgccaggttcctgttatctctaatcaccaacattttgttgagtgtattttcaaactagagatggctgttttggctccaactggagatacttttttcccttcaactcattttttgactatccctgtgaaaagaatagctgttagtttttcatgaatgggctatcgctaccatgtgttttgttcatcacaggtgttgccctgcaacgtaaacccaagtgttgggttccctgccacagaagaataaagtaccttattcttctcattttatagtttatgcttaagcacccgtgtccaaaaccctgtaccccatgtttatcattcataaactgtttcatcagtctcctcgaaagactctgaatagtcgactactgaacaatgaacacctggatctgagactaagccggacgatgactgggttaaagctctcccggctcacccctccagacccgctgcccatccctcttccttgctccatgcccaggggctgacttgtaaaggccaagtcatcaagctttcttgccctttggatgttggtcagtggggagccggagagctggagctggggtcggaggaggtagtaggtggaggtgttcttccctgattcccttgcgggatgcctcgggctggcctcccctgagggtcttagctccgagaggggaccctcttttccacacagccttctccacctctggattttggtaactgctccctcctcatcccttcaggattagtggcctcagtgggagtctggcttttactagtcctggcggacttgtggtttctacataatgtgctcgcacttttgcaaaaaatctttttatagaaccctcctcagataattctgagtgtcatctatttccctgactggtacagtatctcttctgaaaaagcagagtgcattcaagtctgtaggaaaacccttttcttagggaggtgattttttttctctctctgcttcttatttggcctactttacaatttctaactaactagttattggcatttactgacagtaaattattgcagtcaccaataaatgatagtacattgtgaaacaaaatatttgctcatattagcaaataggacattctttggctttgaagtctttcttttgtgaagacttcacacacggttgcttcagcacacagttgctgctcaggttttatgtatagatgataataatagaaagcacagtttactaacatggtaaaccaacggagttcaagtcaagtcagttaataccctaagaattagattttatttcttattctgaaaacttgctacacagggacttatctaacccatagtgtgctctgttgctgacttgattcaagttgcagcgtgttttgcgctgactctaaggtgcggaaatcctcacacctggcaaaggagaattcaaactgaactttttgaatggtttaataaaaatagaaatcactggtaatttccaccccaaactaaactatttcccttcttttaaaaaaatacacaaccaagattttaatgtaaaatattttgctttaattgtattttatgccttgattaatgaaacatggaaatattgattttcagttttggtcacctgaggaacctatctttgtttgcttttggaaaagcccattttctaaacagatacaatattgccacaacaatgtgcagaaacctttttgataataaaaaattgttctttgcctctaagtggatatttgcaattattttctctctcctaactagactgtaaaaagggctgctttagatcctgtagcttactccagttattagttattaacaaacacccaagtctcgaagatatttctaattaaaaaagaaggcatattcagagttctttttaaataaatgttgtttacttttataggcatctttaaacttctggattttggtatgccatttaaaaatacttccagatacacatggaaattagtaatactgcagccgtatccttgcaaacacatctgtcagtgtcaaaggtttcaaggtttttcttaaaaaaagaaaacaaaaaagcaaacacctatactgcccaaatgggaggattagatacatggttagaaatccctcaggaaaagtgttttttcttttcttgttgctgccttaaaaataga

SEQ ID NO: 369219 - DNA, 5488 bp, Homo sapiens
accaattcccttcctgggagttgcggcttccctcgctcggccccactcccgtttaccctttccccagctcccgccttagccaggggcttccccgcctgccgctagggctcgggccgaagcgccgctcagcgccagcctgccgctccccgggctccactttcactttcggtcctgggggagctaggccggcggcagtggtggtggcggcggcgcaagggtgagggcggccccagaaccccaggtaggtagagcaagaagatggtgtttctgcccctcaaatggtcccttgcaaccatgtcatttctactttcctcactgttggctctcttaactgtgtccactccttcatggtgtcagagcactgaagcatctccaaaacgtagtgatgggacaccatttccttggaataaaatacgacttcctgagtacgtcatcccagttcattatgatctcttgatccatgcaaaccttaccacgctgaccttctggggaaccacgaaagtagaaatcacagccagtcagcccaccagcaccatcatcctgcatagtcaccacctgcagatatctagggccaccctcaggaagggagctggagagaggctatcggaagaacccctgcaggtcctggaacacccccgtcaggagcaaattgcactgctggctcccgagcccctccttgtcgggctcccgtacacagttgtcattcactatgctggcaatctttcggagactttccacggattttacaaaagcacctacagaaccaaggaaggggaactgaggatactagcatcaacacaatttgaacccactgcagctagaatggcctttccctgctttgatgaacctgccttcaaagcaagtttctcaatcaaaattagaagagagccaaggcacctagccatctccaatatgccattggtgaaatctgtgactgttgctgaaggactcatagaagaccattttgatgtcactgtgaagatgagcacctatctggtggccttcatcatttcagattttgagtctgtcagcaagataaccaagagtggagtcaaggtttctgtttatgctgtgccagacaagataaatcaagcagattatgcactggatgctgcggtgactcttctagaattttatgaggattatttcagcataccgtatcccctacccaaacaagatcttgctgctattcccgactttcagtctggtgctatggaaaactggggactgacaacatatagagaatctgctctgttgtttgatgcagaaaagtcttctgcatcaagtaagcttggcatcacaatgactgtggcccatgaactggctcaccagtggtttgggaacctggtcactatggaatggtggaatgatctttggctaaatgaaggatttgccaaatttatggagtttgtgtctgtcagtgtgacccatcctgaactgaaagttggagattatttctttggcaaatgttttgacgcaatggaggtagatgctttaaattcctcacaccctgtgtctacacctgtggaaaatcctgctcagatccgggagatgtttgatgatgtttcttatgataagggagcttgtattctgaatatgctaagggagtatcttagtgctgacgcatttaaaagtggtattgtacagtatctccagaagcatagctataaaaatacaaaaaacgaggacctgtgggatagtatggcaagtatttgccctacagatggtgtaaaagggatggatggcttttgctctagaagtcaacattcatcttcatcctcacattggcatcaggaaggggtggatgtgaaaaccatgatgaacacttggacactgcagaagggttttcccctaataaccatcacagtgagggggaggaatgtacacatgaagcaagagcactacatgaagggctctgacggcgccccggacactgggtacctgtggcatgttccattgacattcatcaccagcaaatccgacatggtccatcgatttttgctaaaaacaaaaacagatgtgctcatcctcccagaagaggtggaatggatcaaatttaatgtgggcatgaatggctattacattgtgcattacgaggatgatggatgggactctttgactggccttttaaaaggaacacacacagcagtcagcagtaatgatcgggcaagtctcattaacaatgcatttcagctcgtcagcattgggaagctgtccattgaaaaggccttggatttatccctgtacttgaaacatgaaactgaaattatgcccgtgtttcaaggtttgaatgagctgattcctatgtataagttaatggagaaaagagatatgaatgaagtggaaactcaattcaaggccttcctcatcaggctgctaagggacctcattgataagcagacatggacagacgagggctcagtctcagagcgaatgctgcggagtcaactactactcctcgcctgtgtgcacaactatcagccgtgcgtacagagggcagaaggctatttcagaaagtggaaggaatccaatggaaacttgagcctgcctgtcgacgtgaccttggcagtgtttgctgtgggggcccagagcacagaaggctgggattttctttatagtaaatatcagttttctttgtccagtactgagaaaagccaaattgaatttgccctctgcagaacccaaaataaggaaaagcttcaatggctactagatgaaagctttaagggagataaaataaaaactcaggagtttccacaaattcttacactcattggcaggaacccagtaggatacccactggcctggcaatttctgaggaaaaactggaacaaacttgtacaaaagtttgaacttggctcatcttccatagcccacatggtaatgggtacaacaaatcaattctccacaagaacacggcttgaagaggtaaaaggattcttcagctctttgaaagaaaatggttctcagctccgttgtgtccaacagacaattgaaaccattgaagaaaacatcggttggatggataagaattttgataaaatcagagtgtggctgcaaagtgaaaagcttgaacatgatcctgaagctgacgcaacaggatgaaaatccatcagaatctcagactacagcactaaatatgctttgatgctacatcaaacggaatggaagcatagctgacttcgctaaagttacttcatctccatctagcaaatgaggcactgttctcaaccaaaggagatggggatctggtttagggcaatccctttataatttgatgtgctgtggtctccttggtaatgtataatttggtattgcacaggtgattagtcaaggaagtctggaaaagctttggtcccacagccttgcctcacagcatgtaaataattaaaacaatattgatgctgaggttcttctactgctagtatgaaagtgacaaatttttactggtgtgaattgggaagaaaacaatgctattccatgacgtttgtaaaatgtttgtaaaagctcaaacatgacgattccataaaataaacttgaggttaaataatgggtagtaaattatagaatgtataagaaaaaatataaaggagaaaatcaattatcaggaaagctaaagaacttttcaaatctagtaatttgaatatagacacaatgcactttattgcactttcaattcttataaagcaacaataatattaaggtccttgactatgtgtacaatgttttcacatatatagtttcatttaatcatttcaaagttaatctctgccatctcgctaaatcatcagtctcggctcttctgaaatagaaggtgcctgatcttcctaataattctgcctattttcatttgctttaaacaggcgccctattttctttctagttgtggctgcgcaaaaacatttatctcccaaataagatgtgctgcttaccgaggtatcacggggtggggctccagcttgggtcgttgaagctggggtttgggaaaccacttcagagatggcagcagcaagtttagcatcttcaaatttcttttattgaaaaaaattttattagtaacatgttgtatataaaattatgagcacaatgccatcacttaactataactcttaaagatagcttaatgactgtttattctcttgaccaaatagactcataataacatataattttaaaagaaatttaaattctttcttctctattgtattattttatacaatttgctatttctatttccttctcatattgattattctaaatactatgcaataatataacttagagttccacggtttgtttacacatttcctgttgtacatttaggttattcaaagttttcagctcttttaaaattgctctgaataagttctagtgagtgagttatggtgctggctatattttgctaaactgccctctcaaatgttgctaggaattcatactgcgaaaagcaatgaataagcatgcctgttttcccatggccttgcttgccagaatttgacttttattatgataatcagtgtaaaatgatatactactattgcttgtatattgtggtatacggtgtcaggtttcagggttttttttcaacgttaaatattctagaaactttctgaaataatttctgtttaaaaatattgaatatttgcttcatttcaaatactcccttttgacaaaaaaacttaggtataactgttgatgaaaaaccagaaaaaagtccagaactctttggtgactccaactatggatagcttattttgaaaaaggagaattgcaaattttaccaaaagatggagaaaagcacattaaaaagataccaacattcagaaattcatttcagcatgttattattggaaattatttaaactaatttagataactataagatacttattgtccatttataccctgtaaagccgttttagaatgtaatattttaggtaatccaaaatgtactaaattaaattcatttttagttatgagaaatctttgcttatatgacaaatgaaaagaataacaagttgtcaaatgaaaagaatgacattgaaacatttgtattgtctcttcttaaactatcttattgacttattatttaagccttttaatactaagtatgaaacaacctatggtctggaaatttgtatcgcaaagctatatgtgcatatgttatttaattcatctaacgctacacaaaagcataaaataatgatttttcactctctttaaaaatactaaatcatttatgtccatttctcaattttttcattgatctatgctttgagtttgctttctcaacattattgtattttccacttattattactgtataacatatgctagtgtttagttggattaatcttacctaaaagtactgaaaaatgctttttagtactttttcatattttatacatttattttccgaatgtatcattgaataattttattgagttataaaagtatcttattgctatttaataaaaaattaacacat

SEQ ID NO: 369220 - DNA, 656 bp, Homo sapiens
ccaagtgtttcctcagcttttctgcaccttcctctccattgacctagagtgtctatggaacactcagagtgtcccctgtgtaaaccacctaccacaagattatcaacttcaggcaatggaccacgcaccaggattccacctctttctagcacctatcagtgttgcgcacatcataggccctcaacaaacaggcagccacgctgggggatcccacatggtaaagaactgcaggtggcctctaggagatgagggcggcctccagtcaacagccagcaagaaactgaagtgctctgtcctacaaccttgtgtaactgaattctgccaacaacctgagtgagactgaaagtggatccctctccagtcatgcctcagtgtgagagaaacctgtgacttgcttctaacccataggatatggcaaggaactagtcatatctgagagcagcctccagaaaacagtcagcaaaacactgaggttctcaatccgatagtcaatgaggaacggaatgctggaacaatgatgtgagcttggaagcagatccttcccttctgctgggcctcaggtgagactgcagctccagtcatcatcttgattgcagcccacagaaactaccaacccacagaaactgtgagttaataaatgtgttgttttaaaatga

SEQ ID NO: 369221 - DNA, 1199 bp, Homo sapiens
gaattcgaggatccgggtaccatgggaggaaaacttcttcctggcctgggctccgtgccgctctgtttgccaaccgtccagtcccgcctaccagtgccgggcgctccccacccctcccccggctcccccggtgtccgccatggccaaagcctacgaccacctcttcaagttgctgctgatcggggactcgggggtgggcaagacttgtctgatcattcgctttgcagaggacaacttcaacaacacttacatctccaccatcggaattgatttcaagatccgcactgtggatatagaggggaagaagatcaaactacaagtctgggacacggctggccaagagcggttcaagacaataactactgcctactaccgtggagccatgggcattatcctagtatacgacatcacggatgagaaatctttcgagaatattcagaactggatgaaaagcatcaaggagaatgcctcggctggggtggagcgcctcttgctggggaacaaatgtgacatggaggccaagaggaaggtgcagaaggagcaggccgataagttggctcgagagcatggaatccgatttttcgaaactagtgctaaatccagtatgaatgtggatgaggcttttagttccctggcccgggacatcttgctcaagtcaggaggccggagatcaggaaacggcaacaagcctcccagtactgacctgaaaacttgtgacaagaagaacaccaacaagtgctccctgggctgaggaccctttcttgcctccccaccccggaagctgaacctgagggagacaacggcagagggagtgagcaggggagaaatagcagaggggcttggagggtcacataggtagatggtaaagagaatgaggagaaaaaggagaaaagggaaaagcagaaaggaaaaaaaggaagagagaggaagggagaagggagaggaatgaattgaggaagtgaaagaaggcaaggaggtaggaagagagggaggaggaaaggaaggagagatgcctcaggcttcagaccttacctgggttttcagggcaaacataaatgtaaatacactgatttattctgttactagatcaggttttagggtcctgcaaaaggctagctcggcactacactagggaatttgctcctgttctgtcacttgtcatggtctttcttggtattaaaggccaccatttgcacaaa

SEQ ID NO: 369222 - DNA, 1379 bp, Homo sapiens
gaattcgaggatccgggtaccatgggaggaaaacttcttcctggcctgggctccgtgccgctctgtttgccaaccgtccagtcccgcctaccagtgccgggcgctccccacccctcccccggctcccccggtgtccgccatggccaaagcctacgaccacctcttcaagttgctgctgatcggggactcgggggtgggcaagacttgtctgatcattcgctttgcagaggacaacttcaacaacacttacatctccaccatcggaattgatttcaagatccgcactgtggatatagaggggaagaagatcaaactacaagtctgggacacggctggccaagagcggttcaagacaataactactgcctactaccgtggagccatgggcattatcctagtatacgacatcacggatgagaaatctttcgagaatattcagaactggatgaaaagcatcaaggagaatgcctcggctggggtggagcgcctcttgctggggaacaaatgtgacatggaggccaagaggaaggtgcagaaggagcaggccgataagttggctcgagagcatggaatccgatttttcgaaactagtgctaaatccagtatgaatgtggatgaggcttttagttccctggcccgggacatcttgctcaagtcaggaggccggagatcaggaaacggcaacaagcctcccagtactgacctgaaaacttgtgacaagaagaacaccaacaagtgctccctgggctgaggaccctttcttgcctccccaccccggaagctgaacctgagggagacaacggcagagggagtgagcaggggagaaatagcagaggggcttggagggtcacataggtagatggtaaagagaatgaggagaaaaaggagaaaagggaaaagcagaaaggaaaaaaaggaagagagaggaagggagaagggagaggaatgaattgaggaagtgaaagaaggcaaggaggtaggaagagagggaggaggaaaggaaggagagatgcctcaggcttcagaccttacctgggttttcagggcaaacataaatgtaaatacactgatttattctgttactagatcaggttttagggtcctgcaaaaggctagctcggcactacactagggaatttgctcctgttctgtcacttgtcatggtctttcttggtattaaaggccaccatttgcacaaaaaaaaaaacaaaaggggggggtctaaaaataccgggggccagtttaggtttccggttttgacaagggcctaggggggtaaaaaagagggggggttaaaggggggggaacggtgggtttgggagaccttcggggggatggcaaccaaaatagcggaaatggagggaagcgggagtcgataa

SEQ ID NO: 369223 - DNA, 1586 bp, Homo sapiens
gaattcgaggatccgggtaccatgggaggaaaacttcttcctggcctgggctccgtgccgctctgtttgccaaccgtccagtcccgcctaccagtgccgggcgctccccacccctcccccggctcccccggtgtccgccatggccaaagcctacgaccacctcttcaagttgctgctgatcggggactcgggggtgggcaagacttgtctgatcattcgctttgcagaggacaacttcaacaacacttacatctccaccatcggaattgatttcaagatccgcactgtggatatagaggggaagaagatcaaactacaagtctgggacacggctggccaagagcggttcaagacaataactactgcctactaccgtggagccatgggcattatcctagtatacgacatcacggatgagaaatctttcgagaatattcagaactggatgaaaagcatcaaggagaatgcctcggctggggtggagcgcctcttgctggggaacaaatgtgacatggaggccaagaggaaggtgcagaaggagcaggccgataagttggctcgagagcatggaatccgatttttcgaaactagtgctaaatccagtatgaatgtggatgaggcttttagttccctggcccgggacatcttgctcaagtcaggaggccggagatcaggaaacggcaacaagcctcccagtactgacctgaaaacttgtgacaagaagaacaccaacaagtgctccctgggctgaggaccctttcttgcctccccaccccggaagctgaacctgagggagacaacggcagagggagtgagcaggggagaaatagcagaggggcttggagggtcacataggtagatggtaaagagaatgaggagaaaaaggagaaaagggaaaagcagaaaggaaaaaaaggaagagagaggaagggagaagggagaggaatgaattgaggaagtgaaagaaggcaaggaggtaggaagagagggaggaggaaaggaaggagagatgcctcaggcttcagaccttacctgggttttcagggcaaacataaatgtaaatacactgatttattctgttactagatcaggttttagggtcctgcaaaaggctagctcggcactacactagggaatttgctcctgttctgtcacttgtcatggtctttcttggtattaaaggccaccatttgcacaaagccactaaaaaaagaaaagaatgaaacaaaaacaagaaaacaattgtgtgtgggcgcgcgccccgggacccccaggagaaaggccttttatagaaccagactcgcgtgtgggaggcgcggcgggcccacgggatgaggttcagggaaaaactgggcacgaagagcggaggatacctcgaagagaagaactgcggcgaacagcgaaatagaggtgcgcgggcgcattttccacgcccaaaagaaaaaaagcgcccggggggaacaccgggagcgtttgtagcaacacatgtccggaaggggaagatcgggagagcagcaaagggggacttctacaaacgggggagccacaggcagaggcggaaatagaaaatacgcccgacccggggt

SEQ ID NO: 369224 - DNA, 1209 bp, Homo sapiens
gaattcgaggatccgggtaccatgggaggaaaacttcttcctggcctgggctccgtgccgctctgtttgccaaccgtccagtcccgcctaccagtgccgggcgctccccacccctcccccggctcccccggtgtccgccatggccaaagcctacgaccacctcttcaagttgctgctgatcggggactcgggggtgggcaagacttgtctgatcattcgctttgcagaggacaacttcaacaacacttacatctccaccatcggaattgatttcaagatccgcactgtggatatagaggggaagaagatcaaactacaagtctgggacacggctggccaagagcggttcaagacaataactactgcctactaccgtggagccatgggcattatcctagtatacgacatcacggatgagaaatctttcgagaatattcagaactggatgaaaagcatcaaggagaatgcctcggctggggtggagcgcctcttgctggggaacaaatgtgacatggaggccaagaggaaggtgcagaaggagcaggccgataagttggctcgagagcatggaatccgatttttcgaaactagtgctaaatccagtatgaatgtggatgaggcttttagttccctggcccgggacatcttgctcaagtcaggaggccggagatcaggaaacggcaacaagcctcccagtactgacctgaaaacttgtgacaagaagaacaccaacaagtgctccctgggctgaggaccctttcttgcctccccaccccggaagctgaacctgagggagacaacggcagagggagtgagcaggggagaaatagcagaggggcttggagggtcacataggtagatggtaaagagaatgaggagaaaaaggagaaaagggaaaagcagaaaggaaaaaaaggaagagagaggaagggagaagggagaggaatgaattgaggaagtgaaagaaggcaaggaggtaggaagagagggaggaggaaaggaaggagagatgcctcaggcttcagaccttacctgggttttcagggcaaacataaatgtaaatacactgatttattctgttactagatcaggttttagggtcctgcaaaaggctagctcggcactacactagggaatttgctcctgttctgtcactataactgtgttcttgatgagctcgttgctgttcttgtgctgctcgtatcgtgt

SEQ ID NO: 369225 - DNA, 1233 bp, Homo sapiens
gaattcgaggatccgggtaccatgggaggaaaacttcttcctggcctgggctccgtgccgctctgtttgccaaccgtccagtcccgcctaccagtgccgggcgctccccacccctcccccggctcccccggtgtccgccatggccaaagcctacgaccacctcttcaagttgctgctgatcggggactcgggggtgggcaagacttgtctgatcattcgctttgcagaggacaacttcaacaacacttacatctccaccatcggaattgatttcaagatccgcactgtggatatagaggggaagaagatcaaactacaagtctgggacacggctggccaagagcggttcaagacaataactactgcctactaccgtggagccatgggcattatcctagtatacgacatcacggatgagaaatctttcgagaatattcagaactggatgaaaagcatcaaggagaatgcctcggctggggtggagcgcctcttgctggggaacaaatgtgacatggaggccaagaggaaggtgcagaaggagcaggccgataagttggctcgagagcatggaatccgatttttcgaaactagtgctaaatccagtatgaatgtggatgaggcttttagttccctggcccgggacatcttgctcaagtcaggaggccggagatcaggaaacggcaacaagcctcccagtactgacctgaaaacttgtgacaagaagaacaccaacaagtgctccctgggctgaggaccctttcttgcctccccaccccggaagctgaacctgagggagacaacggcagagggagtgagcaggggagaaatagcagaggggcttggagggtcacataggtagatggtaaagagaatgaggagaaaaaggagaaaagggaaaagcagaaaggaaaaaaaggcacaaaacacgcgaccagacacgagcgcacaggcgcgacgcaacgggacgcagcgcaactgaccgttcgacggaagtgaaagaaggcaaggaggtaggaagagagggaggaggaaaggaaggagagatgcctcaggcttcagaccttacctgggttttcagggcaaacataaatgtaaatacactgatttattctgttactagatcaggttttagggtcctgcaaaaggctagctcggcactacactagggaatttgctcctgttctgtcacttgtcatggtctttcttggtattaaaggccaccatttgcacaaa

SEQ ID NO: 369226 - DNA, 801 bp, Homo sapiens
aattacaatagagtaacaaaaaggaaaatgggtatccggcagggttttcaggagagaaaattataaaaactgaactacaactactattaataaaattatggggctgtgtgtgatggctcacgcctgtaatcccagcactttgggaggccgataagttggctcgagagcatggaatccgatttttcgaaactagtgctaaatccagtatgaatgtggatgaggcttttagttccctggcccgggacatcttgctcaagtcaggaggccggagatcaggaaacggcaacaagcctcccagtactgacctgaaaacttgtgacaagaagaacaccaacaagtgctccctgggctgaggaccctttcttgcctccccaccccggaagctgaacctgagggagacaacggcagagggagtgagcaggggagaaatagcagaggggcttggagggtcacataggtagatggtaaagagaatgaggagaaaaaggagaaaagggaaaagcagaaaggaaaaaaaggaagagagaggaagggagaagggagaggaatgaattgaggaagtgaaagaaggcaaggaggtaggaagagagggaggaggaaaggaaggagagatgcctcaggcttcagaccttacctgggttttcagggcaaacataaatgtaaatacactgatttattctgttactagatcaggttttagggtcctgcaaaaggctagctcggcactacactagggaatttgctcctgttctgtcacttgtcatggtctttcttggtattaaaggccaccatttgcacaaa

SEQ ID NO: 369227 - DNA, 357 bp, Homo sapiens
aatagagacaataatacatgtcttacaaggaaagagtaaggattagataaaatgatacatacacagtgcttgacacatagcaaacattcaatgaataagcaaagacatcttgtttcttgggccactaccatctctggaaatcagctcaactgtctttaatcccgttcccctttactgtttccttattctgttgccccaccatgttacaaaagctaaattcttgtgagagaggaagaattattccgttggagaattcttccctctattccatcccatgaaaacttctccttctttagggacacggctggccaagagcggttcaagacaataactactgcctactaccgtggagccatg

SEQ ID NO: 369228 - DNA, 504 bp, Homo sapiens
ccctccaaactgactctgttccccactttaggcttttagttccctggcccgggacatcttgctcaagtcaggaggccggagatcagtaagttggttttgctggactaggtacaactctggggtgtgtgtgtgtgtatgtatgtgtgtgtgtgtgtgtgtgtgtgtgtgtgtgttggtgttgataaaaacggggagcaatgctaagatttctcatgagggtggatttactttaaacagtttataccctcctaccctaaccatccattcacaccatgacacctgtgcccttctccctctagggaaacggcaacaagcctcccagtactgacctgaaaacttgtgacaagaagaacaccaacaagtgctccctgggctgaggaccctttcttgcctccccaccccggaagctgaacctgagggagacaacggcagagggagtgagcaggggagaaatagcagaggggcttggagggtcacataggtagatggtaaagagaatgagga

SEQ ID NO: 369229 - DNA, 912 bp, Homo sapiens
ctctttcccggagcctgggcggagagggaggaaaacttcttcctggcctgggctccgtgccgctctgtttgccaaccgtccagtcccgcctaccagtgccgggcgctccccacccctcccccggctcccccggtgtccgccatggccaaagcctacgaccacctcttcaagttgctgctgatcggggactcgggggtgggcaagacttgtctgatcattcgctttgcagaggacaacttcaacaacacttacatctccaccatcggaattgatttcaagatccgcactgtggatatagaggggaagaagatcaaactacaagtctgggacacggctggccaagagcggttcaagacaataactactgcctactaccgtggagccatgggcattatcctagtatacgacatcacggatgagaaatctttcgagaatattcagaactggatgaaaagcatcaaggagaatgcctcggctggggtggagcgcctcttgctggggaacaaatgtgacatggaggccaagaggaaggtgcagaaggagcaggccgataagttggctcgagagcatggaatccgatttttcgaaactagtgctaaatccagtatgaatgtggatgaggcttttagttccctggcccgggacatcttgctcaagtcaggaggccggagatcaggaaacggcaacaagcctcccagtactgacctgaaaacttgtgacaagaagaacaccaacaagtgctccctgggctgaggaccctttcttgcctccccaccccggaagctgaacctgagggagacaacggcagagggaggacgagaacgcgcagtttcgcctccatcccttgacctccaacacagcttctccactggatcatcggtggcgatgaaggggcggctggggaaggatgtc

SEQ ID NO: 369230 - DNA, 1394 bp, Homo sapiens
gaattcgaggatccgggtaccatgggaggaaaacttcttcctggcctgggctccgtgccgctctgtttgccaaccgtccagtcccgcctaccagtgccgggcgctccccacccctcccccggctcccccggtgtccgccatggccaaagcctacgaccacctcttcaagttgctgctgatcggggactcgggggtgggcaagacttgtctgatcattcgctttgcagaggacaacttcaacaacacttacatctccaccatcggaattgatttcaagatccgcactgtggatatagaggggaagaagatcaaactacaagtctgggacacggctggccaagagcggttcaagacaataactactgcctactaccgtggagccatgggcattatcctagtatacgacatcacggatgagaaatctttcgagaatattcagaactggatgaaaagcatcaaggagaatgcctcggctggggtggagcgcctcttgctggggaacaaatgtgacatggaggccaagaggaaggtgcagaaggagcaggccgataagttggctcgagagcatggaatccgatttttcgaaactagtgctaaatccagtatgaatgtggatgaggcttttagttccctggcccgggacatcttgctcaagtcaggaggccggagatcaggaaacggcaacaagcctcccagtactgacctgaaaacttgtgacaagaagaacaccaacaagtgctccctgggctgaggaccctttcttgcctccccaccccggaagctgaacctgagggagacaacggcagagggagtgagcaggggagaaatagcagaggggcttggagggtcacataggtagatggtaaagagaatgaggagaaaaaggagaaaagggaaaagcagaaaggaaaaaaaggaagagagaggaagggagaagggagaggaatgaattgaggaagtgaaagaaggcaaggaggtaggaagagagggaggaggaaaggaaggagagatgcctcaggcttcagaccttacctgggttttcagggcaaacataaatgtaaatacactgatttattctgttactagatcaggttttagggtcctgcaaaaggctagctcggcactacactagggaatttgctcctgttctgtcacttgtcatggtctttcttggtattaaaggccaccatttgcacaaaaaaaaaaaaaaaaaaacaacaccccccgcgggcactacaatcataagggtcgcggcggaaaacgggtgtcctagacacgggaccacagggcccacacatgttcctccttaacccaaacattccttagcaccaacgcgagaaaacacgccgggatccccacacagggacgccaatatcaaatcagcgaaacccggg

SEQ ID NO: 369231 - DNA, 1295 bp, Homo sapiens
gaattcgaggatccgggtaccatgggaggaaaacttcttcctggcctgggctccgtgccgctctgtttgccaaccgtccagtcccgcctaccagtgccgggcgctccccacccctcccccggctcccccggtgtccgccatggccaaagcctacgaccacctcttcaagttgctgctgatcggggactcgggggtgggcaagacttgtctgatcattcgctttgcagaggacaacttcaacaacacttacatctccaccatcggtgagcccgctggccatgtcccagaccccgactctcctgtgacctccttctccggctcccggattactagtgaccccacttttcagtccccttagagaattgatttcaagatccgcactgtggatatagaggggaagaagatcaaactacaagtctgggacacggctggccaagagcggttcaagacaataactactgcctactaccgtggagccatgggcattatcctagtatacgacatcacggatgagaaatctttcgagaatattcagaactggatgaaaagcatcaaggagaatgcctcggctggggtggagcgcctcttgctggggaacaaatgtgacatggaggccaagaggaaggtgcagaaggagcaggccgataagttggctcgagagcatggaatccgatttttcgaaactagtgctaaatccagtatgaatgtggatgaggcttttagttccctggcccgggacatcttgctcaagtcaggaggccggagatcaggaaacggcaacaagcctcccagtactgacctgaaaacttgtgacaagaagaacaccaacaagtgctccctgggctgaggaccctttcttgcctccccaccccggaagctgaacctgagggagacaacggcagagggagtgagcaggggagaaatagcagaggggcttggagggtcacataggtagatggtaaagagaatgaggagaaaaaggagaaaagggaaaagcagaaaggaaaaaaaggaagagagaggaagggagaagggagaggaatgaattgaggaagtgaaagaaggcaaggaggtaggaagagagggaggaggaaaggaaggagagatgcctcaggcttcagaccttacctgggttttcagggcaaacataaatgtaaatacactgatttattctgttactagatcaggttttagggtcctgcaaaaggctagctcggcactacactagggaatttgctcctgttctgtcacttgtcatggtctttcttggtattaaaggccaccatttgcacaaa

SEQ ID NO: 369232 - DNA, 651 bp, Homo sapiens
gaattcgaggatccgggtaccatgggaggaaaacttcttcctggcctgggctccgtgccgctctgtttgccaaccgtccagtcccgcctaccacgcctcttgctggggaacaaatgtgacatggaggccaagaggaaggtgcagaaggagcaggccgataagttggctcgagagcatggaatccgatttttcgaaactagtgctaaatccagtatgaatgtggatgaggcttttagttccctggcccgggacatcttgctcaagtcaggaggccggagatcaggaaacggcaacaagcctcccagtactgacctgaaaacttgtgacaagaagaacaccaacaagtgctccctgggctgaggaccctttcttgcctccccaccccggaagctgaacctgagggagacaacggcagagggagtgagcaggggagaaatagcagaggggcttggagggtcacataggtagatggtaaagagaatgaggagaaaaaggagaaaagggaaaagcagaaaggaaaaaaaggaagagagaggaagggagaagggagaggaatgaattgaggaagtgaaagaaggcaaggaggttagaaccttagggttcttagggacgaaacataaactgttaaatacccctggtgtaattctggct

SEQ ID NO: 369233 - DNA, 844 bp, Homo sapiens
cgggggaggcagtttttgagttttggcctcaggcgtcagaatcttagaacgtctcaggctttttcttctctgttctctggaggcttccctgacctccccgcgttttccatggcgggcttgggtttgggaaaagggaagtaaaaaatcaggctgccccaagtgagatgctggcaactcttgggcctttagatttccaaaacctcattttgagcccttctgcagggtattaccaattaggcgccccctggggccgcgatgacatcttccctgaggatctgaggcaaatgtggtttactcccttgctcgaataaccctggcatatcctttgccaggtatcactggaaggatccccccgcaaaagagagggaaaagccgttaggtgtttgttgtgttctcctggataagggatggaattgggccaaattttcaagttaatttgtgtttaatccaccaacaactcaatccctcccccattaaaaaaaaaaaaaaaagcctaggggggtctctgcttctgcagacggtacctgccacgcatgccatagcttagtaactagtattaaccggttgggcttctgcttcctgaatactcggtccctttttcccttatgctgattaatttcaagatggaggagacagccacgttccttccctagacagtttcaccatacttattccacaggttagtctgggaatctgaggcctagcagtcttgttattgaggtcattttttttttcattttggggcaagaggaagcagttgtatcagattgtcatcttccatttgcaagaccccacaatgattttttgccagaagtaaggagcccgcatttcctgaatcagaatt

SEQ ID NO: 369234 - DNA, 355 bp, Homo sapiens
ggcacaatcacagctccttggagcctcgaactcctgggctcaaatgatcccacctcagccccccatttagttgagattacaggcacacaccaccatgcctggctaatttttcaaatttttttgtagagatggtgtctcactatgttagccaggctggccatgaagggatgttttaaaagtgaaacttgaaaaggcaaaccgcaccccgcaaccccaaaaaaaggcaaaaacccatcatcaaaaccagagtatagccagcatagtggctcacacctgtaatcccagcacttggggaggtgcaggtgggaggattgcttgagcacaggaatttgaaaccagcctgggcaacatagca

SEQ ID NO: 369235 - DNA, 423 bp, Homo sapiens
ccagagctcagtgcgtggtggccacctgtcggtttcacccttccccacccccatgttgacatacatgtctaatttttctctttgtttctctgaatattatcatccatgttgtcagatgaaaattattaaaacattttctatatctgagcatgggttcctatgcatgagattatgaaaaacactaataaacaatagttgaaaacctaaaacagcgtaagaggctactttgatgacttctagctgttatagaagatgttgagaagaacatggagaaaaattaagcctgtgcagaaaatctctatgccctaattggtgtatagtgatatctcattatggttttaatttgagttcactgctaatttttgccttcccttttgggttaggcagaaatttcttagatgtgacaccaaaagcatgatctat

SEQ ID NO: 369236 - DNA, 2063 bp, Homo sapiens
cccagagcaagccgattctctacacactgccttcccttcctgtaagactcatcaaaaaggcaccccaaccttgcatggatctgctgttggtattccttggggtgaagccagaagtcaggctttccacagagagacgggactacatggccacctgggaaggctagggagtcaaagggcctgaggaatgactacttccctccacaagggcattccctgccctgctctgcttcctgggggcttcagcaagccttccttctagagctcctagaaccctcccatggtcaacacaacagcagcccagacaatgagatgcaagaggcctgagctcacaggccattcaggtcttctagatgccttcttgaggctgcttgtggccacccacagacacttgtaaggaggagagaagtcagcctggcagagagactctgaaatgagggattagaggtgttcaaggagcaagagcttcagcctgaagacaagggagcagtccctgaagacgcttctactgagaggtctgccatggcctctcttggcctccaacttgtgggctacatcctaggccttctggggcttttgggcacactggttgccatgctgctccccagctggaaaacaagttcttatgtcggtgccagcattgtgacagcagttggcttctccaagggcctctggatggaatgtgccacacacagcacaggcatcacccagtgtgacatctatagcacccttctgggcctgcccgctgacatccaggctgcccaggccatgatggtgacatccagtgcaatctcctccctggcctgcattatctctgtggtgggcatgagatgcacagtcttctgccaggaatcccgagccaaagacagagtggcggtagcaggtggagtctttttcatccttggaggcctcctgggattcattcctgttgcctggaatcttcatgggatcctacgggacttctactcaccactggtgcctgacagcatgaaatttgagattggagaggctctttacttgggcattatttcttccctgttctccctgatagctggaatcatcctctgcttttcctgctcatcccagagaaatcgctccaactactacgatgcctaccaagcccaacctcttgccacaaggagctctccaaggcctggtcaacctcccaaagtcaagagtgagttcaattcctacagcctgacagggtatgtgtgaagaaccaggggccagagctggggggtggctgggtctgtgaaaaacagtggacagcaccccgagggccacaggtgagggacactaccactggatcgtgtcagaaggtgctgctgaggatagactgactttggccattggattgagcaaaggcagaaatgggggctagtgtaacagcatgcaggttgaattgccaaggatgctcgccatgccagcctttctgttttcctcaccttgctgctcccctgccctaagtccccaaccctcaacttgaaaccccattcccttaagccaggactcagaggatccctttgccctctggtttacctgggactccatccccaaacccactaatcacatcccactgactgaccctctgtgatcaaagaccctctctctggctgaggttggctcttagctcattgctggggatgggaaggagaagcagtggcttttgtgggcattgctctaacctacttctcaagcttccctccaaagaaactgattggccctggaacctccatcccactcttgttatgactccacagtgtccagactaatttgtgcatgaactgaaataaaaccatcctacggtatccagggaacagaaagcaggatgcaggatgggaggacaggaaggcagcctgggacatttaaaaaaataaaaatgaaaaaaaaacccagaacccatttctcagggcactttccagaattctctcatatttgtgggctgggatcaagcctgcagcttgaggaaagcacaaggaaaggaaagaagatctggtggaaagctcaggtggcagcggactctgactccactgaggaactgcctcagaagctgcgatcacaacttt

SEQ ID NO: 369237 - DNA, 945 bp, Homo sapiens
  misc_feature (5)..(5): n is a, c, g, or t
  misc_feature (23)..(23): n is a, c, g, or t
  misc_feature (902)..(903): n is a, c, g, or t
  misc_feature (906)..(906): n is a, c, g, or t
  misc_feature (908)..(908): n is a, c, g, or t
caatnaggctaggtacgaggccnggtgttaatcggccgaggccacagacacttgtaaggaggagagaagtcagcctggcagagagactctgaaatgagggattagaggtgttcaaggagcaagagcttcagcctgaagacaagggagcagtccctgaagacgcttctactgagaggtctgccatggcctctcttggcctccaacttgtgggctacatcctaggccttctggggcttttgggcacactggttgccatgctgctccccagctggaaaacaagttcttatgtcggtgccagcattgtgacagcagttggcttctccaagggcctctggatggaatgtgccacacacagcacaggcatcacccagtgtgacatctatagcacccttctgggcctgcccgctgacatccaggctgcccaggccatgatggtgacatccagtgcaatctcctccctggcctgcattatctctgtggtgggcatgagatgcacagtcttctgccaggaatcccgagccaaagacagagtggcggtagcaggtggagtctttttcatccttggaggcctcctgggattcattcctgttgcctggaatcttcatgggatcctacgggacttctactcaccactggtgcctgacagcatgaaatttgagattggagaggctctttacttgggcattatttcttccctgttctccctgatagctggaatcatcctctgcttttcctgctcatcccagagaaatcgctccaactactacgatgcctaccaagcccaacctcttgccacaaggagctctccaaggcctggtcaacctcccaaagtcaagagtgagttcaattcctacagcctgacagggtatgtgtgaagaaccaggggccagagctgggggggnnggncnggaacagggacgccccggggcccgtgggacttcctgt

SEQ ID NO: 369238 - DNA, 809 bp, Homo sapiens
gagctgtggggtactgaggaagacaccattccttgacggtgtctaagaagccaggtggatgtgtgtggtggctccagtgggtgtttctactctgccagtgagaggcagccccctagaaactcttcaggcgtaatggaaaatcagctcaaatgagatcaggcccccccagggtccacccacagagcactacagagcctctgaaagaccatagcaccaagcgagccccttcagattcccccactgtccatcggaagatgctccagagtggctagagggcatctaagggctccagcatggcatatccatgcccacggtgctgtgtccatgatctgagtgatagctgcactgctgcctgggattgcagctgaggtgggagtggagaatggttcccaggaagacagttccacctctaaggtccgaaaatgttccctttaccctggagtgggagtgaggggtcatacaccaaaggtattttccctcaccagtctaggcatgactggcttctgaaaaattccagcacacctcctcgaacctcattgtcagcagagagggactttgttcaggaagaaatccgtgtctccaacgaatatctacccatcacagacccctttcctatcactcaaggccccaggctggaacaaaatggatgcataacagttctgtgtacttgccaaggcatgtgggtgtgggtgccatgtgggtggtttacacacatgcctaccaggtatggcgtgactgtgtgtgtgtgcatggggtgtacaagcaagtgtctacctatgtgtctttctgggcaatgtgtaccatctgtg

SEQ ID NO: 369239 - DNA, 1261 bp, Homo sapiens
  misc_feature (5)..(5): n is a, c, g, or t
  misc_feature (23)..(23): n is a, c, g, or t
caatnaggctaggtacgaggccnggtgttaatcggccgaggccacagacacttgtaaggaggagagaagtcagcctggcagagagactctgaaatgagggattagaggtgttcaaggagcaagagcttcagcctgaagacaagggagcagtccctgaagacgcaccactggtgcctgacagcatgaaatttgagattggagaggctctttacttgggcattatttcttccctgttctccctgatagctggaatcatcctctgcttttcctgctcatcccagagaaatcgctccaactactacgatgcctaccaagcccaacctcttgccacaaggagctctccaaggcctggtcaacctcccaaagtcaagagtgagttcaattcctacagcctgacagggtatgtgtgaagaaccaggggccagagctggggggtggctgggtctgtgaaaaacagtggacagcaccccgagggccacaggtgagggacactaccactggatcgtgtcagaaggtgctgctgaggatagactgactttggccattggattgagcaaaggcagaaatgggggctagtgtaacagcatgcaggttgaattgccaaggatgctcgccatgccagcctttctgttttcctcaccttgctgctcccctgccctaagtccccaaccctcaacttgaaaccccattcccttaagccaggactcagaggatccctttgccctctggtttacctgggactccatccccaaacccactaatcacatcccactgactgaccctctgtgatcaaagaccctctctctggctgaggttggctcttagctcattgctggggatgggaaggagaagcagtggcttttgtgggcattgctctaacctacttctcaagcttccctccaaagaaactgattggccctggaacctccatcccactcttgttatgactccacagtgtccagactaatttgtgcatgaactgaaataaaaccatcctacggtatccagggaacagaaagcaggatgcaggatgggaggacaggaaggcagcctgggacatttaaaaaaataaaaatgaaaaaaaaacccagaacccatttctcagggcactttccagaattctctcatatttgtgggctgggatcaagcctgcagcttgaggaaagcacaaggaaaggaaagaagatctggtggaaagctcaggtggcagcggactctgactccactgaggaactgcctcagaagctgcgatcacaacttt

SEQ ID NO: 369240 - DNA, 701 bp, Homo sapiens
ggagcccttagatcatggacacagcatggcatatccatgcccacggtgctatcactcagatcatggacacagcaccgtgggcatggatatgccatgctgcactgctgcctgggattgcagctgaggtgggagtggagaatggttcccaggaagacagttccacctctaaggtccgaaaatgttccctttaccctggagtgggagtgaggggtcatacaccaaaggtattttccctcaccagtctaggcatgactggcttctgaaaaattccagcacacctcctcgaacctcattgtcagcagagagggcccatctgttgtctgtaacatgcctttcacatgtccaccttcttgccatgttccagctgctctcccaacctggaaggccgtctccccttagccaagtcctcctcaggcttggagaacttcctcagcgtcacctccttcattgagccttctctgatcactccatccctctcctacccctccctcccccaaccctcaatgtataaattgcttcttgatgcttagcattcacaatttttgattgatcgttatttgtgtgtgtgtgtccgatctcacaagtatattgtaaacccttcggtgggtgggggccatatcctagacctctctgtatcccccagactatctgtaacagtgccaggcacacagtaggtgatcaataaacacttgttgattgag

SEQ ID NO: 369241 - DNA, 755 bp, Homo sapiens
tcaaacagcagcaccaccagctccttaactgccttatcattcttttcgcgctcagccgtctgccgcagcgtctccacaatgggctggtcaggcttgatctccaggtgctttttgcccatcatatagccattggtggagttgtcccgaagtgcctgggctttctctctcaactcccgggagtgggagtggagaatggttcccaggaagacagttccacctctaaggtccgaaaatgttccctttaccctggagtgggagtgaggggtcatacaccaaaggtattttccctcaccagtctaggcatgactggcttctgaaaaattccagcacacctcctcgaacctcattgtcagcagagagggcccatctgttgtctgtaacatgcctttcacatgtccaccttcttgccatgttccagctgctctcccaacctggaaggccgtctccccttagccaagtcctcctcaggcttggagaacttcctcagcgtcacctccttcattgagccttctctgatcactccatccctctcctacccctccctcccccaaccctcaatgtataaattgcttcttgatgcttagcattcacaatttttgattgatcgttatttgtgtgtgtgtgtccgatctcacaagtatattgtaaacccttcggtgggtgggggccatatcctagacctctctgtatcccccagactatctgtaacagtgccaggcacacagtaggtgatcaataaacacttgttgattgag

SEQ ID NO: 369242 - DNA, 945 bp, Homo sapiens
gagctgtggggtactgaggaagacaccattccttgacggtgtctaagaagccaggtggatgtgtgtggtggctccagtgggtgtttctactctgccagtgagaggcagccccctagaaactcttcaggcgtaatggaaaatcagctcaaatgagatcaggcccccccagggtccacccacagagcactacagagcctctgaaagaccatagcaccaagcgagccccttcagattcccccactgtccatcggaagatgctccagagtggctagagggcatctaagggctccagcatggcatatccatgcccacggtgctgtgtccatgatctgagtgatagctgcactgctgcctgggattgcagctgaggtgggagtggagaatggttcccaggaagacagttccacctctaaggtccgaaaatgttccctttaccctggagtgggagtgaggggtcatacaccaaaggtattttccctcaccagtctaggcatgactggcttctgaaaaattccagcacacctcctcgaacctcattgtcagcagagagggcccatctgttgtctgtaacatgcctttcacatgtccaccttcttgccatgttccagctgctctcccaacctggaaggccgtctccccttagccaagtcctcctcaggcttggagaacttcctcagcgtcacctccttcattgagccttctctgatcactccatccctctcctacccctccctcccccaaccctcaatgtataaattgcttcttgatgcttagcattcacaatttttgattgatcgttatttgtgtgtgtgtgtccgatctcacaagtatattgtaaacccttcggtgggtgggggccatatcctagacctctctgtatcccccagactatctgtaacagtgccaggcacacagtaggtgatcaataaacacttgttgattgag

SEQ ID NO: 369243 - DNA, 1245 bp, Homo sapiens
ggagcccttagatcatggacacagcatggcatatccatgcccacggtgctatcactcagatcatggacacagcaccgtgggcatggatatgccatgctgcactgctgcctgggattgcagctgaggtgggagtggagaatggttcccaggaagacagttccacctctaaggtccgaaaatgttccctttaccctggagtgggagtgaggggtcatacaccaaaggtattttccctcaccagtctaggcatgactggcttctgaaaaattccagcacacctcctcgaacctcattgtcagcagagagggcccatctgttgtctgtaacatgcctttcacatgtccaccttcttgccatgttccagctgctctcccaacctggaaggccgtctccccttagccaagtcctcctcaggcttggagaacttcctcagcgtcacctccttcattgagccttctctgatcactccatccctctcctacccctccctcccccaaccctcaatgtataaattgcttcttgatgcttagcattcacaatttttgattgatcgttatttgtgtgtgtgtgtccgatctcacaagtatattgtaaacccttcggtgggtgggggccatatcctagacctctctgtatcccccagactatctgtaacagtgccaggcacacagtaggtgatcaataaacacttgttgattgagaaaaaaaaaaaaagaagcaaagaaaaaaaaaacaacaacaaaaaaaaaaagaaaaaaaacaataaaaaaaagaggggcggggcgcgccacaaaaaatatttcctcctgcgggggggcccaccagtatctagtgctgccccccggatggttcttctgtgagcaacaagcgggggctgccaccattaaggggaggcagttttaatacgaccaccggaacacggggcggcgcggggttaaaaccaaggccgtcggcggcgggcggcaacaccacgcgctcaacgcgcgaggcattatcgggcgggaagagacagacccccaacacacggcgggggggcgggaacacacaatcgtcggcaacacatcttccccgcagcagagaagaatatagaacagaccccccggacggcaaaaacacaaacaaccctgcgaccgcgagtgacgagcgggcggaacacccaccgccgccgcataaatcgagccgcccgcttgaaaaaactcgacggccccaagacgacagaaacaatctgaccaaacaacactttcc

SEQ ID NO: 369244 - DNA, 806 bp, Homo sapiens
  misc_feature (5)..(5): n is a, c, g, or t
  misc_feature (23)..(23): n is a, c, g, or t
caatnaggctaggtacgaggccnggtgttaatcggccgaggccacagacacttgtaaggaggagagaagtcagcctggcagagagactctgaaatgagggattagaggtgttcaaggagcaagagcttcagcctgaagacaagggagcagtccctgaagacgcttctactgagaggtctgccatggcctctcttggcctccaacttgtgggctacatcctaggccttctggggcttttgggcacactggttgccatgctgctccccagctggaaaacaagttcttatgtcggtgccagcattgtgacagcagttggcttctccaagggcctctggatggaatgtgccacacacagcacaggcatcacccagtgtgacatctatagcacccttctgggcctgcccgctgacatccaggctgcccaggccatgatggtgacatccagtgcaatctcctccctggcctgcattatctctgtggtgggcatgagatgcacagtcttctgccaggaatcccgagccaaagacagagtggcggtagcaggtggagtctttttcatccttggaggcctcctgggattcattcctgttgcctggaatcttcatgggatcctacgggacttctactatgcttagcattcacaatttttgattgatcgttatttgtgtgtgtgtgtccgatctcacaagtatattgtaaacccttcggtgggtgggggccatatcctagacctctctgtatcccccagactatctgtaacagtgccaggcacacagtaggtgatcaataaacacttgttgattgag

SEQ ID NO: 369245 - DNA, 1480 bp, Homo sapiens
  misc_feature (5)..(5): n is a, c, g, or t
  misc_feature (23)..(23): n is a, c, g, or t
caatnaggctaggtacgaggccnggtgttaatcggccgagggtcggtgccagcattgtgacagcagttggcttctccaagggcctctggatggaatgtgccacacacagcacaggcatcacccagtgtgacatctatagcacccttctgggcctgcccgctgacatccaggctgcccaggccatgatggtgacatccagtgcaatctcctccctggcctgcattatctctgtggtgggcatgagatgcacagtcttctgccaggaatcccgagccaaagacagagtggcggtagcaggtggagtctttttcatccttggaggcctcctgggattcattcctgttgcctggaatcttcatgggatcctacgggacttctactcaccactggtgcctgacagcatgaaatttgagattggagaggctctttacttgggcattatttcttccctgttctccctgatagctggaatcatcctctgcttttcctgctcatcccagagaaatcgctccaactactacgatgcctaccaagcccaacctcttgccacaaggagctctccaaggcctggtcaacctcccaaagtcaagagtgagttcaattcctacagcctgacagggtatgtgtgaagaaccaggggccagagctggggggtggctgggtctgtgaaaaacagtggacagcaccccgagggccacaggtgagggacactaccactggatcgtgtcagaaggtgctgctgaggatagactgactttggccattggattgagcaaaggcagaaatgggggctagtgtaacagcatgcaggttgaattgccaaggatgctcgccatgccagcctttctgttttcctcaccttgctgctcccctgccctaagtccccaaccctcaacttgaaaccccattcccttaagccaggactcagaggatccctttgccctctggtttacctgggactccatccccaaacccactaatcacatcccactgactgaccctctgtgatcaaagaccctctctctggctgaggttggctcttagctcattgctggggatgggaaggagaagcagtggcttttgtgggcattgctctaacctacttctcaagcttccctccaaagaaactgattggccctggaacctccatcccactcttgttatgactccacagtgtccagactaatttgtgcatgaactgaaataaaaccatcctacggtatccagggaacagaaagcaggatgcaggatgggaggacaggaaggcagcctgggacatttaaaaaaataaaaatgaaaaaaaaacccagaacccatttctcagggcactttccagaattctctcatatttgtgggctgggatcaagcctgcagcttgaggaaagcacaaggaaaggaaagaagatctggtggaaagctcaggtggcagcggactctgactccactgaggaactgcctcagaagctgcgatcacaacttt

SEQ ID NO: 369246 - DNA, 1576 bp, Homo sapiens
  misc_feature (5)..(5): n is a, c, g, or t
  misc_feature (23)..(23): n is a, c, g, or t
caatnaggctaggtacgaggccnggtgttaatcggccgaggccacagacacttgtaaggaggagagaagtcagcctggcagagagactctgaaatgagggattagaggtgttcaaggagcaagagcttcagcctgaagacaagggagcagtccctgaagacgcttctactgagaggtctgccatggcctctcttggcctccaacttgtgggctacatcctaggccttctggggcttttgggcacactggttgccatgctgctccccagctggaaaacaagttcttatgtcggtgccagcattgtgacagcagttggcttctccaagggcctctggatggaatgtgccacacacagcacaggcatcacccagtgtgacatctatagcacccttctgggcctgcccgctgacatccaggctgcccaggccatgatggtgacatccagtgcaatctcctccctggcctgcattatctctgtggtgggcatgagatgcacagtcttctgccaggaatcccgagccaaagacagagtggcggtagcaggtggagtctttttcatccttggaggcctcctgggattcattcctgttgcctggaatcttcatgggatcctacgggacttctactcaccactggtgcctgacagcatgaaatttgagattggagaggctctttacttgggcattatttcttccctgttctccctgatagctggaatcatcctctgcttttcctgctcatcccagagaaatcgctccaactactacgatgcctaccaagcccaacctcttgccacaaggagctctccaaggcctggtcaacctcccaaagtcaagagtgagttcaattcctacagcctgacagggtatgtgtgaagaaccaggggccagagctggggggtggctgggtctgtgaaaaacagtggacagcaccccgagggccacaggtgagggacactaccactggatcgtgtcagaaggtgctgctgaggatagactgactttggccattggattgagcaaaggcagaaatgggggctagtgtaacagcatgcaggttgaattgccaaggatgctcgccatgccagcctttctgttttcctcaccttgctgctcccctgccctaagtccccaaccctcaacttgaaaccccattcccttaagccaggactcagaggatccctttgccctctggtttacctgggactccatccccaaacccactaatcacatcccactgactgaccctctgtgatcaaagaccctctctctggctgaggttggctcttagctcattgctggggatgggaaggagaagcagtggcttttgtgggcattgctctaacctacttctcaagcttcccctcccccaaccctcaatgtataaattgcttcttgatgcttagcattcacaatttttgattgatcgttatttgtgtgtgtgtgtccgatctcacaagtatattgtaaacccttcggtgggtgggggccatatcctagacctctctgtatcccccagactatctgtaacagtgccaggcacacagtaggtgatcaataaacacttgttgattgag

SEQ ID NO: 369247 - DNA, 946 bp, Homo sapiens
  misc_feature (5)..(5): n is a, c, g, or t
  misc_feature (23)..(23): n is a, c, g, or t
caatnaggctaggtacgaggccnggtgttaatcggccgaggccacagacacttgtaaggaggagagaagtcagcctggcagagagactctgaaatgagggattagaggtgttcaaggagcaagagcttcagcctgaagacaagggagcagtccctgaagacgcttctactgagaggtctgccatggcctctcttggcctccaacttgtgggctacatcctaggccttctggggcttttgggcacactggttgccatgctgctccccagctggaaaacaagttcttatgtcggtgccagcattgtgacagcagttggcttctccaagggcctctggatggaatgtgccacacacagcacaggcatcacccagtgtgacatctatagcacccttctgggcctgcccgctgacatccaggctgcccaggccatgatggtgacatccagtgcaatctcctccctggcctgcattatctctgtggtgggcatgagatgcacagtcttctgccaggaatcccgagccaaagacagagtggcggtagcaggtggagtctttttcatccttggaggcctcctgggattcattcctgttgcctggaatcttcatgggatcctacgggacttctactcaccactggtgcctgacagcatgaaatttgagattggagaggctctttacttgggcattatttcttccctgttctccctgatagtccatccctctcctacccctccctcccccaaccctcaatgtataaattgcttcttgatgcttagcattcacaatttttgattgatcgttatttgtgtgtgtgtgtccgatctcacaagtatattgtaaacccttcggtgggtgggggccatatcctagacctctctgtatcccccagactatctgtaacagtgccaggcacacagtaggtgatcaataaacacttgttgattgag

SEQ ID NO: 369248 - DNA, 595 bp, Homo sapiens
cttggcaatgtattaaacagcaggccttggagactagcacttgagttaacacagccaccacaaccaccactgccatcatcaccttcccggaaagcagccacctgtctggctcctggctttgtccagctgccaacctaaggcatgtgcctacgcaggaggcgatgacattttggctccacgttcaaagttgttttttttttcctttctcatgtgttatttctaaagataacaaaggtcaaaaggcatccagcgttttctggtttctcataagcttctggtcaatatttaatctggtttatggattttttttaggtcttctagatgccttcttgaggctgcttgtggccacccacagacacttgtaaggaggagagaagtcagcctggcagagagactctgaaatgagggattagaggtgttcaaggagcaagagcttcagcctgaagacaagggagcagtccctgaagacgcttctactgagaggtctgccatggcctctcttggcctccaacttgtgggctacatcctaggccttctggggcttttgggcacactggttgccatgctgctccccagctggaaaacaagttcttat

SEQ ID NO: 369249 - DNA, 1505 bp, Homo sapiens
gaccacatatgctaggtcgatgccggctgtgatgcttgagatcggctgaagagagcgggcccaggctctgtgaggaggcaagggaggtgagaaccttgctctcagagggtgactcaagtcaacacagggaacccctcttttctacagacacagtgggtcgcaggatctgacaagagtccaggttctcaggggacagggagagcaagaggtcaagagctgtgggacaccacagagcagcactgaaggagaagacctgcctgtgggtccccatcgcccaagtcctgcccacactcccacctgctaccctgatcagagtcatcatgcctcgagctccaaagcgtcagcgctgcatgcctgaagaagatcttcaatcccaaagtgagacacagggcctcgagggtgcacaggctcccctggctgtggaggaggatgcttcatcatccacttccaccagctcctcttttccatcctcttttccctcctcctcctcttcctcctcctcctcctgctatcctctaataccaagcaccccagaggaggtttctgctgatgatgagacaccaaatcctccccagagtgctcagatagcctgctcctccccctcggtcgttgcttcccttccattagatcaatctgatgagggctccagcagccaaaaggaggagagtccaagcaccctacaggtcctgccagacagtgagtctttacccagaagtgagatagatgaaaaggtgactgatttggtgcagtttctgctcttcaagtatcaaatgaaggagccgatcacaaaggcagaaatactggagagtgtcataaaaaattatgaagaccacttccctttgttgtttagtgaagcctccgagtgcatgctgctggtctttggcattgatgtaaaggaagtggatcccactggccactcctttgtccttgtcacctccctgggcctcacctatgatgggatgctgagtgatgtccagagcatgcccaagactggcattctcatacttatcctaagcataatcttcatagagggctactgcacccctgaggaggtcatctgggaagcactgaatatgatggggctgtatgatgggatggagcacctcatttatggggagcccaggaagctgctcacccaagattgggtgcaggaaaactacctggagtaccggcaggtgcctggcagtgatcctgcacggtatgagtttctgtggggtccaagggctcatgctgaaattaggaagatgagtctcctgaaatttttggccaaggtaaatgggagtgatccaagatccttcccactgtggtatgaggaggctttgaaagatgaggaagagagagcccaggacagaattgccaccacagatgatactactgccatggccagtgcaagttctagcgctacaggtagcttctcctaccctgaataaagtaagacagattcttcactgtgttttaaaaggcaagtcaaataccacatgattttactcatatgtggaatctaa

SEQ ID NO: 369250 - DNA, 1521 bp, Homo sapiens
ggacgcgtgggtcgacccacgcgtccgaggttctcgttctgagggacaggcttgagatcggctgaagagagcgggcccaggctctgtgaggaggcaagggaggtgagaaccttgctctcagagggtgactcaagtcaacacagggaacccctcttttctacagacacagtgggtcgcaggatctgacaagagtccaggttctcaggggacagggagagcaagaggtcaagagctgtgggacaccacagagcagcactgaaggagaagacctgcctgtgggtccccatcgcccaagtcctgcccacactcccacctgctaccctgatcagagtcatcatgcctcgagctccaaagcgtcagcgctgcatgcctgaagaagatcttcaatcccaaagtgagacacagggcctcgagggtgcacaggctcccctggctgtggaggaggatgcttcatcatccacttccaccagctcctcttttccatcctcttttccctcctcctcctcttcctcctcctcctcctgctatcctctaataccaagcaccccagaggaggtttctgctgatgatgagacaccaaatcctccccagagtgctcagatagcctgctcctccccctcggtcgttgcttcccttccattagatcaatctgatgagggctccagcagccaaaaggaggagagtccaagcaccctacaggtcctgccagacagtgagtctttacccagaagtgagatagatgaaaaggtgactgatttggtgcagtttctgctcttcaagtatcaaatgaaggagccgatcacaaaggcagaaatactggagagtgtcataaaaaattatgaagaccacttccctttgttgtttagtgaagcctccgagtgcatgctgctggtctttggcattgatgtaaaggaagtggatcccactggccactcctttgtccttgtcacctccctgggcctcacctatgatgggatgctgagtgatgtccagagcatgcccaagactggcattctcatacttatcctaagcataatcttcatagagggctactgcacccctgaggaggtcatctgggaagcactgaatatgatggggctgtatgatgggatggagcacctcatttatggggagcccaggaagctgctcacccaagattgggtgcaggaaaactacctggagtaccggcaggtgcctggcagtgatcctgcacggtatgagtttctgtggggtccaagggctcatgctgaaattaggaagatgagtctcctgaaatttttggccaaggtaaatgggagtgatccaagatccttcccactgtggtatgaggaggctttgaaagatgaggaagagagagcccaggacagaattgccaccacagatgatactactgccatggccagtgcaagttctagcgctacaggtagcttctcctaccctgaataaagtaagacagattcttcactgtgttttaaaaggcaagtcaaataccacatgattttactcatatgtggaatctaa

SEQ ID NO: 369251 - DNA, 391 bp, Homo sapiens
gcgcaactccgtctcaaaaaataataataataaaataaaataaatttgtattttattacaatagcatttgcagataggaaactcgtgcttattattccttttatgaatttattgacttatggaatgcctaatatgtagcaggcactgaggtaggcactgaagacacacaggtaaaaccaatacggcgcctgacctcatcgagcacagatacatgcaagatgtgctatttattgtgtctacagacaatgctcacaggtggatgggagcaccctgtctctgactcctcagaattagcagttgcttccttctttagccagcaaacttctgctgtatacattataaacaaacacacaggtcaggaataatacttggttaccagtaatgtgataaa

SEQ ID NO: 369252 - DNA, 768 bp, Homo sapiens
gtgacctttgatagaccttttctgtaatatgggagaaagaataaaattaaattgttttaaatgagataggaagtgaaaaataacctggtacatcccttttgcctcttaaaacctttttatattcaagtaatgtttctatacttgtggatattctgttagacatggttatctcattcacatttaaatgcctagaagccttttttatagctgttgtaaaagtttgtctttattagccatatgtattacaatggtggttggtttatacacatttttaaccttataataatagctacacacagacctactgaaggagcaaaagaaatattaaaattttacgtctaaaaaataagttttattagtgaatatcaagttttgatttgtttatgaaaggcattcagagacctgtgcaataattaaatttttttttcctccccagaattacctctggactacaaatttacaagattctcttcaagcaattcaaaaacagctggctactatccaaatcctccactggtcttatcaagtgatgagacactgatatccaaataagttgtctttactgaaaaatgaagtgaagacccatatatgcagttaaaaaaaagttaattttcaaaaaatactgtaaaagactttaaggaacaagttttattgaccaataagttgatatttgtccataggtctcctttctataaatcatcttgatgtttaacaactcttattatattaaaatctcagtatcctaaaaatagaaccttattgatattt

SEQ ID NO: 369253 - DNA, 693 bp, Homo sapiens
  misc_feature (9)..(9): n is a, c, g, or t
tgggagggngggaaatggaataaccgagcttgcagcacacgcagcaccagtcatgtggtgagcccctctgagctggcgcctcgtgcctcagaatcaggtagactcttgttataagattacagttacccttaactactcccaagggaacgctgtccacctctatgaacttctgaagaaaatgactggcaaacctgaacccaaggttgtttattttggtgacagcatgcattcagatattttcccagctcgtcactatagtaattgggagacagtcctcatcctggaagaactcagaggggatgaaggcacgaggagtcagaggcctgaggagtcagagcctctagagaagaaaggaaaatatgagggaccaaaagcaaaacctttaaatacttcatctaaaaaatggggctctttttttattgattcagttttgggactggaaaatacagaagactccttggtttatacatggtcttgtaagagaatcagtacttacagcactattgcaattccaagtattgaagcaatcgcagaattacctctggactacaaatttacaagattctcttcaagcaattcaaaaacagctggctactatccaaatcctccactggtcttatcaagtgatgagacactgatatccaaataagttgtctttactgaaaaatgaagtgaagacccatatatgcagtt

SEQ ID NO: 369254 - DNA, 1671 bp, Homo sapiens
cggcccggtcctgtcccgcagcgtcccgccagccagctccttgcacccttcgcggccgaggcgctccctggtgctccccgcgcagccatggctcagcacttctccctggccgcctgcgacgtggtcggattcgacctggaccacactctgtgtcgctacaacctgcccgagagcgccccgctcatttataatagctttgcccagttcctagttaaggagaaagggtacgataaggaattgctcaatgtgaccccagaggattgggatttctgttgcaaaggtttggcattggatctagaagatgggaacttccttaaacttgcaaataatggcactgttctcagggcaagccatggcaccaagatgatgactccagaggtgctggcagaggcatatggcaagaaagagtggaagcacttcttgtcggacactggaatggcttgccgctcaggaaagtattacttttacgacaactactttgacctgccaggagctcttctgtgtgccagggtggtggactatttaacaaaactgaacaatggtcaaaaaacatttgatttttggaaggatatagttgctgctatacaacacaattataaaatgtcagcttttaaggaaaactgtggaatatattttccagaaataaaaagagatccaggcagatatttacatagttgtcctgaatctgtgaaaaaatggcttcgacagctaaagaatgctgggaaaattcttctgttaattaccagttctcacagtgattactgtagacttctctgcgaatatattcttgggaatgattttacagacctttttgacattgtgattacaaatgcattgaagcctggtttcttctcccacttaccaagtcagagacctttccggacactcgagaatgatgaggagcaggaggcactgccatctctggataaacctggctggtactcccaagggaacgctgtccacctctatgaacttctgaagaaaatgactggcaaacctgaacccaaggttgtttattttggtgacagcatgcattcagatattttcccagctcgtcactatagtaattgggagacagtcctcatcctggaagaactcagaggggatgaaggcacgaggagtcagaggcctgaggagtcagagcctctagagaagaaaggaaaatatgagggaccaaaagcaaaacctttaaatacttcatctaaaaaatggggctctttttttattgattcagttttgggactggaaaatacagaagactccttggtttatacatggtcttgtaagagaatcagtacttacagcactattgcaattccaagtattgaagcaatcgcagaattacctctggactacaaatttacaagattctcttcaagcaattcaaaaacagctggctactatccaaatcctccactggtcttatcaagtgatgagacactgatatccaaataagttgtctttactgaaaaatgaagtgaagacccatatatgcagttaaaaaaaagttaattttcaaaaaatactgtaaaagactttaaggaacaagttttattgaccaataagttgatatttgtccataggtctcctttctataaatcatcttgatgtttaacaactcttattatattaaaatctcagtatcctaaaaatagaaccttattgatattt

SEQ ID NO: 369255 - DNA, 1647 bp, Homo sapiens
cggcccggtcctgtcccgcagcgtcccgccagccagctccttgcacccttcgcggccgaggcgctccctggtgctccccgcgcagccatggctcagcacttctccctggccgcctgcgacgtggtcggattcgacctggaccacactctgtgtcgctacaacctgcccgagagcgccccgctcatttataatagctttgcccagttcctagttaaggagaaagggtacgataaggaattgctcaatgtgaccccagaggattgggatttctgttgcaaaggtttggcattggatctagaagatgggaacttccttaaacttgcaaataatggcactgttctcagggcaagccatggcaccaagatgatgactccagaggtgctggcagaggcatatggcaagaaagagtggaagcacttcttgtcggacactggaatggcttgccgctcaggaaagtattacttttacgacaactactttgacctgccaggagctcttctgtgtgccagggtggtggactatttaacaaaactgaacaatggtcaaaaaacatttgatttttggaaggatatagttgctgctatacaacacaattataaaatgtcagcttttaaggaaataaaaagagatccaggcagatatttacatagttgtcctgaatctgtgaaaaaatggcttcgacagctaaagaatgctgggaaaattcttctgttaattaccagttctcacagtgattactgtagacttctctgcgaatatattcttgggaatgattttacagacctttttgacattgtgattacaaatgcattgaagcctggtttcttctcccacttaccaagtcagagacctttccggacactcgagaatgatgaggagcaggaggcactgccatctctggataaacctggctggtactcccaagggaacgctgtccacctctatgaacttctgaagaaaatgactggcaaacctgaacccaaggttgtttattttggtgacagcatgcattcagatattttcccagctcgtcactatagtaattgggagacagtcctcatcctggaagaactcagaggggatgaaggcacgaggagtcagaggcctgaggagtcagagcctctagagaagaaaggaaaatatgagggaccaaaagcaaaacctttaaatacttcatctaaaaaatggggctctttttttattgattcagttttgggactggaaaatacagaagactccttggtttatacatggtcttgtaagagaatcagtacttacagcactattgcaattccaagtattgaagcaatcgcagaattacctctggactacaaatttacaagattctcttcaagcaattcaaaaacagctggctactatccaaatcctccactggtcttatcaagtgatgagacactgatatccaaataagttgtctttactgaaaaatgaagtgaagacccatatatgcagttaaaaaaaagttaattttcaaaaaatactgtaaaagactttaaggaacaagttttattgaccaataagttgatatttgtccataggtctcctttctataaatcatcttgatgtttaacaactcttattatattaaaatctcagtatcctaaaaatagaaccttattgatattt

SEQ ID NO: 369256 - DNA, 1499 bp, Homo sapiens
cggcccggtcctgtcccgcagcgtcccgccagccagctccttgcacccttcgcggccgaggcgctccctggtgctccccgcgcagccatggctcagcacttctccctggccgcctgcgacgtggtcggattcgacctggaccacactctgtgtcgctacaacctgcccgagagcgccccgctcatttataatagctttgcccagttcctagttaaggagaaagggtacgataaggaattgctcaatgtgaccccagaggattgggatttctgttgcaaaggtttggcattggatctagaagatgggaacttccttaaacttgcaaataatggcactgttctcagggcaagccatggcaccaagatgatgactccagaggtgctggcagaggcatatggcaagaaagagtggaagcacttcttgtcggacactggaatggcttgccgctcaggaaagtattacttttacgacaactactttgacctgccaggagctcttctgtgtgccagggtggtggactatttaacaaaactgaacaatggtcaaaaaacatttgatttttggaaggatatagttgctgctatacaacacaattataaaatgtcagcttttaaggaaaactgtggaatatattttccagaaataaaaagagatccaggcagatatttacatagttgtcctgaatctgtgaaaaaatggcttcgacagctaaagaatgctgggaaaattcttctgttaattaccagttctcacagtgattactgtagacttctctgcgaatatattcttgggaatgattttacagacctttttgacattgtgattacaaatgcattgaagcctggtttcttctcccacttaccaagtcagagacctttccggacactcgagaatgatgaggagcaggaggcactgccatctctggataaacctggctggtactcccaagggaacgctgtccacctctatgaacttctgaagaaaatgactggcaaacctgaacccaaggttgtttattttggtgacagcatgcattcagatattttcccagctcgtcactatagtaattgggagacagtcctcatcctggaagaactcagaggggatgaaggcacgaggagtcagaggcctgaggagtcagagcctctagagaagaaaggaaaatatgagggaccaaaagcaaaacctttaaatacttcatctaaaaaatggggctctttttttattgattcagttttgggactggaaaatacagaagactccttggtttatacatggtcttgtaagagaatcagtacttacagcactattgcaattccaagtattgaagcaatcgcagaattacctctggactacaaatttacaagattctcttcaagcaattcaaaaacagctggctactatccaaatcctccactggtcttatcaagtgatgagacactgatatccaaataagttgtctttactgaaaaatgaagtgaagacccatatatgcagtt

SEQ ID NO: 369257 - DNA, 1671 bp, Homo sapiens
  misc_feature (1149)..(1149): n is a, c, g, or t
  misc_feature (1153)..(1154): n is a, c, g, or t
  misc_feature (1157)..(1157): n is a, c, g, or t
  misc_feature (1162)..(1163): n is a, c, g, or t
  misc_feature (1182)..(1182): n is a, c, g, or t
  misc_feature (1184)..(1184): n is a, c, g, or t
  misc_feature (1191)..(1191): n is a, c, g, or t
  misc_feature (1193)..(1193): n is a, c, g, or t
  misc_feature (1195)..(1195): n is a, c, g, or t
  misc_feature (1200)..(1200): n is a, c, g, or t
  misc_feature (1205)..(1205): n is a, c, g, or t
  misc_feature (1207)..(1207): n is a, c, g, or t
  misc_feature (1233)..(1233): n is a, c, g, or t
  misc_feature (1242)..(1242): n is a, c, g, or t
  misc_feature (1247)..(1248): n is a, c, g, or t
  misc_feature (1252)..(1252): n is a, c, g, or t
  misc_feature (1254)..(1254): n is a, c, g, or t
  misc_feature (1258)..(1259): n is a, c, g, or t
  misc_feature (1266)..(1266): n is a, c, g, or t
  misc_feature (1278)..(1278): n is a, c, g, or t
  misc_feature (1287)..(1289): n is a, c, g, or t
  misc_feature (1291)..(1291): n is a, c, g, or t
  misc_feature (1296)..(1297): n is a, c, g, or t
  misc_feature (1306)..(1307): n is a, c, g, or t
  misc_feature (1317)..(1317): n is a, c, g, or t
  misc_feature (1325)..(1325): n is a, c, g, or t
  misc_feature (1331)..(1331): n is a, c, g, or t
  misc_feature (1335)..(1335): n is a, c, g, or t
  misc_feature (1337)..(1338): n is a, c, g, or t
  misc_feature (1340)..(1340): n is a, c, g, or t
  misc_feature (1354)..(1354): n is a, c, g, or t
  misc_feature (1383)..(1389): n is a, c, g, or t
cggcccggtcctgtcccgcagcgtcccgccagccagctccttgcacccttcgcggccgaggcgctccctggtgctccccgcgcagccatggctcagcacttctccctggccgcctgcgacgtggtcggattcgacctggaccacactctgtgtcgctacaacctgcccgagagcgccccgctcatttataatagctttgcccagttcctagttaaggagaaagggtacgataaggaattgctcaatgtgaccccagaggattgggatttctgttgcaaaggtttggcattggatctagaagatgggaacttccttaaacttgcaaataatggcactgttctcagggcaagccatggcaccaagatgatgactccagaggtgctggcagaggcatatggcaagaaagagtggaagcacttcttgtcggacactggaatggcttgccgctcaggaaagtattacttttacgacaactactttgacctgccaggagctcttctgtgtgccagggtggtggactatttaacaaaactgaacaatggtcaaaaaacatttgatttttggaaggatatagttgctgctatacaacacaattataaaatgtcagcttttaaggaaaactgtggaatatattttccagaaataaaaagagatccaggcagatatttacatagttgtcctgaatctgtgaaaaaatggcttcgacagctaaagaatgctgggaaaattcttctgttaattaccagttctcacagtgattactgtagacttctctgcgaatatattcttgggaatgattttacagacctttttgacattgtgattacaaatgcattgaagcctggtttcttctcccacttaccaagtcagagacctttccggacactcgagaatgatgaggagcaggaggcactgccatctctggataaacctggctggtactcccaagggaacgctgtccacctctatgaacttctgaagaaaatgactggcaaacctgaacccaaggttgtttattttggtgacagcatgcattcagatattttcccagctcgtcactatagtaattgggagacagtcctcatcctggaagaactcagaggggatgaaggcacgaggagtcagaggcctgaggacccagaccccccngagnncanccccnnaaatgagggccccaacccnanccccccnancnccccnccccncnaatgggcccccccccccacccacccnccccccccnccccnnaacncncaannccccccnccccaaacacgnccccccaannnanccagnncccacagcnncatcgcaaanccaagtantgaggnaagngnngnatggcgtctggacnggggatttacaagattggcgtcagggggnnnnnnngcagctggctactatccaaatcctccactggtcttatcaagtgatgagacactgatatccaaataagttgtctttactgaaaaatgaagtgaagacccatatatgcagttaaaaaaaagttaattttcaaaaaatactgtaaaagactttaaggaacaagttttattgaccaataagttgatatttgtccataggtctcctttctataaatcatcttgatgtttaacaactcttattatattaaaatctcagtatcctaaaaatagaaccttattgatattt

SEQ ID NO: 369258 - DNA, 665 bp, Homo sapiens
cggcccggtcctgtcccgcagcgtcccgccagccagctccttgcacccttcgcggccgaggcgctccctggtgctccccgcgcagccatggctcagcacttctccctggccgcctgcgacgtggtcggattcgacctggaccacactctgtgtcgctacaacctgcccgagagcgccccgctcatttataatagctttgcccagttcctagttaaggagaaagggtacgataaggaattgctcaatgtgaccccagaggattgggatttctgttgcaaaggtttggcattggatctagaagatgggaacttccttaaacttgcaaataatggcactgttctcagggcaagccatggcaccaagatgatgactccagaggtgctggcagaggcatatggcaagaaagagtggaagcacttcttgtcggacactggaatggcttgccgctcaggaaagtattacttttacgacaactactttgacctgccaggagctcttctgtgtgccagggtggtggactatttaacaaaactgaacaatggtcaaaaaacatttctgtgggcagctgtagcacttacccgctttaatccatcaagtagcaggtgattaggagatactcactctgaggtaaacactggataagataccacccttttttgtcgacc

SEQ ID NO: 369259 - DNA, 288 bp, Homo sapiens
cagtggaatgttcaccttaaagtgtgtgagaaaaatataaagcatgtaaaagttagtcaaaagatgaatgatgctgtggtaaaatagataagcaaagatcaagttctgttttatatggaccttttctaattcttaaaataaacttatgaaaaattgtgttgcttttaggaatgattttacagacctttttgacattgtgattacaaatgcattgaagcctggtttcttctcccacttaccaagtcagagacctttccggacactcggtaagttacatttggtttcttt

SEQ ID NO: 369260 - DNA, 1852 bp, Homo sapiens
cggcccggtcctgtcccgcagcgtcccgccagccagctccttgcacccttcgcggccgaggcgctccctggtgctccccgcgcagccatggctcagcacttctccctggccgcctgcgacgtggtcggattcgacctggaccacactctgtgtcgctacaacctgcccgagagcgccccgctcatttataatagctttgcccagttcctagttaaggagaaagggtacgataaggaattgctcaatgtgaccccagaggattgggatttctgttgcaaaggtttggcattggatctagaagatgggaacttccttaaacttgcaaataatggcactgttctcagggcaagccatggcaccaagatgatgactccagaggtgctggcagaggcatatggcaagaaagagtggaagcacttcttgtcggacactggaatggcttgccgctcaggaaagtattacttttacgacaactactttgacctgccaggagctcttctgtgtgccagggtggtggactatttaacaaaactgaacaatggtcaaaaaacatttgatttttggaaggatatagttgctgctatacaacacaattataaaatgtcagcttttaaggaaaactgtggaatatattttccagaaataaaaagagatccaggcagatatttacatagttgtcctgaatctgtgaaaaaatggcttcgacagctaaagaatgctgggaaaattcttctgttaattaccagttctcacagtgattactgtagacttctctgcgaatatattcttgggaatgattttacagacctttttgacattgtgattacaaatgcattgaagcctggtttcttctcccacttaccaagtcagagacctttccggacactcgagaatgatgaggagcaggaggcactgccatctctggataaacctggctggtactcccaagggaacgctgtccacctctatgaacttctgaagaaaatgactggcaaacctgaacccaagaaaatatttaccagaatttctgtgagctgagagatcgtggggtaacagagccctgctccattggctgtcaccatgccacagtctcctggggactcctgagggttaatggatggagcagtctgacttgcagatgctgattctcatatcccttaactctgttttcacatctgaaaattgagaggttgtttattttggtgacagcatgcattcagatattttcccagctcgtcactatagtaattgggagacagtcctcatcctggaagaactcagaggggatgaaggcacgaggagtcagaggcctgaggagtcagagcctctagagaagaaaggaaaatatgagggaccaaaagcaaaacctttaaatacttcatctaaaaaatggggctctttttttattgattcagttttgggactggaaaatacagaagactccttggtttatacatggtcttgtaagagaatcagtacttacagcactattgcaattccaagtattgaagcaatcgcagaattacctctggactacaaatttacaagattctcttcaagcaattcaaaaacagctggctactatccaaatcctccactggtcttatcaagtgatgagacactgatatccaaataagttgtctttactgaaaaatgaagtgaagacccatatatgcagttaaaaaaaagttaattttcaaaaaatactgtaaaagactttaaggaacaagttttattgaccaataagttgatatttgtccataggtctcctttctataaatcatcttgatgtttaacaactcttattatattaaaatctcagtatcctaaaaatagaaccttattgatattt

SEQ ID NO: 369261 - DNA, 1828 bp, Homo sapiens
cggcccggtcctgtcccgcagcgtcccgccagccagctccttgcacccttcgcggccgaggcgctccctggtgctccccgcgcagccatggctcagcacttctccctggccgcctgcgacgtggtcggattcgacctggaccacactctgtgtcgctacaacctgcccgagagcgccccgctcatttataatagctttgcccagttcctagttaaggagaaagggtacgataaggaattgctcaatgtgaccccagaggattgggatttctgttgcaaaggtttggcattggatctagaagatgggaacttccttaaacttgcaaataatggcactgttctcagggcaagccatggcaccaagatgatgactccagaggtgctggcagaggcatatggcaagaaagagtggaagcacttcttgtcggacactggaatggcttgccgctcaggaaagtattacttttacgacaactactttgacctgccaggagctcttctgtgtgccagggtggtggactatttaacaaaactgaacaatggtcaaaaaacatttgatttttggaaggatatagttgctgctatacaacacaattataaaatgtcagcttttaaggaaataaaaagagatccaggcagatatttacatagttgtcctgaatctgtgaaaaaatggcttcgacagctaaagaatgctgggaaaattcttctgttaattaccagttctcacagtgattactgtagacttctctgcgaatatattcttgggaatgattttacagacctttttgacattgtgattacaaatgcattgaagcctggtttcttctcccacttaccaagtcagagacctttccggacactcgagaatgatgaggagcaggaggcactgccatctctggataaacctggctggtactcccaagggaacgctgtccacctctatgaacttctgaagaaaatgactggcaaacctgaacccaagaaaatatttaccagaatttctgtgagctgagagatcgtggggtaacagagccctgctccattggctgtcaccatgccacagtctcctggggactcctgagggttaatggatggagcagtctgacttgcagatgctgattctcatatcccttaactctgttttcacatctgaaaattgagaggttgtttattttggtgacagcatgcattcagatattttcccagctcgtcactatagtaattgggagacagtcctcatcctggaagaactcagaggggatgaaggcacgaggagtcagaggcctgaggagtcagagcctctagagaagaaaggaaaatatgagggaccaaaagcaaaacctttaaatacttcatctaaaaaatggggctctttttttattgattcagttttgggactggaaaatacagaagactccttggtttatacatggtcttgtaagagaatcagtacttacagcactattgcaattccaagtattgaagcaatcgcagaattacctctggactacaaatttacaagattctcttcaagcaattcaaaaacagctggctactatccaaatcctccactggtcttatcaagtgatgagacactgatatccaaataagttgtctttactgaaaaatgaagtgaagacccatatatgcagttaaaaaaaagttaattttcaaaaaatactgtaaaagactttaaggaacaagttttattgaccaataagttgatatttgtccataggtctcctttctataaatcatcttgatgtttaacaactcttattatattaaaatctcagtatcctaaaaatagaaccttattgatattt

SEQ ID NO: 369262 - DNA, 763 bp, Homo sapiens
cggcccggtcctgtcccgcagcgtcccgccagccagctccttgcacccttcgcggccgaggcgctccctggtgctccccgcgcagccatggctcagcacttctccctggccgcctgcgacgtggtcggattcgacctggaccacactctgtgtcgctacaacctgcccgagagcgccccgctcatttataatagctttgcccagttcctagttaaggagaaagggtacgataaggaattgctcaatgtgaccccagaggattgggatttctgttgcaaaggtttggcattggatctagaagatgggaacttccttaaacttgcaaataatggcactgttctcagggcaagccatggcaccaagatgatgactccagaggtgctggcagaggcatatggcaagaaagagtggaagcacttcttgtcggacactggaatggcttgccgctcaggaaagtattacttttacgacaactactttgacctgccaggagctcttctgtgtgccagggtggtggactatttaacaaaactgaacaatggtcaaaaaacatttgatttttggaaggatatagttgctgctatacaacacaattataaaatgtcagcttttaagggtaagtattgtgaagaggggccttctaatacgtgtttgttaagctatgtttgtctagtgaattagctgaaaagtaggtactttgctgtgtatcttacttaggatttaatttaagcttaaatattattataaagttggttctgactac

SEQ ID NO: 369263 - DNA, 468 bp, Homo sapiens
tcctcaaagctatgcaaacatccacttgcagattctacaaaaagagtgattcaaaactgctctatcaaaagaaaggttcaactctgttagttgagtacaaacatgacaaacaagtttctgagaatgattctgtctagtttttatgggaagatgtttcctcattcaccacaggcctcaaagcgctccaaatttccacttccggatactacaaaaagaatgtttcaaacctgctctatgaaagggaaggttcaaatctgtgacctgaatgcaaacatcagaaagaagtttctgcgaatgcttctgtctactttttatattggcattcccatttccaacgaaatcctcaaagctatccaaatatccacttgcagattctataaaaagattttttccaaactgttctatcaaaagaaaggttcaactctattagttgggtacacacataataaacaagtttctgagaatgct

SEQ ID NO: 369264 - DNA, 3587 bp, Homo sapiens
ttccatcccggcagtcgtggctgcagcgctgaggcgagaggttggtgggtgtctccggccataatgacccaggctgagaagggtgatacggagaacggaaaggagaagggcggcgagaaggagaaggagcagcgcggcgtgaagcggcccatcgtgcccgcgctggtgccggagtcgctgcaagagcaaatccagagcaacttcatcattgtcatacatccaggttcaacaactttaaggattggtcgagccacagacactcttcctgccagcattcctcacgtcattgcccgaagacacaaacaacaagggcagcccctatacaaggacagttggctcctaagggagggactaaataaaccagaaagtaatgaacaaagacaaaatggccttaaaatggtggatcaagcaatatggtctaaaaagatgtccaatggtacaagacgcattcctgtgtcccctgaacaggcacgctcctacaataagcagatgcgacctgcaattttagatcactgttcgggaaataagtggacaaacacatctcatcaccctgagtatttagtaggagaagaggccttgtatgttaatccactggactgttacaatattcactggcctatcagaagaggtcagttaaatattcacccaggccctgggggctctcttacagctgttctggcagatattgaagtaatatggtctcatgcgatacaaaaatacttggaaatcccactgaaagatttaaagtattatagatgtatcttgttaattcctgatatctataataagcagcatgtgaaagaactagtgaatatgatactaatgaagatgggtttttcagggattgtggtccatcaggagtctgtgtgtgccacctatggaagtggcttaagcagcacgtgtattgtagacgttggggaccagaagacaagtgtatgctgtgtggaggatggggtgtctcatcggaatactcggctttgtctggcatacggaggatctgatgtgtcaagatgtttttactggctaatgcagcgagctgggttcccttacagagaatgccagttaacaaataaaatggattgtcttcttctgcaacaccttaaagaaactttttgtcatttagatcaggacatctctgggcttcaggaccatgagtttcagattcgacatcctgattctcctgccctgctttaccagtttcgattaggagatgaaaaactgcaggctccaatggctttgttttaccccgcaacttttggaattgttggacagaaaatgacgactttgcagcacagatctcagggcgatcctgaggatcctcacgatgaacattacctgctggccacacagagcaaacaagaacagtctgcaaaagctactgctgaccgaaagtctgcatccaaacctattggatttgaaggggatcttcgtggccagtcctctgatcttccagaaagactccattcccaggaggtagatttggggtctgcacagggagatggcctgatggccggcaacgattccgaggaggccctcactgcactgatgtccaggaagactgccatctcgctgtttgaagggaaagccctgggcctggataaagccatcctccatagcatagactgctgttcatctgacgacaccaaaaagaagatgtacagctccatcctagtggtgggaggtggtttgatgtttcataaagctcaagaatttctgcagcacagaattctcaacaaaatgccaccatccttcaggcgaattattgaaaatgtggatgtgatcacaaggcctaaggacatggacccccggctgattgcatggaaaggaggggcagtgttggcttgtttggatacaacacaggaactgtggatttatcagcgagagtggcagcgctttggtgtccgcatgttacgagagcgggctgcgtttgtgtggtgaatggggaggaaatgtcactgccgaagaccaaaaacaagcttcttggtataaaagactcttacagaatatgtgtattgtaatttattgatctggatgcttaagtgtcatggacagtaaatgaatttgaactttatgttgaggacatgacattggtttgaaaatataaactgcttttgagcagtttagtcagggcatttgagaataaataggaactttctcttcagttgtaaactctcttgccctctctcagggtctcataaactccccagtgatgtaaacgttgctattgaaggttctcatgtggtgaagcccttcatttaagttggcttgaatctcatcagcaggcagcctcatgcaaccatgagggatagtatgtgacgagggagaactgtccactcatgccattttctctcttgtctagtatttcattaggatctaaagttgtctgagttaaatgcacttatgtgactcatgtgtcctcttagaatcccaaatagggggaaaaagttttggtggtttttgtttttttttcattttctgttggattacagaaaaagaatgggacccattcaggtctcgatttccaaaggtaaagatggaaggctgggcagactggcttttgttacctgacatgccgtagggtgagcttagaggaagaaagaaaacaatttttatttggccaaaacagaacaaatgctgaaaaggaaatcttgtttttttcctaaagccaaatagaaatgatttgggtataatttaagagtccttgtgttgtacagatatggtgactgatgtagttattaatactaccaacttagtcatcaagcctcaattttcctttacctgaaggattaagtgaaagcttttggagttcatgatgttcagtatgatcagttaaccttaacctctgagcatcctgaagcaaaatctaaataatgcagctattaccactggtggtccaggctctggtgaagccctctgagcccaggaggaagagaaagcattgtccagaggtaggaacacagtctgggagcccagagctctgggaggagtgggaaaatgctgcttcctgctgcttgcttctaggcacctgcttccgccatctcacttaccatggctagagatgggggtgagactggggaaggacaaaagcagggaacagataagggatggaaatcagaagggaatatagaaagaactctggatgtggagaaatgccggtacctgagcattttgtatcaatgggagtaccctctgtaactgctcagtaggttacaaatgaagagtccaccagtattagaaacaatttaaacttgccagtaccaactgggatgtgtgccttcaatttgaaaattgtatgttttattttttaaatttgttaacagcattaatttatagagtattgatgtcatttatgtttctgaggtgtttcaacacaattttggatcagctgcctgtttgcaaaaacataatatatttctgttaaacagttcttcacctaacagcatattgctcttataactggtagagctgtttcaaaggaagttggtttctggtccaagttttgacctaaaccatgtccatcttctattaccagcacttacaagcactgtgaaaactgatcatgacaaataagtaaaatttgctacatt

SEQ ID NO: 369265 - DNA, 3958 bp, Homo sapiens
ttccatcccggcagtcgtggctgcagcgctgaggcgagaggttggtgggtgtctccggccataatgacccaggctgagaagggtgatacggagaacggaaaggagaagggcggcgagaaggagaaggagcagcgcggcgtgaagcggcccatcgtgcccgcgctggtgccggagtcgctgcaagagcaaatccagagcaacttcatcattgtcatacatccaggttcaacaactttaaggattggtcgagccacagacactcttcctgccagcattcctcacgtcattgcccgaagacacaaacaacaagggcagcccctatacaaggacagttggctcctaagggagggactaaataaaccagaaagtaatgaacaaagacaaaatggccttaaaatggtggatcaagcaatatggtctaaaaagatgtccaatggtacaagacgcattcctgtgtcccctgaacaggcacgctcctacaataagcagatgcgacctgcaattttagatcactgttcgggaaataagtggacaaacacatctcatcaccctgagtatttagtaggagaagaggccttgtatgttaatccactggactgttacaatattcactggcctatcagaagaggtcagttaaatattcacccaggccctgggggctctcttacagctgttctggcagatattgaagtaatatggtctcatgcgatacaaaaatacttggaaatcccactgaaagatttaaagtattatagatgtatcttgttaattcctgatatctataataagcagcatgtgaaagaactagtgaatatgatactaatgaagatgggtttttcagggattgtggtccatcaggagtctgtgtgtgccacctatggaagtggcttaagcagcacgtgtattgtagacgttggggaccagaagacaagtgtatgctgtgtggaggatggggtgtctcatcggaatactcggctttgtctggcatacggaggatctgatgtgtcaagatgtttttactggctaatgcagcgagctgggttcccttacagagaatgccagttaacaaataaaatggattgtcttcttctgcaacaccttaaagaaactttttgtcatttagatcaggacatctctgggcttcaggaccatgagtttcagattcgacatcctgattctcctgccctgctttaccagtttcgattaggagatgaaaaactgcaggctccaatggctttgttttaccccgcaacttttggaattgttggacagaaaatgacgactttgcagcacagatctcagggcgatcctgaggatcctcacgatgaacattacctgctggccacacagagcaaacaagaacagtctgcaaaagctactgctgaccgaaagtctgcatccaaacctattggatttgaaggggatcttcgtggccagtcctctgatcttccagaaagactccattcccaggaggtagatttggggtctgcacagggagatggcctgatggccggcaacgattccgaggaggccctcactgcactgatgtccaggaagactgccatctcgctgtttgaagggaaagccctgggcctggataaagccatcctccatagcatagactgctgttcatctgacgacaccaaaaagaagatgtacagctccatcctagtggtgggaggtggtttgatgtttcataaagctcaagaatttctgcagcacagaattctcaacaaaatgccaccatccttcaggcgaattattgaaaatgtggatgtgatcacaaggcctaaggacatggacccccggctgattgcatggaaaggaggggcagtgttggcttgtttggatacaacacaggaactgtggatttatcagcgagagtggcagcgctttggtgtccgcatgttacgagagcgggctgcgtttgtgtggtgaatggggaggaaatgtcactgccgaagaccaaaaacaagcttcttggtataaaagactcttacagaatatgtgtattgtaatttattgatctggatgcttaagtgtcatggacagtaaatgaatttgaactttatgttgaggacatgacattggtttgaaaatataaactgcttttgagcagtttagtcagggcatttgagaataaataggaactttctcttcagttgtaaactctcttgccctctctcagggtctcataaactccccagtgatgtaaacgttgctattgaaggttctcatgtggtgaagcccttcatttaagttggcttgaatctcatcagcaggcagcctcatgcaaccatgagggatagtatgtgacgagggagaactgtccactcatgccattttctctcttgtctagtatttcattaggatctaaagttgtctgagttaaatgcacttatgtgactcatgtgtcctcttagaatcccaaatagggggaaaaagttttggtggtttttgtttttttttcattttctgttggattacagaaaaagaatgggacccattcaggtctcgatttccaaaggtaaagatggaaggctgggcagactggcttttgttacctgacatgccgtagggtgagcttagaggaagaaagaaaacaatttttatttggccaaaacagaacaaatgctgaaaaggaaatcttgtttttttcctaaagccaaatagaaatgatttgggtataatttaagagtccttgtgttgtacagatatggtgactgatgtagttattaatactaccaacttagtcatcaagcctcaattttcctttacctgaaggattaagtgaaagcttttggagttcatgatgttcagtatgatcagttaaccttaacctctgagcatcctgaagcaaaatctaaataatgcagctattaccactggtggtccaggctctggtgaagccctctgagcccaggaggaagagaaagcattgtccagaggtaggaacacagtctgggagcccagagctctgggaggagtgggaaaatgctgcttcctgctgcttgcttctaggcacctgcttccgccatctcacttaccatggctagagatgggggtgagactggggaaggacaaaagcagggaacagataagggatggaaatcagaagggaatatagaaagaactctggatgtggagaaatgccggtacctgagcattttgtatcaatgggagtaccctctgtaactgctcagtaggttacaaatgaagagtccaccagtattagaaacaatttaaacttgccagtaccaactgggatgtgtgccttcaatttgaaaattgtatgttttattttttaaatttgttaacagcattaatttatagagtattgatgtcatttatgtttctgaggtgtttcaacacaattttggatcagctgcctgtttgcaaaaacataatatatttctgttaaacagttcttcacctaacagcatattgctcttataactggtagagctgtttcaaaggaagttggtttctggtccaagttttgacctaaaccatgtccatcttctattaccagcacttacaagcactgtgaaaactgatcatgacaaataagtaaaatttgctacattaaacatattgcctcagccattactaagcgtccacttgtaaagctggacacagtttttactttatgcttcattttgattttttatccgtaagacataaattagaaggcatgaggtggccctttaaggataatctgcaaatatacacattttaatagtcatccatctgaaatcgatccacattccagagaagattcagtattgtgctgtgtgaaataagcattcccagaaaaaaaacatttatgctaataatacaacataacctctgcattaaagaaaaagatgcttttaggccaggcgccgtggctcacacctgtaatcccatctcagcctccctagtagctgggaccacaggcttacaccatcacactcag

SEQ ID NO: 369266 - DNA, 1716 bp, Homo sapiens
ttccatcccggcagtcgtggctgcagcgctgaggcgagaggttggtgggtgtctccggccataatgacccaggctgagaagggtgatacggagaacggaaaggagaagggcggcgagaaggagaaggagcagcgcggcgtgaagcggcccatcgtgcccgcgctggtgccggagtcgctgcaagagcaaatccagagcaacttcatcattgtcatacatccaggttcaacaactttaaggattggtcgagccacagacactcttcctgccagcattcctcacgtcattgcccgaagacacaaacaacaagggcagcccctatacaaggacagttggctcctaagggagggactaaataaaccagaaagtaatgaacaaagacaaaatggccttaaaatggtggatcaagcaatatggtctaaaaagatgtccaatggtacaagacgcattcctgtgtcccctgaacaggcacgctcctacaataagcagatgcgacctgcaattttagatcactgttcgggaaataagtggacaaacacatctcatcaccctgagtatttagtaggagaagaggccttgtatgttaatccactggactgttacaatattcactggcctatcagaagaggtcagttaaatattcacccaggccctgggggctctcttacagctgttctggcagatattgaagtaatatggtctcatgcgatacaaaaatacttggaaatcccactgaaagatttaaagtattatagatgtatcttgttaattcctgatatctataataagcagcatgtgaaagaactagtgaatatgatactaatgaagatgggtttttcagggattgtggtccatcaggagtctgtgtgtgccacctatggaagtggcttaagcagcacgtgtattgtagacgttggggaccagaagacaagtgtatgctgtgtggaggatggggtgtctcatcggaatactcggctttgtctggcatacggaggatctgatgtgtcaagatgtttttactggctaatgcagcgagctgggttcccttacagagaatgccagttaacaaataaaatggattgtcttcttctgcaacaccttaaagaaactttttgtcatttagatcaggacatctctgggcttcaggaccatgagtttcagattcgacatcctgattctcctgccctgctttaccagtttcgattaggagatgaaaaactgcaggctccaatggctttgttttaccccgcaacttttggaattgttggacagaaaatgacgactttgcagcacagatctcagggcgatcctgaggatcctcacgatgaacattacctgctggccacacagagcaaacaagaacagtctgcaaaagctactgctgaccgaaagtctgcatccaaacctattggatttgaaggggatcttcgtggccagtcctctgatcttccagaaagactccattcccaggaggtagatttggggtctgcacagggagatggcctgatggccggcaacgattccgaggaggccctcactgcactgatgtccaggaagactgccatctcgctgtttgaagggaaagccctgggcctggataaagccatcctccatagcatagactgctgttgtaagcacatctggggagaccgggagatagcagtgaaacaagatagcagttaaataaattggttcagtctaggatatacttgtgca

SEQ ID NO: 369267 - DNA, 810 bp, Homo sapiens
aatttatagagtattgatgtcatttatgtttctgaggtgtttcaacacaattttggatcagctgcctgtttgcaaaaacataatatatttctgttaaacagttcttcacctaacagcatattgctcttataactggtagagctgtttcaaaggaagttggtttctggtccaagttttgacctaaaccatgtccatcttctattaccagcacttacaagcactgtgaaaactgatcatgacaaataagtaaaatttgctacattaaacatattgcctcagccattactaagcgtccacttgtaaagctggacacagtttttactttatgcttcattttgattttttatccgtaagacataaattagaaggcatgaggtggccctttaaggataatctgcaaatatacacattttaatagtcatccatctgaaatcgatccacattccagagaagattcagtattgtgctgtgtgaaataagcattcccagaaaaaaaacatttatgctaataatacaacataacctctgcattaaagaaaaagatgcttttaggccaggcgccgtggctcacacctgtaatccctgcactttgagaggctgaggtgggtggatcatgaggtcaggagatcaagaccatcctggctaacagggtgaaaccccgtctctactaaaaatataaaaagttagctgggtgtggtggtgggtgcctgtagtcccagctactcaggaggctgaggcaggagaatggcgtgaacccggaaggcagaggttgtagtgagccgaggtcacgccactgcactccagcctggg

SEQ ID NO: 369268 - DNA, 3491 bp, Homo sapiens
cgctccgatctcccgcacgccccaccgtctggttgtgtgcgctcctgcccgggctctggcctcagcttccccgaccataaaacgaccacgcaaatccagagcaacttcatcattgtcatacatccaggttcaacaactttaaggattggtcgagccacagacactcttcctgccagcattcctcacgtcattgcccgaagacacaaacaacaagggcagcccctatacaaggacagttggctcctaagggagggactaaataaaccagaaagtaatgaacaaagacaaaatggccttaaaatggtggatcaagcaatatggtctaaaaagatgtccaatggtacaagacgcattcctgtgtcccctgaacaggcacgctcctacaataagcagatgcgacctgcaattttagatcactgttcgggaaataagtggacaaacacatctcatcaccctgagtatttagtaggagaagaggccttgtatgttaatccactggactgttacaatattcactggcctatcagaagaggtcagttaaatattcacccaggccctgggggctctcttacagctgttctggcagatattgaagtaatatggtctcatgcgatacaaaaatacttggaaatcccactgaaagatttaaagtattatagatgtatcttgttaattcctgatatctataataagcagcatgtgaaagaactagtgaatatgatactaatgaagatgggtttttcagggattgtggtccatcaggagtctgtgtgtgccacctatggaagtggcttaagcagcacgtgtattgtagacgttggggaccagaagacaagtgtatgctgtgtggaggatggggtgtctcatcggaatactcggctttgtctggcatacggaggatctgatgtgtcaagatgtttttactggctaatgcagcgagctgggttcccttacagagaatgccagttaacaaataaaatggattgtcttcttctgcaacaccttaaagaaactttttgtcatttagatcaggacatctctgggcttcaggaccatgagtttcagattcgacatcctgattctcctgccctgctttaccagtttcgattaggagatgaaaaactgcaggctccaatggctttgttttaccccgcaacttttggaattgttggacagaaaatgacgactttgcagcacagatctcagggcgatcctgaggatcctcacgatgaacattacctgctggccacacagagcaaacaagaacagtctgcaaaagctactgctgaccgaaagtctgcatccaaacctattggatttgaaggggatcttcgtggccagtcctctgatcttccagaaagactccattcccaggaggtagatttggggtctgcacagggagatggcctgatggccggcaacgattccgaggaggccctcactgcactgatgtccaggaagactgccatctcgctgtttgaagggaaagccctgggcctggataaagccatcctccatagcatagactgctgttcatctgacgacaccaaaaagaagatgtacagctccatcctagtggtgggaggtggtttgatgtttcataaagctcaagaatttctgcagcacagaattctcaacaaaatgccaccatccttcaggcgaattattgaaaatgtggatgtgatcacaaggcctaaggacatggacccccggctgattgcatggaaaggaggggcagtgttggcttgtttggatacaacacaggaactgtggatttatcagcgagagtggcagcgctttggtgtccgcatgttacgagagcgggctgcgtttgtgtggtgaatggggaggaaatgtcactgccgaagaccaaaaacaagcttcttggtataaaagactcttacagaatatgtgtattgtaatttattgatctggatgcttaagtgtcatggacagtaaatgaatttgaactttatgttgaggacatgacattggtttgaaaatataaactgcttttgagcagtttagtcagggcatttgagaataaataggaactttctcttcagttgtaaactctcttgccctctctcagggtctcataaactccccagtgatgtaaacgttgctattgaaggttctcatgtggtgaagcccttcatttaagttggcttgaatctcatcagcaggcagcctcatgcaaccatgagggatagtatgtgacgagggagaactgtccactcatgccattttctctcttgtctagtatttcattaggatctaaagttgtctgagttaaatgcacttatgtgactcatgtgtcctcttagaatcccaaatagggggaaaaagttttggtggtttttgtttttttttcattttctgttggattacagaaaaagaatgggacccattcaggtctcgatttccaaaggtaaagatggaaggctgggcagactggcttttgttacctgacatgccgtagggtgagcttagaggaagaaagaaaacaatttttatttggccaaaacagaacaaatgctgaaaaggaaatcttgtttttttcctaaagccaaatagaaatgatttgggtataatttaagagtccttgtgttgtacagatatggtgactgatgtagttattaatactaccaacttagtcatcaagcctcaattttcctttacctgaaggattaagtgaaagcttttggagttcatgatgttcagtatgatcagttaaccttaacctctgagcatcctgaagcaaaatctaaataatgcagctattaccactggtggtccaggctctggtgaagccctctgagcccaggaggaagagaaagcattgtccagaggtaggaacacagtctgggagcccagagctctgggaggagtgggaaaatgctgcttcctgctgcttgcttctaggcacctgcttccgccatctcacttaccatggctagagatgggggtgagactggggaaggacaaaagcagggaacagataagggatggaaatcagaagggaatatagaaagaactctggatgtggagaaatgccggtacctgagcattttgtatcaatgggagtaccctctgtaactgctcagtaggttacaaatgaagagtccaccagtattagaaacaatttaaacttgccagtaccaactgggatgtgtgccttcaatttgaaaattgtatgttttattttttaaatttgttaacagcattaatttatagagtattgatgtcatttatgtttctgaggtgtttcaacacaattttggatcagctgcctgtttgcaaaaacataatatatttctgttaaacagttcttcacctaacagcatattgctcttataactggtagagctgtttcaaaggaagttggtttctggtccaagttttgacctaaaccatgtccatcttctattaccagcacttacaagcactgtgaaaactgatcatgacaaataagtaaaatttgctacatt

SEQ ID NO: 369269 - DNA, 3985 bp, Homo sapiens
ttccatcccggcagtcgtggctgcagcgctgaggcgagaggttggtgggtgtctccggccataatgacccaggctgagaagggtgatacggagaacggaaaggagaagggcggcgagaaggagaaggagcagcgcggcgtgaagcggcccatcgtgcccgcgctggtgccggagtcgctgcaagagcaaatccagagcaacttcatcattgtcatacatccaggttcaacaactttaaggattggtcgagccacagacactcttcctgccagcattcctcacgtcattgcccgaagacacaaacaacaagggcagcccctatacaaggacagttggctcctaagggagggactaaataaaccagaaagtaatgaacaaagacaaaatggccttaaaatggtggatcaagcaatatggtctaaaaagatgtccaatggtacaagacgcattcctgtgtcccctgaacaggcacgctcctacaataagcagatgcgacctgcaattttagatcactgttcgggaaataagtggacaaacacatctcatcaccctgagtatttagtaggagaagaggccttgtatgttaatccactggactgttacaatattcactggcctatcagaagaggtcagttaaatattcacccaggccctgggggctctcttacagctgttctggcagatattgaagtaatatggtctcatgcgatacaaaaatacttggaaatcccactgaaagatttaaagtattatagatgtatcttgttaattcctgatatctataataagcagcatgtgaaagaactagtgaatatgatactaatgaagatgggtttttcagggattgtggtccatcaggagtctgtgtgtgccacctatggaagtggcttaagcagcacgtgtattgtagacgttggggaccagaagacaagtgtatgctgtgtggaggatggggtgtctcatcggaatactcggctttgtctggcatacggaggatctgatgtgtcaagatgtttttactggctaatgcagcgagctgggttcccttacagagaatgccagttaacaaataaaatggattgtcttcttctgcaacaccttaaagaaactttttgtcatttagatcaggacatctctgggcttcaggaccatgagtttcagattcgacatcctgattctcctgccctgctttaccagtttcgattaggagatgaaaaactgcaggctccaatggctttgttttaccccgcaacttttggaattgttggacagaaaatgacgactttgcagcacagatctcagggcgatcctgaggatcctcacgatgaacattacctgctggccacacagagcaaacaagaacagtctgcaaaagctactgctgaccgaaagtctgcatccaaacctattggatttgaaggggatcttcgtggccagtcctctgatcttccagaaagactccattcccaggaggtagatttggggtctgcacagggagatggcctgatggccggcaacgattccgaggaggccctcactgcactgatgtccaggaagactgccatctcgctgtttgaagggaaagccctgggcctggataaagccatcctccatagcatagactgctgttcatctgacgacaccaaaaagaagatgtacagctccatcctagtggtgggaggtggtttgatgtttcataaagctcaagaatttctgcagcacagaattctcaacaaaatgccaccatccttcaggcgaattattgaaaatgtggatgtgatcacaaggcctaaggctgaaatgccttcatcccttctgtaggacatggacccccggctgattgcatggaaaggaggggcagtgttggcttgtttggatacaacacaggaactgtggatttatcagcgagagtggcagcgctttggtgtccgcatgttacgagagcgggctgcgtttgtgtggtgaatggggaggaaatgtcactgccgaagaccaaaaacaagcttcttggtataaaagactcttacagaatatgtgtattgtaatttattgatctggatgcttaagtgtcatggacagtaaatgaatttgaactttatgttgaggacatgacattggtttgaaaatataaactgcttttgagcagtttagtcagggcatttgagaataaataggaactttctcttcagttgtaaactctcttgccctctctcagggtctcataaactccccagtgatgtaaacgttgctattgaaggttctcatgtggtgaagcccttcatttaagttggcttgaatctcatcagcaggcagcctcatgcaaccatgagggatagtatgtgacgagggagaactgtccactcatgccattttctctcttgtctagtatttcattaggatctaaagttgtctgagttaaatgcacttatgtgactcatgtgtcctcttagaatcccaaatagggggaaaaagttttggtggtttttgtttttttttcattttctgttggattacagaaaaagaatgggacccattcaggtctcgatttccaaaggtaaagatggaaggctgggcagactggcttttgttacctgacatgccgtagggtgagcttagaggaagaaagaaaacaatttttatttggccaaaacagaacaaatgctgaaaaggaaatcttgtttttttcctaaagccaaatagaaatgatttgggtataatttaagagtccttgtgttgtacagatatggtgactgatgtagttattaatactaccaacttagtcatcaagcctcaattttcctttacctgaaggattaagtgaaagcttttggagttcatgatgttcagtatgatcagttaaccttaacctctgagcatcctgaagcaaaatctaaataatgcagctattaccactggtggtccaggctctggtgaagccctctgagcccaggaggaagagaaagcattgtccagaggtaggaacacagtctgggagcccagagctctgggaggagtgggaaaatgctgcttcctgctgcttgcttctaggcacctgcttccgccatctcacttaccatggctagagatgggggtgagactggggaaggacaaaagcagggaacagataagggatggaaatcagaagggaatatagaaagaactctggatgtggagaaatgccggtacctgagcattttgtatcaatgggagtaccctctgtaactgctcagtaggttacaaatgaagagtccaccagtattagaaacaatttaaacttgccagtaccaactgggatgtgtgccttcaatttgaaaattgtatgttttattttttaaatttgttaacagcattaatttatagagtattgatgtcatttatgtttctgaggtgtttcaacacaattttggatcagctgcctgtttgcaaaaacataatatatttctgttaaacagttcttcacctaacagcatattgctcttataactggtagagctgtttcaaaggaagttggtttctggtccaagttttgacctaaaccatgtccatcttctattaccagcacttacaagcactgtgaaaactgatcatgacaaataagtaaaatttgctacattaaacatattgcctcagccattactaagcgtccacttgtaaagctggacacagtttttactttatgcttcattttgattttttatccgtaagacataaattagaaggcatgaggtggccctttaaggataatctgcaaatatacacattttaatagtcatccatctgaaatcgatccacattccagagaagattcagtattgtgctgtgtgaaataagcattcccagaaaaaaaacatttatgctaataatacaacataacctctgcattaaagaaaaagatgcttttaggccaggcgccgtggctcacacctgtaatcccatctcagcctccctagtagctgggaccacaggcttacaccatcacactcag

SEQ ID NO: 369270 - DNA, 1990 bp, Homo sapiens
aaatggtaacccagtagcccaaaagacaaagtccttctcaacaaagcctaaccaacaggcaatggattatagtgattcagaggaaagataagaaggttcctttgtcttggacctccactagacatcaaggaaacatgccaaaaaagtaaacaacaaaggcccccacacctttccaaactacaacccaaaataagttgatctgagaaacaaattgcaatgccgcatgcaaagcagatgtgtccaaattcatgtaggaccagacacatcctgaacctttcagtgcaacagctgttcaagactttcttcaaaatcatccaagcacaagggttgataaaatacacacaaaatggctgatgctcaaaccaaccaaaacaccaggctctttgctgaaacctctgagaagggttcctggctccaggtcagcctcaatggaataaaggaagatcacctaccacttcaaactgaagagctgaaggagttgtatcaagatacagagtgcagcaagtataggaaacattagagaaactgacctgtctggagatggcaagctgcagagccagcatctaaaatggcagctgaagcttgtcggctttgcggagggcctcgaggtgaagaatccataggccctgaggtctgatctccccagcagatgggtctctgtgtcgtgctgggacgcagtgaagccatgtgtgcacttggcaaggcgatggctgctttgacagggtcttactctatcacccaggctggagtgcagtggcatgatcactgctcattgcagcctcaacctcccagggcccaagcgatcctcccatcttagcctcccaaggtgctgggaccacaggcgtgctccccacgcccagctaatttatagaattttttgtagacccggggtttcaacatgctatccaggctagtctggaactactaggctcaagtgatcctcccactttggcatcccaaaaccctgggattacaggcataagccaccacgcccagctactaaatggcttatttctaaggtccactcagtatatagcagcttttataattttacaaatattggctttccatgaatttgtacatcaaagaatatttttctttggtgtttataaaagtgagattgaaaaatcatggtttctctcataattattcaggaaaaataatacacaattatgaagaaatttttagatttattttatcttctttcacaaataataaatttacagaaccctcaaaaagaacttcttagagttataattttctcagttcaattcatattcttcacaaataaatcaagtcatggttgcctctatgcaataccaaccaactgaaaagctggcaatgatctgttgagttgagggtgtacataaagatagttctggctaaaggccccatgctggcctcatcaaatgatttttctctgttaaccacagcaccgtgaaaggaacaaaccagaagtgctagaaatcttggtatttctggagtgcattagggcaacatctgaaggatttccaacttggctaatgatgcatattcaactgccaaatttctaatgaggcacaactgaaacatatacattttaaaaaccttatttctacaacttggctaatgaattcaactgaccacttcaccctctgaaggaaataaggcaaatgccaaacaaaacaagaaaaagctccctgtgttgatctcaagtagatgctaaaatacttgcttcccgtggagcaacttcagcagctaagcttcctgtgggaaagcccctttggtatgccacaggcaactcgccggacagaaatcctcaggccaggcagatgagagagaggacattagtgatcagaaaaattgcaagccttctgaactctgtaaatgaatctaaagcagcctcataaactccgtgcccataaactgaacacctggctagactgctcagaaatacctaaaagacctaaaaatgtcaccacaaggatgctcacaaaatgcttcccttatc

SEQ ID NO: 369271 - DNA, 641 bp, Homo sapiens
aaatggtaacccagtagcccaaaagacaaagtccttctcaacaaagcctaaccaacaggcaatggattatagtgattcagaggaaagataagaaggttcctttgtcttggacctccactagacatcaaggaaacatgccaaaaaagtaaacaacaaaggcccccacacctttccaaactacaacccaaaataagttgatctgagaaacaaattgcaatgccgcatgcaaagcagatgtgtccaaattcatgtaggaccagacacatcctgaacctttcagtgcaacagctgttcaagactttcttcaaaatcatccaagcacaagggttgataaaatacacacaaaatgggtatgtgacaccctggattccatgcaggtttggcagtaaccagggagaattagaacccgaagctagatttcgaaatagagctctggactgaagcattcttgcacaaccatcccacagatggcttccggtctcgctccaactccagtcctctgtggggcctcttctcagctctcctgctttttcccaaaccctcagtaacctccctccttagtagaaggctatgacttctctttcccaaaccaattacttttcctcaatgaacttcttttcttgatggatttaggttataac

SEQ ID NO: 369272 - DNA, 429 bp, Homo sapiens
tttttctttttctttttcagacagggtcttactctatcacccaggctggagtgcagtggcatgatcactgctcattgcagcctcaacctcccagggcccaagcgatcctcccatcttagcctcccaaggtgctgggaccacaggcgtgctccccacgcccagctaatttatagaattttttgtagacccggggtttcaacatgctatccaggctagtctggaactactaggctcaagtgatcctcccactttggcatcccaaaaccctgggattacaggcataagccaccacgcccagctactaaatggcttatttctaaggtccactcagtatatagcagcttttataattttacaaatattggctttccatgaatttgtacatcaaagaatatttttctttggtgtttataaaagtgagattgaaaa

SEQ ID NO: 369273 - DNA, 1102 bp, Homo sapiens
acgacgcgccggaaagcaacggcaagggccgcagccagcaccgggcggagagggctaccatggggaaaatcgcgctgcaactcaaagccacgctggagaacatcaccaacctccggcccgtgggcgaggacttccggtggtacctgaagatgaaatgtggcaactgtggtgagatttcggacaagtggcagtacatccggctgatggacagtgtggcactgaaggggggccgtggcagtgcttccatggtccagaagtgcaagctgtgtgcaagagaaaattccatcgagattttaagcagcaccatcaagccttacaatgctgaagacaatgagaacttcaagacaatagtggagtttgagtgccggggccttgaaccagttgatttccagccgcaggctgggtttgctgctgaaggtgtggagtcagggacagccttcagtgacattaatctgcaggagaaggactggactgactatgatgaaaaggcccaggagtctgtgggaatctatgaggtcacccaccagtttgtgaagtgctgatccctcttccttcccagttgcccttaagaactgagaaaggacaaagtactctaagcagcagagcccacagaggctcgttcctttgacccttgtctcctggtggctatacgaaaccttcacaatctgcatgctggactttattacagcttcccaagccccatcaataaagcccctgttcacgctgcactggtgcatgaaggtgaagtaaggaggcagctactccctccacaaataagaattcgtgcagcagcagttcactccttaggaaaatgaagagtatttttaaggagatggtatctccccagtcaagggcaagtttacagagatgaaaccgcgatcccaccatcactcaatgagccagaagccaatggtgacgtactgttacctgaacttactgaacttgctgttggaaagatctttgtgaggattaggaattaggttaaaagaaattaagaaccatcttcaagcaaaaattaaactttatttctgcttaaacaataaatacacctgagttagttttccaaacctttcctcctgattaaatgcccttaaaacttaaa

SEQ ID NO: 369274 - DNA, 731 bp, Homo sapiens
acgacgcgccggaaagcaacggcaagggccgcagccagcaccgggcggagagggctaccatgggggtgaggggaggccgcccgccgcggggacacggaggggaggtggcgagggtctgggaggcaacagctcgcgccaggaggagatgaagcgagtgggtgcgcgctgaaggagcaggaggcagaaggagtgtctccctgtggcacccacggctgggaatgcgggagggtcgggcaggcgtggggctgcgcaggcacggctgacgcagtcgctctggccctccccctcagaaaatcgcgctgcaactcaaagccacgctggagaacatcaccaacctccggcccgtgggcgaggacttccggtggtacctgaagatgaaatgtggcaactgtggtgagatttcggacaagtggcagtacatccggctgatggacagtgtggcactgaaggggggccgtggcagtgcttccatggtccagaagtgcaagctgtgtgcaagagaaaattccatcgagattttaagcagcaccatcaagccttacaatgctgaagacaatgagaacttcaagacaatagtggagtttgagtgccggggccttgaaccagttgatttccagccgcaggctgggtttgctgctgaaggtgtggagtcagggacagccttcagtgacattaatctgcaggagaagcacgcaaggggaccttggggaaccttggaaacctttaatttg

SEQ ID NO: 369275 - DNA, 1895 bp, Homo sapiens
acgacgcgccggaaagcaacggcaagggccgcagccagcaccgggcggagagggctaccatggggaaaatcgcgctgcaactcaaagccacgctggagaacatcaccaacctccggcccgtgggcgaggacttccggtggtacctgaagatgaaatgtggcaactgtggtgagatttcggacaagtggcagtacatccggctgatggacagtgtggcactgaaggggggccgtggcagtgcttccatggtccagaagtgcaagctgtgtgcaagagaaaattccatcgagattttaagcagcaccatcaagccttacaatgctgaagacaatgagaacttcaagacaatagtggagtttgagtgccggggccttgaaccagttgatttccagccgcaggctgggtttgctgctgaaggtgtggagtcagggacagccttcagtgacattaatctgcaggagaaggactggactgactatgatgaaaaggcccaggagtctgtgggaatctatgaggtcacccaccagtttgtgaagtgctgatccctcttccttcccagttgcccttaagaactgagaaaggacaaagtactctaagcagcagagcccacagaggctcgttcctttgacccttgtctcctggtggctatacgaaaccttcacaatctgcatgctggactttattacagcttcccaagccccatcaataaagcccctgttcacgctgcactggtgcatgaaggtgaagtaaggaggcagctactccctccacaaataagaattcgtgcagcagcagttcactccttaggaaaatgaagagtatttttaaggagatggtatctccccagtcaagggcaagtttacagagatgaaaccgcgatcccaccatcactcaatgagccagaagccaatggtgacgtactgttacctgaacttactgaacttgctgttggaaagatctttgtgaggattaggaattaggttaaaagaaattaagaaccatcttcaagcaaaaattaaactttatttctgcttaaacaataaatacacctgagttagttttccaaacctttcctcctgattaaatgcccttaaaacttaaatctcttgttatcttcagttgtgatctagtcccaagtggaaattacgtttagctttaaaaccatgaatttaaagctcaagcctgtagctggctgcctaggcagcttatgattagtttcacagaatagcacccactggctacacaggccccagtttttttttcttttttgtttttttgagacagtctcgctctgtcgcccaggccggagtgcagtggtgtgatctcagctcactgcaacctccactcctggggttcaagcaattctgcttctgtatttttagtagagacaaggtttcaccatgttggccaggttggtctcaaactcctgacctcaagtgatccacccgcctcagcctctcaaaatgctgggattacaggcatgagccaccatgcccggcctcccagttttcatgatgaggaagtgatggtagcttttcatctgcccagaagttaacttttgatggatttgccttctaaggcatcaaacatgtcttctaaggccttctccacacattggagaaactcccgggcattgcggcctgggtaggaagagacattgcagcctatccagttgtcatgaacagcatacccaacaccaaagccatcagagaccacaggggcaaagcccccaaggttcactgctgggctgctcagtgtgctcgtggacaggacattgtggtttatctgcccgtatgcagggtccaggtatgccaggggaaactcgggggcggggctgctgtctgagagaatgtacttcagatgtgcctggatttccgaggggctcacaatgttcc

SEQ ID NO: 369276 - DNA, 1743 bp, Homo sapiens
acgacgcgccggaaagcaacggcaagggccgcagccagcaccgggcggagagggctaccatggggaaaatcgcgctgcaactcaaagccacgctggagaacatcaccaacctccggcccgtgggcgaggacttccggtggtacctgaagatgaaatgtggcaactgtggtgagatttcggacaagtggcagtacatccggctgatggacagtgtggcactgaaggggggccgtggcagtgcttccatggtccagaagtgcaagctgtgtgcaagagaaaattccatcgagattttaagcagcaccatcaagccttacaatgctgaagacaatgagaacttcaagacaatagtggagtttgagtgccggggccttgaaccagttgatttccagccgcaggctgggtttgctgctgaaggtgtggagtcagggacagccttcagtgacattaatctgcaggagaaggactggactgactatgatgaaaaggcccaggagtctgtgggaatctatgaggtcacccaccagtttgtgaagtgctgatccctcttccttcccagttgcccttaagaactgagaaaggacaaagtactctaagcagcagagcccacagaggctcgttcctttgacccttgtctcctggtggctatacgaaaccttcacaatctgcatgctggactttattacagcttcccaagccccatcaataaagcccctgttcacgctgcactggtgcatgaaggtgaagtaaggaggcagctactccctccacaaataagaattcgtgcagcagcagttcactccttaggaaaatgaagagtatttttaaggagatggtatctccccagtcaagggcaagtttacagagatgaaaccgcgatcccaccatcactcaatgagccagaagccaatggtgacgtactgttacctgaacttactgaacttgctgttggaaagatctttgtgaggattaggaattaggttaaaagaaattaagaaccatcttcaagcaaaaattaaactttatttctgcttaaacaataaatacacctgagttagttttccaaacctttcctcctgattaaatgcccttaaaacttaaatctcttgttatcttcagttgtgatctagtcccaagtggaaattacgtttagctttaaaaccatgaatttaaagctcaagcctgtagctggctgcctaggcagcttatgattagtttcacagaatagcacccactggctacacaggccccagtttttttttcttttttgtttttttgagacagtctcgctctgtcgcccaggccggagtgcagtggtgtgatctcagctcactgcaacctccactcctggggttcaagcaattctgcttcaacctcccaagtagctgggattataggcacatgccaccacacccagctaatttttgtatttttagtagagacaaggtttcaccatgttggccaggttggtctcaaactcctgacctcaagtgatccacccgcctcagcctctcaaaatgctgggattacaggcatgagccaccatgcccggcctcccagttttcatgatgaggaagtgatggtagcttttcatctgcccagaagttaacttttgatggatttgccttctaaggcatcaaacatgtcttctaaggccttctccaatgtgtggagaaggccttagaagacatgtttgatgcctcagaagtacacttttgatggatttgccttctaaggtcgagc

SEQ ID NO: 369277 - DNA, 2437 bp, Homo sapiens
acgacgcgccggaaagcaacggcaagggccgcagccagcaccgggcggagagggctaccatggggaaaatcgcgctgcaactcaaagccacgctggagaacatcaccaacctccggcccgtgggcgaggacttccggtggtacctgaaggtgcggccggggcggggcccggggagaggaggcccgtcctgatctcagtgctgaaccggagccttctctccggcagtatgagaaaatatttaaccaggcacattaagtgttcggggttttcctagttagaattttacgtttgctttctattaaagtgtattggtttatctctaattggcagtcttggaaagcttcattttgtagttcttccctgtgttaaatatttcgtggtctgtaaatggacactaaacgaaatgctacttgaagggacgcttgtgattatttaataaggtgaatagttcgcctttcgtttattgatttggttttctttattgtgaaatagtttaattttgtgcgtaatccacccttccttagccctcccacactggtaaagctggtaccctagtggcatggtctacagaggcctccccttccccagcagttcgaggctcttcactcttccagatcccagagcttctgctctgttttactcctggtcaaaaatcccagcatccttctgtacctctcaaaagccctgttttcgggaagctgcctccggactacttttgtttcccaggattttgaagcctgaataccagggcttacttgggagaatctgttctttggcttgaagaagcggaatcgagtgaaggagacagaaaaatagagtaacaatagagtgataagtgcttataccagtgacatacagggcctgtgggaacataaagctaaccaagcagagtgggtcgggggcctgctgaggccatttctctttttttttcttaattgacacagaattgtacatatttatggggtatatagtgatgttccgataaatgtaatgtattgtgatcagatcaaggtagttagcatattcacctcaaacgtgtatcatttctttgtgttgggagcatttaatatcctagctatttgaaactatatattattgtcagctatagtcatcctacagtgctatagaacactagaacttattcctcccatatagctgtaattttgtatcttctaacaaatctctccatattcccccccctcacctccgctgaaaccatttctgcaccacaggtgccttgaatccccggccacactgagcacttcatagaggagggtgggcacgccggcataggaaacagccttacctatcctttgcccagagatagttctagttttgtccttgttggggcaggtgttagggatgaagtgagattgccatcaagaaggtagatcatgagcctgcccacctcccactgttcttaccctttccttggtgtctgtgcagcagagccagctgctttactaacattcttttccccaaagatgaaatgtggcaactgtggtgagatttcggacaagtggcagtacatccggctgatggacagtgtggcactgaaggggggccgtggcagtgcttccatggtccagaagtgcaagctgtgtgcaagagaaaattccatcgagattttaagcagcaccatcaagccttacaatgctgaagacaatgagaacttcaagacaatagtggagtttgagtgccggggccttgaaccagttgatttccagccgcaggctgggtttgctgctgaaggtgtggagtcagggacagccttcagtgacattaatctgcaggagaaggactggactgactatgatgaaaaggcccaggagtctgtgggaatctatgaggtcacccaccagtttgtgaagtgctgatccctcttccttcccagttgcccttaagaactgagaaaggacaaagtactctaagcagcagagcccacagaggctcgttcctttgacccttgtctcctggtggctatacgaaaccttcacaatctgcatgctggactttattacagcttcccaagccccatcaataaagcccctgttcacgctgcactggtgcatgaaggtgaagtaaggaggcagctactccctccacaaataagaattcgtgcagcagcagttcactccttaggaaaatgaagagtatttttaaggagatggtatctccccagtcaagggcaagtttacagagatgaaaccgcgatcccaccatcactcaatgagccagaagccaatggtgacgtactgttacctgaacttactgaacttgctgttggaaagatctttgtgaggattaggaattaggttaaaagaaattaagaaccatcttcaagcaaaaattaaactttatttctgcttaaacaataaatacacctgagttagttttccaaacctttcctcctgattaaatgcccttaaaacttaaa

SEQ ID NO: 369278 - DNA, 1042 bp, Homo sapiens
acgacgcgccggaaagcaacggcaagggccgcagccagcaccgggcggagagggctaccatggggaaaatcgcgctgcaactcaaagccacgctggagaacatcaccaacctccggcccgtgggcgaggacttccggtggtacctgaagatgaaatgtggcaactgtggtgagatttcggacaagtggcagtacatccggctgatggacagtgtggcactgaaggggggccgtggcagtgcttccatggtccagaagtgcaagctgtgtgcaagagaaaattccatcgagattttaagcagcaccatcaagccttacaatgctgaagacaatgagaacttcaagacaatagtggagtttgagtgccggggccttgaaccagttgatttccagccgcaggctgggtttgctgctgaaggtgtggagtcagggacagccttcagtgacattaatctgcaggagaaggactggactgactatgatgaaaaggcccaggagtctgtgggaatctatgaggtcacccaccagtttgtgaagtgctgatccctcttccttcccagttgcccttaagaactgagaaaggacaaagtactctaagcagcagagcccacagaggctcgttcctttgacccttgtctcctggtggctatacgaaaccttcacaatctgcatgctggactttattacagcttcccaagccccatcaataaagcccctgttcacgctgcactggtgcatgaaggtgaagtaaggaggcagctactccctccacaaataagaattcgtgcagcagcagttcactccttaggaaaatgaagagtatttttaaggagatggtatctccccagtcaagggcaagtttacagagatgaaaccgcgatcccaccatcactcaatgagccagaagccaatggtgacgtactgttacctgaacttactgaacttgctgttggaaagatctttgtgaggattaggaattaggttaaaagaaattaagaaccatcttcaagcaaaaattaaactttatttctgcttaaacaata

SEQ ID NO: 369279 - DNA, 961 bp, Homo sapiens
acgacgcgccggaaagcaacggcaagggccgcagccagcaccgggcggagagggctaccatgggggacagtgtggcactgaaggggggccgtggcagtgcttccatggtccagaagtgcaagctgtgtgcaagagaaaattccatcgagattttaagcagcaccatcaagccttacaatgctgaagacaatgagaacttcaagacaatagtggagtttgagtgccggggccttgaaccagttgatttccagccgcaggctgggtttgctgctgaaggtgtggagtcagggacagccttcagtgacattaatctgcaggagaaggactggactgactatgatgaaaaggcccaggagtctgtgggaatctatgaggtcacccaccagtttgtgaagtgctgatccctcttccttcccagttgcccttaagaactgagaaaggacaaagtactctaagcagcagagcccacagaggctcgttcctttgacccttgtctcctggtggctatacgaaaccttcacaatctgcatgctggactttattacagcttcccaagccccatcaataaagcccctgttcacgctgcactggtgcatgaaggtgaagtaaggaggcagctactccctccacaaataagaattcgtgcagcagcagttcactccttaggaaaatgaagagtatttttaaggagatggtatctccccagtcaagggcaagtttacagagatgaaaccgcgatcccaccatcactcaatgagccagaagccaatggtgacgtactgttacctgaacttactgaacttgctgttggaaagatctttgtgaggattaggaattaggttaaaagaaattaagaaccatcttcaagcaaaaattaaactttatttctgcttaaacaataaatacacctgagttagttttccaaacctttcctcctgattaaatgcccttaaaacttaaa

SEQ ID NO: 369280 - DNA, 728 bp, Homo sapiens
acgacgcgccggaaagcaacggcaagggccgcagccagcaccgggcggagagggctaccatggggaaaatcgcgctgcaactcaaagccacgctggagaacatcaccaacctccggcccgtgggcgaggacttccggtggtacctgaagatgaaatgtggcaactgtggtgagatttcggacaagtggcagtacatccggctgatggacagtgtggcactgaaggggggccgtggcagtgcttccatggtccagaagtgcaagctgtgtgcaagagaaaattccatcgagattttaagcagcaccatcaagccttacaatgctgaagacaatgagaacttcaagacaatagtggagtttgagtgccggggccttgaaccagttgatttccagccgcaggctgggtttgctgctgaaggtgtggagtcagggacagccttcagtgacattaatctgcaggagaaggactggactgactatgatgaaaaggcccaggagtctgtgggaatctatgaggtcacccaccagtttgtgaagtgctgatccctcttccttcccagttgcccttaagaactgagaaaggacaaagtactctaagcagcagagcccacagaggctcgttcctttgacccttgtctcctggtggctatacgaaaccttcacaatctgcatgctggactttattacagcttcccaagccccatcaataaagcccctgttcacgctgca

SEQ ID NO: 369281 - DNA, 893 bp, Homo sapiens
acgacgcgccggaaagcaacggcaagggccgcagccagcaccgggcggagagggctaccatggggaaaatcgcgctgcaactcaaagccacgctggagaacatcaccaacctccggcccgtgggcgaggacttccggtggtacctgaagatgaaatgtggcaactgtggtgagatttcggacaagtggcagtacatccggctgatggacagtgtggcactgaaggggggccgtggcagtgcttccatggtccagaagtgcaagctgtgtgcaagagaaaattccatcgagattttaagcagcaccatcaagccttacaatgctgaagacaatgagaacttcaagacaatagtggagtttgagtgccggggccttgaaccagttgatttccagccgcaggctgggtttgctgctgaaggtgtggagtcagggacagccttcagtgacattaatctgcaggagaaggactggactgactatgatgaaaaggcccaggagtctgtgggaatctatgaggtcacccaccagtttgtgaagtgctgatccctcttccttcccagttgcccttaagaactgagaaaggacaaagtactctaagcagcagagcccacagaggctcgttcctttgacccttgtctcctggtggctatacgaaaccttcacaatctgcatgctggactttattacagcttcccaagccccatcaataaagcccctgttcacgctgcaaaaaaaaaaaaaaagtaaaaaggacaaaaagaggggggggcgcaaaggaacccggggggcaggtaggagcagtttggaaggggcccagggggggaaaaaaggagggggaaaaagggaggggaaagctgggcggggaacccccgtgggagggagaacccaagaggg

SEQ ID NO: 369282 - DNA, 2446 bp, Homo sapiens
acgacgcgccggaaagcaacggcaagggccgcagccagcaccgggcggagagggctaccatggggaaaatcgcgctgcaactcaaagccacgctggagaacatcaccaacctccggcccgtgggcgaggacttccggtggtacctgaagatgaaatgtggcaactgtggtgagatttcggacaagtggcagtacatccggctgatggacagtgtggcactgaaggggggccgtggcagtgcttccatggtccagaagtgcaagctgtgtgcaagagaaaattccatcgagattttaagcagcaccatcaagccttacaatgctgaagacaatgagaacttcaagacaatagtggagtttgagtgccggggccttgaaccagttgatttccagccgcaggctgggtttgctgctgaaggtgtggagtcagggacagccttcagtgacattaatctgcaggagaaggactggactgactatgatgaaaaggcccaggagtctgtgggaatctatgaggtcacccaccagtttgtgaagtgctgatccctcttccttcccagttgcccttaagaactgagaaaggacaaagtactctaagcagcagagcccacagaggctcgttcctttgacccttgtctcctggtggctatacgaaaccttcacaatctgcatgctggactttattacagcttcccaagccccatcaataaagcccctgttcacgctgcactggtgcatgaaggtgaagtaaggaggcagctactccctccacaaataagaattcgtgcagcagcagttcactccttaggaaaatgaagagtatttttaaggagatggtatctccccagtcaagggcaagtttacagagatgaaaccgcgatcccaccatcactcaatgagccagaagccaatggtgacgtactgttacctgaacttactgaacttgctgttggaaagatctttgtgaggattaggaattaggttaaaagaaattaagaaccatcttcaagcaaaaattaaactttatttctgcttaaacaataaatacacctgagttagttttccaaacctttcctcctgattaaatgcccttaaaacttaaatctcttgttatcttcagttgtgatctagtcccaagtggaaattacgtttagctttaaaaccatgaatttaaagctcaagcctgtagctggctgcctaggcagcttatgattagtttcacagaatagcacccactggctacacaggccccagtttttttttcttttttgtttttttgagacagtctcgctctgtcgcccaggccggagtgcagtggtgtgatctcagctcactgcaacctccactcctggggttcaagcaattctgcttcaacctcccaagtagctgggattataggcacatgccaccacacccagctaatttttgtatttttagtagagacaaggtttcaccatgttggccaggttggtctcaaactcctgacctcaagtgatccacccgcctcagcctctcaaaatgctgggattacaggcatgagccaccatgcccggcctcccagttttcatgatgaggaagtgatggtagcttttcatctgcccagaagttaacttttgatggatttgccttctaaggcatcaaacatgtcttctaaggccttctccacacattggagaaactcccgggcattgcggcctgggtaggaagagacattgcagcctatccagttgtcatgaacagcatacccaacaccaaagccatcagagaccacaggggcaaagcccccaaggttcactgctgggctgctcagtgtgctcgtggacaggacattgtggtttatctgcccgtatgcagggtccaggtagagctcaggcaagatgatccctttggctgctgccagatgccgcagagcaaacaagtgtcggtcaaagccctggcctgtgagaaacaaaatggaaaaccagagtctcaggatggaaaaggacctcaggaaaacctcccaactcaccacatggtaggaatacccctcacagcatccttgagagtgggggaaggctctacctctatgcacaccaccaactgactaaccttcagagcagctcaagctagattattttaaattatttaggaaatatattatgtcatgttacatttaaaaatagctgtcaacagctgagctaaaaatgagcctaaaaggaaagcataattttaaagatgtgaaatcagtttagtcaaagagtcaagacagtacaggaagacagctatggactcaaaaactacaataaaactaaaagtctgattcaagtgtaaaagagaagattgagtcagtggaacaaaatggaaagtctgtttgaccagggttcgaatctcagtcttactactaacttgctgtgtaacggggccagtggcttggttttctccctataaaatggaggaagagaagatta

SEQ ID NO: 369283 - DNA, 2808 bp, Homo sapiens
acgacgcgccggaaagcaacggcaagggccgcagccagcaccgggcggagagggctaccatggggaaaatcgcgctgcaactcaaagccacgctggagaacatcaccaacctccggcccgtgggcgaggacttccggtggtacctgaaggtgcggccggggcggggcccggggagaggaggcccgtcctgatctcagtgctgaaccggagccttctctccggcagtatgagaaaatatttaaccaggcacattaagtgttcggggttttcctagttagaattttacgtttgctttctattaaagtgtattggtttatctctaattggcagtcttggaaagcttcattttgtagttcttccctgtgttaaatatttcgtggtctgtaaatggacactaaacgaaatgctacttgaagggacgcttgtgattatttaataaggtgaatagttcgcctttcgtttattgatttggttttctttattgtgaaatagtttaattttgtgcgtaatccacccttccttagccctcccacactggtaaagctggtaccctagtggcatggtctacagaggcctccccttccccagcagttcgaggctcttcactcttccagatcccagagcttctgctctgttttactcctggtcaaaaatcccagcatccttctgtacctctcaaaagccctgttttcgggaagctgcctccggactacttttgtttcccaggattttgaagcctgaataccagggcttacttgggagaatctgttctttggcttgaagaagcggaatcgagtgaaggagacagaaaaatagagtaacaatagagtgataagtgcttataccagtgacatacagggcctgtgggaacataaagctaaccaagcagagtgggtcgggggcctgctgaggccatttctctttttttttcttaattgacacagaattgtacatatttatggggtatatagtgatgttccgataaatgtaatgtattgtgatcagatcaaggtagttagcatattcacctcaaacgtgtatcatttctttgtgttgggagcatttaatatcctagctatttgaaactatatattattgtcagctatagtcatcctacagtgctatagaacactagaacttattcctcccatatagctgtaattttgtatcttctaacaaatctctccatattcccccccctcacctccgctgaaaccatttctgcaccacaggtgccttgaatccccggccacactgagcacttcatagaggagggtgggcacgccggcataggaaacagccttacctatcctttgcccagagatagttctagttttgtccttgttggggcaggtgttagggatgaagtgagattgccatcaagaaggtagatcatgagcctgcccacctcccactgttcttaccctttccttggtgtctgtgcagcagagccagctgctttactaacattcttttccccaaagatgaaatgtggcaactgtggtgagatttcggacaagtggcagtacatccggctgatggtaactgttccccgcccaacccccaacataaacactcacaaacacacatacacttctgggcagggatttggggaaactggccttcatctctccagttctttgctccctgctttttgtggtttgggagggtaggtgtcagtgtgatcagcactggattcaataggcatctttgaggtatgaggcagagttcaaaatcaaggggaagccctttttttattttcctcaggaagccttcccaggagtcttgtcctagtaagttaccctttctgggtcttggtctctttaagtggacaataaatggtgggctcgatctcctcaggactgtacatctaattcatatgtgactgaaagttctgtttgctttttgccaggacagtgtggcactgaaggggggccgtggcagtgcttccatggtccagaagtgcaagctgtgtgcaagagaaaattccatcgagattttaagcagcaccatcaagccttacaatgctgaagacaatgagaacttcaagacaatagtggagtttgagtgccggggccttgaaccagttgatttccagccgcaggctgggtttgctgctgaaggtgtggagtcagggacagccttcagtgacattaatctgcaggagaaggactggactgactatgatgaaaaggcccaggagtctgtgggaatctatgaggtcacccaccagtttgtgaagtgctgatccctcttccttcccagttgcccttaagaactgagaaaggacaaagtactctaagcagcagagcccacagaggctcgttcctttgacccttgtctcctggtggctatacgaaaccttcacaatctgcatgctggactttattacagcttcccaagccccatcaataaagcccctgttcacgctgcactggtgcatgaaggtgaagtaaggaggcagctactccctccacaaataagaattcgtgcagcagcagttcactccttaggaaaatgaagagtatttttaaggagatggtatctccccagtcaagggcaagtttacagagatgaaaccgcgatcccaccatcactcaatgagccagaagccaatggtgacgtactgttacctgaacttactgaacttgctgttggaaagatctttgtgaggattaggaattaggttaaaagaaattaagaaccatcttcaagcaaaaattaaactttatttctgcttaaacaataaatacacctgagttagttttccaaacctttcctcctgattaaatgcccttaaaacttaaa

SEQ ID NO: 369284 - DNA, 1045 bp, Homo sapiens
acgacgcgccggaaagcaacggcaagggccgcagccagcaccgggcggagagggctaccatggggaaaatcgcgctgcaactcaaagccacgctggagaacatcaccaacctccggcccgtgggcgaggacttccggtggtacctgaaggacagtgtggcactgaaggggggccgtggcagtgcttccatggtccagaagtgcaagctgtgtgcaagagaaaattccatcgagattttaagcagcaccatcaagccttacaatgctgaagacaatgagaacttcaagacaatagtggagtttgagtgccggggccttgaaccagttgatttccagccgcaggctgggtttgctgctgaaggtgtggagtcagggacagccttcagtgacattaatctgcaggagaaggactggactgactatgatgaaaaggcccaggagtctgtgggaatctatgaggtcacccaccagtttgtgaagtgctgatccctcttccttcccagttgcccttaagaactgagaaaggacaaagtactctaagcagcagagcccacagaggctcgttcctttgacccttgtctcctggtggctatacgaaaccttcacaatctgcatgctggactttattacagcttcccaagccccatcaataaagcccctgttcacgctgcactggtgcatgaaggtgaagtaaggaggcagctactccctccacaaataagaattcgtgcagcagcagttcactccttaggaaaatgaagagtatttttaaggagatggtatctccccagtcaagggcaagtttacagagatgaaaccgcgatcccaccatcactcaatgagccagaagccaatggtgacgtactgttacctgaacttactgaacttgctgttggaaagatctttgtgaggattaggaattaggttaaaagaaattaagaaccatcttcaagcaaaaattaaactttatttctgcttaaacaataaatacacctgagttagttttccaaacctttcctcctgattaaatgcccttaaaacttaaa

SEQ ID NO: 369285 - DNA, 837 bp, Homo sapiens
atctagaggatcctccattaacaggctgatgcgcgcaccatcaagccttacaagtgctgaagacaatgagaacttcaagacaatagtggagtttgagtgccggggccttgaaccagttgatttccagccgcaggctgggtttgctgctgaaggtgtggagtcagggacagccttcagtgacattaatctgcaggagaaggactggactgactatgatgaaaaggcccaggagtctgtgggaatctatgaggtcacccaccagtttgtgaagtgctgatccctcttccttcccagttgcccttaagaactgagaaaggacaaagtactctaagcagcagagcccacagaggctcgttcctttgacccttgtctcctggtggctatacgaaaccttcacaatctgcatgctggactttattacagcttcccaagccccatcaataaagcccctgttcacgctgcactggtgcatgaaggtgaagtaaggaggcagctactccctccacaaataagaattcgtgcagcagcagttcactccttaggaaaatgaagagtatttttaaggagatggtatctccccagtcaagggcaagtttacagagatgaaaccgcgatcccaccatcactcaatgagccagaagccaatggtgacgtactgttacctgaacttactgaacttgctgttggaaagatctttgtgaggattaggaattaggttaaaagaaattaagaaccatcttcaagcaaaaattaaactttatttctgcttaaacaataaatacacctgagttagttttccaaacctttcctcctgattaaatgcccttaaaacttaaa

SEQ ID NO: 369286 - DNA, 857 bp, Homo sapiens
tgaagcactgaggcccggctgcagacctctcccgagaggggaataatccgtgccggccggttccgccatggagccaggtgcaggtcacctcgacggtcaccgcgcggggagcccaagccttcgtcaggctctgtgcgacggaagcgcagtgatgttttccagtaaagaacgcggacgttgcaccgtgatcaattttgtccctttggaggcgccgttacggtccacgccccgctcgcgtcaagtgactgaggcctgtggtggagaaggacgtgccgtgccgctgggttctgagccggagtggtcggtgggtgggatggaggcgaccttggagcagcacttggaagacacaatgaagaatccctccattgttggagtcctgtgcacagattcacaaggacttaatctgggttgccgcgggaccctgtcagatgagcatgctggagtgatatctgttctagcccagcaagcagctaagctaacctctgaccccactgatattcctgtggtgtgtctagaatcagataatgggaacattatgatccagaaacacgatggcatcacggtggcagtgcacaaaatggcctcttgatgctcatatctgttcttcagcagcctgtcataggaactggatcctacctatgttaattaccttatagaactactaaagttccagtagttaggccattcatttaatgtgcattaggcacttttctgtttatttaagagtcaattgctttctaatgctctatggaccgactatcaagatattagtaagaaaggatcatgttttgaagcagcaggtccaggtcactttgtatatagaattttgctgtattcaataaatctgtttggaggaa

SEQ ID NO: 369287 - DNA, 913 bp, Homo sapiens
tgaagcactgaggcccggctgcagacctctcccgagaggggaataatccgtgccggccggttccgccatggagccaggtgcaggtcacctcgacggtcaccgcgcggggagcccaagccttcgtcaggctctgtgcgacggaagcgcagtgatgttttccagtaaagaacgcggacgttgcaccgtgatcaattttgtccctttggaggcgccgttacggtccacgccccgctcgcgtcaagtgactgaggcctgtggtggagaaggacgtgccgtgccgctgggttctgagccggagtggtcggtgggtgggatggaggcgaccttggagcagcacttggaagacacaatgaagaatccctccattgttggagtcctgtgcacagattcacaaggacttaatctgggttgccgcgggaccctgtcagatgagcatgctggagtgatatctgttctagcccagcaagcagctaagctaacctctgaccccactgatattcctgtggtgtgtctagaatcagataatgggaacattatgatccagaaacacgatggcatcacggtggcagtgcacaaaatggcctcttgatgctcatatctgttcttcagcagcctgtcataggaactggatcctacctatgttaattaccttatagaactactaaagttccagtagttaggccattcatttaatgtgcattaggcacttttctgtttatttaagagtcaattgctttctaatgctctatggaccgactatcaagatattagtaagaaaggatcatgttttgaagcagcaggtccaggtcactttgtatatagaattttgctgtattcaataaatctgtttggaggaaaatggatcttttctagattctttaaacttaaccaaatgttccttttgttcagttat

SEQ ID NO: 369288 - DNA, 889 bp, Homo sapiens
tgaagcactgaggcccggctgcagacctctcccgagaggggaataatccgtgccggccggttccgccatggagccaggtgcaggtcacctcgacggtcaccgcgcggggagcccaagccttcgtcaggctctgtgcgacggaagcgcagtgatgttttccagtaaagaacgcggacgttgcaccgtgatcaattttgtccctttggaggcgccgttacggtccacgccccgctcgcgtcaagtgactgaggcctgtggtggagaaggacgtgccgtgccgctgggttctgagccggagtggtcggtgggtgggatggaggcgaccttggagcagcacttggaagacacaatgaagaatccctccattgttggagtcctgtgcacagattcacaaggacttaatctgggttgccgcgggaccctgtcagatgagcatgctggagtgatatctgttctagcccagcaagcagctaagctaacctctgaccccactgatattcctgtggtgtgtctagaatcagataatgggaacattatgatccagaaacacgatggcatcacggtggcagtgcacaaaatggcctcttgatgctcatatctgttcttcagcagcctgtcataggaactggatcctacctatgttaattaccttatagaactactaaagttccagtagttaggccattcatttaatgtgcattaggcacttttctgtttatttaagagtcaattgctttctaatgctctatggaccgactatcaagatattagtaagaaaggatcatgttttgaagcagcaggtccaggtcactttgtatatagaattttgctgtattcaataaatctgtttggaggaacacaaagaacccagggcctgtggcctccgtgt

SEQ ID NO: 369289 - DNA, 953 bp, Homo sapiens
tgaagcactgaggcccggctgcagacctctcccgagaggggaataatccgtgccggccggttccgccatggagccaggtgcaggtcacctcgacggtcaccgcgcggggagcccaagccttcgtcaggctctgtgcgacggaagcgcagtgatgttttccagtaaagaacgcggacgttgcaccgtgatcaattttgtccctttggaggcgccgttacggtccacgccccgctcgcgtcaagtgactgaggcctgtggtggagaaggacgtgccgtgccgctgggttctgagccggagtggtcggtgggtgggatggaggcgaccttggagcagcacttggaagacactatctatgtaaaattcaaaactggaaaagtataaagggtacagagagacacctgcctcccaccgatgtccctcagcttccacttaccctccaggagaatgaagaatccctccattgttggagtcctgtgcacagattcacaaggacttaatctgggttgccgcgggaccctgtcagatgagcatgctggagtgatatctgttctagcccagcaagcagctaagctaacctctgaccccactgatattcctgtggtgtgtctagaatcagataatgggaacattatgatccagaaacacgatggcatcacggtggcagtgcacaaaatggcctcttgatgctcatatctgttcttcagcagcctgtcataggaactggatcctacctatgttaattaccttatagaactactaaagttccagtagttaggccattcatttaatgtgcattaggcacttttctgtttatttaagagtcaattgctttctaatgctctatggaccgactatcaagatattagtaagaaaggatcatgttttgaagcagcaggtccaggtcactttgtatatagaattttgctgtattcaataaatctgtttggaggaa

SEQ ID NO: 369290 - DNA, 1467 bp, Homo sapiens
tgaagcactgaggcccggctgcagacctctcccgagaggggaataatccgtgccggccggttccgccatggagccaggtgcaggtcacctcgacggtcaccgcgcggggagcccaagccttcgtcaggctctgtgcgacggaagcgcagtgatgttttccagtaaagaacgcggacgttgcaccgtgatcaattttgtccctttggaggcgccgttacggtccacgccccgctcgcgtcaagtgactgaggcctgtggtggagaaggacgtgccgtgccgctgggttctgagccggagtggtcggtgggtgggatggaggcgaccttggagcagcacttggaagacacgtgagtagtgcgcgcctcttcggcctgtcctgaggtcgcggcggaggaacttgagcggaacgaaaggcgcgagctgcgagtaccggccagggcgtctcggggacgtcgcgcgacccccgggacacgggatgagggggctaaactctacccaaggccgcagggcggggcgggtgacccggaattaaaatcctgccgggcaccgcacattccctcttgagcgagtctcccgggcccaggccacgggccaaaactgcctatctcgttgttgaaatcgtctttacggtcagggtggttctgcggaagttttagaaaacgggttgacttttgggaagattgtgccagttgtgcagagtcgagccctgcagtgtaaacaaacacgtatctcctgtgtgtaacctatcagttacttggttgcttaagtagataaaaatcattctttaaatttttcgaacaagcagtatctatgtaaaattcaaaactggaaaagtataaagggtacagagagacacctgcctcccaccgatgtccctcagcttccacttaccctccaggagaatgaagaatccctccattgttggagtcctgtgcacagattcacaaggacttaatctgggttgccgcgggaccctgtcagatgagcatgctggagtgatatctgttctagcccagcaagcagctaagctaacctctgaccccactgatattcctgtggtgtgtctagaatcagataatgggaacattatgatccagaaacacgatggcatcacggtggcagtgcacaaaatggcctcttgatgctcatatctgttcttcagcagcctgtcataggaactggatcctacctatgttaattaccttatagaactactaaagttccagtagttaggccattcatttaatgtgcattaggcacttttctgtttatttaagagtcaattgctttctaatgctctatggaccgactatcaagatattagtaagaaaggatcatgttttgaagcagcaggtccaggtcactttgtatatagaattttgctgtattcaataaatctgtttggaggaaaatggatcttttctagattctttaaacttaaccaaatgttccttttgttcagttat

SEQ ID NO: 369291 - DNA, 1230 bp, Homo sapiens
tgaagcactgaggcccggctgcagacctctcccgagaggggaataatccgtgccggccggttccgccatggagccaggtgcaggtcacctcgacggtcaccgcgcggggagcccaagccttcgtcaggctctgtgcgacggaagcgcagtgatgttttccagtaaagaacgcggacgttgcaccgtgatcaattttgtccctttggaggcgccgttacggtccacgccccgctcgcgtcaagtgactgaggcctgtggtggagaaggacgtgccgtgccgctgggttctgagccggagtggtcggtgggtgggatggaggcgaccttggagcagcacttggaagacacaatgaagaatccctccattgttggagtcctgtgcacagattcacaaggacttaatctgggttgccgcgggaccctgtcagatgagcatgctggagtgatatctgttctagcccagcaagcagctaagctaacctctgaccccactgatattcctgtggtgtgtctagaatcagataatgggaacattatgatccagaaacacgatggcatcacggtggcagtgcacaaaatggcctcttgatgctcatatctgttcttcagcagcctgtcataggaactggatcctacctatgttaattaccttatagaactactaaagttccagtagttaggccattcatttaatgtgcattaggcacttttctgtttatttaagagtcaattgctttctaatgctctatggaccgactatcaagatattagtaagaaaggatcatgttttgaagcagcaggtccaggtcactttgtatatagaattttgctgtattcaataaatctgtttggaggaaaaaaaaaaaaaaaaaaaaaaaaaaaaaaaaaaaaaaaaaaaaaaaaaaaacacaaacaaacacaaacaaaacaaacacaaaaaacaaaaacaaaccaaaaaccccacccacccacgaatacaaagcaagacacacaaccagcaacaccggataaagtaagagcaagcgcacggcgcacacaaaacaaggaaagcccgacagaagaacacctaccacgcaaaaacatataaacacaaccggccgcgacggcacgagcaggccacacaccctcgccacaggccaagaccgcccacgcgccaaccacaccgacccaccgccaacgcaggacacgacccaacccaagcccctccccacacaccgacccaagcccgca

SEQ ID NO: 369292 - DNA, 939 bp, Homo sapiens
cagttatgtttaacatgcagatcagtcatttgggagaaaaagggtaaatttttggaagcatttgctaggcttactaatggaaagactgaaattcaggtatggaaatctaaaactaaatgagttccttcaagaaaccttcaaggctcaaacgtcggcatcggatctggtcaaaatgttttgtatagtaatagtacatccaaatgctctgccatagtggcatgtctattacctgatttggtttcaggtacagttaactttgtgttgcctttatatacagaaatatattgtaaagtacacttagtaattaattttcgtacctagaatttataggtacttttgtacccgagatttagttactataatatatacagactaatacagacattaataaaaagacaattctgtagacattttatatatcatctctattttccaggccgcgggaccctgtcagatgagcatgctggagtgatatctgttctagcccagcaagcagctaagctaacctctgaccccactgatattcctgtggtgtgtctagaatcagataatgggaacattatgatccagaaacacgatggcatcacggtggcagtgcacaaaatggcctcttgatgctcatatctgttcttcagcagcctgtcataggaactggatcctacctatgttaattaccttatagaactactaaagttccagtagttaggccattcatttaatgtgcattaggcacttttctgtttatttaagagtcaattgctttctaatgctctatggaccgactatcaagatattagtaagaaaggatcatgttttgaagcagcaggtccaggtcactttgtatatagaattttgctgtattcaataaatctgtttggaggaaaatggatcttttctagattctttaaacttaaccaaatgttccttttgttcagttat

SEQ ID NO: 369293 - DNA, 886 bp, Homo sapiens
tgaagcactgaggcccggctgcagacctctcccgagaggggaataatccgtgccggccggttccgccatggagccaggtgcaggtcacctcgacggtcaccgcgcggggagcccaagccttcgtcaggctctgtgcgacggaagcgcagtgatgttttccagtaaagaacgcggacgttgcaccgtgatcaattttgtccctttggaggcgccgttacggtccacgccccgctcgcgtcaagtgactgaggcctgtggtggagaaggacgtgccgtgccgctgggttctgagccggagtggtcggtgggtgggatggaggcgaccttggagcagcacttggaagacacaatgaagaatccctccattgttggagtcctgtgcacagattcacaaggacttaatctgggttgccgcgggaccctgtcagatgagcatgctggagtgatatctgttctagcccagcaagcagctaagctaacctctgaccccactgatattcctgtggtgtgtctagaatcagataatgggaacattatgatccagaaacacgatggcatcacggtggcagtgcacaaaatggcctcttgatgctcatatctgttcttcagcagcctgtcataggaactggatcctacctatgttaattaccttatagaactactaaagttccagtagttaggccattcatttaatgtgcattaggcacttttctgtttatttaagagtcaattgctttctaatgctctatggaccgactatcaagatattagtaagaaaggatcatgttttgaagcagcaggtccaggtcactttgtatatagaattttgctgtattcaataaatctgtttggaggaaaaaaccccaccccaccataaaactggcgc

SEQ ID NO: 369294 - DNA, 945 bp, Homo sapiens
tgaagcactgaggcccggctgcagacctctcccgagaggggaataatccgtgccggccggttccgccatggagccaggtgcaggtcacctcgacggtcaccgcgcggggagcccaagccttcgtcaggctctgtgcgacggaagcgcagtgatgttttccagtaaagaacgcggacgttgcaccgtgatcaattttgtccctttggaggcgccgttacggtccacgccccgctcgcgtcaagtgactgaggcctgtggtggagaaggacgtgccgtgccgctgggttctgagccggagtggtcggtgggtgggatggaggcgaccttggagcagcacttggaagacacaatgaagaatccctccattgttggagtcctgtgcacagattcacaaggacttaatctgggttgccgcgggaccctgtcagatgagcatgctggagtgatatctgttctagcccagcaagcagctaagctaacctctgaccccactgatattcctgtggtgtgtctagaatcagataatgggaacattatgatccagaaacacgatggcatcacggtggcagtgcacaaaatggcctcttgatgctcatatctgttcttcagcagcctgtcataggaactggatcctacctatgttaattaccttatagaactactaaagttccagtagttaggccattcatttaatgtgcattaggcacttttctgtttatttaagagtcaattgctttctaatgctctatggaccgactatcaagatattagtaagaaaggatcatgttttgaagcagcaggtccaggtcactttgtatatagaattttgctgtattcaataaatctgtttggaggaaaaaaaaacaacaacacccaaccccacaaaccacacaccaccacccgacaccaacacaccacaccacaaaaacccaccacccaaacaag

SEQ ID NO: 369295 - DNA, 988 bp, Homo sapiens
tgaagcactgaggcccggctgcagacctctcccgagaggggaataatccgtgccggccggttccgccatggagccaggtgcaggtcacctcgacggtcaccgcgcggggagcccaagccttcgtcaggctctgtgcgacggaagcgcagtgatgttttccagtaaagaacgcggacgttgcaccgtgatcaattttgtccctttggaggcgccgttacggtccacgccccgctcgcgtcaagtgactgaggcctgtggtggagaaggacgtgccgtgccgctgggttctgagccggagtggtcggtgggtgggatggaggcgaccttggagcagcacttggaagacacaatgaagaatccctccattgttggagtcctgtgcacagattcacaaggacttaatctgggttgccgcgggaccctgtcagatgagcatgctggagtgatatctgttctagcccagcaagcagctaagctaacctctgaccccactgatattcctgtggtgtgtctagaatcagataatgggaacattatgatccagaaacacgatggcatcacggtggcagtgcacaaaatggcctcttgatgctcatatctgttcttcagcagcctgtcataggaactggatcctacctatgttaattaccttatagaactactaaagttccagtagttaggccattcatttaatgtgcattaggcacttttctgtttatttagctattgcacagcttctgaggcacccacaaaaacatcaaattatggagaagtgagtgcatagatatatgaaatcaacatttcaaattggtaatagaatgtccttcttcattaagtagtgatcttttatcaagctgctacaataaaatcggccttttcattcaacatgctacctgttactaaacagaagtcttaggtatcaaaggttatgcccccggaattagctaataacatttgtaagggctggctggacgtccttttatcctct

SEQ ID NO: 369296 - DNA, 2443 bp, Homo sapiens
ggtgcagctgcttccgggcttcgcggctcccggcggctccccaaggccgcggccccgacgctgggcccgggagcggtccccgcgcacagcgcccggacgcgtaggtcccgaagtaggcccgcgctttgcttcgtaactggggatctctgaggacatcttagttctgaccttgtggaggccgcgtctctgctgcgtgttcgcgggccagtcgggccactttgtagaaatcatagccctctaaatcaagggacgaacgctgctggctggagtttgctggacactttcattccacctcctaacaaagagaattcctattccttgaggtcccttggggcagcagttaaagactacacgatccaggagcacctaggacctggggccaccttcctgcccgctttattggatggagcactgcctccccagtttctgggacaccttggggtgtggccttggtgagtgaaacttggggtgctgcctgctgggaaggaaatccggaaacgcagagaggactctctggtggtgacccaggccttgtcagatctgagattcttggaatctcagattgtgggggtgtggatggtgaatgaatttgggtatgcccccctttaccccagaactgaagaggaagcaaactacttgccacacttgaggctgcatgactattcagagaagggaggagccacttctgaattcagagtaggactgcatcaccaggcaaatacctgttctgagccagaaagactctggcttctgaggagatcctgagagtctgagtagtgccaggaagcagcctcagaatttgggggcccattacacaccccagccatgttcctgcgacggcttggtggctggctacctcgcccttggggccgccggaaaccaatgaggcctgacccgccttacccagaacccagacgggtggacagctcctcggagaattcaggaagtgactgggatagtgccccagaaaccatggaagatgtggggcatcccaagactaaggactcgggggcattgagggtttctagggctgcttccgaaccaagcaaggaggagccccaagttgagcagctagggagcaaaagaatggattccctcaagtgggaccagcctatctctagcactcaagagtctgggagactggaggctggaggggccagtcccaaactcagatgggatcatgtggattcaggtggcaccaggagaccaggggtgtcccctgaagggggactgagcgtccctgggccaggagccccattggagaaacctggtaggcgtgagaagctgttgggctggctgcggggggaaccaggagctccctcccggtacttggggggcccagaagagtgtctgcagatctccaccaacctgaccctgcatcttctggagctgctggcctctgccctgctggccctgtgctcacgaccactgcgggcagccttggacacactgggcctgcgtggaccgctgggcctctggctacatggcctactgtccttcctggctgccctgcatgggctccatgctgttctgagcctacttactgcccaccctttgcacttcgcctgcctctttggtctcctgcaggccttggtgctggctgtcagcctccgggagcccaatggggatgaggcggccactgactgggagagtgaggggttggagagggaaggtgaggagcagaggggagacccgggaaaggggctgtgaccgtggggtgggggcaaagggtgaagagagtgtgggctttaggagaaaagtgtgaggcatgacccaaattgtaagcatagggacctcagggatggggaagaaacccgagtacgagggtgcagggccccccttcatacacaggagagaacagaactatttagggtgtttgtgtttatggacagtgagggcactgctcttggattcaccagctgttatttttgcttttacttttctcccaccttcagttttttttttttttccacctccactttttaaaagcaaaaaaaaaaaaaagtatgatggtggtgaataaagaccaaagggtcctctctacctttgaaaactctcctggggtggaggagaccagggcaggatagacagacctctgcagtaagagagtggttgggaaacccagggtgttccttggatctcaggatctgagccatcgagggaagagtggggctgctaggcaagtggattagggggtctggatagggccccacaggtgacagggagcctgcagggcggatctggtgatcatgggagccagagggagtggggacagtgcaggcagtattggcaggagggccagtgcagaagggctggtagctcaggcagtgtgggggaagcactgaagcctgtagtccccacttgggggctaggggtttgctcactcagcaataaataactgtgtcacatcaaatcctaaatataccactacaaagtgagagtt

SEQ ID NO: 369297 - DNA, 2963 bp, Homo sapiens
ggtgcagctgcttccgggcttcgcggctcccggcggctccccaaggccgcggccccgacgctgggcccgggagcggtccccgcgcacagcgcccggacgcgtaggtcccgaagtaggcccgcgctttgcttcgtaactggggatctctgaggacatcttagttctgaccttgtggaggccgcgtctctgctgcgtgttcgcgggccagtcgggccactttgtagaaatcatagccctctaaatcaagggacgaacgctgctggctggagtttgctggacactttcattccacctcctaacaaagagaattcctattccttgaggtcccttggggcagcagttaaagactacacgatccaggagcacctaggacctggggccaccttcctgcccgctttattggatggagcactgcctccccagtttctgggacaccttggggtgtggccttggtgagtgaaacttggggtgctgcctgctgggaaggaaatccggaaacgcagagaggactctctggtggtgacccaggccttgtcagatctgagattcttggaatctcagattgtgggggtgtggatggtgaatgaatttgggtatgcccccctttaccccagaactgaagaggaagcaaactacttgccacacttgaggctgcatgactattcagagaagggaggagccacttctgaattcagagtaggactgcatcaccaggcaaatacctgttctgagccagaaagactctggcttctgaggagatcctgagagtctgagtagtgccaggaagcagcctcagaatttgggggcccattacacaccccagccatgttcctgcgacggcttggtggctggctacctcgcccttggggccgccggaaaccaatgaggcctgacccgccttacccagaacccagacgggtggacagctcctcggagaattcaggaagtgactgggatagtgccccagaaaccatggaagatgtggggcatcccaagactaaggactcgggggcattgagggtttctagggctgcttccgaaccaagcaaggaggagccccaagttgagcagctagggagcaaaagaatggattccctcaagtgggaccagcctatctctagcactcaagagtctgggagactggaggctggaggggccagtcccaaactcagatgggatcatgtggattcaggtggcaccaggagaccaggggtgtcccctgaagggggactgagcgtccctgggccaggagccccattggagaaacctggtaggcgtgagaagctgttgggctggctgcggggggaaccaggagctccctcccggtacttggggggcccagaagagtgtctgcagatctccaccaacctgaccctgcatcttctggagctgctggcctctgccctgctggccctgtgctcacgaccactgcgggcagccttggacacactgggcctgcgtggaccgctgggcctctggctacatggcctactgtccttcctggctgccctgcatgggctccatgctgttctgagcctacttactgcccaccctttgcacttcgcctgcctctttggtctcctgcaggccttggtgctggctgtcagcctccgggagcccaatggggatgaggcggccactgactgggagagtgaggggttggagagggaaggtgaggagcagaggggagacccgggaaaggggctgtgaccgtggggtgggggcaaagggtgaagagagtgtgggctttaggagaaaagtgtgaggcatgacccaaattgtaagcatagggacctcagggatggggaagaaacccgagtacgagggtgcagggccccccttcatacacaggagagaacagaactatttagggtgtttgtgtttatggacagtgagggcactgctcttggattcaccagctgttatttttgcttttacttttctcccaccttcagttttttttttttttccacctccactttttaaaagcaaaaaaaaaaaaaagtatgatggtggtgaataaagaccaaagggtcctctctacctttgaaaactctcctggggtggaggagaccagggcaggatagacagacctctgcagtaagagagtggttgggaaacccagggtgttccttggatctcaggatctgagccatcgagggaagagtggggctgctaggcaagtggattagggggtctggatagggccccacaggtgacagggagcctgcagggcggatctggtgatcatgggagccagagggagtggggacagtgcaggcagtattggcaggagggccagtgcagaagggctggtagctcaggcagtgtgggggaagcactgaagcctgtagtccccacttgggggctaggggtttgctcactcagcaataaataactgtgtcacatcaaatcctaaatataccactacaaagtgagagttactgccactctgttcttactgacaccgtccagctgggagtttaggtggtagaggatccagggggaatgttgaaatgggaggagtgggaatgacgtctggagacaaaccccagaatgagttgaggattgaaaaattatctttattatcttgagtgggagctggagctggaagtctccagcttctccctccaacaactcagctcccattgtacccatctggggacttagatgaagttacaggtcagttattggacagctcacaggccttgatggggggagggaaaaagaaggacagaagggaagtccagggagaaaagcaaagttgatagtaatggggtgggggagaacgtgttctttcattccctgtgtcaaaggggagtctctaaggctcttttccctccacgtatgaccctctgccccctttatccagtgcaaactcagaaacctctcttttgagtagcccagaacccatcctgcctccctcaggtgacatcacagctcttagccacatccctctggtg

SEQ ID NO: 369298 - DNA, 1521 bp, Homo sapiens
ggtgcagctgcttccgggcttcgcggctcccggcggctccccaaggccgcggccccgacgctgggcccgggagcggtccccgcgcacagcgcccggacgcgtaggtcccgaagtaggcccgcgctttgcttcgtaactggggatctctgaggacatcttagttctgaccttgtggaggccgcgtctctgctgcgtgttcgcgggccagtcgggccactttgtagaaatcatagccctctaaatcaagggacgaacgctgctggctggagtttgctggacactttcattccacctcctaacaaagagaattcctattccttgaggtcccttggggcagcagttaaagactacacgatccaggagcacctaggacgtaagagagtggttgggaaacccagggtgttccttggatctcaggatctgagccatcgagggaagagtggggctgctaggcaagtggattagggggtctggatagggccccacaggtgacagggagcctgcagggcggatctggtgatcatgggagccagagggagtggggacagtgcaggcagtattggcaggagggccagtgcagaagggctggtagctcaggcagtgtgggggaagcactgaagcctgtagtccccacttgggggctaggggtttgctcactcagcaataaataactgtgtcacatcaaatcctaaatataccactacaaagtgagagttactgccactctgttcttactgacaccgtccagctgggagtttaggtggtagaggatccagggggaatgttgaaatgggaggagtgggaatgacgtctggagacaaaccccagaatgagttgaggattgaaaaattatctttattatcttgagtgggagctggagctggaagtctccagcttctccctccaacaactcagctcccattgtacccatctggggacttagatgaagttacaggtcagttattggacagctcacaggccttcctaggagtcaataagacgggaggatgtggtgagcgattgtagaggagaaagcgctggtaaccctggcctgtctcattcagcatgattccacctgggcatgagctggaaaagagctcagtcttcatgtcagggcggccttcagttctgagatctgtgctcccttcagtcaggtggtagatccatttccggggcacacagagcccatctttcatgcggatggtagcacgaaggtggagctgcatcggggcagagccagcagccatattgaagacaatgttgtccacagggtcaaaagttgccaactcctccttggtgggagctgcccctgcgataaagtaccactggcccaagtggacctctgggaactccttcccatccacgcccagagttgtcagttgactgtgctcagggcactggtagatggagttaaggataataccatagaagtagagcagagctgcccaaatttggtggaacatcttcaggcaggagggagctggtgctctgtgtgccttaactgctctctcccctactggc

SEQ ID NO: 369299 - DNA, 999 bp, Homo sapiens
  misc_feature (203)..(203): n is a, c, g, or t
  misc_feature (267)..(267): n is a, c, g, or t
  misc_feature (272)..(272): n is a, c, g, or t
  misc_feature (287)..(287): n is a, c, g, or t
  misc_feature (293)..(294): n is a, c, g, or t
  misc_feature (296)..(296): n is a, c, g, or t
  misc_feature (825)..(825): n is a, c, g, or t
  misc_feature (857)..(857): n is a, c, g, or t
  misc_feature (875)..(875): n is a, c, g, or t
  misc_feature (887)..(887): n is a, c, g, or t
  misc_feature (890)..(890): n is a, c, g, or t
  misc_feature (899)..(899): n is a, c, g, or t
  misc_feature (914)..(914): n is a, c, g, or t
  misc_feature (942)..(942): n is a, c, g, or t
  misc_feature (994)..(994): n is a, c, g, or t
aggggatatgtgggagagaggagggtggtgtggaaaattggggggaaggtatttaagaaagagggtatttgtgggaagtttttggatggatttaggggagaaaaaagggtttttgtgaaaaagggttataaggggggggagaagaaggtgttgatgggtaaaagggatgtatataaagggtgattagtgttggtaggaattanatttaggggtgtgtggggtttatggttggttgtggggggggatttaggggtgtttgtagggtgnggttntttggttaattggtnttgttnntnttttttatttttgtttttttttttttttttttttttttttttttttttttttttttgtttttttttttttttttttttttttttttttttttttttttttttttttttttttttttttttttttttttttttttttttttttttttttttttttttttttttttttttttttttttttttgaggattgaaaaattatctttattatcttgagtgggagctggagctggaagtctccagcttctccctccaacaactcagctcccattgtacccatctggggacttagatgaagttacaggtcagttattggacagctcacaggcctcttgattcctaggagtcaataagaaggctttggagtccaggcaggaagtcagggacttgaattcctccacacacttttcgggaggatgtggtgagcgattgtagaggagaaagcgctggtaaccctggcctgtctcattcagcatgattccacctgggcatgagctggaaaagagctcagtcttcatgtcagggcggcctttnaagttcttgaggaatctggggctcccctttcnaattcaaggtgggtaaanatcccaattttnccnggggggaanaaaagaagcccccantctttttccaatgccgggaatggttaancaaccgaaaaggtgggaagcttgcaataccggggggcagcccaagcggcccnttttg

SEQ ID NO: 369300 - DNA, 3248 bp, Homo sapiens
ggtgcagctgcttccgggcttcgcggctcccggcggctccccaaggccgcggccccgacgctgggcccgggagcggtccccgcgcacagcgcccggacgcgtaggtcccgaagtaggcccgcgctttgcttcgtaactggggatctctgaggacatcttagttctgaccttgtggaggccgcgtctctgctgcgtgttcgcgggccagtcgggccactttgtagaaatcatagccctctaaatcaagggacgaacgctgctggctggagtttgctggacactttcattccacctcctaacaaagagaattcctattccttgaggtcccttggggcagcagttaaagactacacgatccaggagcacctaggacctggggccaccttcctgcccgctttattggatggagcactgcctccccagtttctgggacaccttggggtgtggccttggtgagtgaaacttggggtgctgcctgctgggaaggaaatccggaaacgcagagaggactctctggtggtgacccaggccttgtcagatctgagattcttggaatctcagattgtgggggtgtggatggtgaatgaatttgggtatgcccccctttaccccagaactgaagaggaagcaaactacttgccacacttgaggctgcatgactattcagagaagggaggagccacttctgaattcagagtaggactgcatcaccaggcaaatacctgttctgagccagaaagactctggcttctgaggagatcctgagagtctgagtagtgccaggaagcagcctcagaatttgggggcccattacacaccccagccatgttcctgcgacggcttggtggctggctacctcgcccttggggccgccggaaaccaatgaggcctgacccgccttacccagaacccagacgggtggacagctcctcggagaattcaggaagtgactgggatagtgccccagaaaccatggaagatgtggggcatcccaagactaaggactcgggggcattgagggtttctagggctgcttccgaaccaagcaaggaggagccccaagttgagcagctagggagcaaaagaatggattccctcaagtgggaccagcctatctctagcactcaagagtctgggagactggaggctggaggggccagtcccaaactcagatgggatcatgtggattcaggtggcaccaggagaccaggggtgtcccctgaagggggactgagcgtccctgggccaggagccccattggagaaacctggtaggcgtgagaagctgttgggctggctgcggggggaaccaggagctccctcccggtacttggggggcccagaagagtgtctgcagatctccaccaacctgaccctgcatcttctggagctgctggcctctgccctgctggccctgtgctcacgaccactgcgggcagccttggacacactgggcctgcgtggaccgctgggcctctggctacatggcctactgtccttcctggctgccctgcatgggctccatgctgttctgagcctacttactgcccaccctttgcacttcgcctgcctctttggtctcctgcaggccttggtgctggctgtcagcctccgggagcccaatggggatgaggcggccactgactgggagagtgaggggttggagagggaaggtgaggagcagaggggagacccgggaaaggggctgtgaccgtggggtgggggcaaagggtgaagagagtgtgggctttaggagaaaagtgtgaggcatgacccaaattgtaagcatagggacctcagggatggggaagaaacccgagtacgagggtgcagggccccccttcatacacaggagagaacagaactatttagggtgtttgtgtttatggacagtgagggcactgctcttggattcaccagctgttatttttgcttttacttttctcccaccttcagttttttttttttttccacctccactttttaaaagcaaaaaaaaaaaaaagtatgatggtggtgaataaagaccaaagggtcctctctacctttgaaaactctcctggggtggaggagaccagggcaggatagacagacctctgcagtaagagagtggttgggaaacccagggtgttccttggatctcaggatctgagccatcgagggaagagtggggctgctaggcaagtggattagggggtctggatagggccccacaggtgacagggagcctgcagggcggatctggtgatcatgggagccagagggagtggggacagtgcaggcagtattggcaggagggccagtgcagaagggctggtagctcaggcagtgtgggggaagcactgaagcctgtagtccccacttgggggctaggggtttgctcactcagcaataaataactgtgtcacatcaaatcctaaatataccactacaaagtgagagttactgccactctgttcttactgacaccgtccagctgggagtttaggtggtagaggatccagggggaatgttgaaatgggaggagtgggaatgacgtctggagacaaaccccagaatgagttgaggattgaaaaattatctttattatcttgagtgggagctggagctggaagtctccagcttctccctccaacaactcagctcccattgtacccatctggggacttagatgaagttacaggtcagttattggacagctcacaggccttcctaggagtcaataagacgggaggatgtggtgagcgattgtagaggagaaagcgctggtaaccctggcctgtctcattcagcatgattccacctgggcatgagctggaaaagagctcagtcttcatgtcagggcggccttcagttctgagatctgtgctcccttcagtcaggtggtagatccatttccggggcacacagagcccatctttcatgcggatggtagcacgaaggtggagctgcatcggggcagagccagcagccatattgaagacaatgttgtccacagggtcaaaagttgccaactcctccttggtgggagctgcccctgcgataaagtaccactggcccaagtggacctctgggaactccttcccatccacgcccagagttgtcagttgactgtgctcagggcactggtagatggagttaaggataataccatagaagtagagcagagctgcccaaatttggtggaacatcttcaggcaggagggagctggtgctctgtgtgccttaactgctctctcccctactggc

SEQ ID NO: 369301 - DNA, 3086 bp, Homo sapiens
  misc_feature (2912)..(2912): n is a, c, g, or t
  misc_feature (2944)..(2944): n is a, c, g, or t
  misc_feature (2962)..(2962): n is a, c, g, or t
  misc_feature (2974)..(2974): n is a, c, g, or t
  misc_feature (2977)..(2977): n is a, c, g, or t
  misc_feature (2986)..(2986): n is a, c, g, or t
  misc_feature (3001)..(3001): n is a, c, g, or t
  misc_feature (3029)..(3029): n is a, c, g, or t
  misc_feature (3081)..(3081): n is a, c, g, or t
ggtgcagctgcttccgggcttcgcggctcccggcggctccccaaggccgcggccccgacgctgggcccgggagcggtccccgcgcacagcgcccggacgcgtaggtcccgaagtaggcccgcgctttgcttcgtaactggggatctctgaggacatcttagttctgaccttgtggaggccgcgtctctgctgcgtgttcgcgggccagtcgggccactttgtagaaatcatagccctctaaatcaagggacgaacgctgctggctggagtttgctggacactttcattccacctcctaacaaagagaattcctattccttgaggtcccttggggcagcagttaaagactacacgatccaggagcacctaggacctggggccaccttcctgcccgctttattggatggagcactgcctccccagtttctgggacaccttggggtgtggccttggtgagtgaaacttggggtgctgcctgctgggaaggaaatccggaaacgcagagaggactctctggtggtgacccaggccttgtcagatctgagattcttggaatctcagattgtgggggtgtggatggtgaatgaatttgggtatgcccccctttaccccagaactgaagaggaagcaaactacttgccacacttgaggctgcatgactattcagagaagggaggagccacttctgaattcagagtaggactgcatcaccaggcaaatacctgttctgagccagaaagactctggcttctgaggagatcctgagagtctgagtagtgccaggaagcagcctcagaatttgggggcccattacacaccccagccatgttcctgcgacggcttggtggctggctacctcgcccttggggccgccggaaaccaatgaggcctgacccgccttacccagaacccagacgggtggacagctcctcggagaattcaggaagtgactgggatagtgccccagaaaccatggaagatgtggggcatcccaagactaaggactcgggggcattgagggtttctagggctgcttccgaaccaagcaaggaggagccccaagttgagcagctagggagcaaaagaatggattccctcaagtgggaccagcctatctctagcactcaagagtctgggagactggaggctggaggggccagtcccaaactcagatgggatcatgtggattcaggtggcaccaggagaccaggggtgtcccctgaagggggactgagcgtccctgggccaggagccccattggagaaacctggtaggcgtgagaagctgttgggctggctgcggggggaaccaggagctccctcccggtacttggggggcccagaagagtgtctgcagatctccaccaacctgaccctgcatcttctggagctgctggcctctgccctgctggccctgtgctcacgaccactgcgggcagccttggacacactgggcctgcgtggaccgctgggcctctggctacatggcctactgtccttcctggctgccctgcatgggctccatgctgttctgagcctacttactgcccaccctttgcacttcgcctgcctctttggtctcctgcaggccttggtgctggctgtcagcctccgggagcccaatggggatgaggcggccactgactgggagagtgaggggttggagagggaaggtgaggagcagaggggagacccgggaaaggggctgtgaccgtggggtgggggcaaagggtgaagagagtgtgggctttaggagaaaagtgtgaggcatgacccaaattgtaagcatagggacctcagggatggggaagaaacccgagtacgagggtgcagggccccccttcatacacaggagagaacagaactatttagggtgtttgtgtttatggacagtgagggcactgctcttggattcaccagctgttatttttgcttttacttttctcccaccttcagttttttttttttttccacctccactttttaaaagcaaaaaaaaaaaaaagtatgatggtggtgaataaagaccaaagggtcctctctacctttgaaaactctcctggggtggaggagaccagggcaggatagacagacctctgcagtaagagagtggttgggaaacccagggtgttccttggatctcaggatctgagccatcgagggaagagtggggctgctaggcaagtggattagggggtctggatagggccccacaggtgacagggagcctgcagggcggatctggtgatcatgggagccagagggagtggggacagtgcaggcagtattggcaggagggccagtgcagaagggctggtagctcaggcagtgtgggggaagcactgaagcctgtagtccccacttgggggctaggggtttgctcactcagcaataaataactgtgtcacatcaaatcctaaatataccactacaaagtgagagttactgccactctgttcttactgacaccgtccagctgggagtttaggtggtagaggatccagggggaatgttgaaatgggaggagtgggaatgacgtctggagacaaaccccagaatgagttgaggattgaaaaattatctttattatcttgagtgggagctggagctggaagtctccagcttctccctccaacaactcagctcccattgtacccatctggggacttagatgaagttacaggtcagttattggacagctcacaggcctcttgattcctaggagtcaataagaaggctttggagtccaggcaggaagtcagggacttgaattcctccacacacttttcgggaggatgtggtgagcgattgtagaggagaaagcgctggtaaccctggcctgtctcattcagcatgattccacctgggcatgagctggaaaagagctcagtcttcatgtcagggcggcctttnaagttcttgaggaatctggggctcccctttcnaattcaaggtgggtaaanatcccaattttnccnggggggaanaaaagaagcccccantctttttccaatgccgggaatggttaancaaccgaaaaggtgggaagcttgcaataccggggggcagcccaagcggcccnttttg

SEQ ID NO: 369302 - DNA, 3201 bp, Homo sapiens
ggtgcagctgcttccgggcttcgcggctcccggcggctccccaaggccgcggccccgacgctgggcccgggagcggtccccgcgcacagcgcccggacgcgtaggtcccgaagtaggcccgcgctttgcttcgtaactggggatctctgaggacatcttagttctgaccttgtggaggccgcgtctctgctgcgtgttcgcgggccagtcgggccactttgtagaaatcatagccctctaaatcaagggacgaacgctgctggctggagtttgctggacactttcattccacctcctaacaaagagaattcctattccttgaggtcccttggggcagcagttaaagactacacgatccaggagcacctaggacctggggccaccttcctgcccgctttattggatggagcactgcctccccagtttctgggacaccttggggtgtggccttggtgagtgaaacttggggtgctgcctgctgggaaggaaatccggaaacgcagagaggactctctggtggtgacccaggccttgtcagatctgagattcttggaatctcagattgtgggggtgtggatggtgaatgaatttgggtatgcccccctttaccccagaactgaagaggaagcaaactacttgccacacttgaggctgcatgactattcagagaagggaggagccacttctgaattcagagtaggactgcatcaccaggcaaatacctgttctgagccagaaagactctggcttctgaggagatcctgagagtctgagtagtgccaggaagcagcctcagaatttgggggcccattacacaccccagccatgttcctgcgacggcttggtggctggctacctcgcccttggggccgccggaaaccaatgaggcctgacccgccttacccagaacccagacgggtggacagctcctcggagaattcaggaagtgactgggatagtgccccagaaaccatggaagatgtggggcatcccaagactaaggactcgggggcattgagggtttctagggctgcttccgaaccaagcaaggaggagccccaagttgagcagctagggagcaaaagaatggattccctcaagtgggaccagcctatctctagcactcaagagtctgggagactggaggctggaggggccagtcccaaactcagatgggatcatgtggattcaggtggcaccaggagaccaggggtgtcccctgaagggggactgagcgtccctgggccaggagccccattggagaaacctggtaggcgtgagaagctgttgggctggctgcggggggaaccaggagctccctcccggtacttggggggcccagaagagtgtctgcagatctccaccaacctgaccctgcatcttctggagctgctggcctctgccctgctggccctgtgctcacgaccactgcgggcagccttggacacactgggcctgcgtggaccgctgggcctctggctacatggcctactgtccttcctggctgccctgcatgggctccatgctgttctgagcctacttactgcccaccctttgcacttcgcctgcctctttggtctcctgcaggccttggtgctggctgtcagcctccgggagcccaatggggatgaggcggccactgactgggagagtgaggggttggagagggaaggtgaggagcagaggggagacccgggaaaggggctgtgaccgtggggtgggggcaaagggtgaagagagtgtgggctttaggagaaaagtgtgaggcatgacccaaattgtaagcatagggacctcagggatggggaagaaacccgagtacgagggtgcagggccccccttcatacacaggagagaacagaactatttagggtgtttgtgtttatggacagtgagggcactgctcttggattcaccagctgttatttttgcttttacttttctcccaccttcagttttttttttttttccacctccactttttaaaagcaaaaaaaaaaaaaagtatgatggtggtgaataaagaccaaagggtcctctctacctttgaaaagtaagagagtggttgggaaacccagggtgttccttggatctcaggatctgagccatcgagggaagagtggggctgctaggcaagtggattagggggtctggatagggccccacaggtgacagggagcctgcagggcggatctggtgatcatgggagccagagggagtggggacagtgcaggcagtattggcaggagggccagtgcagaagggctggtagctcaggcagtgtgggggaagcactgaagcctgtagtccccacttgggggctaggggtttgctcactcagcaataaataactgtgtcacatcaaatcctaaatataccactacaaagtgagagttactgccactctgttcttactgacaccgtccagctgggagtttaggtggtagaggatccagggggaatgttgaaatgggaggagtgggaatgacgtctggagacaaaccccagaatgagttgaggattgaaaaattatctttattatcttgagtgggagctggagctggaagtctccagcttctccctccaacaactcagctcccattgtacccatctggggacttagatgaagttacaggtcagttattggacagctcacaggccttcctaggagtcaataagacgggaggatgtggtgagcgattgtagaggagaaagcgctggtaaccctggcctgtctcattcagcatgattccacctgggcatgagctggaaaagagctcagtcttcatgtcagggcggccttcagttctgagatctgtgctcccttcagtcaggtggtagatccatttccggggcacacagagcccatctttcatgcggatggtagcacgaaggtggagctgcatcggggcagagccagcagccatattgaagacaatgttgtccacagggtcaaaagttgccaactcctccttggtgggagctgcccctgcgataaagtaccactggcccaagtggacctctgggaactccttcccatccacgcccagagttgtcagttgactgtgctcagggcactggtagatggagttaaggataataccatagaagtagagcagagctgcccaaatttggtggaacatcttcaggcaggagggagctggtgctctgtgtgccttaactgctctctcccctactggc

SEQ ID NO: 369303 - DNA, 959 bp, Homo sapiens
ttctgtggaagcctcccttgtttcccaacctgtgccactctttatcagatctacatgcccatcttatgtagcattccaccttgtcccattcattattcctgacttgaagccaaaattgtgtgaatccactggttcttttctcatgtgtatgttttgtgccctccgttcaccccagcactcctgtcatgtttgaaatgctggcatgaaatcctcctagagatgtccatcaaaagagttgggaagaggccctggagagaagcatcaggactgggatttgaggtttgacagtacctagaacaagaggagctgataccactgaaaaacagaacagatgttaaaaccatgggatagcacctacttttagctggcataaagtagagaagctgagtagtagtggttgtgaagtataaacgttcactgctgtggtaggtagctaagggaagaattgaaattatttttattgttactatcattttaaagacatatttttgctctattgtccaggctggagggcagtggtgcaatcatagctccctgtagtttcaaactcctgggctcaagtgatccatctcagcctcctcagtatctgggaccatgcctggctaatttttaaatttctgtacagacggagtcttgctacattgcccaggctgttcgtgaactcctggcctcaagcgatccttccaccttggcctctcaaagcactaggattacaggtgtgagccacagcacctggctaagttcagattattaatggccagtggtccctagtgttacagatgccaaatagtaagatgatgaaaagtatggttcagtgggattacaggcatgagccaccgcgcctggcctacacaaaaattcttaattttgagaaagtccagttcatcctgtttttttctttcattgcttatgcttttggtgtcatatgaaataaattattgcaaaatgccacaacttaa

SEQ ID NO: 369304 - DNA, 288 bp, Homo sapiens
  misc_feature (5)..(5): n is a, c, g, or t
  misc_feature (28)..(28): n is a, c, g, or t
  misc_feature (91)..(91): n is a, c, g, or t
tttcnttttaattttttatttttaaaangacagagtcttggctatgtcaccccatgctggagtgaagtgggcatgatcctcagctcactgnaccctccaaccttccccaggttcaagcaattccgccttggcctcccaaagtgctgggattacaggcatgagccaccgcgcctggcctacacaaaaattcttaattttgagaaagtccagttcatcctgtttttttctttcattgcttatgcttttggtgtcatatgaaataaattattgcaaaatgccacaacttaa

SEQ ID NO: 369305 - DNA, 272 bp, Homo sapiens
ctgggactacaggcgtgcatcaccacgcccagctaatttttgtatttttagtagagacggggtttcaccatgttggacaggatggtctcaatctcttgaccttatgatccgcccgccttggcctcccaaagtgctgggattacaggcatgagccaccgcgcctggcctacacaaaaattcttaattttgagaaagtccagttcatcctgtttttttctttcattgcttatgcttttggtgtcatatgaaataaattattgcaaaatgccaca

SEQ ID NO: 369306 - DNA, 482 bp, Homo sapiens
ggaggcatagagggctcggtatagaaatgccattcccctcacgccagtgggtagtcattgagatctgggtgccaagcactgagctggggaacacacttagagagaccaacatgtgtgagggtcccagctccaggaaatggaggtggggtggagaacgcctggagggaggcgtccacaggtgttcctggagtgcagagaactgctgcccactcaggatggtctgagaagatgcagacagaaagtgctccccgggctggatcttgaatcatgaggaaaatcaagtggcctgagtggagaggaagcgctttctaggtgagaagcccgacctgatggagggggatggatcagcaacaaagaaaatcatccaatcccaggaatagccctgtcactgcaccaggaagatgccagggcagagggactctggtggagtcacacacagccggagccagcaggagctctttggagcagcagtgacctgcgtg

SEQ ID NO: 369307 - DNA, 257 bp, Homo sapiens
tgcttgtagtcccacctgtctgtgaggctgaggtgggagcatcacctgagcccaggaggccaagatggatggatcatttgagaccagcctaagcaacatggcaaaaccccatctctacagaaaataacaacaacaacaaaaaattgctgggtgtgatggcacatgcctgtattcccacctatctgtgaggctgaggtggcagcatcatctgagcctgatcacctgatggaggctgcagtgagcctcgatcgcagcac

SEQ ID NO: 369308 - DNA, 840 bp, Homo sapiens
  misc_feature (84)..(84): n is a, c, g, or t
tttatatacagcttgtttgaacagctcaggatcatcctcctctacaatgtaggttttccttccctcccggaccacgtggaagcngcactcaagatgctgcgccgcgaggcccgcctgcgccgcgagtacctgtaccgcaaggcccgggaggaggcgcagcgctcagcccaggagaggaaggagcggctgcggcgcgcgctggaagaaaaccgcctgattcccactgagttacgccgagaggctctggccttacaggggtccctggagtttgatgatgctggaggtgaaggtgtgaccagccacgtggatgatgaataccgatgggcaggagtcgaggatcccaaggttatgatcactacctcccgagaccccagttcccgcctcaagatgtttgcaaaggagctgaagctggtgttcccgggcgcccagcgaatgaaccgaggtcgacatgaagtgggggcactggtgcgagcctgcaaagccaacggcgtcaccgatctgctggtcgttcacgagcatcggggcacacctgtggggctcatcgtcagccacctgccctttggtcctactgcctacttcacgctgtgcaatgtggtcatgcggcatgacatcccagacctgggcaccatgtcggaggccaagccccacctcatcacacacggcttctcctcccgcctgggcaagcgggtctctgacatcctccgatacctatttcccgtgcccaaagatgacagccaccgggtcatcaccttcgcaaaccaggacgactacatatcattccgcaccatgtgtataagaagacagaccattgcaacacggtcattgcaacacggtctctca

SEQ ID NO: 369309 - DNA, 2875 bp, Homo sapiens
tttaagggcaagcgcccttagagaagcagcacggaagcaaccaatcaactggtttctccaattagcccccaagtggatcagcctgctgaactgtcggctagggttataggtggttctgagtccttccggaagctgccgaatcttagaagtcgcgccactgttgtggcgatggaagaaggcgaagctctacagaaaccattttggttgagggaagagtggttttaaagttaatttggaaaggagccggcaagcaaccttcagtcggtgtgcggtttttacagttgaactgtttccagccgctaattatgattgttttagcggttcgtcatctgaaaactgcattctgcacggcggtggtggggggaggacgaggatggagaagcctgggcggacatatttattagctgcggtcctaagtcacgtgtgacattctgtatccagtctatcggttatcccaaggagaacgccctgccggaatggccaatcgccttgagatgtccccgccctattcgccatcttaacatagggcattccccacagctgcaggcaccagtgaagcgtctaagggaccatcttggttgagggcggaagtgaggactgtgtcgcgctggaggagcccacagattctcccggacccacgtggaagcggcactcaagatgctgcgccgcgaggcccgcctgcgccgcgagtacctgtaccgcaaggcccgggaggaggcgcagcgctcagcccaggagaggaaggagcggctgcggcgcgcgctggaagaaaaccgcctgattcccactgagttacgccgagaggctctggccttacaggggtccctggagtttgatgatgctggaggtgaaggtgtgaccagccacgtggatgatgaataccgatgggcaggagtcgaggatcccaaggttatgatcactacctcccgagaccccagttcccgcctcaagatgtttgcaaaggagctgaagctggtgttcccgggcgcccagcgaatgaaccgaggtcgacatgaagtgggggcactggtgcgagcctgcaaagccaacggcgtcaccgatctgctggtcgttcacgagcatcggggcacacctgtggggctcatcgtcagccacctgccctttggtcctactgcctacttcacgctgtgcaatgtggtcatgcggcatgacatcccagacctgggcaccatgtcggaggccaagccccacctcatcacacacggcttctcctcccgcctgggcaagcgggtctctgacatcctccgatacctatttcccgtgcccaaagatgacagccaccgggtcatcaccttcgcaaaccaggacgactacatatcattccggcaccatgtgtataagaagacagaccaccgcaacgtggagctcactgaggtcgggccccgctttgagctgaagctgtacatgatccgtctgggcacgctggagcaggaggccacagcagacgtggagtggcgctggcacccttacaccaataccgcacgcaagagagtcttcctgagcaccgagtgagcacactcaccactcagtcaggacatggacttggaactcaggatggggctgtcatagacagacccaccagtaggaactgtcacagaatggcctgctgaactgggatgtggaactgtggcgggtggagaggtctgaataaaccgtctgtgtcatggccccgcctgcctctgagtggtcaggccaagtctgcagggcaaagcccatgggatccctttgggtggggacctgatggctgtgggacgtgcttgggcctggagtcagtgtgggggttaacagagagagagatttgatgctaacgtcccctcaagagtgagggtcatatgagctcttcagcaggcagatgtgggtagcagggccagcctgtgtcaggggcagcccaccaagttaactcactgagtggaagccgccagtgtgccaacgcggaggggacaggccacacccagtgctcagcagctgattcctcatgtaagtggcatcatgtggtatttgttttgtgtctggcttatttctattaacataatgttctccaggttcctccatgttattgcaaatgataggatttctttccttgtaaaaaataacatgccacattttcttaccaatccgtccaccaatagacacttaggtcgttttcatagtttggcagttgtggaaatgctgcagtaaacatgggagtatagctatcttttgaagataatgatttcatctcttttttatatgtatacccagaagtgggattgctgcatcaaatggtggttctatttttaattttttgaggaaccgccatactgttttccataaaggctgtactaatttccattctcaccaacagttcactagggttcccttttctccacattgttgccaacattctttatcttgtgttttttaataacagctatcctaacaggtatgaggtgatctctctcattgcggttttgatttgcatttccctaacggttggtgatactgagcatttttgcatacaccgggtcatttgttctttgttgttgacttgagtcccttatatagtttggatactgctgtggcctgaatgtttgtgtcccccaaaaattcgtatattgaactctcatccctaaggtcaacagtttagggaagcgattaggtcctgaggactctgccctcttgcatagaattagtgctcttataaaagatgcccgagggagctcttttgcccctcctgccatgtgaggacacagctagaagctaccatctgtgaaccaggaagcccccctcaccagacactgaatctgctggagccaccatcttggacttcccagcctccagagctgtgagaaataaatgcctgttgtttaagcta

SEQ ID NO: 369310 - DNA, 2351 bp, Homo sapiens
  misc_feature (40)..(40): n is a, c, g, or t
  misc_feature (58)..(58): n is a, c, g, or t
gaaaaaaaaaaaaagagaaaaggaaaacaggaaacaatangctagtgcgaggccgggnggtaggaagtgaggactgtgtcgcgctggaggagcccacagattctcccggacccacgtggaagcggcactcaagatgctgcgccgcgaggcccgcctgcgccgcgagtacctgtaccgcaaggcccgggaggaggcgcagcgctcagcccaggagaggaaggagcggctgcggcgcgcgctggaagaaaaccgcctgattcccactgagttacgccgagaggctctggccttacaggggtccctggagtttgatgatgctggaggtgaaggtgtgaccagccacgtggatgatgaataccgatgggcaggagtcgaggatcccaaggttatgatcactacctcccgagaccccagttcccgcctcaagatgtttgcaaaggagctgaagctggtgttcccgggcgcccagcgaatgaaccgaggtcgacatgaagtgggggcactggtgcgagcctgcaaagccaacggcgtcaccgatctgctggtcgttcacgagcatcggggcacacctgtggggctcatcgtcagccacctgccctttggtcctactgcctacttcacgctgtgcaatgtggtcatgcggcatgacatcccagacctgggcaccatgtcggaggccaagccccacctcatcacacacggcttctcctcccgcctgggcaagcgggtctctgacatcctccgatacctatttcccgtgcccaaagatgacagccaccgggtcatcaccttcgcaaaccaggacgactacatatcattccggcaccatgtgtataagaagacagaccaccgcaacgtggagctcactgaggtcgggccccgctttgagctgaagctgtacatgatccgtctgggcacgctggagcaggaggccacagcagacgtggagtggcgctggcacccttacaccaataccgcacgcaagagagtcttcctgagcaccgagtgagcacactcaccactcagtcaggacatggacttggaactcaggatggggctgtcatagacagacccaccagtaggaactgtcacagaatggcctgctgaactgggatgtggaactgtggcgggtggagaggtctgaataaaccgtctgtgtcatggccccgcctgcctctgagtggtcaggccaagtctgcagggcaaagcccatgggatccctttgggtggggacctgatggctgtgggacgtgcttgggcctggagtcagtgtgggggttaacagagagagagatttgatgctaacgtcccctcaagagtgagggtcatatgagctcttcagcaggcagatgtgggtagcagggccagcctgtgtcaggggcagcccaccaagttaactcactgagtggaagccgccagtgtgccaacgcggaggggacaggccacacccagtgctcagcagctgattcctcatgtaagtggcatcatgtggtatttgttttgtgtctggcttatttctattaacataatgttctccaggttcctccatgttattgcaaatgataggatttctttccttgtaaaaaataacatgccacattttcttaccaatccgtccaccaatagacacttaggtcgttttcatagtttggcagttgtggaaatgctgcagtaaacatgggagtatagctatcttttgaagataatgatttcatctcttttttatatgtatacccagaagtgggattgctgcatcaaatggtggttctatttttaattttttgaggaaccgccatactgttttccataaaggctgtactaatttccattctcaccaacagttcactagggttcccttttctccacattgttgccaacattctttatcttgtgttttttaataacagctatcctaacaggtatgaggtgatctctctcattgcggttttgatttgcatttccctaacggttggtgatactgagcatttttgcatacaccgggtcatttgttctttgttgttgacttgagtcccttatatagtttggatactgctgtggcctgaatgtttgtgtcccccaaaaattcgtatattgaactctcatccctaaggtcaacagtttagggaagcgattaggtcctgaggactctgccctcttgcatagaattagtgctcttataaaagatgcccgagggagctcttttgcccctcctgccatgtgaggacacagctagaagctaccatctgtgaaccaggaagcccccctcaccagacactgaatctgctggagccaccatcttggacttcccagcctccagagctgtgagaaataaatgcctgttgtttaagcta

SEQ ID NO: 369311 - DNA, 2180 bp, Homo sapiens
tttaagggcaagcgcccttagagaagcagcacggaagcaaccaatcaactggtttctccaattagcccccaagtggatcagcctgctgaactgtcggctagggttataggtggttctgagtccttccggaagctgccgaatcttagaagtcgcgccactgttgtggcgatggaagaaggcgaagctctacagaaaccattttggttgagggaagagtggttttaaagttaatttggaaaggagccggcaagcaaccttcagtcggtgtgcggtttttacagttgaactgtttccagccgctaattatgattgttttagcggttcgtcatctgaaaactgcattctgcacggcggtggtggggggaggacgaggatggagaagcctgggcggacatatttattagctgcggtcctaagtcacgtgtgacattctgtatccagtctatcggttatcccaaggagaacgccctgccggaatggccaatcgccttgagatgtccccgccctattcgccatcttaacatagggcattccccacagctgcaggcaccagtgaagcgtctaagggaccatcttggttgagggcggaagtgaggactgtgtcgcgctggaggagcccacagattctcccggacccacgtggaagcggcactcaagatgctgcgccgcgaggcccgcctgcgccgcgagtacctgtaccgcaaggcccgggaggaggcgcagcgctcagcccaggagaggaaggagcggctgcggcgcgcgctggaagaaaaccgcctgattcccactgagttacgccgagaggctctggccttacaggggtccctggagtttgatgatgctggaggtgaaggtgtgaccagccacgtggatgatgaataccgatgggcaggagtcgaggatcccaaggttatgatcactacctcccgagaccccagttcccgcctcaagatgtttgcaaaggagctgaagctggtgttcccgggcgcccagcgaatgaaccgaggtcgacatgaagtgggggcactggtgcgagcctgcaaagccaacggcgtcaccgatctgctggtcgttcacgagcatcggggcacacctgtggggctcatcgtcagccacctgccctttggtcctactgcctacttcacgctgtgcaatgtggtcatgcggcatgacatcccagacctgggcaccatgtcggaggccaagccccacctcatcacacacggcttctcctcccgcctgggcaagcgggtctctgacatcctccgatacctatttcccgtgcccaaagatgacagccaccgggtcatcaccttcgcaaaccaggacgactacatatcattccggcaccatgtgtataagaagacagaccaccgcaacgtggagctcactgaggtcgggccccgctttgagctgaagctgtacatgatccgtctgggcacgctggagcaggaggccacagcagacgtggagtggcgctggcacccttacaccaataccgcacgcaagagagtcttcctgagcaccgagtgagcacactcaccactcagtcaggacatggacttggaactcaggatggggctgtcatagacagacccaccagtaggaactgtcacagaatggcctgctgaactgggatgtggaactgtggcgggtggagaggtctgaataaaccgtctgtgtcatggccccgcctgcctctgagtggtcaggccaagtctgcagggcaaagcccatgggatccctttgggtggggacctgatggctgtgggacgtgcttgggcctggagtcagtgtgggggttaacagagagagagatttgatgctaacgtcccctcaagagtgagggtcatatgagctcttcagcaggcagatgtgggtagcagggccagcctgtgtcaggggcagcccaccaagttaactcactgagtggaagccgccagtgtgccaacgcggaggggacaggccacacccagtgctcagcagctgattcctcatgtaagtggcatcatgtggtatttgttttgtgtctggcttcttatacacatggtgccggaatgatatgtagtcgtcctggtttgcgaaggtgatgacccggtggctatcatctttggcacgggaaataggtatcggaggatgtcagagacccgctgcccagcgggaggagaaccatccatttt

SEQ ID NO: 369312 - DNA, 2902 bp, Homo sapiens
tttaagggcaagcgcccttagagaagcagcacggaagcaaccaatcaactggtttctccaattagcccccaagtggatcagcctgctgaactgtcggctagggttataggtggttctgagtccttccggaagctgccgaatcttagaagtcgcgccactgttgtggcgatggaagaaggcgaagctctacagaaaccattttggttgagggaagagtggttttaaagttaatttggaaaggagccggcaagcaaccttcagtcggtgtgcggtttttacagttgaactgtttccagccgctaattatgattgttttagcggttcgtcatctgaaaactgcattctgcacggcggtggtggggggaggacgaggatggagaagcctgggcggacatatttattagctgcggtcctaagtcacgtgtgacattctgtatccagtctatcggttatcccaaggagaacgccctgccggaatggccaatcgccttgagatgtccccgccctattcgccatcttaacatagggcattccccacagctgcaggcaccagtgaagcgtctaagggaccatcttggttgagggcggaagtgaggactgtgtcgcgctggaggagcccacagattctcccggacccacgtggaagcggcactcaagatggtaggagaatgagctcctgtttcggagctgcgccgcgaggcccgcctgcgccgcgagtacctgtaccgcaaggcccgggaggaggcgcagcgctcagcccaggagaggaaggagcggctgcggcgcgcgctggaagaaaaccgcctgattcccactgagttacgccgagaggctctggccttacaggggtccctggagtttgatgatgctggaggtgaaggtgtgaccagccacgtggatgatgaataccgatgggcaggagtcgaggatcccaaggttatgatcactacctcccgagaccccagttcccgcctcaagatgtttgcaaaggagctgaagctggtgttcccgggcgcccagcgaatgaaccgaggtcgacatgaagtgggggcactggtgcgagcctgcaaagccaacggcgtcaccgatctgctggtcgttcacgagcatcggggcacacctgtggggctcatcgtcagccacctgccctttggtcctactgcctacttcacgctgtgcaatgtggtcatgcggcatgacatcccagacctgggcaccatgtcggaggccaagccccacctcatcacacacggcttctcctcccgcctgggcaagcgggtctctgacatcctccgatacctatttcccgtgcccaaagatgacagccaccgggtcatcaccttcgcaaaccaggacgactacatatcattccggcaccatgtgtataagaagacagaccaccgcaacgtggagctcactgaggtcgggccccgctttgagctgaagctgtacatgatccgtctgggcacgctggagcaggaggccacagcagacgtggagtggcgctggcacccttacaccaataccgcacgcaagagagtcttcctgagcaccgagtgagcacactcaccactcagtcaggacatggacttggaactcaggatggggctgtcatagacagacccaccagtaggaactgtcacagaatggcctgctgaactgggatgtggaactgtggcgggtggagaggtctgaataaaccgtctgtgtcatggccccgcctgcctctgagtggtcaggccaagtctgcagggcaaagcccatgggatccctttgggtggggacctgatggctgtgggacgtgcttgggcctggagtcagtgtgggggttaacagagagagagatttgatgctaacgtcccctcaagagtgagggtcatatgagctcttcagcaggcagatgtgggtagcagggccagcctgtgtcaggggcagcccaccaagttaactcactgagtggaagccgccagtgtgccaacgcggaggggacaggccacacccagtgctcagcagctgattcctcatgtaagtggcatcatgtggtatttgttttgtgtctggcttatttctattaacataatgttctccaggttcctccatgttattgcaaatgataggatttctttccttgtaaaaaataacatgccacattttcttaccaatccgtccaccaatagacacttaggtcgttttcatagtttggcagttgtggaaatgctgcagtaaacatgggagtatagctatcttttgaagataatgatttcatctcttttttatatgtatacccagaagtgggattgctgcatcaaatggtggttctatttttaattttttgaggaaccgccatactgttttccataaaggctgtactaatttccattctcaccaacagttcactagggttcccttttctccacattgttgccaacattctttatcttgtgttttttaataacagctatcctaacaggtatgaggtgatctctctcattgcggttttgatttgcatttccctaacggttggtgatactgagcatttttgcatacaccgggtcatttgttctttgttgttgacttgagtcccttatatagtttggatactgctgtggcctgaatgtttgtgtcccccaaaaattcgtatattgaactctcatccctaaggtcaacagtttagggaagcgattaggtcctgaggactctgccctcttgcatagaattagtgctcttataaaagatgcccgagggagctcttttgcccctcctgccatgtgaggacacagctagaagctaccatctgtgaaccaggaagcccccctcaccagacactgaatctgctggagccaccatcttggacttcccagcctccagagctgtgagaaataaatgcctgttgtttaagcta

SEQ ID NO: 369313 - DNA, 2345 bp, Homo sapiens
tttaagggcaagcgcccttagagaagcagcacggaagcaaccaatcaactggtttctccaattagcccccaagtggatcagcctgctgaactgtcggctagggttataggtggttctgagtccttccggaagctgccgaatcttagaagtcgcgccactgttgtggcgatggaagaaggcgaagctctacagaaaccattttggttgagggaagagtggttttaaagttaatttggaaaggagccggcaagcaaccttcagtcggtgtgcggtttttacagttgaactgtttccagccgctaattatgattgttttagcggttcgtcatctgaaaactgcattctgcacggcggtggtggggggaggacgaggatggagaagcctgggcggacatatttattagctgcggtcctaagtcacgtgtgacattctgtatccagtctatcggttatcccaaggagaacgccctgccggaatggccaatcgccttgagatgtccccgccctattcgccatcttaacatagggcattccccacagctgcaggcaccagtgaagcgtctaagggaccatcttggttgagggcggaagtgaggactgtgtcgcgctggaggagcccacagattctcccggacccacgtggaagcggcactcaagatgctgcgccgcgaggcccgcctgcgccgcgagtacctgtaccgcaaggcccgggaggaggcgcagcgctcagcccaggagaggaaggagcggctgcggcgcgcgctggaagaaaaccgcctgattcccactgagttacgccgagaggctctggccttacaggggtccctggagtttgatgatgctggaggtgaaggtgtgaccagccacgtggatgatgaataccgatgggcaggagtcgaggatcccaaggttatgatcactacctcccgagaccccagttcccgcctcaagatgtttgcaaaggagctgaagctggtgttcccgggcgcccagcgaatgaaccgaggtcgacatgaagtgggggcactggtgcgagcctgcaaagccaacggcgtcaccgatctgctggtcgttcacgagcatcggggcacacctgtggggctcatcgtcagccacctgccctttggtcctactgcctacttcacgctgtgcaatgtggtcatgcggcatgacatcccagacctgggcaccatgtcggaggccaagccccacctcatcacacacggcttctcctcccgcctgggcaagcgggtctctgacatcctccgatacctatttcccgtgcccaaagatgacagccaccgggtcatcaccttcgcaaaccaggacgactacatatcattccggcaccatgtgtataagaagacagaccaccgcaacgtggagctcactgaggtcgggccccgctttgagctgaagctgtacatgatccgtctgggcacgctggagcaggaggccacagcagacgtggagtggcgctggcacccttacaccaataccgcacgcaacagctgattcctcatgtaagtggcatcatgtggtatttgttttgtgtctggcttatttctattaacataatgttctccaggttcctccatgttattgcaaatgataggatttctttccttgtcgttttcatagtttggcagttgtggaaatgctgcagtaaacatgggagtatagctatcttttgaagataatgatttcatctcttttttatatgtatacccagaagtgggattgctgcatcaaatggtggttctatttttaattttttgaggaaccgccatactgttttccataaaggctgtactaatttccattctcaccaacagttcactagggttcccttttctccacattgttgccaacattctttatcttgtgttttttaataacagctatcctaacaggtatgaggtgatctctctcattgcggttttgatttgcatttccctaacggttggtgatactgagcatttttgcatacaccgggtcatttgttctttgttgttgacttgagtcccttatatagtttggatactgctgtggcctgaatgtttgtgtcccccaaaaattcgtatattgaactctcatccctaaggtcaacagtttagggaagcgattaggtcctgaggactctgccctcttgcatagaattagtgctcttataaaagatgcccgagggagctcttttgcccctcctgccatgtgaggacacagctagaagctaccatctgtgaaccaggaagcccccctcaccagacactgaatctgctggagccaccatcttggacttcccagcctccagagctgtgagaaataaatgcctgttgtttaagcta

SEQ ID NO: 369314 - DNA, 2311 bp, Homo sapiens
  misc_feature (84)..(84): n is a, c, g, or t
tttatatacagcttgtttgaacagctcaggatcatcctcctctacaatgtaggttttccttccctcccggaccacgtggaagcngcactcaagatgctgcgccgcgaggcccgcctgcgccgcgagtacctgtaccgcaaggcccgggaggaggcgcagcgctcagcccaggagaggaaggagcggctgcggcgcgcgctggaagaaaaccgcctgattcccactgagttacgccgagaggctctggccttacaggggtccctggagtttgatgatgctggaggtgaaggtgtgaccagccacgtggatgatgaataccgatgggcaggagtcgaggatcccaaggttatgatcactacctcccgagaccccagttcccgcctcaagatgtttgcaaaggagctgaagctggtgttcccgggcgcccagcgaatgaaccgaggtcgacatgaagtgggggcactggtgcgagcctgcaaagccaacggcgtcaccgatctgctggtcgttcacgagcatcggggcacacctgtggggctcatcgtcagccacctgccctttggtcctactgcctacttcacgctgtgcaatgtggtcatgcggcatgacatcccagacctgggcaccatgtcggaggccaagccccacctcatcacacacggcttctcctcccgcctgggcaagcgggtctctgacatcctccgatacctatttcccgtgcccaaagatgacagccaccgggtcatcaccttcgcaaaccaggacgactacatatcattccggcaccatgtgtataagaagacagaccaccgcaacgtggagctcactgaggtcgggccccgctttgagctgaagctgtacatgatccgtctgggcacgctggagcaggaggccacagcagacgtggagtggcgctggcacccttacaccaataccgcacgcaagagagtcttcctgagcaccgagtgagcacactcaccactcagtcaggacatggacttggaactcaggatggggctgtcatagacagacccaccagtaggaactgtcacagaatggcctgctgaactgggatgtggaactgtggcgggtggagaggtctgaataaaccgtctgtgtcatggccccgcctgcctctgagtggtcaggccaagtctgcagggcaaagcccatgggatccctttgggtggggacctgatggctgtgggacgtgcttgggcctggagtcagtgtgggggttaacagagagagagatttgatgctaacgtcccctcaagagtgagggtcatatgagctcttcagcaggcagatgtgggtagcagggccagcctgtgtcaggggcagcccaccaagttaactcactgagtggaagccgccagtgtgccaacgcggaggggacaggccacacccagtgctcagcagctgattcctcatgtaagtggcatcatgtggtatttgttttgtgtctggcttatttctattaacataatgttctccaggttcctccatgttattgcaaatgataggatttctttccttgtaaaaaataacatgccacattttcttaccaatccgtccaccaatagacacttaggtcgttttcatagtttggcagttgtggaaatgctgcagtaaacatgggagtatagctatcttttgaagataatgatttcatctcttttttatatgtatacccagaagtgggattgctgcatcaaatggtggttctatttttaattttttgaggaaccgccatactgttttccataaaggctgtactaatttccattctcaccaacagttcactagggttcccttttctccacattgttgccaacattctttatcttgtgttttttaataacagctatcctaacaggtatgaggtgatctctctcattgcggttttgatttgcatttccctaacggttggtgatactgagcatttttgcatacaccgggtcatttgttctttgttgttgacttgagtcccttatatagtttggatactgctgtggcctgaatgtttgtgtcccccaaaaattcgtatattgaactctcatccctaaggtcaacagtttagggaagcgattaggtcctgaggactctgccctcttgcatagaattagtgctcttataaaagatgcccgagggagctcttttgcccctcctgccatgtgaggacacagctagaagctaccatctgtgaaccaggaagcccccctcaccagacactgaatctgctggagccaccatcttggacttcccagcctccagagctgtgagaaataaatgcctgttgtttaagcta

SEQ ID NO: 369315 - DNA, 2187 bp, Homo sapiens
acaatcggtctaggtcgagctgggttgaggcgcagcgctcagcccaggagaggaaggagcggctgcggcgcgcgctggaagaaaaccgcctgattcccactgagttacgccgagaggctctggccttacaggggtccctggagtttgatgatgctggaggtgaaggtgtgaccagccacgtggatgatgaataccgatgggcaggagtcgaggatcccaaggttatgatcactacctcccgagaccccagttcccgcctcaagatgtttgcaaaggagctgaagctggtgttcccgggcgcccagcgaatgaaccgaggtcgacatgaagtgggggcactggtgcgagcctgcaaagccaacggcgtcaccgatctgctggtcgttcacgagcatcggggcacacctgtggggctcatcgtcagccacctgccctttggtcctactgcctacttcacgctgtgcaatgtggtcatgcggcatgacatcccagacctgggcaccatgtcggaggccaagccccacctcatcacacacggcttctcctcccgcctgggcaagcgggtctctgacatcctccgatacctatttcccgtgcccaaagatgacagccaccgggtcatcaccttcgcaaaccaggacgactacatatcattccggcaccatgtgtataagaagacagaccaccgcaacgtggagctcactgaggtcgggccccgctttgagctgaagctgtacatgatccgtctgggcacgctggagcaggaggccacagcagacgtggagtggcgctggcacccttacaccaataccgcacgcaagagagtcttcctgagcaccgagtgagcacactcaccactcagtcaggacatggacttggaactcaggatggggctgtcatagacagacccaccagtaggaactgtcacagaatggcctgctgaactgggatgtggaactgtggcgggtggagaggtctgaataaaccgtctgtgtcatggccccgcctgcctctgagtggtcaggccaagtctgcagggcaaagcccatgggatccctttgggtggggacctgatggctgtgggacgtgcttgggcctggagtcagtgtgggggttaacagagagagagatttgatgctaacgtcccctcaagagtgagggtcatatgagctcttcagcaggcagatgtgggtagcagggccagcctgtgtcaggggcagcccaccaagttaactcactgagtggaagccgccagtgtgccaacgcggaggggacaggccacacccagtgctcagcagctgattcctcatgtaagtggcatcatgtggtatttgttttgtgtctggcttatttctattaacataatgttctccaggttcctccatgttattgcaaatgataggatttctttccttgtaaaaaataacatgccacattttcttaccaatccgtccaccaatagacacttaggtcgttttcatagtttggcagttgtggaaatgctgcagtaaacatgggagtatagctatcttttgaagataatgatttcatctcttttttatatgtatacccagaagtgggattgctgcatcaaatggtggttctatttttaattttttgaggaaccgccatactgttttccataaaggctgtactaatttccattctcaccaacagttcactagggttcccttttctccacattgttgccaacattctttatcttgtgttttttaataacagctatcctaacaggtatgaggtgatctctctcattgcggttttgatttgcatttccctaacggttggtgatactgagcatttttgcatacaccgggtcatttgttctttgttgttgacttgagtcccttatatagtttggatactgctgtggcctgaatgtttgtgtcccccaaaaattcgtatattgaactctcatccctaaggtcaacagtttagggaagcgattaggtcctgaggactctgccctcttgcatagaattagtgctcttataaaagatgcccgagggagctcttttgcccctcctgccatgtgaggacacagctagaagctaccatctgtgaaccaggaagcccccctcaccagacactgaatctgctggagccaccatcttggacttcccagcctccagagctgtgagaaataaatgcctgttgtttaagcta

SEQ ID NO: 369316 - DNA, 2218 bp, Homo sapiens
  misc_feature (40)..(40): n is a, c, g, or t
  misc_feature (58)..(58): n is a, c, g, or t
gaaaaaaaaaaaaagagaaaaggaaaacaggaaacaatangctagtgcgaggccgggnggtaagggcggctcaccagccgagaggatagagcggtgcggcgcgcgctggaagaaaaccgcctgattcccactgagttacgccgagaggctctggccttacaggggtccctggagtttgatgatgctggaggtgaaggtgtgaccagccacgtggatgatgaataccgatgggcaggagtcgaggatcccaaggttatgatcactacctcccgagaccccagttcccgcctcaagatgtttgcaaaggagctgaagctggtgttcccgggcgcccagcgaatgaaccgaggtcgacatgaagtgggggcactggtgcgagcctgcaaagccaacggcgtcaccgatctgctggtcgttcacgagcatcggggcacacctgtggggctcatcgtcagccacctgccctttggtcctactgcctacttcacgctgtgcaatgtggtcatgcggcatgacatcccagacctgggcaccatgtcggaggccaagccccacctcatcacacacggcttctcctcccgcctgggcaagcgggtctctgacatcctccgatacctatttcccgtgcccaaagatgacagccaccgggtcatcaccttcgcaaaccaggacgactacatatcattccggcaccatgtgtataagaagacagaccaccgcaacgtggagctcactgaggtcgggccccgctttgagctgaagctgtacatgatccgtctgggcacgctggagcaggaggccacagcagacgtggagtggcgctggcacccttacaccaataccgcacgcaagagagtcttcctgagcaccgagtgagcacactcaccactcagtcaggacatggacttggaactcaggatggggctgtcatagacagacccaccagtaggaactgtcacagaatggcctgctgaactgggatgtggaactgtggcgggtggagaggtctgaataaaccgtctgtgtcatggccccgcctgcctctgagtggtcaggccaagtctgcagggcaaagcccatgggatccctttgggtggggacctgatggctgtgggacgtgcttgggcctggagtcagtgtgggggttaacagagagagagatttgatgctaacgtcccctcaagagtgagggtcatatgagctcttcagcaggcagatgtgggtagcagggccagcctgtgtcaggggcagcccaccaagttaactcactgagtggaagccgccagtgtgccaacgcggaggggacaggccacacccagtgctcagcagctgattcctcatgtaagtggcatcatgtggtatttgttttgtgtctggcttatttctattaacataatgttctccaggttcctccatgttattgcaaatgataggatttctttccttgtaaaaaataacatgccacattttcttaccaatccgtccaccaatagacacttaggtcgttttcatagtttggcagttgtggaaatgctgcagtaaacatgggagtatagctatcttttgaagataatgatttcatctcttttttatatgtatacccagaagtgggattgctgcatcaaatggtggttctatttttaattttttgaggaaccgccatactgttttccataaaggctgtactaatttccattctcaccaacagttcactagggttcccttttctccacattgttgccaacattctttatcttgtgttttttaataacagctatcctaacaggtatgaggtgatctctctcattgcggttttgatttgcatttccctaacggttggtgatactgagcatttttgcatacaccgggtcatttgttctttgttgttgacttgagtcccttatatagtttggatactgctgtggcctgaatgtttgtgtcccccaaaaattcgtatattgaactctcatccctaaggtcaacagtttagggaagcgattaggtcctgaggactctgccctcttgcatagaattagtgctcttataaaagatgcccgagggagctcttttgcccctcctgccatgtgaggacacagctagaagctaccatctgtgaaccaggaagcccccctcaccagacactgaatctgctggagccaccatcttggacttcccagcctccagagctgtgagaaataaatgcctgttgtttaagcta

SEQ ID NO: 369317 - DNA, 2983 bp, Homo sapiens
tttaagggcaagcgcccttagagaagcagcacggaagcaaccaatcaactggtttctccaattagcccccaagtggatcagcctgctgaactgtcggctagggttataggtggttctgagtccttccggaagctgccgaatcttagaagtcgcgccactgttgtggcgatggaagaaggcgaagctctacagaaaccattttggttgagggaagagtggttttaaagttaatttggaaaggagccggcaagcaaccttcagtcggtgtgcggtttttacagttgaactgtttccagccgctaattatgattgttttagcggttcgtcatctgaaaactgcattctgcacggcggtggtggggggaggacgaggatggagaagcctgggcggacatatttattagctgcggtcctaagtcacgtgtgacattctgtatccagtctatcggttatcccaaggagaacgccctgccggaatggccaatcgccttgagatgtccccgccctattcgccatcttaacatagggcattccccacagctgcaggcaccagtgaagcgtctaagggaccatcttggttgagggcggaagtgaggactgtgtcgcgctggaggagcccacagattctcccggacccacgtggaagcggcactcaagatggtaggagaatgagctcctgtttcggagctgcgccgcgaggcccgcctgcgccgcgagtacctgtaccgcaaggcccgggaggaggcgcagcgctcagcccaggagaggaaggagcggctgcggcgcgcgctggaagaaaaccgcctgattcccactgagttacgccgagaggctctggccttacaggggtccctggagtttgatgatgctggaggtgaaggtgtgaccagccacgtggatgatgaataccgatgggcaggagtcgaggatcccaaggttatgatcactacctcccgagaccccagttcccgcctcaagatgtttgcaaaggtactggtgagcagggagtgagggagagacacccaggacacacagccccagtcctgactgtacactgccatccacgcccaggagctgaagctggtgttcccgggcgcccagcgaatgaaccgaggtcgacatgaagtgggggcactggtgcgagcctgcaaagccaacggcgtcaccgatctgctggtcgttcacgagcatcggggcacacctgtggggctcatcgtcagccacctgccctttggtcctactgcctacttcacgctgtgcaatgtggtcatgcggcatgacatcccagacctgggcaccatgtcggaggccaagccccacctcatcacacacggcttctcctcccgcctgggcaagcgggtctctgacatcctccgatacctatttcccgtgcccaaagatgacagccaccgggtcatcaccttcgcaaaccaggacgactacatatcattccggcaccatgtgtataagaagacagaccaccgcaacgtggagctcactgaggtcgggccccgctttgagctgaagctgtacatgatccgtctgggcacgctggagcaggaggccacagcagacgtggagtggcgctggcacccttacaccaataccgcacgcaagagagtcttcctgagcaccgagtgagcacactcaccactcagtcaggacatggacttggaactcaggatggggctgtcatagacagacccaccagtaggaactgtcacagaatggcctgctgaactgggatgtggaactgtggcgggtggagaggtctgaataaaccgtctgtgtcatggccccgcctgcctctgagtggtcaggccaagtctgcagggcaaagcccatgggatccctttgggtggggacctgatggctgtgggacgtgcttgggcctggagtcagtgtgggggttaacagagagagagatttgatgctaacgtcccctcaagagtgagggtcatatgagctcttcagcaggcagatgtgggtagcagggccagcctgtgtcaggggcagcccaccaagttaactcactgagtggaagccgccagtgtgccaacgcggaggggacaggccacacccagtgctcagcagctgattcctcatgtaagtggcatcatgtggtatttgttttgtgtctggcttatttctattaacataatgttctccaggttcctccatgttattgcaaatgataggatttctttccttgtaaaaaataacatgccacattttcttaccaatccgtccaccaatagacacttaggtcgttttcatagtttggcagttgtggaaatgctgcagtaaacatgggagtatagctatcttttgaagataatgatttcatctcttttttatatgtatacccagaagtgggattgctgcatcaaatggtggttctatttttaattttttgaggaaccgccatactgttttccataaaggctgtactaatttccattctcaccaacagttcactagggttcccttttctccacattgttgccaacattctttatcttgtgttttttaataacagctatcctaacaggtatgaggtgatctctctcattgcggttttgatttgcatttccctaacggttggtgatactgagcatttttgcatacaccgggtcatttgttctttgttgttgacttgagtcccttatatagtttggatactgctgtggcctgaatgtttgtgtcccccaaaaattcgtatattgaactctcatccctaaggtcaacagtttagggaagcgattaggtcctgaggactctgccctcttgcatagaattagtgctcttataaaagatgcccgagggagctcttttgcccctcctgccatgtgaggacacagctagaagctaccatctgtgaaccaggaagcccccctcaccagacactgaatctgctggagccaccatcttggacttcccagcctccagagctgtgagaaataaatgcctgttgtttaagcta

SEQ ID NO: 369318 - DNA, 1697 bp, Homo sapiens
ggccttcaggctggggctgcgggccaggccaggcatttgccactctgtttccctctctttccttgtgccccaggtctctgacatcctccgatacctatttcccgtgcccaaagatgacagccaccgggtcatcaccttcgcaaaccaggacgactacatatcattccggcaccatgtgtataagaagacagaccaccgcaacgtggagctcactgaggtcgggccccgctttgagctgaagctgtacatgatccgtctgggcacgctggagcaggaggccacagcagacgtggagtggcgctggcacccttacaccaataccgcacgcaagagagtcttcctgagcaccgagtgagcacactcaccactcagtcaggacatggacttggaactcaggatggggctgtcatagacagacccaccagtaggaactgtcacagaatggcctgctgaactgggatgtggaactgtggcgggtggagaggtctgaataaaccgtctgtgtcatggccccgcctgcctctgagtggtcaggccaagtctgcagggcaaagcccatgggatccctttgggtggggacctgatggctgtgggacgtgcttgggcctggagtcagtgtgggggttaacagagagagagatttgatgctaacgtcccctcaagagtgagggtcatatgagctcttcagcaggcagatgtgggtagcagggccagcctgtgtcaggggcagcccaccaagttaactcactgagtggaagccgccagtgtgccaacgcggaggggacaggccacacccagtgctcagcagctgattcctcatgtaagtggcatcatgtggtatttgttttgtgtctggcttatttctattaacataatgttctccaggttcctccatgttattgcaaatgataggatttctttccttgtaaaaaataacatgccacattttcttaccaatccgtccaccaatagacacttaggtcgttttcatagtttggcagttgtggaaatgctgcagtaaacatgggagtatagctatcttttgaagataatgatttcatctcttttttatatgtatacccagaagtgggattgctgcatcaaatggtggttctatttttaattttttgaggaaccgccatactgttttccataaaggctgtactaatttccattctcaccaacagttcactagggttcccttttctccacattgttgccaacattctttatcttgtgttttttaataacagctatcctaacaggtatgaggtgatctctctcattgcggttttgatttgcatttccctaacggttggtgatactgagcatttttgcatacaccgggtcatttgttctttgttgttgacttgagtcccttatatagtttggatactgctgtggcctgaatgtttgtgtcccccaaaaattcgtatattgaactctcatccctaaggtcaacagtttagggaagcgattaggtcctgaggactctgccctcttgcatagaattagtgctcttataaaagatgcccgagggagctcttttgcccctcctgccatgtgaggacacagctagaagctaccatctgtgaaccaggaagcccccctcaccagacactgaatctgctggagccaccatcttggacttcccagcctccagagctgtgagaaataaatgcctgttgtttaagcta

SEQ ID NO: 369319 - DNA, 1404 bp, Homo sapiens
tttaagggcaagcgcccttagagaagcagcacggaagcaaccaatcaactggtttctccaattagcccccaagtggatcagcctgctgaactgtcggctagggttataggtggttctgagtccttccggaagctgccgaatcttagaagtcgcgccactgttgtggcgatggaagaaggcgaagctctacagaaaccattttggttgagggaagagtggttttaaagttaatttggaaaggagccggcaagcaaccttcagtcggtgtgcggtttttacagttgaactgtttccagccgctaattatgattgttttagcggttcgtcatctgaaaactgcattctgcacggcggtggtggggggaggacgaggatggagaagcctgggcggacatatttattagctgcggtcctaagtcacgtgtgacattctgtatccagtctatcggttatcccaaggagaacgccctgccggaatggccaatcgccttgagatgtccccgccctattcgccatcttaacatagggcattccccacagctgcaggcaccagtgaagcgtctaagggaccatcttggttgagggcggaagtgaggactgtgtcgcgctggaggagcccacagattctcccggacccacgtggaagcggcactcaagatgctgcgccgcgaggcccgcctgcgccgcgagtacctgtaccgcaaggcccgggaggaggcgcagcgctcagcccaggagaggaaggagcggctgcggcgcgcgctggaagaaaaccgcctgattcccactgagttacgccgagaggctctggccttacaggggtccctggagtttgatgatgctggaggtgaaggtgtgaccagccacgtggatgatgaataccgatgggcaggagtcgaggatcccaaggttatgatcactacctcccgagaccccagttcccgcctcaagatgtttgcaaaggagctgaagctggtgttcccgggcgcccagcgaatgaaccgaggtcgacatgaagtgggggcactggtgcgagcctgcaaagccaacggcgtcaccgatctgctggtcgttcacgagcatcggggcacacctgtggggctcatcgtcagccacctgccctttggtcctactgcctacttcacgctgtgcaatgtggtcatgcggcatgacatcccagacctgggcaccatgtcggaggccaagccccacctcatcacacacggcttctcctcccgcctgggcaagcgggtctctgacatcctccgatacctatttcccgtgcccaaagatgacagccaccgggtcatcaccttcgcaaaccaggacgactacatatcattccgcaccatgtgtataagaagacagaccattgcaacacggtcattgcaacacggtctctca

SEQ ID NO: 369320 - DNA, 1381 bp, Homo sapiens
tttaagggcaagcgcccttagagaagcagcacggaagcaaccaatcaactggtttctccaattagcccccaagtggatcagcctgctgaactgtcggctagggttataggtggttctgagtccttccggaagctgccgaatcttagaagtcgcgccactgttgtggcgatggaagaaggcgaagctctacagaaaccattttggttgagggaagagtggttttaaagttaatttggaaaggagccggcaagcaaccttcagtcggtgtgcggtttttacagttgaactgtttccagccgctaattatgattgttttagcggttcgtcatctgaaaactgcattctgcacggcggtggtggggggaggacgaggatggagaagcctgggcggacatatttattagctgcggtcctaagtcacgtgtgacattctgtatccagtctatcggttatcccaaggagaacgccctgccggaatggccaatcgccttgagatgtccccgccctattcgccatcttaacatagggcattccccacagctgcaggcaccagtgaagcgtctaagggaccatcttggttgagggcggaagtgaggactgtgtcgcgctggaggagcccacagattctcccggacccacgtggaagcggcactcaagatggtaggagaatgagctcctgtttcggagctgcgccgcgaggcccgcctgcgccgcgagtacctgtaccgcaaggcccgggaggaggcgcagcgctcagcccaggagaggaaggagcggctgcggcgcgcgctggaagaaaaccgcctgattcccactgagttacgccgagaggctctggccttacaggggtccctggagtttgatgatgctggaggtgaaggtgtgaccagccacgtggatgatgaataccgatgggcaggagtcgaggatcccaaggttatgatcactacctcccgagaccccagttcccgcctcaagatgtttgcaaaggtactggtgagcagggagtgagggagagacacccaggacacacagccccagtcctgactgtacactgccatccacgcccaggagctgaagctggtgttcccgggcgcccagcgaatgaaccgaggtcgacatgaagtgggggcactggtgcgagcctgcaaagccaacggcgtcaccgatctgctggtcgttcacgagcatcggggcacacctgtggggctcatcgtcagccacctgccctttggtcctactgcctacttcacgctgtgcaatgtggtcatgcggcatgacatcccagacctgggcaccatgtcggaggccaagccccctcataaccgggttttctccggctgggcagcggttccgacatcccggatacattccgggcaga

SEQ ID NO: 369321 - DNA, 1689 bp, Homo sapiens
tttaagggcaagcgcccttagagaagcagcacggaagcaaccaatcaactggtttctccaattagcccccaagtggatcagcctgctgaactgtcggctagggttataggtggttctgagtccttccggaagctgccgaatcttagaagtcgcgccactgttgtggcgatggaagaaggcgaagctctacagaaaccattttggttgagggaagagtggttttaaagttaatttggaaaggagccggcaagcaaccttcagtcggtgtgcggtttttacagttgaactgtttccagccgctaattatgattgttttagcggttcgtcatctgaaaactgcattctgcacggcggtggtggggggaggacgaggatggagaagcctgggcggacatatttattagctgcggtcctaagtcacgtgtgacattctgtatccagtctatcggttatcccaaggagaacgccctgccggaatggccaatcgccttgagatgtccccgccctattcgccatcttaacatagggcattccccacagctgcaggcaccagtgaagcgtctaagggaccatcttggttgagggcggaagtgaggactgtgtcgcgctggaggagcccacagattctcccggacccacgtggaagcggcactcaagatgctgcgccgcgaggcccgcctgcgccgcgagtacctgtaccgcaaggcccgggaggaggcgcagcgctcagcccaggagaggaaggagcggctgcggcgcgcgctggaagaaaaccgcctgattcccactgagttacgccgagaggctctggccttacaggggtccctggagtttgatgatgctggaggtgaaggtgtgaccagccacgtggatgatgaataccgatgggcaggagtcgaggatcccaaggttatgatcactacctcccgagaccccagttcccgcctcaagatgtttgcaaaggagctgaagctggtgttcccgggcgcccagcgaatgaaccgaggtcgacatgaagtgggggcactggtgcgagcctgcaaagccaacggcgtcaccgatctgctggtcgttcacgagcatcggggcacacctgtggggctcatcgtcagccacctgccctttggtcctactgcctacttcacgctgtgcaatgtggtcatgcggcatgacatcccagacctgggcaccatgtcggaggccaagccccacctcatcacacacggcttctcctcccgcctgggcaagcgggtctctgacatcctccgatacctatttcccgtgcccaaagatgacagccaccgggtcatcaccttcgcaaaccaggacgactacatatcattccggcaccatgtgtataagaagacagaccaccgcaacgtggagctcactgaggtcgggccccgctttgagctgaagctgtacatgatccgtctgggcacgctggagcaggaggccacagcagacgtggagtggcgctggcacccttacaccaataccgcacgcaagagagtcttcctgagcaccgagtgagcacactcaccactcagtcaggacatggacttggaactcaggatggggctgtcatagacagacccaccagtaggaactgtcacagaatggcctgctgaactgggatgtggaactgtggcgggtggagaggtctgaataaaccgtctgtgtcatggc

SEQ ID NO: 369322 - DNA, 3212 bp, Homo sapiens
tttaagggcaagcgcccttagagaagcagcacggaagcaaccaatcaactggtttctccaattagcccccaagtggatcagcctgctgaactgtcggctagggttataggtggttctgagtccttccggaagctgccgaatcttagaagtcgcgccactgttgtggcgatggaagaaggcgaagctctacagaaaccattttggttgagggaagagtggttttaaagttaatttggaaaggagccggcaagcaaccttcagtcggtgtgcggtttttacagttgaactgtttccagccgctaattatgattgttttagcggttcgtcatctgaaaactgcattctgcacggcggtggtggggggaggacgaggatggagaagcctgggcggacatatttattagctgcggtcctaagtcacgtgtgacattctgtatccagtctatcggttatcccaaggagaacgccctgccggaatggccaatcgccttgagatgtccccgccctattcgccatcttaacatagggcattccccacagctgcaggcaccagtgaagcgtctaagggaccatcttggttgagggcggaagtgaggactgtgtcgcgctggaggagcccacagattctcccggacccacgtggaagcggcactcaagatgctgcgccgcgaggcccgcctgcgccgcgagtacctgtaccgcaaggcccgggaggaggcgcagcgctcagcccaggagaggaaggagcggctgcggcgcgcgctggaagaaaaccgcctgattcccactgagttacgccgagaggctctggccttacaggggtccctggagtttgatgatgctggaggtgaaggtgtgaccagccacgtggatgatgaataccgatgggcaggagtcgaggatcccaaggttatgatcactacctcccgagaccccagttcccgcctcaagatgtttgcaaaggagctgaagctggtgttcccgggcgcccagcgaatgaaccgaggtcgacatgaagtgggggcactggtgcgagcctgcaaagccaacggcgtcaccgatctgctggtcgttcacgagcatcggggcacacctgtggggctcatcgtcagccacctgccctttggtcctactgcctacttcacgctgtgcaatgtggtcatgcggcatgacatcccagacctgggcaccatgtcggaggccaagccccacctcatcacacacggcttctcctcccgcctgggcaagcgggtctctgacatcctccgatacctatttcccgtgcccaaagatgacagccaccgggtcatcaccttcgcaaaccaggacgactacatatcattccggcaccatgtgtataagaagacagaccaccgcaacgtggagctcactgaggtcgggccccgctttgagctgaagctgtacatgatccgtctgggcacgctggagcaggaggccacagcagacgtggagtggcgctggcacccttacaccaataccgcacgcaagagagtcttcctgagcaccgagtgagcacactcaccactcagtcaggacatggacttggaactcaggatggggctgtcatagacagacccaccagtaggaactgtcacagaatggcctgctgaactgggatgtggaactgtggcgggtggagaggtctgaataaaccgtctgtgtcatggccccgcctgcctctgagtggtcaggccaagtctgcagggcaaagcccatgggatccctttgggtggggacctgatggctgtgggacgtgcttgggcctggagtcagtgtgggggttaacagagagagagatttgatgctaacgtcccctcaagagtgagggtcatatgagctcttcagcaggcagatgtgggtagcagggccagcctgtgtcaggggcagcccaccaagttaactcactgagtggaagccgccagtgtgccaacgcggaggggacaggccacacccagtgctcagcagctgattcctcatgtaagtggcatcatgtggtatttgttttgtgtctggcttatttctattaacataatgttctccaggttcctccatgttattgcaaatgataggatttctttccttgtaaaaaataacatgccacattttcttaccaatccgtccaccaatagacacttaggtcgttttcatagtttggcagttgtggaaatgctgcagtaaacatgggagtatagctatcttttgaagataatgatttcatctcttttttatatgtatacccagaagtgggattgctgcatcaaatggtggttctatttttaattttttgaggaaccgccatactgttttccataaaggctgtactaatttccattctcaccaacagttcactagggttcccttttctccacattgttgccaacattctttatcttgtgttttttaataacagctatcctaacaggtatgaggtgatctctctcattgcggttttgatttgcatttccctaacggttggtgatactgagcatttttgcatacaccgggtcatttgttctttgttgttgacttgagtcccttatatagtttggatactgctgtggcctgaatgtttgtgtcccccaaaaattcgtatattgaactctcatccctaaggtcaacagtttagggaagcgattaggtcctgaggactctgccctcttgcatagaattagtgctcttataaaagatgcccgagggagctcttttgcccctcctgccatgtgaggacacagctagaagctaccatctgtgaaccaggaagcccccctcaccagacactgaatctgctggagccaccatcttggacttcccagcctccagagctgtgagaaataaatgcctgttgtttaagctacccagtctgtggtattttgttagaacagcccaagttgagacagatagtaaccctttaccagatacatggtttgcaaatagtttttcccactctgtagatatagccattgagaagctcctcaagatagacattaaatacaaagaagcatggtgtgaaacgccatgtgtgatatgctgtcagtgtgcaaaagaggcagggagggccctgcacttgcatgtatgtgctgcatcatccccagaaggctgaactccttgctggtgcactgggtacccagggaggagggaggttctttactgtaatgttagcaggtgaacattgtatccacttgaccacgaag

SEQ ID NO: 369323 - DNA, 1735 bp, Homo sapiens
tttaagggcaagcgcccttagagaagcagcacggaagcaaccaatcaactggtttctccaattagcccccaagtggatcagcctgctgaactgtcggctagggttataggtggttctgagtccttccggaagctgccgaatcttagaagtcgcgccactgttgtggcgatggaagaaggcgaagctctacagaaaccattttggttgagggaagagtggttttaaagttaatttggaaaggagccggcaagcaaccttcagtcggtgtgcggtttttacagttgaactgtttccagccgctaattatgattgttttagcggttcgtcatctgaaaactgcattctgcacggcggtggtggggggaggacgaggatggagaagcctgggcggacatatttattagctgcggtcctaagtcacgtgtgacattctgtatccagtctatcggttatcccaaggagaacgccctgccggaatggccaatcgccttgagatgtccccgccctattcgccatcttaacatagggcattccccacagctgcaggcaccagtgaagcgtctaagggaccatcttggttgagggcggaagtgaggactgtgtcgcgctggaggagcccacagattctcccggacccacgtggaagcggcactcaagatgctgcgccgcgaggcccgcctgcgccgcgagtacctgtaccgcaaggcccgggaggaggcgcagcgctcagcccaggagaggaaggagcggctgcggcgcgcgctggaagaaaaccgcctgattcccactgagttacgccgagaggctctggccttacaggggtccctggagtttgatgatgctggaggtgaaggtgtgaccagccacgtggatgatgaataccgatgggcaggagtcgaggatcccaaggttatgatcactacctcccgagaccccagttcccgcctcaagatgtttgcaaaggagctgaagctggtgttcccgggcgcccagcgaatgaaccgaggtcgacatgaagtgggggcactggtgcgagcctgcaaagccaacggcgtcaccgatctgctggtcgttcacgagcatcggggcacacctgtggggctcatcgtcagccacctgccctttggtcctactgcctacttcacgctgtgcaatgtggtcatgcggcatgacatcccagacctgggcaccatgtcggaggccaagccccacctcatcacacacggcttctcctcccgcctgggcaagcgggtctctgacatcctccgatacctatttcccgtgcccaaagatgacagccaccgggtcatcaccttcgcaaaccaggacgactacatatcattccggcaccatgtgtataagaagacagaccaccgcaacgtggagctcactgaggtcgggccccgctttgagctgaagctgtacatgatccgtctgggcacgctggagcaggaggccacagcagacgtggagtggcgctggcacccttacaccaataccgcacgcaagagagtcttcctgagcaccgagtgagcacactcaccactcagtcaggacatggacttggaactcaggatggggctgtcatagacagacccaccagtaggaactgtcacagaatggcctgctgaactgggatgtggaactgtggcgggtggagaggtctgaataaaccgtctgtgtcatggcaaaaaaaaaaacacaaaaaagcacacacaacaacaaaaaacgaggg

SEQ ID NO: 369324 - DNA, 2092 bp, Homo sapiens
  misc_feature (2092)..(2092): n is a, c, g, or t
tttaagggcaagcgcccttagagaagcagcacggaagcaaccaatcaactggtttctccaattagcccccaagtggatcagcctgctgaactgtcggctagggttataggtggttctgagtccttccggaagctgccgaatcttagaagtcgcgccactgttgtggcgatggaagaaggcgaagctctacagaaaccattttggttgagggaagagtggttttaaagttaatttggaaaggagccggcaagcaaccttcagtcggtgtgcggtttttacagttgaactgtttccagccgctaattatgattgttttagcggttcgtcatctgaaaactgcattctgcacggcggtggtggggggaggacgaggatggagaagcctgggcggacatatttattagctgcggtcctaagtcacgtgtgacattctgtatccagtctatcggttatcccaaggagaacgccctgccggaatggccaatcgccttgagatgtccccgccctattcgccatcttaacatagggcattccccacagctgcaggcaccagtgaagcgtctaagggaccatcttggttgagggcggaagtgaggactgtgtcgcgctggaggagcccacagattctcccggacccacgtggaagcggcactcaagatgctgcgccgcgaggcccgcctgcgccgcgagtacctgtaccgcaaggcccgggaggaggcgcagcgctcagcccaggagaggaaggagcggctgcggcgcgcgctggaagaaaaccgcctgattcccactgagttacgccgagaggctctggccttacaggggtccctggagtttgatgatgctggaggtgaaggtgtgaccagccacgtggatgatgaataccgatgggcaggagtcgaggatcccaaggttatgatcactacctcccgagaccccagttcccgcctcaagatgtttgcaaaggagctgaagctggtgttcccgggcgcccagcgaatgaaccgaggtcgacatgaagtgggggcactggtgcgagcctgcaaagccaacggcgtcaccgatctgctggtcgttcacgagcatcggggcacacctgtggggctcatcgtcagccacctgccctttggtcctactgcctacttcacgctgtgcaatgtggtcatgcggcatgacatcccagacctgggcaccatgtcggaggccaagccccacctcatcacacacggcttctcctcccgcctgggcaagcgggtctctgacatcctccgatacctatttcccgtgcccaaagatgacagccaccgggtcatcaccttcgcaaaccaggacgactacatatcattccggcaccatgtgtataagaagacagaccaccgcaacgtggagctcactgaggtcgggccccgctttgagctgaagctgtacatgatccgtctgggcacgctggagcaggaggccacagcagacgtggagtggcgctggcacccttacaccaataccgcacgcaagagagtcttcctgagcaccgagtgagcacactcaccactcagtcaggacatggacttggaactcaggatggggctgtcatagacagacccaccagtaggaactgtcacagaatggcctgctgaactgggatgtggaactgtggcgggtggagaggtctgaataaaccgtctgtgtcatggcaaaaaaaacaaagaaaaaaagcgggggccaccaaaatccccgagaggccacgttaagcgaaccaatttttacaagcgggcccatacggagcacatataacacacaacgcccgcgatataaaagcacggaggggggaacaacgtgaaccgggaaacgggagaagacacaaatctgggaggggcaacagaggaaaaacccttcacggaggtacagcacaggaaaacacaaaacaacggaagcatggtgaacgagccactatgacggaaaagtaagcatatgataaaaaacgagaagacgagagcgcagcagagagaggagcacacgacaagacaacaacaacatcagagacagaggaaggacaacagatagctagcaaagcatcgcactcccgcacctgctgctn

SEQ ID NO: 369325 - DNA, 3027 bp, Homo sapiens
tttaagggcaagcgcccttagagaagcagcacggaagcaaccaatcaactggtttctccaattagcccccaagtggatcagcctgctgaactgtcggctagggttataggtggttctgagtccttccggaagctgccgaatcttagaagtcgcgccactgttgtggcgatggaagaaggcgaagctctacagaaaccattttggttgagggaagagtggttttaaagttaatttggaaaggagccggcaagcaaccttcagtcggtgtgcggtttttacagttgaactgtttccagccgctaattatgattgttttagcggttcgtcatctgaaaactgcattctgcacggcggtggtggggggaggacgaggatggagaagcctgggcggacatatttattagctgcggtcctaagtcacgtgtgacattctgtatccagtctatcggttatcccaaggagaacgccctgccggaatggccaatcgccttgagatgtccccgccctattcgccatcttaacatagggcattccccacagctgcaggcaccagtgaagcgtctaagggaccatcttggttgagggcggaagtgaggactgtgtcgcgctggaggagcccacagattctcccggacccacgtggaagcggcactcaagatggtaggagaatgagctcctgtttcggagaggtccggggcgcgtgaagtgctggggatgtggctctggggacttggaggctcagcggctccggggctccggggttccggggctcgggagcgagtagtgagtgactgggcctgctgttcccacagctgcgccgcgaggcccgcctgcgccgcgagtacctgtaccgcaaggcccgggaggaggcgcagcgctcagcccaggagaggaaggagcggctgcggcgcgcgctggaagaaaaccgcctgattcccactgagttacgccgagaggctctggccttacaggggtccctggagtttgatgatgctggaggtgaaggtgtgaccagccacgtggatgatgaataccgatgggcaggagtcgaggatcccaaggttatgatcactacctcccgagaccccagttcccgcctcaagatgtttgcaaaggagctgaagctggtgttcccgggcgcccagcgaatgaaccgaggtcgacatgaagtgggggcactggtgcgagcctgcaaagccaacggcgtcaccgatctgctggtcgttcacgagcatcggggcacacctgtggggctcatcgtcagccacctgccctttggtcctactgcctacttcacgctgtgcaatgtggtcatgcggcatgacatcccagacctgggcaccatgtcggaggccaagccccacctcatcacacacggcttctcctcccgcctgggcaagcgggtctctgacatcctccgatacctatttcccgtgcccaaagatgacagccaccgggtcatcaccttcgcaaaccaggacgactacatatcattccggcaccatgtgtataagaagacagaccaccgcaacgtggagctcactgaggtcgggccccgctttgagctgaagctgtacatgatccgtctgggcacgctggagcaggaggccacagcagacgtggagtggcgctggcacccttacaccaataccgcacgcaagagagtcttcctgagcaccgagtgagcacactcaccactcagtcaggacatggacttggaactcaggatggggctgtcatagacagacccaccagtaggaactgtcacagaatggcctgctgaactgggatgtggaactgtggcgggtggagaggtctgaataaaccgtctgtgtcatggccccgcctgcctctgagtggtcaggccaagtctgcagggcaaagcccatgggatccctttgggtggggacctgatggctgtgggacgtgcttgggcctggagtcagtgtgggggttaacagagagagagatttgatgctaacgtcccctcaagagtgagggtcatatgagctcttcagcaggcagatgtgggtagcagggccagcctgtgtcaggggcagcccaccaagttaactcactgagtggaagccgccagtgtgccaacgcggaggggacaggccacacccagtgctcagcagctgattcctcatgtaagtggcatcatgtggtatttgttttgtgtctggcttatttctattaacataatgttctccaggttcctccatgttattgcaaatgataggatttctttccttgtaaaaaataacatgccacattttcttaccaatccgtccaccaatagacacttaggtcgttttcatagtttggcagttgtggaaatgctgcagtaaacatgggagtatagctatcttttgaagataatgatttcatctcttttttatatgtatacccagaagtgggattgctgcatcaaatggtggttctatttttaattttttgaggaaccgccatactgttttccataaaggctgtactaatttccattctcaccaacagttcactagggttcccttttctccacattgttgccaacattctttatcttgtgttttttaataacagctatcctaacaggtatgaggtgatctctctcattgcggttttgatttgcatttccctaacggttggtgatactgagcatttttgcatacaccgggtcatttgttctttgttgttgacttgagtcccttatatagtttggatactgctgtggcctgaatgtttgtgtcccccaaaaattcgtatattgaactctcatccctaaggtcaacagtttagggaagcgattaggtcctgaggactctgccctcttgcatagaattagtgctcttataaaagatgcccgagggagctcttttgcccctcctgccatgtgaggacacagctagaagctaccatctgtgaaccaggaagcccccctcaccagacactgaatctgctggagccaccatcttggacttcccagcctccagagctgtgagaaataaatgcctgttgtttaagcta

SEQ ID NO: 369326 - DNA, 2966 bp, Homo sapiens
tttaagggcaagcgcccttagagaagcagcacggaagcaaccaatcaactggtttctccaattagcccccaagtggatcagcctgctgaactgtcggctagggttataggtggttctgagtccttccggaagctgccgaatcttagaagtcgcgccactgttgtggcgatggaagaaggcgaagctctacagaaaccattttggttgagggaagagtggttttaaagttaatttggaaaggagccggcaagcaaccttcagtcggtgtgcggtttttacagttgaactgtttccagccgctaattatgattgttttagcggttcgtcatctgaaaactgcattctgcacggcggtggtggggggaggacgaggatggagaagcctgggcggacatatttattagctgcggtcctaagtcacgtgtgacattctgtatccagtctatcggttatcccaaggagaacgccctgccggaatggccaatcgccttgagatgtccccgccctattcgccatcttaacatagggcattccccacagctgcaggcaccagtgaagcgtctaagggaccatcttggttgagggcggaagtgaggactgtgtcgcgctggaggagcccacagattctcccggacccacgtggaagcggcactcaagatgctgcgccgcgaggcccgcctgcgccgcgagtacctgtaccgcaaggcccgggaggaggcgcagcgctcagcccaggagaggaaggagcggctgcggcgcgcgctggaagaaaaccgcctgattcccactgagttacgccgagaggctctggccttacaggggtccctggagtttgatgatgctggaggtgaaggtgtgaccagccacgtggatgatgaataccgatgggcaggagtcgaggatcccaaggttatgatcactacctcccgagaccccagttcccgcctcaagatgtttgcaaaggagctgaagctggtgttcccgggcgcccagcgaatgaaccgaggtcgacatgaagtgggggcactggtgcgagcctgcaaagccaacggcgtcaccgatctgctggtcgttcacgagcatcggggcacacctgtggggctcatcgtcagccacctgccctttggtcctactgcctacttcacgctgtgcaatgtggtcatgcggcatgacatcccagacctgggcaccatgtcggaggccaagccccacctcatcacacacggcttctcctcccgcctgggcaagcgggtctctgacatcctccgatacctatttcccgtgcccaaagatgacagccaccgggtcatcaccttcgcaaaccaggacgactacatatcattccggtgggtccacgggccatgccccaggaaaggcatcccccccctgtgtacctcgtgctgcttgccgttgacccacagctgttccctcccaggcgcaccatgtgtataagaagacagaccaccgcaacgtggagctcactgaggtcgggccccgctttgagctgaagctgtacatgatccgtctgggcacgctggagcaggaggccacagcagacgtggagtggcgctggcacccttacaccaataccgcacgcaagagagtcttcctgagcaccgagtgagcacactcaccactcagtcaggacatggacttggaactcaggatggggctgtcatagacagacccaccagtaggaactgtcacagaatggcctgctgaactgggatgtggaactgtggcgggtggagaggtctgaataaaccgtctgtgtcatggccccgcctgcctctgagtggtcaggccaagtctgcagggcaaagcccatgggatccctttgggtggggacctgatggctgtgggacgtgcttgggcctggagtcagtgtgggggttaacagagagagagatttgatgctaacgtcccctcaagagtgagggtcatatgagctcttcagcaggcagatgtgggtagcagggccagcctgtgtcaggggcagcccaccaagttaactcactgagtggaagccgccagtgtgccaacgcggaggggacaggccacacccagtgctcagcagctgattcctcatgtaagtggcatcatgtggtatttgttttgtgtctggcttatttctattaacataatgttctccaggttcctccatgttattgcaaatgataggatttctttccttgtaaaaaataacatgccacattttcttaccaatccgtccaccaatagacacttaggtcgttttcatagtttggcagttgtggaaatgctgcagtaaacatgggagtatagctatcttttgaagataatgatttcatctcttttttatatgtatacccagaagtgggattgctgcatcaaatggtggttctatttttaattttttgaggaaccgccatactgttttccataaaggctgtactaatttccattctcaccaacagttcactagggttcccttttctccacattgttgccaacattctttatcttgtgttttttaataacagctatcctaacaggtatgaggtgatctctctcattgcggttttgatttgcatttccctaacggttggtgatactgagcatttttgcatacaccgggtcatttgttctttgttgttgacttgagtcccttatatagtttggatactgctgtggcctgaatgtttgtgtcccccaaaaattcgtatattgaactctcatccctaaggtcaacagtttagggaagcgattaggtcctgaggactctgccctcttgcatagaattagtgctcttataaaagatgcccgagggagctcttttgcccctcctgccatgtgaggacacagctagaagctaccatctgtgaaccaggaagcccccctcaccagacactgaatctgctggagccaccatcttggacttcccagcctccagagctgtgagaaataaatgcctgttgtttaagcta

SEQ ID NO: 369327 - DNA, 2184 bp, Homo sapiens
tttccaaatgcttgccggccgttttccttgcccattgggttctcctgttggttttgagagtgtttcttccgtgtgatgaaaaccgcctgattcccactgagttacgccgagaggctctggccttacaggggtccctggagtttgatgatgctggaggtgaaggtgtgaccagccacgtggatgatgaataccgatgggcaggagtcgaggatcccaaggttatgatcactacctcccgagaccccagttcccgcctcaagatgtttgcaaaggagctgaagctggtgttcccgggcgcccagcgaatgaaccgaggtcgacatgaagtgggggcactggtgcgagcctgcaaagccaacggcgtcaccgatctgctggtcgttcacgagcatcggggcacacctgtggggctcatcgtcagccacctgccctttggtcctactgcctacttcacgctgtgcaatgtggtcatgcggcatgacatcccagacctgggcaccatgtcggaggccaagccccacctcatcacacacggcttctcctcccgcctgggcaagcgggtctctgacatcctccgatacctatttcccgtgcccaaagatgacagccaccgggtcatcaccttcgcaaaccaggacgactacatatcattccggcaccatgtgtataagaagacagaccaccgcaacgtggagctcactgaggtcgggccccgctttgagctgaagctgtacatgatccgtctgggcacgctggagcaggaggccacagcagacgtggagtggcgctggcacccttacaccaataccgcacgcaagagagtcttcctgagcaccgagtgagcacactcaccactcagtcaggacatggacttggaactcaggatggggctgtcatagacagacccaccagtaggaactgtcacagaatggcctgctgaactgggatgtggaactgtggcgggtggagaggtctgaataaaccgtctgtgtcatggccccgcctgcctctgagtggtcaggccaagtctgcagggcaaagcccatgggatccctttgggtggggacctgatggctgtgggacgtgcttgggcctggagtcagtgtgggggttaacagagagagagatttgatgctaacgtcccctcaagagtgagggtcatatgagctcttcagcaggcagatgtgggtagcagggccagcctgtgtcaggggcagcccaccaagttaactcactgagtggaagccgccagtgtgccaacgcggaggggacaggccacacccagtgctcagcagctgattcctcatgtaagtggcatcatgtggtatttgttttgtgtctggcttatttctattaacataatgttctccaggttcctccatgttattgcaaatgataggatttctttccttgtaaaaaataacatgccacattttcttaccaatccgtccaccaatagacacttaggtcgttttcatagtttggcagttgtggaaatgctgcagtaaacatgggagtatagctatcttttgaagataatgatttcatctcttttttatatgtatacccagaagtgggattgctgcatcaaatggtggttctatttttaattttttgaggaaccgccatactgttttccataaaggctgtactaatttccattctcaccaacagttcactagggttcccttttctccacattgttgccaacattctttatcttgtgttttttaataacagctatcctaacaggtatgaggtgatctctctcattgcggttttgatttgcatttccctaacggttggtgatactgagcatttttgcatacaccgggtcatttgttctttgttgttgacttgagtcccttatatagtttggatactgctgtggcctgaatgtttgtgtcccccaaaaattcgtatattgaactctcatccctaaggtcaacagtttagggaagcgattaggtcctgaggactctgccctcttgcatagaattagtgctcttataaaagatgcccgagggagctcttttgcccctcctgccatgtgaggacacagctagaagctaccatctgtgaaccaggaagcccccctcaccagacactgaatctgctggagccaccatcttggacttcccagcctccagagctgtgagaaataaatgcctgttgtttaagcta

SEQ ID NO: 369328 - DNA, 3118 bp, Homo sapiens
tttaagggcaagcgcccttagagaagcagcacggaagcaaccaatcaactggtttctccaattagcccccaagtggatcagcctgctgaactgtcggctagggttataggtggttctgagtccttccggaagctgccgaatcttagaagtcgcgccactgttgtggcgatggaagaaggcgaagctctacagaaaccattttggttgagggaagagtggttttaaagttaatttggaaaggagccggcaagcaaccttcagtcggtgtgcggtttttacagttgaactgtttccagccgctaattatgattgttttagcggttcgtcatctgaaaactgcattctgcacggcggtggtggggggaggacgaggatggagaagcctgggcggacatatttattagctgcggtcctaagtcacgtgtgacattctgtatccagtctatcggttatcccaaggagaacgccctgccggaatggccaatcgccttgagatgtccccgccctattcgccatcttaacatagggcattccccacagctgcaggcaccagtgaagcgtctaagggaccatcttggttgagggcggaagtgaggactgtgtcgcgctggaggagcccacagattctcccggacccacgtggaagcggcactcaagatggtaggagaatgagctcctgtttcggagaggtccggggcgcgtgaagtgctggggatgtggctctggggacttggaggctcagcggctccggggctccggggttccggggctcgggagcgagtagtgagtgactgggcctgctgttcccacagctgcgccgcgaggcccgcctgcgccgcgagtacctgtaccgcaaggcccgggaggaggcgcagcgctcagcccaggagaggaaggagcggctgcggcgcgcgctggaagaaaaccgcctgattcccactgagttacgccgagaggctctggccttacaggggtccctggagtttgatgatgctggaggtgaaggtgtgaccagccacgtggatgatgaataccgatgggcaggagtcgaggatcccaaggttatgatcactacctcccgagaccccagttcccgcctcaagatgtttgcaaaggagctgaagctggtgttcccgggcgcccagcgaatgaaccgaggtcgacatgaagtgggggcactggtgcgagcctgcaaagccaacggcgtcaccgatctgctggtcgttcacgagcatcggggcacacctgtggggctcatcgtcagccacctgccctttggtcctactgcctacttcacgctgtgcaatgtggtcatgcggcatgacatcccagacctgggcaccatgtcggaggccaagccccacctcatcacacacggcttctcctcccgcctgggcaagcgggtctctgacatcctccgatacctatttcccgtgcccaaagatgacagccaccgggtcatcaccttcgcaaaccaggacgactacatatcattccggtgggtccacgggccatgccccaggaaaggcatcccccccctgtgtacctcgtgctgcttgccgttgacccacagctgttccctcccaggcgcaccatgtgtataagaagacagaccaccgcaacgtggagctcactgaggtcgggccccgctttgagctgaagctgtacatgatccgtctgggcacgctggagcaggaggccacagcagacgtggagtggcgctggcacccttacaccaataccgcacgcaagagagtcttcctgagcaccgagtgagcacactcaccactcagtcaggacatggacttggaactcaggatggggctgtcatagacagacccaccagtaggaactgtcacagaatggcctgctgaactgggatgtggaactgtggcgggtggagaggtctgaataaaccgtctgtgtcatggccccgcctgcctctgagtggtcaggccaagtctgcagggcaaagcccatgggatccctttgggtggggacctgatggctgtgggacgtgcttgggcctggagtcagtgtgggggttaacagagagagagatttgatgctaacgtcccctcaagagtgagggtcatatgagctcttcagcaggcagatgtgggtagcagggccagcctgtgtcaggggcagcccaccaagttaactcactgagtggaagccgccagtgtgccaacgcggaggggacaggccacacccagtgctcagcagctgattcctcatgtaagtggcatcatgtggtatttgttttgtgtctggcttatttctattaacataatgttctccaggttcctccatgttattgcaaatgataggatttctttccttgtaaaaaataacatgccacattttcttaccaatccgtccaccaatagacacttaggtcgttttcatagtttggcagttgtggaaatgctgcagtaaacatgggagtatagctatcttttgaagataatgatttcatctcttttttatatgtatacccagaagtgggattgctgcatcaaatggtggttctatttttaattttttgaggaaccgccatactgttttccataaaggctgtactaatttccattctcaccaacagttcactagggttcccttttctccacattgttgccaacattctttatcttgtgttttttaataacagctatcctaacaggtatgaggtgatctctctcattgcggttttgatttgcatttccctaacggttggtgatactgagcatttttgcatacaccgggtcatttgttctttgttgttgacttgagtcccttatatagtttggatactgctgtggcctgaatgtttgtgtcccccaaaaattcgtatattgaactctcatccctaaggtcaacagtttagggaagcgattaggtcctgaggactctgccctcttgcatagaattagtgctcttataaaagatgcccgagggagctcttttgcccctcctgccatgtgaggacacagctagaagctaccatctgtgaaccaggaagcccccctcaccagacactgaatctgctggagccaccatcttggacttcccagcctccagagctgtgagaaataaatgcctgttgtttaagcta

SEQ ID NO: 369329 - DNA, 1755 bp, Homo sapiens
tttaagggcaagcgcccttagagaagcagcacggaagcaaccaatcaactggtttctccaattagcccccaagtggatcagcctgctgaactgtcggctagggttataggtggttctgagtccttccggaagctgccgaatcttagaagtcgcgccactgttgtggcgatggaagaaggcgaagctctacagaaaccattttggttgagggaagagtggttttaaagttaatttggaaaggagccggcaagcaaccttcagtcggtgtgcggtttttacagttgaactgtttccagccgctaattatgattgttttagcggttcgtcatctgaaaactgcattctgcacggcggtggtggggggaggacgaggatggagaagcctgggcggacatatttattagctgcggtcctaagtcacgtgtgacattctgtatccagtctatcggttatcccaaggagaacgccctgccggaatggccaatcgccttgagatgtccccgccctattcgccatcttaacatagggcattccccacagctgcaggcaccagtgaagcgtctaagggaccatcttggttgagggcggaagtgaggactgtgtcgcgctggaggagcccacagattctcccggacccacgtggaagcggcactcaagatgctgcgccgcgaggcccgcctgcgccgcgagtacctgtaccgcaaggcccgggaggaggcgcagcgctcagcccaggagaggaaggagcggctgcggcgcgcgctggaagaaaaccgcctgattcccactgagttacgccgagaggctctggccttacaggggtccctggagtttgatgatgctggaggtgaaggtgtgaccagccacgtggatgatgaataccgatgggcaggagtcgaggatcccaaggttatgatcactacctcccgagaccccagttcccgcctcaagatgtttgcaaaggagctgaagctggtgttcccgggcgcccagcgaatgaaccgaggtcgacatgaagtgggggcactggtgcgagcctgcaaagccaacggcgtcaccgatctgctggtcgttcacgagcatcggggcacacctgtggggctcatcgtcagccacctgccctttggtcctactgcctacttcacgctgtgcaatgtggtcatgcggcatgacatcccagacctgggcaccatgtcggaggccaagccccacctcatcacacacggcttctcctcccgcctgggcaagcgggtctctgacatcctccgatacctatttcccgtgcccaaagatgacagccaccgggtcatcaccttcgcaaaccaggacgactacatatcattccggtgggtccacgggccatgccccaggaaaggcatcccccccctgtgtacctcgtgctgcttgccgttgacccacagctgttccctcccaggcgcaccatgtgtataagaagacagaccaccgcaacgtggagctcactgagtgtacatgatccgtctgggcacgctggagcaggaggccacagcagacgtggagtggcgctggcacccttacaccaataccgcacgcaagagagtcttcctgagcaccgagtgagcacactcaccactcagtcaggacatggacttggaactcaggatggggctgtcatagacagacccaccagtaggaactgtcacagaatggcctgctgaactgggatgtggaactgtggcgggtggagaggtctgaataaaccgtctgtgtcatggc

SEQ ID NO: 369330 - DNA, 1494 bp, Homo sapiens
tttaagggcaagcgcccttagagaagcagcacggaagcaaccaatcaactggtttctccaattagcccccaagtggatcagcctgctgaactgtcggctagggttataggtggttctgagtccttccggaagctgccgaatcttagaagtcgcgccactgttgtggcgatggaagaaggcgaagctctacagaaaccattttggttgagggaagagtggttttaaagttaatttggaaaggagccggcaagcaaccttcagtcggtgtgcggtttttacagttgaactgtttccagccgctaattatgattgttttagcggttcgtcatctgaaaactgcattctgcacggcggtggtggggggaggacgaggatggagaagcctgggcggacatatttattagctgcggtcctaagtcacgtgtgacattctgtatccagtctatcggttatcccaaggagaacgccctgccggaatggccaatcgccttgagatgtccccgccctattcgccatcttaacatagggcattccccacagctgcaggcaccagtgaagcgtctaagggaccatcttggttgagggcggaagtgaggactgtgtcgcgctggaggagcccacagattctcccggacccacgtggaagcggcactcaagatgctgcgccgcgaggcccgcctgcgccgcgagtacctgtaccgcaaggcccgggaggaggcgcagcgctcagcccaggagaggaaggagcggctgcggcgcgcgctggaagaaaaccgcctgattcccactgagttacgccgagaggctctggccttacaggggtccctggagtttgatgatgctggaggtgaaggtgtgaccagccacgtggatgatgaataccgatgggcaggagtcgaggatcccaaggttatgatcactacctcccgagaccccagttcccgcctcaagatgtttgcaaaggagctgaagctggtgttcccgggcgcccagcgaatgaaccgaggtcgacatgaagtgggggcactggtgcgagcctgcaaagccaacggcgtcaccgatctgctggtcgttcacgagcatcggggcacacctgtggggctcatcgtcagccacctgccctttggtcctactgcctacttcacgctgtgcaatgtggtcatgcggcatgacatcccagacctgggcaccatgtcggaggccaagccccacctcatcacacacggcttctcctcccgcctgggcaagcgggtctctgacatcctccgatacctatttcccgtgcccaaagatgacagccaccgggtcatcacgagagtcttcctgagcaccgagtgagcacactcaccactcagtcaggacatggacttggaactcaggatggggctgtcatagacagacccaccagtaggaactgtcacagaatggcctgctgaactgggatgtggaactgtggcgggtggagaggtctgaataaaccgtctgtgtcatggc

SEQ ID NO: 369331 - DNA, 365 bp, Homo sapiens
agatggagtcttgctctgtcgtccaggcgggagtgcagtggcgtgatctcagcttactgcaacctctgcctctcgggtccagtcctcccacctcagcctcctgagtagctgggattacaggtgtgtgccatcaagcccggctaatttttgtatttttagtagagatggggtttcactatgttggatggctgatctcgatctcctgacctcaggtgatccgcccaccttggcctcccaaagtgctgggattacaggcatgagccactgtgcccggcctgtttccttgaattggatcaaaatatgatctatacattacaatcaggtaatgtttcttacctgatttttgtttgtttgtttgtttttaa

SEQ ID NO: 369332 - DNA, 437 bp, Homo sapiens
tttggagttttaaaatcttcttctaccacgaactctacccctgacaaacggtgagaaaataaatagaattgctagtcttcatcacacggaaaagagctagtgagctatttcgtttcctccctttttctgcccccttctcttttcccagcttcccatttatagccctgctttgcagagacagcaacagatactctagaagcaggatgaacatgagagtggatttacaacatggaaagcaaaggccatgcattcctaaagggcagggaaggccttaagggcagggctttgacttttcaccactgcctcctctgcctagcacctgcatgcagtgggcattcaactaatatttaaggcagaacaggaaggaaaggcaaaaacttgggaagaaatatacaactgaggagaaaatttccagacatttcactgtgaaggtgtca

SEQ ID NO: 369333 - DNA, 141 bp, Homo sapiens
tgaagatattcaaatggttcctcctacaacaaaggaagccctatatgaaaatttaaagttctatttgaattgaaatgaaaaagtgtgtcctgtctcttatgtagtggtatggctatatcagcataagtaggcaccttatcc

SEQ ID NO: 369334 - DNA, 2892 bp, Homo sapiens
attcggcacgatggggttgtccacagtctcgtagctaccaagtgacaggccacgatttgatctcaggccagtgtgttaaactccaatttgcgtgctcctgtccctccccgcgcgtcggcggagctcggggccggactggacctgccgagggaggggcggacagtcctgacggtgcggggcggggctggcggctgcccaggcctggctgaggcgccgcggccgggtccctctccacctgccgggcggagcgcacgggccatgggctgagccccgctgagcccgccgggccggccatgggcgatcgcgagcgcaacaagaagcggctgctggagctgctgcgggcgccggacacaggcaacgcgcactgcgccgactgcggggcggcagatcccgactgggcctcttacaagctggggatcttcatctgtctcaactgctgcggcgtccaccgtaacttccctgacatcagcagagttaaatctgtgcgacttgacttctgggacgacagtattgtggagtttatgatccacaatggaaacctccgtgtgaaggccaagttcgaagccagagtcccagctttctactacatcccccaggccaacgactgcctggtcttaaaggaacaatggattcgagctaagtatgagagacgggaatttatggctgatggggaaaccatctcgctcccaggtaaccgagaaggattcctgtggaagcgaggaagggacaactcacagtttctgagaaggaagtttgtacttctggcaagagaaggcctcctgaagtacttcacaaaggaacagggtaaaagccccaaagctgtcatcagcattaaggacttgaatgccaccttccagacagagaagatagggcacccccatgggctgcagatcacctacaggagagatggccacaccaggaacctgtttgtgtatcatgaaagtgggaaggagatagtggactggttcaatgccctccgtgcagcccgtctgcagtacctaaaaatggcctttcctgaactcccagagtctgagctcgtgccattcctcaccaggaactacctcaaacaaggcttcatggaaaagactgggccaaagcagaaagaacctttcaagaaaaggtggttcgccctggattgccatgagcggaggctgctctattacaagaacccactggatgccttcgagcagggccaggtttttcttgggaacaaggagcagggatatgaagcctacgaagacctgcccaagggcatccgaggaaatcgctggaaagccggactcaccattgtcaccccagagcggagatttgtcctcacttgccccagtgagaaggaacagcaggaatggctggaaagtttgcggggtgtcctgtccagccccttgacgcccctcaaccggcttactgcatcaacagagagtggccgcagcagcaggtgacccattaactgaggaactggctgccactgaacacctggaactccttgtgggaagaagtttgcacctcggccctggctgcccaccatcagtgccccgcagtcagcagccattcctggcagtgaactctgccaggactgaagctgtggctttatccatcagctccctgggccttccccgcaacccacctcggggatctgaggatctggtgcatagatgaacatctatcccctcctcccccatacacacctaggcttgaaatgccctacaggcccagaactttctcacatctgaaatggaggcattgcaatgaaaaggcacccacagcatcatgcaagtggcatcttgtaaaaaaaaaaaaaaagtttaatctgaatctaaccatgaggaaataatcagacaaatccacattaggggcattctgctaaacatctgacccagactcttcaaaaatgaagagtgaaagataaagtagtcaatggccgggcgcagtgagattgcgccattgcattccagcctgggtgacagagcgagactccgtatcagaaagaaaaagaggaactgaatgaaatctcagatggctgaaatgttagagaaacagagcaccaagtcccctgctctgtgactcgttgttcctttcctctgtcttcaagcaccacgcagaaatacactggatgttctctctttgcttcaatggagacccaaggagctgggaggtctcttaagagactctctgattctccgtggctgggtgtgatggctcatgcccataatcccagccctttgggaagctgaggcaggaggattgagaccaggagttcgagaagagcctgggcaacatagtgagaccccatctctacaaagaaaaaaaaattagctggacatggtaatgaatgcctgtagtcccagctactccggacactgatgtgagaggatcacttgagccagggaggtcatggctacagtgacccctcattgcaccactttacttagcctgggtgacagagtgagaccctatctcaaaaaaaaaaaaaatctatgcattgtatgggactttcctttggatcccccaatcaaaggataagcaatgcgtaagcctgtgtccttcctgaagcttctcgactgcccagatagggaggtgagtcctctctatctcctctggctctggaagcaccttgaaaatgtgcattttcaaggacacttgctgggttgtgcattaagggccagtttacttgtctgcctctttgaccacctgtgaactctgttgggtgtactctgctaagttctggggatgaggaaattaataaaggtacagtcttgccttcaaggaacttatggtctagaggagaagaacgagaagtatagataggcagtaacaaagctacttgaagaggccaactgggattctaagggtgggaaagaacagacacaagagataaagtcctaatgaaatgga

SEQ ID NO: 369335 - DNA, 2037 bp, Homo sapiens
aggcagcagggtgaagctggcaaagggtatggtggggttggaaggggaatgggcagaaccttcagagcctgagggctcctatccaggccccagggagaagcactaggatgtctgactgaggaggctgggctggagaaccagtgggactggccagctcctttggtttgggctgggctggcccctgacctctatcctcagaaactgacctggtcatctgtggtaagaagttccctcttttgcagcagaaagaacctttcaagaaaaggtggttcgccctggattgccatgagcggaggctgctctattacaagaacccactggatgccttcgagcagggccaggtttttcttgggaacaaggagcagggatatgaagcctacgaagacctgcccaagggcatccgaggaaatcgctggaaagccggactcaccattgtcaccccagagcggagatttgtcctcacttgccccagtgagaaggaacagcaggaatggctggaaagtttgcggggtgtcctgtccagccccttgacgcccctcaaccggcttactgcatcaacagagagtggccgcagcagcaggtgacccattaactgaggaactggctgccactgaacacctggaactccttgtgggaagaagtttgcacctcggccctggctgcccaccatcagtgccccgcagtcagcagccattcctggcagtgaactctgccaggactgaagctgtggctttatccatcagctccctgggccttccccgcaacccacctcggggatctgaggatctggtgcatagatgaacatctatcccctcctcccccatacacacctaggcttgaaatgccctacaggcccagaactttctcacatctgaaatggaggcattgcaatgaaaaggcacccacagcatcatgcaagtggcatcttgtaaaaaaaaaaaaaaagtttaatctgaatctaaccatgaggaaataatcagacaaatccacattaggggcattctgctaaacatctgacccagactcttcaaaaatgaagagtgaaagataaagtagtcaatggccgggcgcagtgagattgcgccattgcattccagcctgggtgacagagcgagactccgtatcagaaagaaaaagaggaactgaatgaaatctcagatggctgaaatgttagagaaacagagcaccaagtcccctgctctgtgactcgttgttcctttcctctgtcttcaagcaccacgcagaaatacactggatgttctctctttgcttcaatggagacccaaggagctgggaggtctcttaagagactctctgattctccgtggctgggtgtgatggctcatgcccataatcccagccctttgggaagctgaggcaggaggattgagaccaggagttcgagaagagcctgggcaacatagtgagaccccatctctacaaagaaaaaaaaattagctggacatggtaatgaatgcctgtagtcccagctactccggacactgatgtgagaggatcacttgagccagggaggtcatggctacagtgacccctcattgcaccactttacttagcctgggtgacagagtgagaccctatctcaaaaaaaaaaaaaatctatgcattgtatgggactttcctttggatcccccaatcaaaggataagcaatgcgtaagcctgtgtccttcctgaagcttctcgactgcccagatagggaggtgagtcctctctatctcctctggctctggaagcaccttgaaaatgtgcattttcaaggacacttgctgggttgtgcattaagggccagtttacttgtctgcctctttgaccacctgtgaactctgttgggtgtactctgctaagttctggggatgaggaaattaataaaggtacagtcttgccttcaaggaacttatggtctagaggagaagaacgagaagtatagataggcagtaacaaagctacttgaagaggccaactgggattctaagggtgggaaagaacagacacaagagataaagtcctaatgaaatgga

SEQ ID NO: 369336 - DNA, 808 bp, Homo sapiens
aggcagcagggtgaagctggcaaagggtatggtggggttggaaggggaatgggcagaaccttcagagcctgagggctcctatccaggccccagggagaagcactaggatgtctgactgaggaggctgggctggagaaccagtgggactggccagctcctttggtttgggctgggctggcccctgacctctatcctcagaaactgacctggtcatctgtggtaagaagttccctcttttgcagcagaaagaacctttcaagaaaaggtggttcgccctggattgccatgagcggaggctgctctattacaagaacccactggatgccttcgagcagggccaggtttttcttgggaacaaggagcagggatatgaagcctacgaagacctgcccaagggcatccgaggaaatcgctggaaagccggactcaccattgtcaccccagagcggagatttgtcctcacttgccccagtgagaaggaacagcaggaatggctggaaagtttgcggggtgtcctgtccagccccttgacgcccctcaaccggcttagtaagaagcaggaactgaggggtgttcttttggacaagggcagaggacagaaaattgcttcttcacttaggttcagctttgataccacaaaagattcctgattcctgactatgctcttttcattgtcttctcttcctgcaaaagaaaagcacagacatgccattattgccaaaaggtctcctctgtccactctgggttcccctaaccgagcccttccccaggagcttttagaggagtttggccctggcagaacccctgg

SEQ ID NO: 369337 - DNA, 356 bp, Homo sapiens
  misc_feature (344)..(344): n is a, c, g, or t
  misc_feature (347)..(348): n is a, c, g, or t
tccacaggacagcattggcatggccacctccctcagccctcttcatttcccttgcagctgcatcaacagagagtggccgcagcagcaggtgacccattaactgaggaactggctgccactgaacacctggaactccttgtgggaagaagtttgcacctcggccctggctgcccaccatcagtgccccgcagtcagcagccattcctggcagtgaactctgccaggactgaagctgtggctttatccatcagctccctgggccttccccgcaacccacctcggggatctgaggatctggtgcatagatgaacatctatcccctcctcccccatccttgtcgggtnccnngcgggttt

SEQ ID NO: 369338 - DNA, 349 bp, Homo sapiens
tcctctcagaactggttagaccaaatggctttgtcaaaatctggacaacagtcgcactttaagaggatcttggcggccaggtccagtcgctcatgcctatactcccagcaatttgggaggcccgtaatcccagtactttgggagggcagatcacaaggtcaggagatcgagaccgtcctgtctaacacggtgaaaccccgtctctactgaaaatacaaaaagttagccgggcgtgatggcgggtgcctgtagtcccagctacttgggaggctgaggcaggagaatggcatgaacctgggaggcggagcttgcagtgagccgagatcgtgccactgcactccagccttgg

SEQ ID NO: 369339 - DNA, 468 bp, Homo sapiens
  misc_feature (214)..(214): n is a, c, g, or t
gatgccaggatgatggaggaggccctcgacggggctccctccctccctccacaccaccaccaccaccaccaccaccgccgtggctgcctctgaagaggacgaggagtgtggctgagagcccagaaaggggcacttcacatctcccgaggccatcagagtcagcctctctggcccaagcagctgcctctgtttgctcaggtaagattgagagccntctcttacgactatttcaccaggagttgggggtgggggctggaggctgttgagtccctgtcgaaaccacagaggttattgagaggaaagctcatccatgaagaccccaacgtgccttcaaaacttgtgtttgcttaagcagcccagacggccaatgcttcatgtagagagcaatgtggtgtttgcaaaacatcgactctgcctcttcctgtgggccgacctccccgcgtgttccaccgggaggcgattcttgcg

SEQ ID NO: 369340 - DNA, 385 bp, Homo sapiens
agaactgttgggaggcataaatgaccctcagcacagggtggtgtgtatggaatgtgcatcataagtggcagctattttgataattactaaacatgatgaatgatgataagcgaaataataacacagcttttcaacattttcactcaataagttaaatttataataggcaagcaaaggagtttccagaattaagcatctgatgggagcttagacaggttgacttttacagctcattctaaccctgagtgagggtctgtgattttataagcccttttagggttcgagtgctacttctaatcaagatcctggtatcatgtttttctccattacgtggaacaataatgaatagataaataaaatataactgggaaaggagaacacagat

SEQ ID NO: 369341 - DNA, 535 bp, Homo sapiens
cgtatttccggagtcccttctgagacagaaggttgtgttggggaactgaagcagtttctgtgggcggacagggaaccctgcgtttctactgtgtgattctgccaccttcctggcccgacgccatgggagtgacttgtgtgtcccagatgcctgtggccgagggcaagagtgttcagcaaaccgtagagctccttacccggaaattggagatgcttggggcagagaagcaaggaacattttgtgtggactgtgagacttaccatacggccgcctctacccttggcagccaaggtaatagagaagaggaaacctaaccaatgactgtggaataatatggaagaagatggaaaaaacttgtttaatgggttgagaaagtggcgacttctataagacatggatagatgcaaacatgtagggcggttacggctcgcccaggaccactccatcctgaaccctcagaagtggtgctgcttagagtgtgccaccaccgagtccgtgtgggcctgcctcaagtgctcccacgtggcctgcggcc

SEQ ID NO: 369342 - DNA, 3158 bp, Homo sapiens
cgtatttccggagtcccttctgagacagaaggttgtgttggggaactgaagcagtttctgtgggcggacagggaaccctgcgtttctactgtgtgattctgccaccttcctggcccgacgccatgggagtgacttgtgtgtcccagatgcctgtggccgagggcaagagtgttcagcaaaccgtagagctccttacccggaaattggagatgcttggggcagagaagcaaggaacattttgtgtggactgtgagacttaccatacggccgcctctacccttggcagccaaggtcagaccgggaagctgatgtatgtgatgcacaactcagagtacccattgagctgtttcgccctctttgagaatggcccttgccttattgctgacaccaactttgatgtgcttatggtgaagctcaagggctttttccagagtgctaaggccagcaagattgagacccggggcaccaggtaccagtactgtgacttcctggtgaaggtgggcacggtcacaatggggcccagtgcccggggcatctctgtggaggtggagtatggcccctgtgtggtagctagtgactgctggagtctgctgctcgagttcctacagagttttctaggcagccacacaccaggggctcccgcagtgtttgggaacagacatgatgcggtctacggcccagcagataccatggtccagtacatggaactcttcaacaagatccgcaagcagcagcaggtgccggtggctgggattcgttagtgatgagcagctgccagctgagctctgtcaccaggggtactccacaggaggagcaggtgctgactttcaggtccctggaccccagaaacccagggtagacatggactctactctccttctctggttctcagctgtggcttttgttctggggctgagtcccctccccaaccccctgactctcacacatagccccccatcagctgttttactccgtgccttactggatttggcctgtcctcaagaatggtaattatgaagagtggagaagtttggaccttgcctcctttaggggaaaggtaggacaggaatgtccctgcctggtactggtgggggaaatagtccgtatccccaactattaaggatttgtcccaggccaatggtgaacatgctgcattttatgtttggattgtgctgtaataagagcctcttccttccctcagaggatgtggctgggcttctatcctagagatggagtagaaggcacaactggtttgatagttactattttctgacctgtttgctgaagtgatttgcgaattgactttcctagggtgttgcctgagtcctttgaaatctccttctgacatctttcccttctgttgtgaaatatgttaagccacaggccaaactgctataagatcgaagtttgtttttttctcacctaataatagagaggtaatcagatggtctagggcagatttaactctacaaggttatcaggaactttgtttccttctgtcttattcagccattcccagtatgttttcttacccataagatcaaagcagactcatcagctccatatctgcattccactggggaaagagagagagaaaagagcagatttttaaaaaaagatatgactgagcattgctcagatcactgtggccacactttgctgaaagagatgctgggacatagaacctcttatctgggcagtcatgtgctgagttaaaactcagggattctgtgactacaagatgaaagacaatttggttgctgagatgcagttaatggcttctgttacatggagctcaatggacgtgcccaggaatgcttttggctgttattttgcagttaatacctcctgtaactaaagcatttgtttatgagttgacttgagagaagggctgatctcagagccgctttgagctaagttggattagtcacactaggaagttaattccacacctttcgtctaagtctcagtattgaggcctctccagttctcatgcaccctgatcttagggttagaatacttgaccctgatacctgcaccatgcttcatggttcctgagctctttctcctgtttcatttgagcctccaaactacatatttggtcatattgcctgcctaccccatgcctgctgcagaaatattcatccaggttaaccttgatatacacagagatggtcttggagaattgtgaatgtatgtactgtattgtcatcaaggatactgtcccttatttgaaggcatctaaagagaaactgttttcagatccaagtgctcagatctaaagcctctgcaacaagtcaggtggtggtcatgtttcccttctagttttggctgacaggaagctcagttcagtaccataactacagaacctgtcatctgtattttttgttctcaccccgtttttgttattttgtttctggttttttatattgaggtatgttttagatatagtttacaaaaataaaacgcacagatcttaaaaaaaaaaaaacaaaaacaacaaaaaaaacaaaaaaaaaaaaaaaaaaaaaaaaaaaaacaaaaacacacaaacacaacacaaaaaaataaaccaccagacacacacaagaagcaaaaaaaaaagaaaacaaaaacgcagagaagacggcgagggggcgcgcgacataccgaccgaccacaggaggagtccaaacagcagcgagacacgccgagatcgcccttccacgcaaggaggggagcgcggacagagggacgccgcctgactacctgccgccccgcgcgccaccgcggcgtctgtgtacgcggcggagccggagcagacaaaaagactagcgatagtctaggggactagagttatgggtcaggctgaaggtgcctgcatcattggtctgtagggtggtgcatgtcatcacagtcataaggtacacataccatactcctaggaaaggtgcttatgtacgcgttatgttggtggcacagtctatatagaagtcgtcgactggtagtctagactactggttgcgttcaggttctaaacaacctatcacgtttatcaggtgatgctcgtagtctaagaatgatagagagcggattcggtgaatgtcatgttgcttagtcgtaaaactctattatatacggacggaggagagatgataaaagaaagaggaaggggaagg

SEQ ID NO: 369343 - DNA, 2225 bp, Homo sapiens
cgtatttccggagtcccttctgagacagaaggttgtgttggggaactgaagcagtttctgtgggcggacagggaaccctgcgtttctactgtgtgattctgccaccttcctggcccgacgccatgggagtgacttgtgtgtcccagatgcctgtggccgagggcaagagtgttcagcaaaccgtagagctccttacccggaaattggagatgcttggggcagagaagcaaggaacattttgtgtggactgtgagacttaccatacggccgcctctacccttggcagccaaggtggagtatggcccctgtgtggtagctagtgactgctggagtctgctgctcgagttcctacagagttttctaggcagccacacaccaggggctcccgcagtgtttgggaacagacatgatgcggtctacggcccagcagataccatggtccagtacatggaactcttcaacaagatccgcaagcagcagcaggtgccggtggctgggattcgttagtgatgagcagctgccagctgagctctgtcaccaggggtactccacaggaggagcaggtgctgactttcaggtccctggaccccagaaacccagggtagacatggactctactctccttctctggttctcagctgtggcttttgttctggggctgagtcccctccccaaccccctgactctcacacatagccccccatcagctgttttactccgtgccttactggatttggcctgtcctcaagaatggtaattatgaagagtggagaagtttggaccttgcctcctttaggggaaaggtaggacaggaatgtccctgcctggtactggtgggggaaatagtccgtatccccaactattaaggatttgtcccaggccaatggtgaacatgctgcattttatgtttggattgtgctgtaataagagcctcttccttccctcagaggatgtggctgggcttctatcctagagatggagtagaaggcacaactggtttgatagttactattttctgacctgtttgctgaagtgatttgcgaattgactttcctagggtgttgcctgagtcctttgaaatctccttctgacatctttcccttctgttgtgaaatatgttaagccacaggccaaactgctataagatcgaagtttgtttttttctcacctaataatagagaggtaatcagatggtctagggcagatttaactctacaaggttatcaggaactttgtttccttctgtcttattcagccattcccagtatgttttcttacccataagatcaaagcagactcatcagctccatatctgcattccactggggaaagagagagagaaaagagcagatttttaaaaaaagatatgactgagcattgctcagatcactgtggccacactttgctgaaagagatgctgggacatagaacctcttatctgggcagtcatgtgctgagttaaaactcagggattctgtgactacaagatgaaagacaatttggttgctgagatgcagttaatggcttctgttacatggagctcaatggacgtgcccaggaatgcttttggctgttattttgcagttaatacctcctgtaactaaagcatttgtttatgagttgacttgagagaagggctgatctcagagccgctttgagctaagttggattagtcacactaggaagttaattccacacctttcgtctaagtctcagtattgaggcctctccagttctcatgcaccctgatcttagggttagaatacttgaccctgatacctgcaccatgcttcatggttcctgagctctttctcctgtttcatttgagcctccaaactacatatttggtcatattgcctgcctaccccatgcctgctgcagaaatattcatccaggttaaccttgatatacacagagatggtcttggagaattgtgaatgtatgtactgtattgtcatcaaggatactgtcccttatttgaaggcatctaaagagaaactgttttcagatccaagtgctcagatctaaagcctctgcaacaagtcaggtggtggtcatgtttcccttctagttttggctgacaggaagctcagttcagtaccataactacagaacctgtcatctgtattttttgttctcaccccgtttttgttattttgtttctggttttttatattgaggtatgttttagatatagtttacaaaaataaaacgcacagatctta

SEQ ID NO: 369344 - DNA, 1829 bp, Homo sapiens
cgtatttccggagtcccttctgagacagaaggttgtgttggggaactgaagcagtttctgtgggcggacagggaaccctgcgtttctactgtgtgattctgccaccttcctggcccgacgccatgggagtgacttgtgtgtcccagatgcctgtggccgagggcaagagtgttcagcaaaccgtagagctccttacccggaaattggagatgcttggggcagagaagcaaggaacattttgtgtggactgtgagacttaccatacggccgcctctacccttggcagccaaggtcagaccgggaagctgatgtatgtgatgcacaactcagagtacccattgagctgtttcgccctctttgagaatggcccttgccttattgctgacaccaactttgatgtgcttatggtgaagctcaagggctttttccagagtgctaaggccagcaagattgagacccggggcaccaggtaccagtactgtgacttcctggtgaaggtgggcacggtcacaatggggcccagtgcccggggcatctctgtggaggtggagtatggcccctgtgtggtagctagtgactgctggagtctgctgctcgagttcctacagagttttctaggcagccacacaccaggggctcccgcagtgtttgggaacagacatgatgcggtctacggcccagcagataccatggtccagtacatggaactcttcaacaagatccgcaagcagcagcaggtgccggtggctgggattcgttagtgatgagcagctgccagctgagctctgtcaccaggggtactccacaggaggagcaggtgctgactttcaggtccctggaccccagaaacccagggtagacatggactctactctccttctctggttctcagctgtggcttttgttctggggctgagtcccctccccaaccccctgactctcacacatagccccccatcagctgttttactccgtgccttactggatttggcctgtcctcaagaatggtaattatgaagagtggagaagtttggaccttgcctcctttaggggaaaggtaggacaggaatgtccctgcctggtactggtgggggaaatagtccgtatccccaactattaaggatttgtcccaggccaatggtgaacatgctgcattttatgtttggattgtgctgtaataagagcctcttccttccctcagaggatgtggctgggcttctatcctagagatggagtagaaggcacaactggtttgatagttactattttctgacctgtttgctgaagtgatttgcgaattgactttcctagggtgttgcctgagtcctttgaaatctccttctgacatctttcccttctgttgtgaaatatgttaagccacaggccaaactgctataagatcgaagtttgtttttttctcacctaataatagagaggtaatcagatggtctagggcagatttaactctacaaggttatcaggaactttgtttccttctgtcttattcagccattcccagtatgttttcttacccataagatcaaagcagactcatcagctccatatctgcattccactggggaaagagagagagaaaagagcagatttttaaaaaaagatatgactgagcattgctcagatcactgtggccacactttgctgaaagagatgctgggacatagaacctcttatctgggcagtcatgtgctgagttaaaactcagggattctgtgactacaagatgaaagacaatttggttgctgtgggttgattttggcagtaataccctctggaacaaaccatttggttatttgccttggagggctgcc

SEQ ID NO: 369345 - DNA, 933 bp, Homo sapiens
cgtatttccggagtcccttctgagacagaaggttgtgttggggaactgaagcagtttctgtgggcggacagggaaccctgcgtttctactgtgtgattctgccaccttcctggcccgacgccatgggagtgacttgtgtgtcccagatgcctgtggccgagggcaagagtgttcagcaaaccgtagagctccttacccggaaattggagatgcttggggcagagaagcaaggaacattttgtgtggactgtgagacttaccatacggccgcctctacccttggcagccaaggtcagaccgggaagctgatgtatgtgatgcacaactcagagtacccattgagctgtttcgccctctttgagaatggcccttgccttattgctgacaccaactttgatgtgcttatggtgaagctcaagggctttttccagagtgctaaggccagcaagattgagacccggggcaccaggtaccagtactgtgacttcctggtgaaggtgggcacggtcacaatggggcccagtgcccggggcatctctgtggaggtggagtatggcccctgtgtggtagctagtgactgctggagtctgctgctcgagttcctacagagttttctaggcagccacacaccaggggctcccgcagtgtttgggaacagacatgatgcggtctacggcccagcagataccatggtccagtacatggaactcttcaacaagatccgcaagcagcagcaggtgccggtggctgggattcgttagtgatgagcagctgccagctgagctctgtcaccaggggtactccacaggaggagcaggtaatagagaagaggaaacctaaccaatgactgtggaataatatggaagaagatggaaaaaacttgtttaatgggtaagaaataaaaactgtaataaaacattattaatgaaagct

SEQ ID NO: 369346 - DNA, 2479 bp, Homo sapiens
cgtatttccggagtcccttctgagacagaaggttgtgttggggaactgaagcagtttctgtgggcggacagggaaccctgcgtttctactgtgtgattctgccaccttcctggcccgacgccatgggagtgacttgtgtgtcccagatgcctgtggccgagggcaagagtgttcagcaaaccgtagagctccttacccggaaattggagatgcttggggcagagaagcaaggaacattttgtgtggactgtgagacttaccatacggccgcctctacccttggcagccaaggtcagaccgggaagctgatgtatgtgatgcacaactcagagtacccattgagctgtttcgccctctttgagaatggcccttgccttattgctgacaccaactttgatgtgcttatggtgaagctcaagggctttttccagagtgctaaggccagcaagattgagacccggggcaccaggtaccagtactgtgacttcctggtgaaggtgggcacggtcacaatggggcccagtgcccggggcatctctgtggaggtggagtatggcccctgtgtggtagctagtgactgctggagtctgctgctcgagttcctacagagttttctaggcagccacacaccaggggctcccgcagtgtttgggaacagacatgatgcggtctacggcccagcagataccatggtccagtacatggaactcttcaacaagatccgcaagcagcagcaggtgccggtggctgggattcgttagtgatgagcagctgccagctgagctctgtcaccaggggtactccacaggaggagcaggtgctgactttcaggtccctggaccccagaaacccagggtagacatggactctactctccttctctggttctcagctgtggcttttgttctggggctgagtcccctccccaaccccctgactctcacacatagccccccatcagctgttttactccgtgccttactggatttggcctgtcctcaagaatggtaattatgaagagtggagaagtttggaccttgcctcctttaggggaaaggtaggacaggaatgtccctgcctggtactggtgggggaaatagtccgtatccccaactattaaggatttgtcccaggccaatggtgaacatgctgcattttatgtttggattgtgctgtaataagagcctcttccttccctcagaggatgtggctgggcttctatcctagagatggagtagaaggcacaactggtttgatagttactattttctgacctgtttgctgaagtgatttgcgaattgactttcctagggtgttgcctgagtcctttgaaatctccttctgacatctttcccttctgttgtgaaatatgttaagccacaggccaaactgctataagatcgaagtttgtttttttctcacctaataatagagaggtaatcagatggtctagggcagatttaactctacaaggttatcaggaactttgtttccttctgtcttattcagccattcccagtatgttttcttacccataagatcaaagcagactcatcagctccatatctgcattccactggggaaagagagagagaaaagagcagatttttaaaaaaagatatgactgagcattgctcagatcactgtggccacactttgctgaaagagatgctgggacatagaacctcttatctgggcagtcatgtgctgagttaaaactcagggattctgtgactacaagatgaaagacaatttggttgctgagatgcagttaatggcttctgttacatggagctcaatggacgtgcccaggaatgcttttggctgttattttgcagttaatacctcctgtaactaaagcatttgtttatgagttgacttgagagaagggctgatctcagagccgctttgagctaagttggattagtcacactaggaagttaattccacacctttcgtctaagtctcagtattgaggcctctccagttctcatgcaccctgatcttagggttagaatacttgaccctgatacctgcaccatgcttcatggttcctgagctctttctcctgtttcatttgagcctccaaactacatatttggtcatattgcctgcctaccccatgcctgctgcagaaatattcatccaggttaaccttgatatacacagagatggtcttggagaattgtgaatgtatgtactgtattgtcatcaaggatactgtcccttatttgaaggcatctaaagagaaactgttttcagatccaagtgctcagatctaaagcctctgcaacaagtcaggtggtggtcatgtttcccttctagttttggctgacaggaagctcagttcagtaccataactacagaacctgtcatctgtattttttgttctcaccccgtttttgttattttgtttctggttttttatattgaggtatgttttagatatagtttacaaaaataaaacgcacagatctta

SEQ ID NO: 369347 - DNA, 2973 bp, Homo sapiens
  misc_feature (47)..(47): n is a, c, g, or t
  misc_feature (73)..(73): n is a, c, g, or t
  misc_feature (80)..(84): n is a, c, g, or t
  misc_feature (96)..(96): n is a, c, g, or t
  misc_feature (98)..(98): n is a, c, g, or t
  misc_feature (100)..(100): n is a, c, g, or t
cagcaaccaccccacccccccccacaactatgtactagtcgagccgngtgtgattcagtcagagggtgagacntaccatnnnnncgcctctacccntngnagcaaggtcagaccgggaagctgatgtatgtgatgcacaactcagagtacccattgagctgtttcgccctctttgagaatggcccttgccttattgctgacaccaactttgatgtgcttatggtgaagctcaagggctttttccagagtgctaaggccagcaagattgagacccggggcaccaggtaccagtactgtgacttcctggtgaaggtgggcacggtcacaatggggcccagtgcccggggcatctctgtggaggtggagtatggcccctgtgtggtagctagtgactgctggagtctgctgctcgagttcctacagagttttctaggcagccacacaccaggggctcccgcagtgtttgggaacagacatgatgcggtctacggcccagcagataccatggtccagtacatggaactcttcaacaagatccgcaagcagcagcaggtgccggtggctgggattcgttagtgatgagcagctgccagctgagctctgtcaccaggggtactccacaggaggagcaggtgctgactttcaggtccctggaccccagaaacccagggtagacatggactctactctccttctctggttctcagctgtggcttttgttctggggctgagtcccctccccaaccccctgactctcacacatagccccccatcagctgttttactccgtgccttactggatttggcctgtcctcaagaatggtaattatgaagagtggagaagtttggaccttgcctcctttaggggaaaggtaggacaggaatgtccctgcctggtactggtgggggaaatagtccgtatccccaactattaaggatttgtcccaggccaatggtgaacatgctgcattttatgtttggattgtgctgtaataagagcctcttccttccctcagaggatgtggctgggcttctatcctagagatggagtagaaggcacaactggtttgatagttactattttctgacctgtttgctgaagtgatttgcgaattgactttcctagggtgttgcctgagtcctttgaaatctccttctgacatctttcccttctgttgtgaaatatgttaagccacaggccaaactgctataagatcgaagtttgtttttttctcacctaataatagagaggtaatcagatggtctagggcagatttaactctacaaggttatcaggaactttgtttccttctgtcttattcagccattcccagtatgttttcttacccataagatcaaagcagactcatcagctccatatctgcattccactggggaaagagagagagaaaagagcagatttttaaaaaaagatatgactgagcattgctcagatcactgtggccacactttgctgaaagagatgctgggacatagaacctcttatctgggcagtcatgtgctgagttaaaactcagggattctgtgactacaagatgaaagacaatttggttgctgagatgcagttaatggcttctgttacatggagctcaatggacgtgcccaggaatgcttttggctgttattttgcagttaatacctcctgtaactaaagcatttgtttatgagttgacttgagagaagggctgatctcagagccgctttgagctaagttggattagtcacactaggaagttaattccacacctttcgtctaagtctcagtattgaggcctctccagttctcatgcaccctgatcttagggttagaatacttgaccctgatacctgcaccatgcttcatggttcctgagctctttctcctgtttcatttgagcctccaaactacatatttggtcatattgcctgcctaccccatgcctgctgcagaaatattcatccaggttaaccttgatatacacagagatggtcttggagaattgtgaatgtatgtactgtattgtcatcaaggatactgtcccttatttgaaggcatctaaagagaaactgttttcagatccaagtgctcagatctaaagcctctgcaacaagtcaggtggtggtcatgtttcccttctagttttggctgacaggaagctcagttcagtaccataactacagaacctgtcatctgtattttttgttctcaccccgtttttgttattttgtttctggttttttatattgaggtatgttttagatatagtttacaaaaataaaacgcacagatcttaaaaaaaaaaaaacaaaaacaacaaaaaaaacaaaaaaaaaaaaaaaaaaaaaaaaaaaaacaaaaacacacaaacacaacacaaaaaaataaaccaccagacacacacaagaagcaaaaaaaaaagaaaacaaaaacgcagagaagacggcgagggggcgcgcgacataccgaccgaccacaggaggagtccaaacagcagcgagacacgccgagatcgcccttccacgcaaggaggggagcgcggacagagggacgccgcctgactacctgccgccccgcgcgccaccgcggcgtctgtgtacgcggcggagccggagcagacaaaaagactagcgatagtctaggggactagagttatgggtcaggctgaaggtgcctgcatcattggtctgtagggtggtgcatgtcatcacagtcataaggtacacataccatactcctaggaaaggtgcttatgtacgcgttatgttggtggcacagtctatatagaagtcgtcgactggtagtctagactactggttgcgttcaggttctaaacaacctatcacgtttatcaggtgatgctcgtagtctaagaatgatagagagcggattcggtgaatgtcatgttgcttagtcgtaaaactctattatatacggacggaggagagatgataaaagaaagaggaaggggaagg

SEQ ID NO: 369348 - DNA, 2446 bp, Homo sapiens
cgtatttccggagtcccttctgagacagaaggttgtgttggggaactgaagcagtttctgtgggcggacagggaaccctgcgtttctactgtgtgattctgccaccttcctggcccgacgccatgggagtgacttgtgtgtcccagatgcctgtggccgagggcaagagtgttcagcaaaccgtagagctccttacccggaaattggagatgcttggggcagagaagcaaggaacattttgtgtggactgtgagacttaccatacggccgcctctacccttggcagccaaggtcagaccgggaagctgatgtatgtgatgcacaactcagagtacccattgagctgtttcgccctctttgagaatggcccttgccttattgctgacaccaactttgatgtgcttatggtgaagctcaagggctttttccagagtgctaaggccagcaagattgagacccggggcaccaggtaccagtactgtgacttcctggtgaaggtgggcacggtcacaatggggcccagtgcccggggcatctctgtggaggtggagtatggcccctgtgtggtagctagtgactgctggagtctgctgctcgagttcctacagagttttctaggcagccacacaccaggggctcccgcagtgtttgggaacagacatgatgcggtctacggcccagcagataccatggtccagtacatggaactcttcaacaagatccgcaagcagcagcaggtgccggtggctgggattcgttagtgatgagcagctgccagctgagctctgtcaccaggggtactccacaggaggagcaggtgctgactttcaggtccctggaccccagaaacccagggtagacatggactctactctccttctctggttctcagctgtggcttttgttctggggctgagtcccctccccaaccccctgactctcacacatagccccccatcagctgttttactccgtgccttactggatttggcctgtcctcaagaatggtaattatgaagagtggagaagtttggaccttgcctcctttaggggaaaggtaggacaggaatgtccctgcctggtactggtgggggaaatagtccgtatccccaactattaaggatttgtcccaggccaatggtgaacatgctgcattttatgtttggattgtgctgtaataagagcctcttccttccctcagaggatgtggctgggcttctatcctagagatggagtagaaggcacaactggtttgatagttactattttctgacctgtttgctgaagtgatttgcgaattgactttcctagggtgttgcctgagtcctttgaaatctccttctgacatctttcccttctgttgtgaaatatgttaagccacaggccaaactgctataagatcgaagtttgtttttttctcacctaataatagagaggtaatcagatggtctagggcagatttaactctacaaggttatcaggaactttgtttccttctgtcttattcagccattcccagtatgttttcttacccataagatcaaagcagactcatcagctccatatctgcattccactggggaaagagagagagaaaagagcagatttttaaaaaaagatatgactgagcattgctcagatcactgtggccacactttgctgaaagagatgctgggacatagaacctcttatctgggcagtcatgtgctgagttaaaactcagggattctgtgactacaagatgaaagacaatttggttgctgagatgcagttaatggcttctgttacatggagctcaatggacgtgcccaggaatgcttttggctgttattttgcagttaatacctcctgtaactaaagcatttgtttatgagttgacttgagagaagggctgatctcagagccgctttgagctaagttggattagtcacactaggaagttaattccacacctttcgtctaagtctcagtattgaggcctctccagttctcatgcaccctgatcttagggttagaatacttgaccctgatacctgcaccatgcttcatggttcctgagctctttctcctgtttcatttgagcctccaaactacatatttggtcatattgcctgcctaccccatgcctgctgcagaaatattcatccaggttaaccttgatatacacagagatggtcttggagaattgtgaatgtatgtactgtattgtcatcaaggatactgtcccttatttgaaggcatctaaagagaaactgttttcagatccaagtgctcagatctaaagcctctgcaacaagtcaggtggtggtcatgtttcccttctagttttggagaacctgtcatctgtattttttgttctcaccccgtttttgttattttgtttctggttttttatattgaggtatgttttagatatagtttacaaaaataaaacgcacagatctta

SEQ ID NO: 369349 - DNA, 807 bp, Homo sapiens
cgtatttccggagtcccttctgagacagaaggttgtgttggggaactgaagcagtttctgtgggcggacagggaaccctgcgtttctactgtgtgattctgccaccttcctggcccgacgccatgggagtgacttgtgtgtcccagatgcctgtggccgagggcaagagtgttcagcaaaccgtagagctccttacccggaaattggagatgcttggggcagagaagcaaggaacattttgtgtggactgtgagacttaccatacggccgcctctacccttggcagccaaggtggagtatggcccctgtgtggtagctagtgactgctggagtctgctgctcgagttcctacagagttttctaggcagccacacaccaggggctcccgcagtgtttgggaacagacatgatgcggtctacggcccagcagataccatggtccagtacatggaactcttcaacaagatccgcaagcagcagcaggtgccggtggctgggattcgttagtgatgagcagctgccagctgagctctgtcaccaggggtactccacaggaggagcaggtaatagagaagaggaaacctaaccaatgactgtggaataatatggaagaagatggaaaaaacttgtttaatgggttgagaaagtggcgacttctataagacatggatagatgcaaacatgtagggcggttacggctcgcccaggaccactccatcctgaaccctcagaagtggtgctgcttagagtgtgccaccaccgagtccgtgtgggcctgcctcaagtgctcccacgtggcctgcggcc

SEQ ID NO: 369350 - DNA, 2070 bp, Homo sapiens
tgagatggagtctcgctttaccgcccaggctggagtgcagtggcactatctcagctcactgcaagctccacctcctgggttcacgccattctcctgcctcagcctccccagtagctgggactacaggcgctcaccaccacgcgcagctaattttttgtatttttagtagagacggggtttcaccgtgttagccaggatggtctcgatctcctgacctcgtgatccgcccgcctcggcctcccaaagtgctgggattacaggcgtgagccaccgcgcctggccaaaaaaagccatgctttttcatccttccagatcgtaacccaggtgttaagtttacatggaatgcctatgccccctcctcttcctagacgtagatatctcctctcccctaggaagtcttccttaactcatcctcagggagttatccacccttcttccagcacagggcacggcactaatggtgagctcttctcacatcttctgctgtggcttttgttctggggctgagtcccctccccaaccccctgactctcacacatagccccccatcagctgttttactccgtgccttactggatttggcctgtcctcaagaatggtaattatgaagagtggagaagtttggaccttgcctcctttaggggaaaggtaggacaggaatgtccctgcctggtactggtgggggaaatagtccgtatccccaactattaaggatttgtcccaggccaatggtgaacatgctgcattttatgtttggattgtgctgtaataagagcctcttccttccctcagaggatgtggctgggcttctatcctagagatggagtagaaggcacaactggtttgatagttactattttctgacctgtttgctgaagtgatttgcgaattgactttcctagggtgttgcctgagtcctttgaaatctccttctgacatctttcccttctgttgtgaaatatgttaagccacaggccaaactgctataagatcgaagtttgtttttttctcacctaataatagagaggtaatcagatggtctagggcagatttaactctacaaggttatcaggaactttgtttccttctgtcttattcagccattcccagtatgttttcttacccataagatcaaagcagactcatcagctccatatctgcattccactggggaaagagagagagaaaagagcagatttttaaaaaaagatatgactgagcattgctcagatcactgtggccacactttgctgaaagagatgctgggacatagaacctcttatctgggcagtcatgtgctgagttaaaactcagggattctgtgactacaagatgaaagacaatttggttgctgagatgcagttaatggcttctgttacatggagctcaatggacgtgcccaggaatgcttttggctgttattttgcagttaatacctcctgtaactaaagcatttgtttatgagttgacttgagagaagggctgatctcagagccgctttgagctaagttggattagtcacactaggaagttaattccacacctttcgtctaagtctcagtattgaggcctctccagttctcatgcaccctgatcttagggttagaatacttgaccctgatacctgcaccatgcttcatggttcctgagctctttctcctgtttcatttgagcctccaaactacatatttggtcatattgcctgcctaccccatgcctgctgcagaaatattcatccaggttaaccttgatatacacagagatggtcttggagaattgtgaatgtatgtactgtattgtcatcaaggatactgtcccttatttgaaggcatctaaagagaaactgttttcagatccaagtgctcagatctaaagcctctgcaacaagtcaggtggtggtcatgtttcccttctagttttggctgacaggaagctcagttcagtaccataactacagaacctgtcatctgtattttttgttctcaccccgtttttgttattttgtttctggttttttatattgaggtatgttttagatatagtttacaaaaataaaacgcacagatctta

SEQ ID NO: 369351 - DNA, 668 bp, Homo sapiens
  misc_feature (3)..(3): n is a, c, g, or t
  misc_feature (6)..(6): n is a, c, g, or t
  misc_feature (9)..(9): n is a, c, g, or t
ttnggnacnagctaactatctcacaatataggtccccaaccactgaccaaactccagtccaggcagccaccagctggcctggtcttgctgcttcctttagcggcttccaaggtccagggacagggggtctgggccaccaagaggctctgctaggctgtccctgcagccacagccaccccactggacccctgcctcccatctgagaggacagccctcttcctggagctgggatctgacacttgctgataccaacggcagataccaggtcaaggattcggtgacttgaagacaggcctcctctgttgctttgagtcaatttctagtacctggggcctaaatcttgactgcacaccggtcatattattgaggtaacgagatgtgagcagaaacaacctgtgtcacacctgggcagaagctttaaaggccagtgctgcccttgttggggaagcaagtatagatatgaatcgttccacaacgcggagcgccccctgccgacccatgctgggcgtgtactataggtataagaatagtctttggagcatcatctgagatagtgagccaagatcgtgcaactgcactccagcctgagtaacagagtgagactccatctcaaaacaaacaaataaacaaaacagaataaatatactcaggatatttacagacacttt

SEQ ID NO: 369352 - DNA, 621 bp, Homo sapiens
ccccatctctacagaaaattttaaaacttaaaaaaattaaaaagtaaacgttagacaggcatggtggtgtgtgtctgtagtcccagctacttgtgaggcttaggcgagaggatggcttgagcccaggaatttgaggctgtagtgggttttgactatgccactgcactccagcccgggtgacacagcaaaaccctatctcttaaaaacaaatcagatttactccaaatgccacttttggctctttatgatgacagctgacatttatagagcctttatgtgcaaagcgcagtggtaggatatctcgtttcacttctcgttgaagtggaagtcaagtctattcttatccttattttacagatgaggagactgaggatcagagagataaagtcacctgtccaaggtcatactgtggatgtagctctaacccaagccctcccgactgcagcacaaattctcagccactaccctattagccccttcatttgaaggtgtcttcatcattgccaagattccttttcctcccggccccctaagtcttcaggattccctcatctcatctccccagagaagccatgacaccatcttctccaaaaacaaagtcagcgctttcactgtagatgg

SEQ ID NO: 369353 - DNA, 1194 bp, Homo sapiens
  misc_feature (3)..(3): n is a, c, g, or t
  misc_feature (6)..(6): n is a, c, g, or t
  misc_feature (9)..(9): n is a, c, g, or t
ttnggnacnagctaactatctcacaatataggtccccaaccactgaccaaactccagtccaggcagccaccagctggcctggtcttgctgcttcctttagcggcttccaaggtccagggacagggggtctgggccaccaagaggctctgctaggctgtccctgcagccacagccaccccactggacccctgcctcccatctgagaggacagccctcttcctggagctgggatctgacacttgctgataccaacggcagataccaggtcaaggattcggtgacttgaagacaggcctcctctgttgctttgagtcaatttctagtacctggggcctaaatcttgactgcacaccggtcatattattgaggtaacgagatgtgagcagaaacaacctgtgtcacacctgggcagaagctttaaaggccagtgctgcccttgttggggaagcaagtatagatatgaatcgttccacaacgcggagcgccccctgccgacccatgctgggcgtgtactatagctcatggaatcttcacaacaaccaaggctcatttgatgggtgaagaaactgaggaccagagaagtgaagcaaagcaccatcatcatagagcttcaaggggcagagccacatcaccaaactgtctccgacaatggcctctgatctgtcctcaagctgatgctattggtcaaagggactaggcctacatagctaggaaaaattaggctcacctggcacttaaaaacagatatacagtatgccctgatggaagattgttgacatcccctatctcttcacttgtcctgtttagagcacttgaagatgctgctattccaggctacctcagcccaccccttcttatccatccattcatccatcttttcatcaacccactcatcacatcatttgtccatccatccttcccctaaccacctacccatctatccagctacttattcatccatttatcacatgcacctacatatctttccatccatctacttacccatccatgcatcatcctccacacccaaccatccacccataacatctttttattaatccactcatcacatcatttgtccatccatccttcccctaaccacctacccatctatccagctacttattcatccatttatcacatgcacctacatatctttccatccatctacttacccatccatgcatgggtacc

SEQ ID NO: 369354 - DNA, 891 bp, Homo sapiens
gtaggatgggaaggtgatgtgggaggggagataggggaagggctggagaggggccatattttaagaatgaagggtgggaacagccatagcctgatattggacacggtcccatagccagccagcatctggggtcctactcgattttgggcctatccacccttcacaaggacacggcatgtttgttatagcttctattaccttttctctttcattagctcatggaatcttcacaacaaccaaggctcatttgatgggtgaagaaactgaggaccagagaagtgaagcaaagcaccatcatcatagagcttcaaggggcagagccacatcaccaaactgtctccgacaatggcctctgatctgtcctcaagctgatgctattggtcaaagggactaggcctacatagctaggaaaaattaggctcacctggcacttaaaaacagatatacagtatgccctgatggaagattgttgacatcccctatctcttcacttgtcctgtttagagcacttgaagatgctgctattccaggctacctcagcccaccccttcttatccatccattcatccatcttttcatcaacccactcatcacatcatttgtccatccatccttcccctaaccacctacccatctatccagctacttattcatccatttatcacatgcacctacatatctttccatccatctacttacccatccatgcatcatcctccacacccaaccatccacccataacatctttttattaatccactcatcacatcatttgtccatccatccttcccctaaccacctacccatctatccagctacttattcatccatttatcacatgcacctacatatctttccatccatctacttacccatccatgcatgggtacc

SEQ ID NO: 369355 - DNA, 865 bp, Homo sapiens
gcagtgcccagcagctgcctcctcaccctagctgagctgaccacaagattccagacctcagctggagctgcagcctcatactggctgagtggctccaagacacagaaggaagcagggtggcaggctgacctcagccagctgcctgccccctctcctctgaggctggcctgggaccgatggggctcttccctccaggaggggtttccgggcctcctcttttcccctacctccctgtggagaactgtccacccctccagatatgctccagtgatgtcggaggggatgcctcaatctggcgagacgcagcggcaacaaaatctgctcagagacaaacggacatgttgctgatatgaatctcacttggtgaggaaactgaggctcagagaagaaacatcattttcccagtgagccaaggcaatggtgttagaactatctctacctggctccagagcttgtgtttatgcccctgcaccgatacggccttccatgaagcccggcccagaaagctttggagtctggttacatctctgccacgcaggcctggccttcccaggacaagagccccctgcagcttccagaaccccgtggtctcaagcagagagctgtcgcacttccttctttgccttctcatcctccaagtcccatcttagtcatcttcctccgggaaacagaacgccggggtcctcctctgtccccccatagcccccaaagctttacatcatcatcgtttagtcagatggtaattagactggttgtgtgcctcctccactggactgtgtcccatctaccattgtattcccaggacccacttgatataaataggctggatgaataactgagtgaataaaggatggaaatcgtccat

SEQ ID NO: 369356 - DNA, 280 bp, Homo sapiens
acatcatttgtccatccatccttcccctaaccacctacccatctatccagctacttattcatccatttatcacatgcacctacatatctttccatccatctacttacccatccatgcatcatcctccacacccaaccatccacccataacatctttttattaatccatccacccatctatccacccagccatctccccagttactcattcatttgtctcatccatccagctatttctccctctattccattcatgcatccctccacccatctatcacatc

SEQ ID NO: 369357 - DNA, 362 bp, Homo sapiens
ggtgggaacagccatagcctgatattggacacggtcccatagccagccagcatctggggtcctactcgattttgggcctatccacccttcacaaggacacggcatgtttgttatagcttctattaccttttctctttcattagctcatggaatcttcacaacaaccaaggctcatttgatgggtgaagaaactgaggaccagagaagtgaagcaaagcaccatcatcatagagcttcaaggggcagagccacatcaccaaactgtctccgacaatggcctctgatctgtcctcaagctgatgctattggtcaaagggactaggcctacatagctaggaaaaattaggctcacctggcactta

SEQ ID NO: 369358 - DNA, 975 bp, Homo sapiens
gcagtgcccagcagctgcctcctcaccctagctgagctgaccacaagattccagacctcagctggagctgcagcctcatactggctgagtggctccaagacacagaaggaagcagggtggcaggctgacctcagccagctgcctgccccctctcctctgaggctggcctgggaccgatggggctcttccctccaggaggggtttccgggcctcctcttttcccctacctccctgtggagaactgtccacccctccagatatgctccagtgatgtcggaggggatgcctcaatctggcgagacgcagcggcaacaaaatctgctcagagacaaacggacatgttgctgatatgaatctcacttggtgaggaaactgaggctcagagaagaaacatcattttcccagtgagccaaggcaatggtgttagaactatctctacctggctccagagcttgtgtttatgcccctgcaccgatacggccttccatgaagcccggcccagaaagctttggagtctggttacatctctgccacgcaggcctggccttcccaggacaagaggtaacgagatgtgagcagaaacaacctgtgtcacacctgggcagaagctttaaaggccagtgctgcccttgttggggaagcaagtatagatatgaatcgttccacaacgcggagcgccccctgccgacccatgctgggcgtgtactatagatgaggagactgaggatcagagagataaagtcacctgtccaaggtcatactgtggatgtagctctaacccaagccctcccgactgcagcacaaattctcagccactaccctattagccccttcatttgaaggtgtcttcatcattgccaagattccttttcctcccggccccctaagtcttcaggattccctcatctcatctccccagagaagccatgacaccatcttctccaaaaacaaagtcagcgctttcactgtagatgg

SEQ ID NO: 369359 - DNA, 782 bp, Homo sapiens
  misc_feature (3)..(3): n is a, c, g, or t
  misc_feature (6)..(6): n is a, c, g, or t
  misc_feature (9)..(9): n is a, c, g, or t
ttnggnacnagctaactatctcacaatataggtccccaaccactgaccaaactccagtccaggcagccaccagctggcctggtcttgctgcttcctttagcggcttccaaggtccagggacagggggtctgggccaccaagaggctctgctaggctgtccctgcagccacagccaccccactggacccctgcctcccatctgagaggacagccctcttcctggagctgggatctgacacttgctgataccaacggcagataccaggtcaaggattcggtgacttgaagacaggcctcctctgttgctttgagtcaatttctagtacctggggcctaaatcttgactgcacaccggtcatattattgaggtaacgagatgtgagcagaaacaacctgtgtcacacctgggcagaagctttaaaggccagtgctgcccttgttggggaagcaagtatagatatgaatcgttccacaacgcggagcgccccctgccgacccatgctgggcgtgtactatagatgaggagactgaggatcagagagataaagtcacctgtccaaggtcatactgtggatgtagctctaacccaagccctcccgactgcagcacaaattctcagccactaccctattagccccttcatttgaaggtgtcttcatcattgccaagattccttttcctcccggccccctaagtcttcaggattccctcatctcatctccccagagaagccatgacaccatcttctccaaaaacaaagtcagcgctttcactgtagatgg

SEQ ID NO: 369360 - DNA, 1038 bp, Homo sapiens
  misc_feature (3)..(3): n is a, c, g, or t
  misc_feature (6)..(6): n is a, c, g, or t
  misc_feature (9)..(9): n is a, c, g, or t
ttnggnacnagctaactatctcacaatataggtccccaaccactgaccaaactccagtccaggcagccaccagctggcctggtcttgctgcttcctttagcggcttccaaggtccagggacagggggtctgggccaccaagaggctctgctaggctgtccctgcagccacagccaccccactggacccctgcctcccatctgagaggacagccctcttcctggagctgggatctgacacttgctgataccaacggcagataccaggtaacgagatgtgagcagaaacaacctgtgtcacacctgggcagaagctttaaaggccagtgctgcccttgttggggaagcaagtatagatatgaatcgttccacaacgcggagcgccccctgccgacccatgctgggcgtgtactatagctcatggaatcttcacaacaaccaaggctcatttgatgggtgaagaaactgaggaccagagaagtgaagcaaagcaccatcatcatagagcttcaaggggcagagccacatcaccaaactgtctccgacaatggcctctgatctgtcctcaagctgatgctattggtcaaagggactaggcctacatagctaggaaaaattaggctcacctggcacttatcacttgtcctgtttagagcacttgaagatgctgctattccaggctacctcagcccaccccttcttatccatccattcatccatcttttcatcaacccactcatcacatcatttgtccatccatccttcccctaaccacctacccatctatccagctacttattcatccatttatcacatgcacctacatatctttccatccatctacttacccatccatgcatcatcctccacacccaaccatccacccataacatctttttattaatccactcatcacatcatttgtccatccatccttcccctaaccacctacccatctatccagctacttattcatccatttatcacatgcacctacatatctttccatccatctacttacccatccatgcatgggtacc

SEQ ID NO: 369361 - DNA, 637 bp, Homo sapiens
  misc_feature (562)..(562): n is a, c, g, or t
ctgacattgagcattttaatgagtgcctgggcaatatcaaggctggttgtaatatcaaggctggttgttcagggagcacaatgactctctaagcctggattcctcacttgcaaacgagagtggtgctgctcacaactcaggtactatttggagaatcaacaagatttgacgtgacatgataaacccagagaatgaaagccaggaagcatttaatacatgctacaatttttcctttgcttttaaaaagttgatttgttatcaagagaagatgacagaaataataccatttcgtaactttccattcttcactttgatagtttatcatatatgtgtttatttttctcataataatatacaggaaacacattatattttcctagcgctagtcaaattctatttaagtttgttaacacactaaatcattgtcagataggggtcatcattaggtttcattggtgttggtcaaagtggacactatttaaagacatcacagcctggttcccaccctcagggcacagggagcagaaacaatgtgttcattttgtcttaaaagtcccatcancaggtcgacagggccagtcaacacagacatgttctaaatatttgcttacgggtggacataattacttaaaataca

SEQ ID NO: 369362 - DNA, 289 bp, Homo sapiens
cccttcctttgacgcctgaccttagaacgcctgacctttggagcctgacctttggactctagttccaaggaaaaaattcccagcgttttctacattcggtgctgcgtcatctgaaatcggcacattccatggaggaaggagtcctgctttgttgcatgtatcctagggtttaatgttggtaaatgagtcactctagcatttgtagaaggctccctgagactcctgcagcctagttccaagaaaaaaactcccagcgttttctacattcggcgctacgtacaaaggtcag

SEQ ID NO: 369363 - DNA, 2548 bp, Homo sapiens
  misc_feature (1429)..(1429): n is a, c, g, or t
gtatttttagttgagacgggattttgccatgttggctaggctggtctcgaactcctgacctcaggtgatccggccacctcagcctcccaaagtgctgggattacaggcatgagccactgtgcctggccgtggaccttcttttcaaagaattatggaggcttattttagttcccctaacttggaaatctcctgaggaagaaaggtgactacaggcatttgtcaaaaatttgtaaaggcaagtttattagcctctgccatcgggggcaaagaataatagctaaggcaaacaatagacacaccaaaaagcctgggaggaaaagctggaaagtaagatattttggagaataaaggcttttaaaacttccacatattcttgggaatccaaaaggccacatgtacatgcagggtgagcaaatagagaagacttgagaaagccttaaactctcacctctggctaaccatgaggcttgctcaaataggaagtgaaaactaaggtgaatttgttgcttagctgaatgttgaaggtgtgccccaacacttacacagagcctactggtaaagacagagtgttttcttttgtcttggtttcaggcatttaaggaaatctgtttctcttttggatcactagctgcaaattaagctaacagaacaggagctcagctggtcacacacagcaacgaatacagactttataaagttcagaaaagttaccaaacagtggtaaccataacaagtaccaacaatgaactatggggagggaggagaatctgatttccagagttaccacattataatactattcaaaatgtcacatttttagcaaagattacatgacaaggaaaaaccagaaaagtatggcccatacacaggtaaaaaaagaaattaatagaaactacccctgaagaagcacagacttcggatgtacaaaacaaagacttttcatcaactcttttagatatgctagaagagctaaaggaaaccatggacagagaacaaaaaaattaggaaagcaatgtctcatccaatacagaatatcaataaagagattgaaattgtagaaaagaaccaaatagaaattctggagttgaaaagtattataactaaaactgaaaattcactagaggtattcagcagcagactggagaagtcagaagaaagaatcaacaggcttcaagataggtcaattaagattatacagtctgaggagcagaaaggaaaaagaatgaagaaaaatgaacagagcataaaagacctctgggactctatcaagcataccagtatatgcatgaggggagtcccagaaggagaagaaagagagaaagggacataatatttgaagaaataatggtagaaaatgtcccagctttgatgaaatacatgaatctagatattcaagaggctcaaagaaccctaaatagggtaaactcanaaagacccacaccggaatgcaaaagtgagctgggtgtggtggcacgtgcctgtggtcccagctactcgagaggctaaggcaggaaaatcgcttgaacccaggaggcagagattgcggtgagccgggattgcgccagtgcactccagctgggcgacagagcgagattccatctcgaaaaaaaaaaaaaaacaaaaaactattgctgcagtcattcagatggaaatggggaaagaataatattaactgatttcaaaaaggacttgaagatgtgaatcatctattttgctgaagaaatcttaactctttgaaattactttttgttgctgttgtcatactcttaggtgccaaactgcggtaaattttttatcagtgaagtggaagcatgtgttttgttgttttgggaatttttatcaagtatcttcagagaagattatttcctgctttatcttcaaaaactggaaaggaagggtcaaagaaaagacagtagctggccggtcatggtggctcatgcctgtaatcccaacactttgggaggctgaggtgggcagatcacctgaggttgggagttcgaggccagcctgaccaacgtggagaaatgccatctctactaaagatgcaaggattggccgggcatggtggcgcgtgcctgtgatcccagctgctcaggaggctgaggcaggagaatcgcttggacctgggaggtggaggttgcggtgagctgagatcacgccattgcactccagcctgggcaacaagcgaaactctgtctcaaaaaaaaaagaaaagacagtagcttatgttcatgtcaagcacctctcatcacagtctagttccaaggaaaaaattcccagcgttttctacattcggtgctgcgtcatctgaaatcggcacattccatggaggaaggagtcctgctttgttgcatgtatcctagggtttaatgttggtaaatgagtcactctagcatttgtagaaggctccctgagactcctgcagcagtcgaccaagcccaaggacataattgaatctggagagtcctggggccttgttttgaaaaagacttgaaatacacataggaagaaaggcataaaaataaatgttcacttgtctctgctgtga

SEQ ID NO: 369364 - DNA, 2623 bp, Homo sapiens
  misc_feature (1504)..(1504): n is a, c, g, or t
agcgggttcaaggcagaaggccgtgcgtcagggcggccctcagcggagatgcgtgcacggagcggggagcgctgctcggggcagggaatgaaagcggcgcttgagactggaaatttagggagatgagttccttgggaacaacgctgaaccatctcactgccccaccctaccccttgttatttttttttgagacaggtcttgcgctgtcgtccagtctgagtgcagtgacgcgatcacggctcactgcagcctcgacctccggggcttacgggtcatcccacctcagccctctaagtagctggcaccacgggcatgcaccaccacacccggctaattttttaaaaaaagtttttccggagatagggtctcgctgtgttacccaggctggtctcgaacccctggcctgaagcgatcctcccgcctcggcctcccaaagtgctgggattacaggcgtgagccactgcgctcggcttttcacccctttctaacgttttccatacccagcggtgccctgcccaccctctctttatctctcacttttccctcctctgtttcttcctcgctgaagtccattggtgaaagaaaattcatgtgaaagttctcagagtcgtccttgtctactccactaccaaatgttgaagttcttcaagaatcagtcctttggaggcatttaaggaaatctgtttctcttttggatcactagctgcaaattaagctaacagaacaggagctcagctggtcacacacagcaacgaatacagactttataaagttcagaaaagttaccaaacagtggtaaccataacaagtaccaacaatgaactatggggagggaggagaatctgatttccagagttaccacattataatactattcaaaatgtcacatttttagcaaagattacatgacaaggaaaaaccagaaaagtatggcccatacacaggtaaaaaaagaaattaatagaaactacccctgaagaagcacagacttcggatgtacaaaacaaagacttttcatcaactcttttagatatgctagaagagctaaaggaaaccatggacagagaacaaaaaaattaggaaagcaatgtctcatccaatacagaatatcaataaagagattgaaattgtagaaaagaaccaaatagaaattctggagttgaaaagtattataactaaaactgaaaattcactagaggtattcagcagcagactggagaagtcagaagaaagaatcaacaggcttcaagataggtcaattaagattatacagtctgaggagcagaaaggaaaaagaatgaagaaaaatgaacagagcataaaagacctctgggactctatcaagcataccagtatatgcatgaggggagtcccagaaggagaagaaagagagaaagggacataatatttgaagaaataatggtagaaaatgtcccagctttgatgaaatacatgaatctagatattcaagaggctcaaagaaccctaaatagggtaaactcanaaagacccacaccggaatgcaaaagtgagctgggtgtggtggcacgtgcctgtggtcccagctactcgagaggctaaggcaggaaaatcgcttgaacccaggaggcagagattgcggtgagccgggattgcgccagtgcactccagctgggcgacagagcgagattccatctcgaaaaaaaaaaaaaaacaaaaaactattgctgcagtcattcagatggaaatggggaaagaataatattaactgatttcaaaaaggacttgaagatgtgaatcatctattttgctgaagaaatcttaactctttgaaattactttttgttgctgttgtcatactcttaggtgccaaactgcggtaaattttttatcagtgaagtggaagcatgtgttttgttgttttgggaatttttatcaagtatcttcagagaagattatttcctgctttatcttcaaaaactggaaaggaagggtcaaagaaaagacagtagctggccggtcatggtggctcatgcctgtaatcccaacactttgggaggctgaggtgggcagatcacctgaggttgggagttcgaggccagcctgaccaacgtggagaaatgccatctctactaaagatgcaaggattggccgggcatggtggcgcgtgcctgtgatcccagctgctcaggaggctgaggcaggagaatcgcttggacctgggaggtggaggttgcggtgagctgagatcacgccattgcactccagcctgggcaacaagcgaaactctgtctcaaaaaaaaaagaaaagacagtagcttatgttcatgtcaagcacctctcatcacagtctagttccaaggaaaaaattcccagcgttttctacattcggtgctgcgtcatctgaaatcggcacattccatggaggaaggagtcctgctttgttgcatgtatcctagggtttaatgttggtaaatgagtcactctagcatttgtagaaggctccctgagactcctgcagcagtcgaccaagcccaaggacataattgaatctggagagtcctggggccttgttttgaaaaagacttgaaatacacataggaagaaaggcataaaaataaatgttcacttgtctctgctgtga

SEQ ID NO: 369365 - DNA, 2107 bp, Homo sapiens
  misc_feature (988)..(988): n is a, c, g, or t
cccgggccgctgcccctcaccggacgccgcgcgccaccggccctccgcggggcaggggctgctgcgagctcgccgggcgccctttagacagtcgtccttgtctactccactaccaaatgttgaagttcttcaagaatcagtcctttggaggcatttaaggaaatctgtttctcttttggatcactagctgcaaattaagctaacagaacaggagctcagctggtcacacacagcaacgaatacagactttataaagttcagaaaagttaccaaacagtggtaaccataacaagtaccaacaatgaactatggggagggaggagaatctgatttccagagttaccacattataatactattcaaaatgtcacatttttagcaaagattacatgacaaggaaaaaccagaaaagtatggcccatacacaggtaaaaaaagaaattaatagaaactacccctgaagaagcacagacttcggatgtacaaaacaaagacttttcatcaactcttttagatatgctagaagagctaaaggaaaccatggacagagaacaaaaaaattaggaaagcaatgtctcatccaatacagaatatcaataaagagattgaaattgtagaaaagaaccaaatagaaattctggagttgaaaagtattataactaaaactgaaaattcactagaggtattcagcagcagactggagaagtcagaagaaagaatcaacaggcttcaagataggtcaattaagattatacagtctgaggagcagaaaggaaaaagaatgaagaaaaatgaacagagcataaaagacctctgggactctatcaagcataccagtatatgcatgaggggagtcccagaaggagaagaaagagagaaagggacataatatttgaagaaataatggtagaaaatgtcccagctttgatgaaatacatgaatctagatattcaagaggctcaaagaaccctaaatagggtaaactcanaaagacccacaccggaatgcaaaagtgagctgggtgtggtggcacgtgcctgtggtcccagctactcgagaggctaaggcaggaaaatcgcttgaacccaggaggcagagattgcggtgagccgggattgcgccagtgcactccagctgggcgacagagcgagattccatctcgaaaaaaaaaaaaaaacaaaaaactattgctgcagtcattcagatggaaatggggaaagaataatattaactgatttcaaaaaggacttgaagatgtgaatcatctattttgctgaagaaatcttaactctttgaaattactttttgttgctgttgtcatactcttaggtgccaaactgcggtaaattttttatcagtgaagtggaagcatgtgttttgttgttttgggaatttttatcaagtatcttcagagaagattatttcctgctttatcttcaaaaactggaaaggaagggtcaaagaaaagacagtagctggccggtcatggtggctcatgcctgtaatcccaacactttgggaggctgaggtgggcagatcacctgaggttgggagttcgaggccagcctgaccaacgtggagaaatgccatctctactaaagatgcaaggattggccgggcatggtggcgcgtgcctgtgatcccagctgctcaggaggctgaggcaggagaatcgcttggacctgggaggtggaggttgcggtgagctgagatcacgccattgcactccagcctgggcaacaagcgaaactctgtctcaaaaaaaaaagaaaagacagtagcttatgttcatgtcaagcacctctcatcacagtctagttccaaggaaaaaattcccagcgttttctacattcggtgctgcgtcatctgaaatcggcacattccatggaggaaggagtcctgctttgttgcatgtatcctagggtttaatgttggtaaatgagtcactctagcatttgtagaaggctccctgagactcctgcagcagtcgaccaagcccaaggacataattgaatctggagagtcctggggccttgttttgaaaaagacttgaaatacacataggaagaaaggcataaaaataaatgttcacttgtctctgctgtga

SEQ ID NO: 369366 - DNA, 2793 bp, Homo sapiens
  misc_feature (1429)..(1429): n is a, c, g, or t
gtatttttagttgagacgggattttgccatgttggctaggctggtctcgaactcctgacctcaggtgatccggccacctcagcctcccaaagtgctgggattacaggcatgagccactgtgcctggccgtggaccttcttttcaaagaattatggaggcttattttagttcccctaacttggaaatctcctgaggaagaaaggtgactacaggcatttgtcaaaaatttgtaaaggcaagtttattagcctctgccatcgggggcaaagaataatagctaaggcaaacaatagacacaccaaaaagcctgggaggaaaagctggaaagtaagatattttggagaataaaggcttttaaaacttccacatattcttgggaatccaaaaggccacatgtacatgcagggtgagcaaatagagaagacttgagaaagccttaaactctcacctctggctaaccatgaggcttgctcaaataggaagtgaaaactaaggtgaatttgttgcttagctgaatgttgaaggtgtgccccaacacttacacagagcctactggtaaagacagagtgttttcttttgtcttggtttcaggcatttaaggaaatctgtttctcttttggatcactagctgcaaattaagctaacagaacaggagctcagctggtcacacacagcaacgaatacagactttataaagttcagaaaagttaccaaacagtggtaaccataacaagtaccaacaatgaactatggggagggaggagaatctgatttccagagttaccacattataatactattcaaaatgtcacatttttagcaaagattacatgacaaggaaaaaccagaaaagtatggcccatacacaggtaaaaaaagaaattaatagaaactacccctgaagaagcacagacttcggatgtacaaaacaaagacttttcatcaactcttttagatatgctagaagagctaaaggaaaccatggacagagaacaaaaaaattaggaaagcaatgtctcatccaatacagaatatcaataaagagattgaaattgtagaaaagaaccaaatagaaattctggagttgaaaagtattataactaaaactgaaaattcactagaggtattcagcagcagactggagaagtcagaagaaagaatcaacaggcttcaagataggtcaattaagattatacagtctgaggagcagaaaggaaaaagaatgaagaaaaatgaacagagcataaaagacctctgggactctatcaagcataccagtatatgcatgaggggagtcccagaaggagaagaaagagagaaagggacataatatttgaagaaataatggtagaaaatgtcccagctttgatgaaatacatgaatctagatattcaagaggctcaaagaaccctaaatagggtaaactcanaaagacccacaccggaatgcaaaagtgagctgggtgtggtggcacgtgcctgtggtcccagctactcgagaggctaaggcaggaaaatcgcttgaacccaggaggcagagattgcggtgagccgggattgcgccagtgcactccagctgggcgacagagcgagattccatctcgaaaaaaaaaaaaaaacaaaaaactattgctgcagtcattcagatggaaatggggaaagaataatattaactgatttcaaaaaggacttgaagatgtgaatcatctattttgctgaagaaatcttaactctttgaaattactttttgttgctgttgtcatactcttaggtgccaaactgcggtaaattttttatcagtgaagtggaagcatgtgttttgttgttttgggaatttttatcaagtatcttcagagaagattatttcctgctttatcttcaaaaactggaaaggaagggtcaaagaaaagacagtagctggccggtcatggtggctcatgcctgtaatcccaacactttgggaggctgaggtgggcagatcacctgaggttgggagttcgaggccagcctgaccaacgtggagaaatgccatctctactaaagatgcaaggattggccgggcatggtggcgcgtgcctgtgatcccagctgctcaggaggctgaggcaggagaatcgcttggacctgggaggtggaggttgcggtgagctgagatcacgccattgcactccagcctgggcaacaagcgaaactctgtctcaaaaaaaaaagaaaagacagtagcttatgttcatgtcaagcacctctcatcacagtctagttccaaggaaaaaattcccagcgttttctacattcggtgctgcgtcatctgaaatcggcacattccatggaggaaggagtcctgctttgttgcatgtatcctagggtttaatgttggtaaatgagtcactctagcatttgtagaaggctccctgagactcctgcagcagtcgaccaagcccaaggacataattgaatctggagagtcctggggccttgttttgaaaaagacttgaaatacacataggaagaaaggcataaaaataaatgttcacttgtctctgctgtgagtatgtgttccaacttttcagtgatggctttgagaattctcaaacttgactggctctaagtgtatctggtggcttttgtatcgtaacctgaaactggcttagtactttttcctaaaagctcaggatttgagaatgaggaccccttcgccaggaaaatggcatgaacccaggaggcagagtttgcaatgagccgagatcgcgccactgcactccagactgggtgagagagctagactccatctcga

SEQ ID NO: 369367 - DNA, 1880 bp, Homo sapiens
  misc_feature (761)..(761): n is a, c, g, or t
gaactgccaaagttatttttaagtggctgtgacattttatattctaccagcagtgaatgaaatttccaatttctcatcctgggagccaaggaggagaatctgatttccagagttaccacattataatactattcaaaatgtcacatttttagcaaagattacatgacaaggaaaaaccagaaaagtatggcccatacacaggtaaaaaaagaaattaatagaaactacccctgaagaagcacagacttcggatgtacaaaacaaagacttttcatcaactcttttagatatgctagaagagctaaaggaaaccatggacagagaacaaaaaaattaggaaagcaatgtctcatccaatacagaatatcaataaagagattgaaattgtagaaaagaaccaaatagaaattctggagttgaaaagtattataactaaaactgaaaattcactagaggtattcagcagcagactggagaagtcagaagaaagaatcaacaggcttcaagataggtcaattaagattatacagtctgaggagcagaaaggaaaaagaatgaagaaaaatgaacagagcataaaagacctctgggactctatcaagcataccagtatatgcatgaggggagtcccagaaggagaagaaagagagaaagggacataatatttgaagaaataatggtagaaaatgtcccagctttgatgaaatacatgaatctagatattcaagaggctcaaagaaccctaaatagggtaaactcanaaagacccacaccggaatgcaaaagtgagctgggtgtggtggcacgtgcctgtggtcccagctactcgagaggctaaggcaggaaaatcgcttgaacccaggaggcagagattgcggtgagccgggattgcgccagtgcactccagctgggcgacagagcgagattccatctcgaaaaaaaaaaaaaaacaaaaaactattgctgcagtcattcagatggaaatggggaaagaataatattaactgatttcaaaaaggacttgaagatgtgaatcatctattttgctgaagaaatcttaactctttgaaattactttttgttgctgttgtcatactcttaggtgccaaactgcggtaaattttttatcagtgaagtggaagcatgtgttttgttgttttgggaatttttatcaagtatcttcagagaagattatttcctgctttatcttcaaaaactggaaaggaagggtcaaagaaaagacagtagctggccggtcatggtggctcatgcctgtaatcccaacactttgggaggctgaggtgggcagatcacctgaggttgggagttcgaggccagcctgaccaacgtggagaaatgccatctctactaaagatgcaaggattggccgggcatggtggcgcgtgcctgtgatcccagctgctcaggaggctgaggcaggagaatcgcttggacctgggaggtggaggttgcggtgagctgagatcacgccattgcactccagcctgggcaacaagcgaaactctgtctcaaaaaaaaaagaaaagacagtagcttatgttcatgtcaagcacctctcatcacagtctagttccaaggaaaaaattcccagcgttttctacattcggtgctgcgtcatctgaaatcggcacattccatggaggaaggagtcctgctttgttgcatgtatcctagggtttaatgttggtaaatgagtcactctagcatttgtagaaggctccctgagactcctgcagcagtcgaccaagcccaaggacataattgaatctggagagtcctggggccttgttttgaaaaagacttgaaatacacataggaagaaaggcataaaaataaatgttcacttgtctctgctgtga

SEQ ID NO: 369368 - DNA, 451 bp, Homo sapiens
tagatctgccttcttgggatgtattcaaggatgctagccgtgtttgagactgtaaatatgtctagtgaatagggcttcaggctgtgtgtgtttgccttgttttgcacagaattcggcacagccccaagcacagatgggtgcttcataaatattgttgaaggatgatgacacaaaggattatttaatacctatggacctcaggccacaaacatactttcaatgtgttttacttctgaaatcatttgaaccaaaatgtttcagcaacacagattcatctgcaaccacaaatcagacacatttagaatgacaaagccccaaaagaatgccattttcaaggctgaaactgtattattctgggctaaatggaatccttgttttagtgacactgtaagagtagaaattaaagacactgaaaatcttcccttggggaaccacaattatctgtgaacaa

SEQ ID NO: 369369 - DNA, 89 bp, Homo sapiens
acaatggtaaagagctggaagttaacatcatccccaacccatggtaatggttcccaaattaggagatcagccttggtcatgtcaatgcc

SEQ ID NO: 369370 - DNA, 1515 bp, Homo sapiens
tttttgacctcattaaagatatgtcgttcatttattctgaatcttatattgatagataataccagaagatttcagcatagcagataaaatacagcaaatcctaaccagcacaggttttagtgacaaacgggcccgttccatggacatagatgacttcatcaggtaattacatttttgttttcctaagtgtttacatttctttactgtgacaccttcagattggagattttaaaggcttttaagcggtataaggtgctacctgggagagttattgcatagcacttccatggcatggaatagtatttggtgtagaagatggaggctagttagctgcagcagaatgaacattttctttaagaacagtagtaaagaacagtccgagccagaagattgcctttgtgttaatgtggtgtgcaggttccaatgtggtgtgcaggttcctcccttcctgctccttccccaactctcattcatagtcttagtcttaatagcttatccctccaaaatagtccataaggtagaaaaatcataatacatgtaactggatctgatttttaaaatttccttactgggaatagctgttgttaaatcaatcttaagcatacaataatgccagttagaatcctacctggttatccatttaggaataatacagttttgtagcctgaagcaagttctacacttctcaagtaaaaagctgtcataattatctaggtaatttagaccaaaatttgttttgcttgaattaagcaagtaagtcttatgaaaacagaataaggcttcaattaattacccaggtaattactaacctgtacttactgtttttaatcattaagatgttaactttcagaaggtcttgcctatttagccaattcacttttaaagcttccatgttctagaggctgaataaaaaatgagagtagattgttctaaaagtcattggtttgactttttctaagctggaaacacagttctatataactaagacaaatggagtttatattttattggctggctagcagtactactgagtcattttagatgttaatcctaggcattgaatactattcataaatatctactttgcttttttagaaatttatctggacctgtttctatgggccagcctaaacataacctcaggtctaaagagaaatattttctctttttcttcattttcactaaatttcctcaaagttattgggcatgtgcagtttactaactagaatctattaagtacataggtatctacagagagaaacaatgtgtatttaatttgaatataaacaacagctcaagagaggaagaaggggcatgtaagattggtttttcatctgacttctgccaattccaaacagcttcttgttcagttaccttgaaacaaatgccagtgagttcttaggcctgggataatgaaagtctaagataattttagtcaaattcattacgacataaaggctctaatgaaagaggcaccaacatggcatggttttaaccaatacatatcttataaat

SEQ ID NO: 369371 - DNA, 1598 bp, Homo sapiens
agcaggaggagctcagagcgtacgggagggggcggacccttgcccctccggcgcttgggccagagtggtgcgggcggcgcgtggcggcgatccccacgtggtggctttctcacgctagccctctttggtcctccttgacgtcccgggcctgtgggcccgctttctgccgagatgccgaaggtcaagtcgggggccatcggccgccgccgcgggcggcaggagcagcgccgggagctgaagagcgctggaggactcatgttcaacacggggattgggcagcacattttgaaaaatcctctcattattaacagcattatcgataaggctgccttaagaccaactgatgtagtgctggaagttggacctggaactggcaacatgactgtaaagttgttagaaaaggcaaaaaaggttgttgcttgtgaacttgacccaaggctagtagctgaacttcacaaaagagttcagggcacgcctgtggccagcaaacttcaagtactggtgggtgatgtgctgaaaacagatttgccattctttgatacttgtgtggcaaatttgccttatcagatctcttcgccttttgtcttcaagctgttgctacatcgaccttttttcaggtgtgctatacttatgtttcaaagagaatttgccctccgactggttgcaaaacctggagataagttatactgcagactctcaattaatacacagctgttggcacgtgtggaccatctaatgaaagtgggaaagaataacttcagaccaccgcccaaggtggaatccagtgttgtaaggatagaacctaagaatccaccaccacccatcaattttcaggaatgggatggtctagtaaggataacctttgttaggaaaaacaagacactctctgctgcatttaaatcaagtgcagtgcaacaactcttggaaaaaaactacagaattcactgttcagtccataatattataataccagaagatttcagcatagcagataaaatacagcaaatcctaaccagcacaggttttagtgacaaacgggcccgttccatggacatagatgacttcatcagattgctacatggattcaacgcagaaggtattcatttttcctaggtatttggaaaacagaaattttcaaggtcaagaaaagaaatgaattttgtattttttgtatttgagaagataatgcttttgctttactgagacattatttacttgactatttttggttcaatactactactgttgtcaccatttatgattctgaattttaaagttggaaagttctaagtatcaaagtttttaatatataatgctggtccaatctattcataataatcttcaagttcaggagccgcagagacgcacaactttacacttatcatttctaacagtttattgtataaagatgttactcttctatttactgttatatactgtaaggccttctttaggcctttagctctgttcctccagtaataaaaaagttaaaatatgcttcactagtcacacattccccataccatttcgtgttattcacattccccgtaccatttcttgttattcacatgtacagtaaaacaattgtttcttaaatt

SEQ ID NO: 369372 - DNA, 1255 bp, Homo sapiens
agcaggaggagctcagagcgtacgggagggggcggacccttgcccctccggcgcttgggccagagtggtgcgggcggcgcgtggcggcgatccccacgtggtggctttctcacgctagccctctttggtcctccttgacgtcccgggcctgtgggcccgctttctgccgagatgccgaaggtcaagtcgggggccatcggccgccgccgcgggcggcaggagcagcgccgggagctgaagagcgctggaggactcatgttcaacacggggattgggcagcacattttgaaaaatcctctcattattaacagcattatcgataaggctgccttaagaccaactgatgtagtgctggaagttggacctggaactggcaacatgactgtaaagttgttagaaaaggcaaaaaaggttgttgcttgtgaacttgacccaaggctagtagctgaacttcacaaaagagttcagggcacgcctgtggccagcaaacttcaagtactggtgggtgatgtgctgaaaacagatttgccattctttgatacttgtgtggcaaatttgccttatcagatctcttcgccttttgtcttcaagctgttgctacatcgaccttttttcaggtgtgctatacttatgtttcaaagagaatttgccctccgactggttgcaaaacctggagataagttatactgcagactctcaattaatacacagctgttggcacgtgtggaccatctaatgaaagtgggaaagaataacttcagaccaccgcccaaggtggaatccagtgttgtaaggatagaacctaagaatccaccaccacccatcaattttcaggaatgggatggtctagtaaggataacctttgttaggaaaaacaagacactctctgctgcatttaaatcaagtgcagtgcaacaactcttggaaaaaaactacagaattcactgttcagtccataatattgtcagtgctgctgtgtatcctgtgaaacagatatgagcaactttgattactccaccctgtcctctaactactgacagttgtttttagccataacaagaatcagattcagcagttacaggttcctcaaagctgtagatatgtgtagcttgcacaacttaaaataattgtgtagtttactgtcctctgaattgtgaccacgtcttgtttcttgctcacatagcagttacaaatatagttattactttctttgtatagaaattgaaataaagttcatatggctcaatagcagatt

SEQ ID NO: 369373 - DNA, 1047 bp, Homo sapiens
  misc_feature (876)..(876): n is a, c, g, or t
  misc_feature (922)..(922): n is a, c, g, or t
  misc_feature (925)..(926): n is a, c, g, or t
tgagacagagtcttgctctgtcacccaggctggactccagtggcacaatctcagctcactgcaacctccgcctcctgggttcaggcaaatctcctgcctcaaccacccgagtagctgggattacaggcatgtgccaccatgccaggctaatttttgtatttttagtagagacggggtttcaccatgttggccagactgttctcgaactactgacctcaggtaatccacccgcctcagcctcccaaagtgctgggattacaggcataagccactgcgcccagccagtaacgtttctttaataactagtattaggagtgggtgggctctgtaagcatgctgtattcatgttttagtattaatggtatagaactatataccgttatgtgctacaaattagcttttcagtaccattccattttgatttcttttttcagattgctacatggattcaacgcagaaggtattcatttttcctaggtatttggaaaacagaaattttcaaggtcaagaaaagaaatgaattttgtattttttgtatttgagaagataatgcttttgctttactgagacattatttacttgactatttttggttcaatactactactgttgtcaccatttatgattctgaattttaaagttggaaagttctaagtatcaaagtttttaatatataatgctggtccaatctattcataataatcttcaagttcaggagccgcagagacgcacaactttacacttatcatttctaacagtttattgtataaagatgttactcttctatttactgttatatactgtaaggccttctttaggcctttagctctgttcctccagtaataaaaaagttaaaataaaaccacaaccaccccnaacaaccaccccgctcccccccccaaccaaacccgcggaaaataancanncaatgggcctcttgggcctcaaggggagagttttgggccccttccctttagggggggtaattaaggacccttgtccatgactccttgccctggccttcgggcgggggaagcgggttaattt

SEQ ID NO: 369374 - DNA, 920 bp, Homo sapiens
tgagacagagtcttgctctgtcacccaggctggactccagtggcacaatctcagctcactgcaacctccgcctcctgggttcaggcaaatctcctgcctcaaccacccgagtagctgggattacaggcatgtgccaccatgccaggctaatttttgtatttttagtagagacggggtttcaccatgttggccagactgttctcgaactactgacctcaggtaatccacccgcctcagcctcccaaagtgctgggattacaggcataagccactgcgcccagccagtaacgtttctttaataactagtattaggagtgggtgggctctgtaagcatgctgtattcatgttttagtattaatggtatagaactatataccgttatgtgctacaaattagcttttcagtaccattccattttgatttcttttttcagattgctacatggattcaacgcagaaggtattcatttttcctaggtatttggaaaacagaaattttcaaggtcaagaaaagaaatgaattttgtattttttgtatttgagaagataatgcttttgctttactgagacattatttacttgactatttttggttcaatactactactgttgtcaccatttatgattctgaattttaaagttggaaagttctaagtatcaaagtttttaatatataatgctggtccaatctattcataataatcttcaagttcaggagccgcagagacgcacaactttacacttatcatttctaacagtttattgtataaagatgttactcttctatttactgttatatactgtaaggccttctttaggcctttagctctgttcctccagtaataaaaaagttaaaataaaaaaaaaaacaacggcgccaacaaaaaataagcaaaacgactcgggctctttggcctcac

SEQ ID NO: 369375 - DNA, 2820 bp, Homo sapiens
agcaggaggagctcagagcgtacgggagggggcggacccttgcccctccggcgcttgggccagagtggtgcgggcggcgcgtggcggcgatccccacgtggtggctttctcacgctagccctctttggtcctccttgacgtcccgggcctgtgggcccgctttctgccgagatgccgaaggtcaagtcgggggccatcggccgccgccgcgggcggcaggagcagcgccgggagctgaagagcgctggaggactcatgttcaacacggggattgggcagcacattttgaaaaatcctctcattattaacagcattatcgataaggttgttgcttgtgaacttgacccaaggctagtagctgaacttcacaaaagagttcagggcacgcctgtggccagcaaacttcaagtactggtgggtgatgtgctgaaaacagatttgccattctttgatacttgtgtggcaaatttgccttatcagatctcttcgccttttgtcttcaagctgttgctacatcgaccttttttcaggtgtgctatacttatgtttcaaagagaatttgccctccgactggttgcaaaacctggagataagttatactgcagactctcaattaatacacagctgttggcacgtgtggaccatctaatgaaagtgggaaagaataacttcagaccaccgcccaaggtggaatccagtgttgtaaggatagaacctaagaatccaccaccacccatcaattttcaggaatgggatggtctagtaaggataacctttgttaggaaaaacaagacactctctgctgcatttaaatcaagtgcagtgcaacaactcttggaaaaaaactacagaattcactgttcagtccataatattataataccagaagatttcagcatagcagataaaatacagcaaatcctaaccagcacaggttttagtgacaaacgggcccgttccatggacatagatgacttcatcagattgctacatggattcaacgcagaaggtattcatttttcctaggtatttggaaaacagaaattttcaaggtcaagaaaagaaatgaattttgtattttttgtatttgagaagataatgcttttgctttactgagacattatttacttgactatttttggttcaatactactactgttgtcaccatttatgattctgaattttaaagttggaaagttctaagtatcaaagtttttaatatataatgctggtccaatctattcataataatcttcaagttcaggagccgcagagacgcacaactttacacttatcatttctaacagtttattgtataaagatgttactcttctatttactgttatatactgtaaggccttctttaggcctttagctctgttcctccagtaataaaaaagttaaaatatgcttcactagtcacacattccccataccatttcgtgttattcacattccccgtaccatttcttgttattcacatgtacagtaaaacaattgtttcttaaattatttttattttggttctctcattctcttccctatttatcctatacagtgtctgttacgattgcctacctctttcgctatcctatagcgtcagagacttagggttctgggtaagcccaagtctgctactgccaccgtgcagtgccaggcatattaaagggcatgactcccaacatgtaaaatgaggaagctaaactggaatgaaattaacaataaaattatctttttttatggttcttagggagataactataggcttagcaaaatttcagagggttttgtaattgaaactggtttcaacttcagaaaaacagccatttcccataactacaggttcccagtattcctatgatttctggacaattaaaatttccagttcctttttcatatacctggtgcttagttttaagctattttaaaactgtcagactgagaatttcaatagatgtcataaactagttttattagctactatgtttaagtcaatataatactaagtgctgttaatatactataatagagttatagtagctattttgtttctataaaaaattaataaaaatatctttattgatatttggctttttttaatacctaacttaatagaagagtgtttccaattaatttaacaaagccagattttgaaatctggcttcaaagtcatagtaaatgttactacataattaaaataatgcttgttcttaatgtataatccagaacaaaggcatcaagctgcttttgttaaacaaatatgaaataatatacattaagagtagatttttttgtttaatttcacaaaactattttgcagagttcacttgtatcatctctatccttatagtaaaaattttaagatttaactcggctttctcaggttatttccctctacccctatgaactgctgagttttagttccttttctggccttcagttttcactatctgtaaagctgaaggactgtattatattacctccagtatcttttctggtactaatttttaaaatacctgatcagaatgaagccatcatagtgtaaggcagcatatttgtctataaggagactttccaaagacagtacccatccaatgcaaataataaatttgaagctaatcatctgttgtgctttaaaatgagcaaattcacatgtctttattgccctttgaaagttggttaatctcaaaaactaccttttttttaaatatcctttgcaaggtcaattgtaacagttctccatccttcctcttccctttgaaataaacacaaatagaatatatcttacagctgcaagaaaacctgagtcctttccaaaac

SEQ ID NO: 369376 - DNA, 2989 bp, Homo sapiens
agcaggaggagctcagagcgtacgggagggggcggacccttgcccctccggcgcttgggccagagtggtgcgggcggcgcgtggcggcgatccccacgtggtggctttctcacgctagccctctttggtcctccttgacgtcccgggcctgtgggcccgctttctgccgagatgccgaaggtcaagtcgggggccatcggccgccgccgcgggcggcaggagcagcgccgggagctgaagagcgctggaggactcatgttcaacacggggattgggcagcacattttgaaaaatcctctcattattaacagcattatcgataaggctgccttaagaccaactgatgtagtgctggaagttggacctggaactggcaacatgactgtaaagttgttagaaaaggcaaaaaaggttgttgcttgtgaacttgacccaaggctagtagctgaacttcacaaaagagttcagggcacgcctgtggccagcaaacttcaagtactggtgggtgatgtgctgaaaacagatttgccattctttgatacttgtgtggcaaatttgccttatcagatctcttcgccttttgtcttcaagctgttgctacatcgaccttttttcaggtttgtgacaaaagactagagttactgccaaattttgaaagacttacagttcaggtggtgaacatagccaaaaatgagtcaggtgtgctatacttatgtttcaaagagaatttgccctccgactggttgcaaaacctggagataagttatactgcagactctcaattaatacacagctgttggcacgtgtggaccatctaatgaaagtgggaaagaataacttcagaccaccgcccaaggtggaatccagtgttgtaaggatagaacctaagaatccaccaccacccatcaattttcaggaatgggatggtctagtaaggataacctttgttaggaaaaacaagacactctctgctgcatttaaatcaagtgcagtgcaacaactcttggaaaaaaactacagaattcactgttcagtccataatattataataccagaagatttcagcatagcagataaaatacagcaaatcctaaccagcacaggttttagtgacaaacgggcccgttccatggacatagatgacttcatcagattgctacatggattcaacgcagaaggtattcatttttcctaggtatttggaaaacagaaattttcaaggtcaagaaaagaaatgaattttgtattttttgtatttgagaagataatgcttttgctttactgagacattatttacttgactatttttggttcaatactactactgttgtcaccatttatgattctgaattttaaagttggaaagttctaagtatcaaagtttttaatatataatgctggtccaatctattcataataatcttcaagttcaggagccgcagagacgcacaactttacacttatcatttctaacagtttattgtataaagatgttactcttctatttactgttatatactgtaaggccttctttaggcctttagctctgttcctccagtaataaaaaagttaaaatatgcttcactagtcacacattccccataccatttcgtgttattcacattccccgtaccatttcttgttattcacatgtacagtaaaacaattgtttcttaaattatttttattttggttctctcattctcttccctatttatcctatacagtgtctgttacgattgcctacctctttcgctatcctatagcgtcagagacttagggttctgggtaagcccaagtctgctactgccaccgtgcagtgccaggcatattaaagggcatgactcccaacatgtaaaatgaggaagctaaactggaatgaaattaacaataaaattatctttttttatggttcttagggagataactataggcttagcaaaatttcagagggttttgtaattgaaactggtttcaacttcagaaaaacagccatttcccataactacaggttcccagtattcctatgatttctggacaattaaaatttccagttcctttttcatatacctggtgcttagttttaagctattttaaaactgtcagactgagaatttcaatagatgtcataaactagttttattagctactatgtttaagtcaatataatactaagtgctgttaatatactataatagagttatagtagctattttgtttctataaaaaattaataaaaatatctttattgatatttggctttttttaatacctaacttaatagaagagtgtttccaattaatttaacaaagccagattttgaaatctggcttcaaagtcatagtaaatgttactacataattaaaataatgcttgttcttaatgtataatccagaacaaaggcatcaagctgcttttgttaaacaaatatgaaataatatacattaagagtagatttttttgtttaatttcacaaaactattttgcagagttcacttgtatcatctctatccttatagtaaaaattttaagatttaactcggctttctcaggttatttccctctacccctatgaactgctgagttttagttccttttctggccttcagttttcactatctgtaaagctgaaggactgtattatattacctccagtatcttttctggtactaatttttaaaatacctgatcagaatgaagccatcatagtgtaaggcagcatatttgtctataaggagactttccaaagacagtacccatccaatgcaaataataaatttgaagctaatcatctgttgtgctttaaaatgagcaaattcacatgtctttattgccctttgaaagttggttaatctcaaaaactaccttttttttaaatatcctttgcaaggtcaattgtaacagttctccatccttcctcttccctttgaaataaacacaaatagaatatatcttacagctgcaagaaaacctgagtcctttccaaaac

SEQ ID NO: 369377 - DNA, 1923 bp, Homo sapiens
agcaggaggagctcagagcgtacgggagggggcggacccttgcccctccggcgcttgggccagagtggtgcgggcggcgcgtggcggcgatccccacgtggtggctttctcacgctagccctctttggtcctccttgacgtcccgggcctgtgggcccgctttctgccgagatgccgaaggtcaagtcgggggccatcggccgccgccgcgggcggcaggagcagcgccgggagctgaagagcgctggaggactcatgttcaacacggggattgggcagcacattttgaaaaatcctctcattattaacagcattatcgataaggctgccttaagaccaactgatgtagtgctggaagttggacctggaactggcaacatgactgtaaagttgttagaaaaggcaaaaaaggttgttgcttgtgaacttgacccaaggctagtagctgaacttcacaaaagagttcagggcacgcctgtggccagcaaacttcaagtactggtgggtgatgtgctgaaaacagatttgccattctttgatacttgtgtggcaaatttgccttatcagatctcttcgccttttgtcttcaagctgttgctacatcgaccttttttcaggtgtgctatacttatgtttcaaagagaatttgccctccgactggttgcaaaacctggagataagttatactgcagactctcaattaatacacagctgttggcacgtgtggaccatctaatgaaagtgggaaagaataacttcagaccaccgcccaaggtggaatccagtgttgtaaggatagaacctaagaatccaccaccacccatcaattttcaggaatgggatggtctagtaaggataacctttgttaggaaaaacaagacactctctgctgcatttaaatcaagtgcagtgcaacaactcttggaaaaaaactacagaattcactgttcagtccataatattataataccagaagatttcagcatagcagataaaatacagcaaatcctaaccagcacaggttttagtgacaaacgggcccgttccatggacatagatgacttcatcagattgctacatggattcaacgcagaaggtattcatttttcctaggtatttggaaaacagaaattttcaaggtcaagaaaagaaatgaattttgtattttttgtatttgagaagataatgcttttgctttactgagacattatttacttgactatttttggttcaatactactactgttgtcaccatttatgattctgaattttaaagttggaaagttctaagtatcaaagtttttaatatataatgctggtccaatctattcataataatcttcaagttcaggagccgcagagacgcacaactttacacttatcatttctaacagtttattgtataaagatgttactcttctatttactgttatatactgtaaggccttctttaggcctttagctctgttcctccagtaataaaaaagttaaaataaaaaaaaaaaaaaaaaaaaacacaacaaaaaaaaaaaaacaaaaacaaacaacaacaaacagcgaacgagaaacggacaagcaagaaaaaaccacggaagaacagaagcaaaacagacaaaagagagacggagagaaagaggagacgaccggagcagcagagagaaagaacaagacagagcacgcgacccacacacgagccagaggaccacgcaaagcagagaccaggcaggcgcgcgacacacaagcgcaagcagagaaacaccaacgcagaactcaacgacgcgcgacaaatgacgccagcgggcgccgcccgcacacacaaacaacacaaaagccccccggacgcggaacgcacagccaatgacgaagaggcaagagacaacccacgcgacaggaccgcgaaacaaagcgacagagacgagccca

SEQ ID NO: 369378 - DNA, 1562 bp, Homo sapiens
agcaggaggagctcagagcgtacgggagggggcggacccttgcccctccggcgcttgggccagagtggtgcgggcggcgcgtggcggcgatccccacgtggtggctttctcacgctagccctctttggtcctccttgacgtcccgggcctgtgggcccgctttctgccgagatgccgaaggtcaagtcgggggccatcggccgccgccgcgggcggcaggagcagcgccgggagctgaagagcgctggaggactcatgttcaacacggggattgggcagcacattttgaaaaatcctctcattattaacagcattatcgataaggctgccttaagaccaactgatgtagtgctggaagttggacctggaactggcaacatgactgtaaagttgttagaaaaggcaaaaaaggttgttgcttgtgaacttgacccaaggctagtagctgaacttcacaaaagagttcagggcacgcctgtggccagcaaacttcaagtactggtgggtgatgtgctgaaaacagatttgccattctttgatacttgtgtggcaaatttgccttatcagatctcttcgccttttgtcttcaagctgttgctacatcgaccttttttcaggtgtgctatacttatgtttcaaagagaatttgccctccgactggttgcaaaacctggagataagttatactgcagactctcaattaatacacagctgttggcacgtgtggaccatctaatgaaagtgggaaagaataacttcagaccaccgcccaaggtggaatccagtgttgtaaggatagaacctaagaatccaccaccacccatcaattttcaggaatgggatggtctagtaaggataacctttgttaggaaaaacaagacactctctgctgcatttaaatcaagtgcagtgcaacaactcttggaaaaaaactacagaattcactgttcagtccataatattataataccagaagatttcagcatagcagataaaatacagcaaatcctaaccagcacaggttttagtgacaaacgggcccgttccatggacatagatgacttcatcagattgctacatggattcaacgcagaaggtattcatttttcctaggtatttggaaaacagaaattttcaaggtcaagaaaagaaatgaattttgtattttttgtatttgagaagataatgcttttgctttactgagacattatttacttgactatttttggttcaatactactactgttgtcaccatttatgattctgaattttaaagttggaaagttctaagtatcaaagtttttaatatataatgctggtccaatctattcataataatcttcaagttcaggagccgcagagacgcacaactttacacttatcatttctaacagtttattgtataaagatgttactcttctatttactgttatatactgtaaggccttctttaggcctttagctctgttcctccagtaataaaaaagttaaaatcccaccccccaatctccacccccacccccccccacgggcctcctccgcctcacgggaggacccctccc

SEQ ID NO: 369379 - DNA, 2271 bp, Homo sapiens
tgagacagagtcttgctctgtcacccaggctggactccagtggcacaatctcagctcactgcaacctccgcctcctgggttcaggcaaatctcctgcctcaaccacccgagtagctgggattacaggcatgtgccaccatgccaggctaatttttgtatttttagtagagacggggtttcaccatgttggccagactgttctcgaactactgacctcaggtaatccacccgcctcagcctcccaaagtgctgggattacaggcataagccactgcgcccagccagtaacgtttctttaataactagtattaggagtgggtgggctctgtaagcatgctgtattcatgttttagtattaatggtatagaactatataccgttatgtgctacaaattagcttttcagtaccattccattttgatttcttttttcagattgctacatggattcaacgcagaaggtattcatttttcctaggtatttggaaaacagaaattttcaaggtcaagaaaagaaatgaattttgtattttttgtatttgagaagataatgcttttgctttactgagacattatttacttgactatttttggttcaatactactactgttgtcaccatttatgattctgaattttaaagttggaaagttctaagtatcaaagtttttaatatataatgctggtccaatctattcataataatcttcaagttcaggagccgcagagacgcacaactttacacttatcatttctaacagtttattgtataaagatgttactcttctatttactgttatatactgtaaggccttctttaggcctttagctctgttcctccagtaataaaaaagttaaaatatgcttcactagtcacacattccccataccatttcgtgttattcacattccccgtaccatttcttgttattcacatgtacagtaaaacaattgtttcttaaattatttttattttggttctctcattctcttccctatttatcctatacagtgtctgttacgattgcctacctctttcgctatcctatagcgtcagagacttagggttctgggtaagcccaagtctgctactgccaccgtgcagtgccaggcatattaaagggcatgactcccaacatgtaaaatgaggaagctaaactggaatgaaattaacaataaaattatctttttttatggttcttagggagataactataggcttagcaaaatttcagagggttttgtaattgaaactggtttcaacttcagaaaaacagccatttcccataactacaggttcccagtattcctatgatttctggacaattaaaatttccagttcctttttcatatacctggtgcttagttttaagctattttaaaactgtcagactgagaatttcaatagatgtcataaactagttttattagctactatgtttaagtcaatataatactaagtgctgttaatatactataatagagttatagtagctattttgtttctataaaaaattaataaaaatatctttattgatatttggctttttttaatacctaacttaatagaagagtgtttccaattaatttaacaaagccagattttgaaatctggcttcaaagtcatagtaaatgttactacataattaaaataatgcttgttcttaatgtataatccagaacaaaggcatcaagctgcttttgttaaacaaatatgaaataatatacattaagagtagatttttttgtttaatttcacaaaactattttgcagagttcacttgtatcatctctatccttatagtaaaaattttaagatttaactcggctttctcaggttatttccctctacccctatgaactgctgagttttagttccttttctggccttcagttttcactatctgtaaagctgaaggactgtattatattacctccagtatcttttctggtactaatttttaaaatacctgatcagaatgaagccatcatagtgtaaggcagcatatttgtctataaggagactttccaaagacagtacccatccaatgcaaataataaatttgaagctaatcatctgttgtgctttaaaatgagcaaattcacatgtctttattgccctttgaaagttggttaatctcaaaaactaccttttttttaaatatcctttgcaaggtcaattgtaacagttctccatccttcctcttccctttgaaataaacacaaatagaatatatcttacagctgcaagaaaacctgagtcctttccaaaac

SEQ ID NO: 369380 - DNA, 874 bp, Homo sapiens
agcaggaggagctcagagcgtacgggagggggcggacccttgcccctccggcgcttgggccagagtggtgcgggcggcgcgtggcggcgatccccacgtggtggctttctcacgctagccctctttggtcctccttgacgtcccgggcctgtgggcccgctttctgccgagatgccgaaggtcaagtcgggggccatcggccgccgccgcgggcggcaggagcagcgccgggagctgaagagcgctggaggactcatgttcaacacggggattgggcagcacattttgaaaaatcctctcattattaacagcattatcgataaggctgccttaagaccaactgatgtagtgctggaagttggacctggaactggcaacatgactgtaaagttgttagaaaaggcaaaaaaggtagaaaggggatttaatgtttggtatcacaaatgactatgttagcaagctcagttggtttacaatctaaatatgttttaactaattgctattattttagtagtaactcctgatcccttgttggaaattttgtcttagaaaatatgagatatttcaccactgcacccggcccatttttgtttgttgtttgaagtatgcgagtataattaaaggaatattgatggtagaaatgggagaagaagtttgtcacataaatcatgtaagagttcctgttgggcgataacatcgatgttatcgcccaacacgcagttggtacctactacagtgtattgtaaacctttttctctgttcttctagggctactacaaagttctgggaaagggtaagctccctaagcagcctgtcatcgtgtaggcctaattcttcagcagaagatgctgaggagatgattatagagtttggt

SEQ ID NO: 369381 - DNA, 358 bp, Homo sapiens
aaaatgtccatttttattcttgttgatctagcatgagattattttgtacattccataagatccttaaaagacaatatataatgtataactagcacaattttgacttgaattctgacaggtcagtgctgctgtgtatcctgtgaaacagatatgagcaactttgattactccaccctgtcctctaactactgacagttgtttttagccataacaagaatcagattcagcagttacaggttcctcaaagctgtagatatgtgtagcttgcacaacttaaaataattgtgtagtttactgtcctctgaattgtgaccacgtcttgtttcttgctcacatagcagttacaaatatagttatt

SEQ ID NO: 369382 - DNA, 420 bp, Homo sapiens
gagaagataatgcttttgctttactgagacattatttacttgactatttttggttcaatactactactgttgtcaccatttatgattctgaattttaaagttggaaagttctaagtatcaaagtttttaatatataatgctggtccaatctattcataataatcttcaagttcaggagccgcagagacgcacaactttacacttatcatttctaacagtttattgtataaagatgttactcttctatttactgttatatactgtaaggccttctttaggcctttagctctgttcctccagtaataaaaaagttaaaatatgcttcactagtcacacattccccataccatttcgtgttattcacattccccgtaccatttcttgttattcacatgtacagtaaaacaattgtttcttaaa

SEQ ID NO: 369383 - DNA, 2907 bp, Homo sapiens
agcaggaggagctcagagcgtacgggagggggcggacccttgcccctccggcgcttgggccagagtggtgcgggcggcgcgtggcggcgatccccacgtggtggctttctcacgctagccctctttggtcctccttgacgtcccgggcctgtgggcccgctttctgccgagatgccgaaggtcaagtcgggggccatcggccgccgccgcgggcggcaggagcagcgccgggagctgaagagcgctggaggactcatgttcaacacggggattgggcagcacattttgaaaaatcctctcattattaacagcattatcgataaggctgccttaagaccaactgatgtagtgctggaagttggacctggaactggcaacatgactgtaaagttgttagaaaaggcaaaaaaggttgttgcttgtgaacttgacccaaggctagtagctgaacttcacaaaagagttcagggcacgcctgtggccagcaaacttcaagtactggtgggtgatgtgctgaaaacagatttgccattctttgatacttgtgtggcaaatttgccttatcagatctcttcgccttttgtcttcaagctgttgctacatcgaccttttttcaggtgtgctatacttatgtttcaaagagaatttgccctccgactggttgcaaaacctggagataagttatactgcagactctcaattaatacacagctgttggcacgtgtggaccatctaatgaaagtgggaaagaataacttcagaccaccgcccaaggtggaatccagtgttgtaaggatagaacctaagaatccaccaccacccatcaattttcaggaatgggatggtctagtaaggataacctttgttaggaaaaacaagacactctctgctgcatttaaatcaagtgcagtgcaacaactcttggaaaaaaactacagaattcactgttcagtccataatattataataccagaagatttcagcatagcagataaaatacagcaaatcctaaccagcacaggttttagtgacaaacgggcccgttccatggacatagatgacttcatcagattgctacatggattcaacgcagaaggtattcatttttcctaggtatttggaaaacagaaattttcaaggtcaagaaaagaaatgaattttgtattttttgtatttgagaagataatgcttttgctttactgagacattatttacttgactatttttggttcaatactactactgttgtcaccatttatgattctgaattttaaagttggaaagttctaagtatcaaagtttttaatatataatgctggtccaatctattcataataatcttcaagttcaggagccgcagagacgcacaactttacacttatcatttctaacagtttattgtataaagatgttactcttctatttactgttatatactgtaaggccttctttaggcctttagctctgttcctccagtaataaaaaagttaaaatatgcttcactagtcacacattccccataccatttcgtgttattcacattccccgtaccatttcttgttattcacatgtacagtaaaacaattgtttcttaaattatttttattttggttctctcattctcttccctatttatcctatacagtgtctgttacgattgcctacctctttcgctatcctatagcgtcagagacttagggttctgggtaagcccaagtctgctactgccaccgtgcagtgccaggcatattaaagggcatgactcccaacatgtaaaatgaggaagctaaactggaatgaaattaacaataaaattatctttttttatggttcttagggagataactataggcttagcaaaatttcagagggttttgtaattgaaactggtttcaacttcagaaaaacagccatttcccataactacaggttcccagtattcctatgatttctggacaattaaaatttccagttcctttttcatatacctggtgcttagttttaagctattttaaaactgtcagactgagaatttcaatagatgtcataaactagttttattagctactatgtttaagtcaatataatactaagtgctgttaatatactataatagagttatagtagctattttgtttctataaaaaattaataaaaatatctttattgatatttggctttttttaatacctaacttaatagaagagtgtttccaattaatttaacaaagccagattttgaaatctggcttcaaagtcatagtaaatgttactacataattaaaataatgcttgttcttaatgtataatccagaacaaaggcatcaagctgcttttgttaaacaaatatgaaataatatacattaagagtagatttttttgtttaatttcacaaaactattttgcagagttcacttgtatcatctctatccttatagtaaaaattttaagatttaactcggctttctcaggttatttccctctacccctatgaactgctgagttttagttccttttctggccttcagttttcactatctgtaaagctgaaggactgtattatattacctccagtatcttttctggtactaatttttaaaatacctgatcagaatgaagccatcatagtgtaaggcagcatatttgtctataaggagactttccaaagacagtacccatccaatgcaaataataaatttgaagctaatcatctgttgtgctttaaaatgagcaaattcacatgtctttattgccctttgaaagttggttaatctcaaaaactaccttttttttaaatatcctttgcaaggtcaattgtaacagttctccatccttcctcttccctttgaaataaacacaaatagaatatatcttacagctgcaagaaaacctgagtcctttccaaaac

SEQ ID NO: 369384 - DNA, 2006 bp, Homo sapiens
agcaggaggagctcagagcgtacgggagggggcggacccttgcccctccggcgcttgggccagagtggtgcgggcggcgcgtggcggcgatccccacgtggtggctttctcacgctagccctctttggtcctccttgacgtcccgggcctgtgggcccgctttctgccgagatgccgaaggtcaagtcgggggccatcggccgccgccgcgggcggcaggagcagcgccgggagctgaagagcgctggaggactcatgttcaacacggggattgggcagcacattttgaaaaatcctctcattattaacagcattatcgataaggctgccttaagaccaactgatgtagtgctggaagttggacctggaactggcaacatgactgtaaagttgttagaaaaggcaaaaaaggttgttgcttgtgaacttgacccaaggctagtagctgaacttcacaaaagagttcagggcacgcctgtggccagcaaacttcaagtactggtgggtgatgtgctgaaaacagatttgccattctttgatacttgtgtggcaaatttgccttatcagatctcttcgccttttgtcttcaagctgttgctacatcgaccttttttcaggtgtgctatacttatgtttcaaagagaatttgccctccgactggttgcaaaacctggagataagttatactgcagactctcaattaatacacagctgttggcacgtgtggaccatctaatgaaagtgggaaagaataacttcagaccaccgcccaaggtggaatccagtgttgtaaggatagaacctaagaatccaccaccacccatcaattttcaggaatgggatggtctagtaaggataacctttgttaggaaaaacaagacactctctgctgcatttaaatcaagtgcagtgcaacaactcttggaaaaaaactacagaattcactgttcagtccataatattataataccagaagatttcagcatagcagataaaatacagcaaatcctaaccagcacaggttttagtgacaaacgggcccgttccatggacatagatgacttcatcagattgctacatggattcaacgcagaaggtattcatttttcctaggtatttggaaaacagaaattttcaaggtcaagaaaagaaatgaattttgtattttttgtatttgagaagataatgcttttgctttactgagacattatttacttgactatttttggttcaatactactactgttgtcaccatttatgattctgaattttaaagttggaaagttctaagtatcaaagtttttaatatataatgctggtccaatctattcataataatcttcaagttcaggagccgcagagacgcacaactttacacttatcatttctaacagtttattgtataaagatgttactcttctatttactgttatatactgtaaggccttctttaggcctttagctctgttcctccagtaataaaaaagttaaaatatgcttcactagtcacacattccccataccatttcgtgttattcacattccccgtaccatttcttgttattcacatgtacagtaaaacaattgtttcttaaattatttttattttggttctctcattctcttccctatttatcctatacagtgtctgttacgattgcctacctctttcgctatcctatagcgtcagagacttagggttctgggtaagcccaagtctgctactgccaccgtgcagtgccaggcatattaaagggcatgactcccaacatgtaaaatgaggaagctaaactggaatgaaattaacaataaaattatctttttttatggttcttagggagataactataaaaaaattagctgggcgtggtgacgggcgcctgtaatcccagctactcgggaggctgaggcaggagaatcgcttgaaccccggagtcagaggctgcagtgagctgagattgtgccactgcactccagcctgggtgacatagcaagactccatctta

SEQ ID NO: 369385 - DNA, 2869 bp, Homo sapiens
agcaggaggagctcagagcgtacgggagggggcggacccttgcccctccggcgcttgggccagagtggtgcgggcggcgcgtggcggcgatccccacgtggtggctttctcacgctagccctctttggtcctccttgacgtcccgggcctgtgggcccgctttctgccgagatgccgaaggtcaagtcgggggccatcggccgccgccgcgggcggcaggagcagcgccgggagctgaagagcgctggaggactcatgttcaacacggggattgggcagcacattttgaaaaatcctctcattattaacagcattatcgataaggctgccttaagaccaactgatgtagtgctggaagttggacctggaactggcaacatgactgtaaagttgttagaaaaggcaaaaaaggttgttgcttgtgaacttgacccaaggctagtagctgaacttcacaaaagagttcagggcacgcctgtggccagcaaacttcaagtactggtgggtgatgtgctgaaaacagatttgccattctttgatacttgtgtggcaaatttgccttatcagatctcttcgccttttgtcttcaagctgttgctacatcgaccttttttcaggtgtgctatacttatgtttcaaagagaatttgccctccgactggttgcaaaacctggagataagttatactgcagactctcaattagtgggaaagaataacttcagaccaccgcccaaggtggaatccagtgttgtaaggatagaacctaagaatccaccaccacccatcaattttcaggaatgggatggtctagtaaggataacctttgttaggaaaaacaagacactctctgctgcatttaaatcaagtgcagtgcaacaactcttggaaaaaaactacagaattcactgttcagtccataatattataataccagaagatttcagcatagcagataaaatacagcaaatcctaaccagcacaggttttagtgacaaacgggcccgttccatggacatagatgacttcatcagattgctacatggattcaacgcagaaggtattcatttttcctaggtatttggaaaacagaaattttcaaggtcaagaaaagaaatgaattttgtattttttgtatttgagaagataatgcttttgctttactgagacattatttacttgactatttttggttcaatactactactgttgtcaccatttatgattctgaattttaaagttggaaagttctaagtatcaaagtttttaatatataatgctggtccaatctattcataataatcttcaagttcaggagccgcagagacgcacaactttacacttatcatttctaacagtttattgtataaagatgttactcttctatttactgttatatactgtaaggccttctttaggcctttagctctgttcctccagtaataaaaaagttaaaatatgcttcactagtcacacattccccataccatttcgtgttattcacattccccgtaccatttcttgttattcacatgtacagtaaaacaattgtttcttaaattatttttattttggttctctcattctcttccctatttatcctatacagtgtctgttacgattgcctacctctttcgctatcctatagcgtcagagacttagggttctgggtaagcccaagtctgctactgccaccgtgcagtgccaggcatattaaagggcatgactcccaacatgtaaaatgaggaagctaaactggaatgaaattaacaataaaattatctttttttatggttcttagggagataactataggcttagcaaaatttcagagggttttgtaattgaaactggtttcaacttcagaaaaacagccatttcccataactacaggttcccagtattcctatgatttctggacaattaaaatttccagttcctttttcatatacctggtgcttagttttaagctattttaaaactgtcagactgagaatttcaatagatgtcataaactagttttattagctactatgtttaagtcaatataatactaagtgctgttaatatactataatagagttatagtagctattttgtttctataaaaaattaataaaaatatctttattgatatttggctttttttaatacctaacttaatagaagagtgtttccaattaatttaacaaagccagattttgaaatctggcttcaaagtcatagtaaatgttactacataattaaaataatgcttgttcttaatgtataatccagaacaaaggcatcaagctgcttttgttaaacaaatatgaaataatatacattaagagtagatttttttgtttaatttcacaaaactattttgcagagttcacttgtatcatctctatccttatagtaaaaattttaagatttaactcggctttctcaggttatttccctctacccctatgaactgctgagttttagttccttttctggccttcagttttcactatctgtaaagctgaaggactgtattatattacctccagtatcttttctggtactaatttttaaaatacctgatcagaatgaagccatcatagtgtaaggcagcatatttgtctataaggagactttccaaagacagtacccatccaatgcaaataataaatttgaagctaatcatctgttgtgctttaaaatgagcaaattcacatgtctttattgccctttgaaagttggttaatctcaaaaactaccttttttttaaatatcctttgcaaggtcaattgtaacagttctccatccttcctcttccctttgaaataaacacaaatagaatatatcttacagctgcaagaaaacctgagtcctttccaaaac

SEQ ID NO: 369386 - DNA, 846 bp, Homo sapiens
agcaggaggagctcagagcgtacgggagggggcggacccttgcccctccggcgcttgggccagagtggtgcgggcggcgcgtggcggcgatccccacgtggtggctttctcacgctagccctctttggtcctccttgacgtcccgggcctgtgggcccgctttctgccgagatgccgaaggtcaagtcgggggccatcggccgccgccgcgggcggcaggagcagcgccgggagctgaagagcgctggaggactcatgttcaacacggggattgggcagcacattttgaaaaatcctctcattattaacagcattatcgataaggctgccttaagaccaactgatgtagtgctggaagttggacctggaactggcaacatgactgtaaagttgttagaaaaggcaaaaaaggtagaaaggggatttaatgtttggtatcacaaatgactatgttagcaagctcagttggtttacaatctaaatatgttttaactaattgctattattttagtagtaactcctgatcccttgttggaaattttgtcttagaaaatatgagatatttcagccaggcgcggtggctcacgcctgtaatcccagcactttgggaggccgaggcaggtggatcatgaggtcaagagattgagaccatcctgggcaatatggtgaagccccatctcgactgaaaatacaaaaattagccgagtgtggtggcaggtgcctgtagtcccagctacttgggaggctggggcaggagaatcacttgaacccggaaggcagaggttgcagtgagccaggattgcaccactgcactccagcctggtgacagagtgagactctgtctca

SEQ ID NO: 369387 - DNA, 1369 bp, Homo sapiens
  misc_feature (22)..(22): n is a, c, g, or t
tctgtctcaaaaaaaaaaaaanataaataataataataatacttttcttacacacgtaagaaagactgctggtctcgaacttctcggctcaagctatctatctgcctcagtctcccaaactgctgggattagtcatgagccaccgtgcctggctgtgacccattttagatgacaaaaactaattttcaatgctaatacgaattggttgttaaaggtgaatataattaaactgaacattattggcatcctaaatcctttattggccataatttacctttggattctattcaaactacactttgatctgtagaacccaaattggttactatatgaacttgcatcttcctaaactcatcatgttaaaaattttcacagcttgaaaaatggaggtcctcatatcagtctcttgattttcttttgaggtaagctgtccctctgtgcttagtccttgactaaaaataatcgtactgcttatggtcttgatttgacttttctgtatactggttacactggctcaaaagtccatttttgtggagactcttaaaaagtagtagtcttccacattcaagtactgtacttgaaaaaaaaaaacctggatttcagctttcatttagaaatgctttccctgtaattactacttttaaaacccatattttatatgtcaatttttacattaattaccccattgatagcagtttttgaatggttttagttaaaactgtcaatcttctttgcttgaatctagcctctcattaagtttatcaaaaactttaaaaagtaaatgtaagactcttcatatagtgttttttttttaattgagttatggattctttggatttattcattatctgagttagttttttcagaaatgtcttcttattttgtaggtctgtggttgatgaaaacctgttcatgagggcacaaaagactcttccagtttattctatcactataaaatagaatttgatggatttcgaagtaagaaaattcttagaatagaaaataggatggtaaatctttaaatacatatgagtaattagaatatcataaggctagtacagataatattcttacaaaggcatccataaatagtgaagtggtagcacctattcccccatgattgacattcattaattaatccattgtacccagagttttaagatgaacagcttataagtaccttcttcccctcatgagtaatcactcctcagtgaacatactatatgcttattgccatttgaatatccttttctgttcaagtgtatcatcctttttaaaaattgagttgtcatggaagaatttgatgtaggtaagtgactatcagctgtgaggaaggtagaggaaggcaagaactatcctgaggacagag

SEQ ID NO: 369388 - DNA, 1315 bp, Homo sapiens
  misc_feature (22)..(22): n is a, c, g, or t
tctgtctcaaaaaaaaaaaaanataaataataataataatacttttcttacacacgtaagaaagactgctggtctcgaacttctcggctcaagctatctatctgcctcagtctcccaaactgctgggattagtcatgagccaccgtgcctggctgtgacccattttagatgacaaaaactaattttcaatgctaatacgaattggttgttaaaggtgaatataattaaactgaacattattggcatcctaaatcctttattggccataatttacctttggattctattcaaactacactttgatctgtagaacccaaattggttactatatgaacttgcatcttcctaaactcatcatgttaaaaattttcacagcttgaaaaatggaggtcctcatatcagtctcttgattttcttttgaggtaagctgtccctctgtgcttagtccttgactaaaaataatcgtactgcttatggtcttgatttgacttttctgtatactggttacactggctcaaaagtccatttttgtggagactcttaaaaagtagtagtcttccacattcaagtactgtacttgaaaaaaaaaaacctggatttcagctttcatttagaaatgctttccctgtaattactacttttaaaacccatattttatatgtcaatttttacattaattaccccattgatagcagtttttgaatggttttagttaaaactgtcaatcttctttgcttgaatctagcctctcattaagtttatcaaaaactttaaaaagtaaatgtaagactcttcatatagtgttttttttttaattgagttatggattctttggatttattcattatctgagttagttttttcagaaatgtcttcttattttgtaggtctgtggttgatgaaaacctgttcatgagggcacaaaagactcttccagtttattctatcactataaaatagaatttgatggatttcgaagtaagaaaattcttagaatagtagtacagataatattcttacaaaggcatccataaatagtgaagtggtagcacctattcccccatgattgacattcattaattaatccattgtacccagagttttaagatgaacagcttataagtaccttcttcccctcatgagtaatcactcctcagtgaacatactatatgcttattgccatttgaatatccttttctgttcaagtgtatcatcctttttaaaaattgagttgtcatggaagaatttgatgtaggtaagtgactatcagctgtgaggaaggtagaggaaggcaagaactatcctgaggacagag

SEQ ID NO: 369389 - DNA, 337 bp, Homo sapiens
acaccccatccctaaataataataaaactaccagtctggatggtgcctccctagcacatgggaatgttagtaataatgacccttattccaaaaggtgaccgggaaactttagacccttttactgaacttgcaaagcctcagtcattcacagcatgtttccttgcgttcttcggcatgtgtgcatttctgactgctgttgaagttttgtcttaatctggtgacagcaacatttgttagaagggagaatctcttgagcctgggaggcggaggttacagtgagcccagatcatgcctcttcactccagcctttgctacagagcgagactctgtctcaaaa

SEQ ID NO: 369390 - DNA, 558 bp, Homo sapiens
gagtattatagagataagtaattgtattattttcagacaaaagtatatgtagtaatgtaaactactgaccagattttgtttcaaattgttttttttaaatgaattgctaagaattatttgaaattagcacattagcggtaataagatagtagatattagatagattagattaggatagtaggtagtagatgtaggtataaagagactgaaaatcagctgtttaaacatttttcccaaatgtggggctaggaagcaagataaagaattatgcaggccaggcgcggtggctcacgcctgtaatcccagcactttgggaggccgaggcgggcggatcatgaagtcaggagatcgagaccatcctggccaacacggtgaaaccccgtctctactaaaaatacaaaaaaaattagccgggcgtggtggcgggtgcctgtagtcccagctacacgggaggctgaggcaggagaatagggtgaacccaggaggtggagcttgcagtgagccgagatcgcgccactgcactccagcctgggcaacagagcgagactccgtctcaaa

SEQ ID NO: 369391 - DNA, 4827 bp, Homo sapiens
caagcttatgcatgcggccgctgaatggaggccaacatgccgaagcggaaggagcccggcaggtctctccgcatcaaagtcatctccatgggcaacgccgaagtggggaaaagctgtattataaagcgatactgtgagaaaagattcgtgtctaaatacctggcaacaattggaattgactatggagtcacaaaggtacacgtcagagacagagaaatcaaagttaacatctttgatatggctggacatcccttcttctatgaggttcgaaatgagttttacaaggacacacagggtgtgatactggtctatgatgttgggcagaaagactcctttgacgcccttgatgcgtggctggcagaaatgaagcaagagcttggacctcatggaaacatggaaaatattatatttgtagtttgtgccaacaagattgattgtaccaaacatcgctgtgtagatgaaagtgaaggacgtctttgggctgaaagcaaagggttcctgtactttgaaacttcagcacaaactggagaaggcattaatgagatgttccagaccttttatatatccatagttgatttatgtgaaaatggcgggaaacgccctaccaccaatagcagtgctagtttcaccaaagaacaagcagatgccattcgcagaattcgaaatagtaaagacagttgggacatgctgggagtcaaacctggggcctcaagggatgaagtcaataaagcgtatcggaaacttgctgtgcttcttcaccctgacaaatgtgtagcacctggcagtgaagatgccttcaaagcagttgtgaatgctcggacagccctcctgaaaaacatcaagtagaaagtacagaaaaaagccacatgtgggactcaaatgcaaacagactttccctagaggtgaaataaccaacgtggagttttccttcccagaatctcactgctcttttcattcatgtgttgtcatttgtatatcagtaattcaggtacccatttcatagacattttactgagaaatgacctgcatttgtatgaagtgaactgagcgtcacaccctgtacttcatttcatatttctagataattctgaatttttttctcattcgtcagctctgtaattatagtatcacttagacatttcacttggggaaatccacaaggttcctggaggagggaagagaggacaagaggaccctttcactttttcttttttacggaattcatcatcagagaagaaaataacaaaaatggaagcaaacaacatcagaacccctgtaagtttggtgtgaccttacagacaagttgctgcttttacaatgagttccttaggtggtattttaacccatcgatctataatgatgactcttggcagccctttgggagtttgtaaaatgaggtgatacagttctgaattgagcattcctttatgatattcactctgttcctcttctgcagccaccagtgggagagacaagccagtcctaagagaaaaggtggtggcagccacaaattctaggtacactggctgctgcctatcctgtccctggatctgaggcctttcccttgccatagaaatggttgctggtagcagtagagagcactgtgcacctgggaatgaggaatcaggccccaagacagaagtacttggaggagccagctgcagtagtatccgcctgtagtcccagctactcaggaggctgagacaggaggattgcttaagcccaggagctcaagtcccacctgggcaacatagtaagatcttgtctcttaaaaaaaaaaaaaaaggtacttagaggtcgcacttaaagattatgcacatcagcagaggaaaggccagccaagcttggggcaagcttgatgcagtaggagagactccttatgaggcttagcccttgtcttactgccagcctttgccacaggcaggtgagaaaggcagggccactcctcagcaaagttggcctcttctacacttcctcaccagtgttgtttcttccttttttcccctcttccccttcccgtcttgtgttttttctgaaccccacatctgccatcatttctctcctctagagtccctggcttctggccactgcctcctccctcttctaagccttggcctgaatctggttgatcagaggcaagtgtggatcctttgggtggcagtcaggggagatctcagggcctctgttgggaggaatctctgtaattcctgcttgggctccaaatttctgaagagtaatatttttaaactatagcttacaaaatacattctctgaccacagtctcctccttgatatacaagggatggatgaagttcatgtattaggactggcactccttacggtgcttatagaactagtctcaccacttgactcattacgtcgtcattcttgttacatcactcatacttttagctgcaaccacactaattcacatttttatatactttcaattagctgtactaattggggcttgaaagtatataaaatcttcctgtcctgtgaattttaaaaagctatcccatatcgattgccaaagagcatctaccttacctcctaagaagaaaagccactttcttccaatccaagcccactgcagccttgtggattttccacacagcagcttttcactgtatgcctgtacttgggctgcactgagcttgtcttcaggaaaccagagcgttgctttatcatcgcacttttcatcttggtaatatcaaaacaactttttaaatgaactgattgatatatgttatttcttgcgaggttttcctctggcctttaactggcttctgaggctacagaactccaacccagagttcttcgggacctaaattttgcttaaggaaggcctttatcatgctgaaagcactcagacatgtctgtcctcacagcagaatgtagaagtcatatgaatgagggatcgtgcacggtagcgtcagcccgaattgacacgacaactctgaatgtgtggccctctatgaaagctggtgccagttttcatcactgttattaaatactagattgggaacctcattcagccgtattgcacagatgagcaattacagcagagaaaattcattagtgctcccactcatatccttatgtgtgagttggtgaaatttagcctgagcttgattcttaggtcttgagactcagtttccaacaccttcattattaatgttaagaatggccatataccacttcatttacgtaaaaggaataaaataagcaagttaagcttcagggtcctagaatttttctgatttctataatccttcagcagaatattaagaaataaagcatgatctgcaatggaaaggtttttttggcactaacttcatgcagaatttcacagacatctatgcattaatttaaattcttggtgcaaatgtgtgctttgtagttcaaccttattaaaaattcttcagccagttaggatttcaaaatacattagtgagagtaacagctagcagaataattacaatggctaaaacgtttttatagagaatcttgtttttcaaaaaagaataaaaagtttgaatagctattattaaagaaaagccatgtcttcaacatctgagtcaccaagaagtaacactttttaaacttgttagaaatccctggaggcatttcaaattcatcttctaacctacctaagcactttaaaatacagcctccttctgttcctctgttccccttcatgcctccttttgaattgatatctcagctgtcaatatttctttgacttcagcattgttattttatttctctatatcaatgtgtccttagttttcttagcctgttaatttaaaaatccagacttgggggtcattgtgttgctacccaagagaaaatgctacagttttatagattgcacatcattctttaaggcatacttttacctcaggaaacttactctagtatgttctcatatattgaattctcaactaagtaactatttctttatacctataaactagtacctaattcactgttagttaaatgagctatagataaggcagctaaatttctgaaagatagccagagtaagtaagcagccactgcaagctctgaatcagttttttaaaaaaaagaaaaaaaaaaaaaaggagctgtgccccattgaacaatgacaacatcacaaggggaagggagggattttgccaaaagttagaaaggtggagctgtaagccatgtgcttgttgcctttgacagtgacagtgcgcgtcttacaactaattccactaggcatgggaatgtcacctcctttgccactgtaccccatcaagcttactctgaatcaaaggttttgtaaaacttttgaaaatgaacttagctgcaaaatatagctaaccactttccattgcaagctttgcaaagtgaagagaggttcgtacttctcataattggtatttagcacaattgtaagatacagttttactgtttgtacatcgtttttttccattaaacttttctagagaagacaaaagcttacactggtgacatggataagtgagatggtgtctaacgagcagtgcaatattaggcggtgcaatagaggccctgttggcaagatgagttttgctggagagctggacagtgttggttagcttcctgcattgattgcccctgggcgttcttcccccttaactgtgaaagcagagtctataaatgaactctttgctcttacaaggtaatttacatattttctttctgttgaaataactgaaaatgttaaatctaccagtttatgtcttgtaaacagagtgtcatatgtatttaagttgtgtatttttataaagtaaagccaagtatcaaacaaaaaaa

SEQ ID NO: 369392 - DNA, 4998 bp, Homo sapiens
agcgggtctccctcccccggctccccacgctcccaaccgcccgcgcctgctgccaggcagcggcggggatggcgagcagcggaggcgaggcggtgacgagagcagcggctccgccattggacgaggaggcctgagggacgggccagcggtgcacaagaagagaccgaggcgggtggccccgagagagccagggccatggaggccaacatgccgaagcggaaggagcccggcaggtctctccgcatcaaagtcatctccatgggcaacgccgaagtggggaaaagctgtattataaagcgatactgtgagaaaagattcgtgtctaaatacctggcaacaattggaattgactatggagtcacaaaggtacacgtcagagacagagaaatcaaagttaacatctttgatatggctggacatcccttcttctatgaggttcgaaatgagttttacaaggacacacagggtgtgatactggtctatgatgttgggcagaaagactcctttgacgcccttgatgcgtggctggcagaaatgaagcaagagcttggacctcatggaaacatggaaaatattatatttgtagtttgtgccaacaagattgattgtaccaaacatcgctgtgtagatgaaagtgaaggacgtctttgggctgaaagcaaagggttcctgtactttgaaacttcagcacaaactggagaaggcattaatgagatgttccagaccttttatatatccatagttgatttatgtgaaaatggcgggaaacgccctaccaccaatagcagtgctagtttcaccaaagaacaagcagatgccattcgcagaattcgaaatagtaaagacagttgggacatgctgggagtcaaacctggggcctcaagggatgaagtcaataaagcgtatcggaaacttgctgtgcttcttcaccctgacaaatgtgtagcacctggcagtgaagatgccttcaaagcagttgtgaatgctcggacagccctcctgaaaaacatcaagtagaaagtacagaaaaaagccacatgtgggactcaaatgcaaacagactttccctagaggtgaaataaccaacgtggagttttccttcccagaatctcactgctcttttcattcatgtgttgtcatttgtatatcagtaattcaggtacccatttcatagacattttactgagaaatgacctgcatttgtatgaagtgaactgagcgtcacaccctgtacttcatttcatatttctagataattctgaatttttttctcattcgtcagctctgtaattatagtatcacttagacatttcacttggggaaatccacaaggttcctggaggagggaagagaggacaagaggaccctttcactttttcttttttacggaattcatcatcagagaagaaaataacaaaaatggaagcaaacaacatcagaacccctgtaagtttggtgtgaccttacagacaagttgctgcttttacaatgagttccttaggtggtattttaacccatcgatctataatgatgactcttggcagccctttgggagtttgtaaaatgaggtgatacagttctgaattgagcattcctttatgatattcactctgttcctcttctgcagccaccagtgggagagacaagccagtcctaagagaaaaggtggtggcagccacaaattctaggtacactggctgctgcctatcctgtccctggatctgaggcctttcccttgccatagaaatggttgctggtagcagtagagagcactgtgcacctgggaatgaggaatcaggccccaagacagaagtacttggaggagccagctgcagtagtatccgcctgtagtcccagctactcaggaggctgagacaggaggattgcttaagcccaggagctcaagtcccacctgggcaacatagtaagatcttgtctcttaaaaaaaaaaaaaaaggtacttagaggtcgcacttaaagattatgcacatcagcagaggaaaggccagccaagcttggggcaagcttgatgcagtaggagagactccttatgaggcttagcccttgtcttactgccagcctttgccacaggcaggtgagaaaggcagggccactcctcagcaaagttggcctcttctacacttcctcaccagtgttgtttcttccttttttcccctcttccccttcccgtcttgtgttttttctgaaccccacatctgccatcatttctctcctctagagtccctggcttctggccactgcctcctccctcttctaagccttggcctgaatctggttgatcagaggcaagtgtggatcctttgggtggcagtcaggggagatctcagggcctctgttgggaggaatctctgtaattcctgcttgggctccaaatttctgaagagtaatatttttaaactatagcttacaaaatacattctctgaccacagtctcctccttgatatacaagggatggatgaagttcatgtattaggactggcactccttacggtgcttatagaactagtctcaccacttgactcattacgtcgtcattcttgttacatcactcatacttttagctgcaaccacactaattcacatttttatatactttcaattagctgtactaattggggcttgaaagtatataaaatcttcctgtcctgtgaattttaaaaagctatcccatatcgattgccaaagagcatctaccttacctcctaagaagaaaagccactttcttccaatccaagcccactgcagccttgtggattttccacacagcagcttttcactgtatgcctgtacttgggctgcactgagcttgtcttcaggaaaccagagcgttgctttatcatcgcacttttcatcttggtaatatcaaaacaactttttaaatgaactgattgatatatgttatttcttgcgaggttttcctctggcctttaactggcttctgaggctacagaactccaacccagagttcttcgggacctaaattttgcttaaggaaggcctttatcatgctgaaagcactcagacatgtctgtcctcacagcagaatgtagaagtcatatgaatgagggatcgtgcacggtagcgtcagcccgaattgacacgacaactctgaatgtgtggccctctatgaaagctggtgccagttttcatcactgttattaaatactagattgggaacctcattcagccgtattgcacagatgagcaattacagcagagaaaattcattagtgctcccactcatatccttatgtgtgagttggtgaaatttagcctgagcttgattcttaggtcttgagactcagtttccaacaccttcattattaatgttaagaatggccatataccacttcatttacgtaaaaggaataaaataagcaagttaagcttcagggtcctagaatttttctgatttctataatccttcagcagaatattaagaaataaagcatgatctgcaatggaaaggtttttttggcactaacttcatgcagaatttcacagacatctatgcattaatttaaattcttggtgcaaatgtgtgctttgtagttcaaccttattaaaaattcttcagccagttaggatttcaaaatacattagtgagagtaacagctagcagaataattacaatggctaaaacgtttttatagagaatcttgtttttcaaaaaagaataaaaagtttgaatagctattattaaagaaaagccatgtcttcaacatctgagtcaccaagaagtaacactttttaaacttgttagaaatccctggaggcatttcaaattcatcttctaacctacctaagcactttaaaatacagcctccttctgttcctctgttccccttcatgcctccttttgaattgatatctcagctgtcaatatttctttgacttcagcattgttattttatttctctatatcaatgtgtccttagttttcttagcctgttaatttaaaaatccagacttgggggtcattgtgttgctacccaagagaaaatgctacagttttatagattgcacatcattctttaaggcatacttttacctcaggaaacttactctagtatgttctcatatattgaattctcaactaagtaactatttctttatacctataaactagtacctaattcactgttagttaaatgagctatagataaggcagctaaatttctgaaagatagccagagtaagtaagcagccactgcaagctctgaatcagttttttaaaaaaaagaaaaaaaaaaaaaaggagctgtgccccattgaacaatgacaacatcacaaggggaagggagggattttgccaaaagttagaaaggtggagctgtaagccatgtgcttgttgcctttgacagtgacagtgcgcgtcttacaactaattccactaggcatgggaatgtcacctcctttgccactgtaccccatcaagcttactctgaatcaaaggttttgtaaaacttttgaaaatgaacttagctgcaaaatatagctaaccactttccattgcaagctttgcaaagtgaagagaggttcgtacttctcataattggtatttagcacaattgtaagatacagttttactgtttgtacatcgtttttttccattaaacttttctagagaagacaaaagcttacactggtgacatggataagtgagatggtgtctaacgagcagtgcaatattaggcggtgcaatagaggccctgttggcaagatgagttttgctggagagctggacagtgttggttagcttcctgcattgattgcccctgggcgttcttcccccttaactgtgaaagcagagtctataaatgaactctttgctcttacaaggtaatttacatattttctttctgttgaaataactgaaaatgttaaatctaccagtttatgtcttgtaaacagagtgtcatatgtatttaagttgtgtatttttataaagtaaagccaagtatcaaacaaaaaaa

SEQ ID NO: 369393 - DNA, 4783 bp, Homo sapiens
gctcagactccagctctctgtgatgtggtcaggaaatggactccaagcagacaaccaggtgattggggggcttatctctcagggagccgtcttgcacttgctgttgtccactgccaacagtttttttccagttcgatagtagttgatggcaggaagtctagtccagtattcattactctgtcatggctggaactcagacatgaaatttaaacaggctttggtctcaatcctagtattctatagcctacactatgacttgtctcctataaccatgtgtgtgatgaatgaatccttgtgccctcagaaatctatgaatattcatatttcaggttaactcgtaggctagaagacagtcttactgatacacaactagcaaacatccgtgaactgtgatcccttttatgtggcttttatctttttagatacatcttggatagaactaatggataaattagtctgtttaaaaaaaaaaagctaacaagaagagaataattacagtattctataaaccttttatatatccatagttgatttatgtgaaaatggcgggaaacgccctaccaccaatagcagtgctagtttcaccaaagaacaagcagatgccattcgcagaattcgaaatagtaaagacagttgggacatgctgggagtcaaacctggggcctcaagggatgaagtcaataaagcgtatcggaaacttgctgtgcttcttcaccctgacaaatgtgtagcacctggcagtgaagatgccttcaaagcagttgtgaatgctcggacagccctcctgaaaaacatcaagtagaaagtacagaaaaaagccacatgtgggactcaaatgcaaacagactttccctagaggtgaaataaccaacgtggagttttccttcccagaatctcactgctcttttcattcatgtgttgtcatttgtatatcagtaattcaggtacccatttcatagacattttactgagaaatgacctgcatttgtatgaagtgaactgagcgtcacaccctgtacttcatttcatatttctagataattctgaatttttttctcattcgtcagctctgtaattatagtatcacttagacatttcacttggggaaatccacaaggttcctggaggagggaagagaggacaagaggaccctttcactttttcttttttacggaattcatcatcagagaagaaaataacaaaaatggaagcaaacaacatcagaacccctgtaagtttggtgtgaccttacagacaagttgctgcttttacaatgagttccttaggtggtattttaacccatcgatctataatgatgactcttggcagccctttgggagtttgtaaaatgaggtgatacagttctgaattgagcattcctttatgatattcactctgttcctcttctgcagccaccagtgggagagacaagccagtcctaagagaaaaggtggtggcagccacaaattctaggtacactggctgctgcctatcctgtccctggatctgaggcctttcccttgccatagaaatggttgctggtagcagtagagagcactgtgcacctgggaatgaggaatcaggccccaagacagaagtacttggaggagccagctgcagtagtatccgcctgtagtcccagctactcaggaggctgagacaggaggattgcttaagcccaggagctcaagtcccacctgggcaacatagtaagatcttgtctcttaaaaaaaaaaaaaaaggtacttagaggtcgcacttaaagattatgcacatcagcagaggaaaggccagccaagcttggggcaagcttgatgcagtaggagagactccttatgaggcttagcccttgtcttactgccagcctttgccacaggcaggtgagaaaggcagggccactcctcagcaaagttggcctcttctacacttcctcaccagtgttgtttcttccttttttcccctcttccccttcccgtcttgtgttttttctgaaccccacatctgccatcatttctctcctctagagtccctggcttctggccactgcctcctccctcttctaagccttggcctgaatctggttgatcagaggcaagtgtggatcctttgggtggcagtcaggggagatctcagggcctctgttgggaggaatctctgtaattcctgcttgggctccaaatttctgaagagtaatatttttaaactatagcttacaaaatacattctctgaccacagtctcctccttgatatacaagggatggatgaagttcatgtattaggactggcactccttacggtgcttatagaactagtctcaccacttgactcattacgtcgtcattcttgttacatcactcatacttttagctgcaaccacactaattcacatttttatatactttcaattagctgtactaattggggcttgaaagtatataaaatcttcctgtcctgtgaattttaaaaagctatcccatatcgattgccaaagagcatctaccttacctcctaagaagaaaagccactttcttccaatccaagcccactgcagccttgtggattttccacacagcagcttttcactgtatgcctgtacttgggctgcactgagcttgtcttcaggaaaccagagcgttgctttatcatcgcacttttcatcttggtaatatcaaaacaactttttaaatgaactgattgatatatgttatttcttgcgaggttttcctctggcctttaactggcttctgaggctacagaactccaacccagagttcttcgggacctaaattttgcttaaggaaggcctttatcatgctgaaagcactcagacatgtctgtcctcacagcagaatgtagaagtcatatgaatgagggatcgtgcacggtagcgtcagcccgaattgacacgacaactctgaatgtgtggccctctatgaaagctggtgccagttttcatcactgttattaaatactagattgggaacctcattcagccgtattgcacagatgagcaattacagcagagaaaattcattagtgctcccactcatatccttatgtgtgagttggtgaaatttagcctgagcttgattcttaggtcttgagactcagtttccaacaccttcattattaatgttaagaatggccatataccacttcatttacgtaaaaggaataaaataagcaagttaagcttcagggtcctagaatttttctgatttctataatccttcagcagaatattaagaaataaagcatgatctgcaatggaaaggtttttttggcactaacttcatgcagaatttcacagacatctatgcattaatttaaattcttggtgcaaatgtgtgctttgtagttcaaccttattaaaaattcttcagccagttaggatttcaaaatacattagtgagagtaacagctagcagaataattacaatggctaaaacgtttttatagagaatcttgtttttcaaaaaagaataaaaagtttgaatagctattattaaagaaaagccatgtcttcaacatctgagtcaccaagaagtaacactttttaaacttgttagaaatccctggaggcatttcaaattcatcttctaacctacctaagcactttaaaatacagcctccttctgttcctctgttccccttcatgcctccttttgaattgatatctcagctgtcaatatttctttgacttcagcattgttattttatttctctatatcaatgtgtccttagttttcttagcctgttaatttaaaaatccagacttgggggtcattgtgttgctacccaagagaaaatgctacagttttatagattgcacatcattctttaaggcatacttttacctcaggaaacttactctagtatgttctcatatattgaattctcaactaagtaactatttctttatacctataaactagtacctaattcactgttagttaaatgagctatagataaggcagctaaatttctgaaagatagccagagtaagtaagcagccactgcaagctctgaatcagttttttaaaaaaaagaaaaaaaaaaaaaaggagctgtgccccattgaacaatgacaacatcacaaggggaagggagggattttgccaaaagttagaaaggtggagctgtaagccatgtgcttgttgcctttgacagtgacagtgcgcgtcttacaactaattccactaggcatgggaatgtcacctcctttgccactgtaccccatcaagcttactctgaatcaaaggttttgtaaaacttttgaaaatgaacttagctgcaaaatatagctaaccactttccattgcaagctttgcaaagtgaagagaggttcgtacttctcataattggtatttagcacaattgtaagatacagttttactgtttgtacatcgtttttttccattaaacttttctagagaagacaaaagcttacactggtgacatggataagtgagatggtgtctaacgagcagtgcaatattaggcggtgcaatagaggccctgttggcaagatgagttttgctggagagctggacagtgttggttagcttcctgcattgattgcccctgggcgttcttcccccttaactgtgaaagcagagtctataaatgaactctttgctcttacaaggtaatttacatattttctttctgttgaaataactgaaaatgttaaatctaccagtttatgtcttgtaaacagagtgtcatatgtatttaagttgtgtatttttataaagtaaagccaagtatcaaacaaaaaaa

SEQ ID NO: 369394 - DNA, 554 bp, Homo sapiens
caagcttatgcatgcggccgctgaatggaggccaacatgccgaagcggaaggagcccggcaggtctctccgcatcaaagtcatctccatgggcaacgccgaagtggggaaaagctgtattataaagcgatactgtgagaaaagattcgtgtctaaatacctggcaacaattggaattgactatggagtcacaaaggtacacgtcagagacagagaaatcaaagttaacatctttgatatggctggacatcccttcttctatgaggtaagaaagcctttttgacaaaacctatatccagtattgttggtggtttggggagagatccagaattatatgaaacaaccaatattgatatcatgtgtaaaattgcataattttagcttgatcgtggcttgccttcagagccttgagttaatagacaactgttgattttttaggttatcctgttaaatagtggtaggaaatttcattgccaatatttcaaacatttcaataagacattttgactttcagaggacttttgctttttacctcatactttagcctaaaatgtg

SEQ ID NO: 369395 - DNA, 259 bp, Homo sapiens
atctgtccttttatttgaaggttcgaaatgagttttacaaggacacacagggtgtgatactggtctatgatgttgggcagaaagactcctttgacgcccttgatgcgtggctggcagaaatgaagcaagagcttggacctcatggaaacatggaaaatattatatttgtagtttgtgccaacaaggtaacccctctggaaatggtgtgttcagatttctagggaaagagtggagctttgagtgttgggaaacaaaaaga

SEQ ID NO: 369396 - DNA, 441 bp, Homo sapiens
tgttttccattgtaagtccttctatgctaatacatttttagaatgacattactttgattctataaaaaaccctctaatgaccagtagaaacagatacaatagcaaacactaagaatacacaaaagaacacactttgccaggttaatgactgtgagatacattcttataacatcacaaaaactacgttttgtgtatctgtccttttatttgaaggttcgaaatgagttttacaaggacacacagggtgtgatactggtctatgatgttgggcagaaagactcctttgacgcccttgatgcgtggctggcagaaatgaagcaagagcttggacctcatggaaacatggaaaatattatatttgtagtttgtgccaacaaggtaacccctctggaaatggtgtgttcagatttctagggaaagagtggagctttgagtgttggg

SEQ ID NO: 369397 - DNA, 5139 bp, Homo sapiens
agcgggtctccctcccccggctccccacgctcccaaccgcccgcgcctgctgccaggcagcggcggggatggcgagcagcggaggcgaggcggtgacgagagcagcggctccgccattggacgaggaggcctgagggacgggccagcggtgcacaagaagagaccgaggcgggtggccccgagagagccagggccatggaggccaacatgccgaagcggaaggagcccggcaggtctctccgcatcaaagtcatctccatgggcaacgccgaagtggggaaaagctgtattataaagcgatactgtgagaaaagattcgtgtctaaatacctggcaacaattggaattgactatggagtcacaaaggtacacgtcagagacagagaaatcaaagttaacatctttgatatggctggacatcccttcttctatgagatgaggaaactgagacgcagagaggttaagtgacttgcccaagatcacaaaactagttcgaaatgagttttacaaggacacacagggtgtgatactggtctatgatgttgggcagaaagactcctttgacgcccttgatgcgtggctggcagaaatgaagcaagagcttggacctcatggaaacatggaaaatattatatttgtagtttgtgccaacaagattgattgtaccaaacatcgctgtgtagatgaaagtgaaggacgtctttgggctgaaagcaaagggttcctgtactttgaaacttcagcacaaactggagaaggcattaatgagatgttccagatacatcttggatagaactaatggataaattagtctgtttaaaaaaaaaaagctaacaagaagagaataattacagtattctataaaccttttatatatccatagttgatttatgtgaaaatggcgggaaacgccctaccaccaatagcagtgctagtttcaccaaagaacaagcagatgccattcgcagaattcgaaatagtaaagacagttgggacatgctgggagtcaaacctggggcctcaagggatgaagtcaataaagcgtatcggaaacttgctgtgcttcttcaccctgacaaatgtgtagcacctggcagtgaagatgccttcaaagcagttgtgaatgctcggacagccctcctgaaaaacatcaagtagaaagtacagaaaaaagccacatgtgggactcaaatgcaaacagactttccctagaggtgaaataaccaacgtggagttttccttcccagaatctcactgctcttttcattcatgtgttgtcatttgtatatcagtaattcaggtacccatttcatagacattttactgagaaatgacctgcatttgtatgaagtgaactgagcgtcacaccctgtacttcatttcatatttctagataattctgaatttttttctcattcgtcagctctgtaattatagtatcacttagacatttcacttggggaaatccacaaggttcctggaggagggaagagaggacaagaggaccctttcactttttcttttttacggaattcatcatcagagaagaaaataacaaaaatggaagcaaacaacatcagaacccctgtaagtttggtgtgaccttacagacaagttgctgcttttacaatgagttccttaggtggtattttaacccatcgatctataatgatgactcttggcagccctttgggagtttgtaaaatgaggtgatacagttctgaattgagcattcctttatgatattcactctgttcctcttctgcagccaccagtgggagagacaagccagtcctaagagaaaaggtggtggcagccacaaattctaggtacactggctgctgcctatcctgtccctggatctgaggcctttcccttgccatagaaatggttgctggtagcagtagagagcactgtgcacctgggaatgaggaatcaggccccaagacagaagtacttggaggagccagctgcagtagtatccgcctgtagtcccagctactcaggaggctgagacaggaggattgcttaagcccaggagctcaagtcccacctgggcaacatagtaagatcttgtctcttaaaaaaaaaaaaaaaggtacttagaggtcgcacttaaagattatgcacatcagcagaggaaaggccagccaagcttggggcaagcttgatgcagtaggagagactccttatgaggcttagcccttgtcttactgccagcctttgccacaggcaggtgagaaaggcagggccactcctcagcaaagttggcctcttctacacttcctcaccagtgttgtttcttccttttttcccctcttccccttcccgtcttgtgttttttctgaaccccacatctgccatcatttctctcctctagagtccctggcttctggccactgcctcctccctcttctaagccttggcctgaatctggttgatcagaggcaagtgtggatcctttgggtggcagtcaggggagatctcagggcctctgttgggaggaatctctgtaattcctgcttgggctccaaatttctgaagagtaatatttttaaactatagcttacaaaatacattctctgaccacagtctcctccttgatatacaagggatggatgaagttcatgtattaggactggcactccttacggtgcttatagaactagtctcaccacttgactcattacgtcgtcattcttgttacatcactcatacttttagctgcaaccacactaattcacatttttatatactttcaattagctgtactaattggggcttgaaagtatataaaatcttcctgtcctgtgaattttaaaaagctatcccatatcgattgccaaagagcatctaccttacctcctaagaagaaaagccactttcttccaatccaagcccactgcagccttgtggattttccacacagcagcttttcactgtatgcctgtacttgggctgcactgagcttgtcttcaggaaaccagagcgttgctttatcatcgcacttttcatcttggtaatatcaaaacaactttttaaatgaactgattgatatatgttatttcttgcgaggttttcctctggcctttaactggcttctgaggctacagaactccaacccagagttcttcgggacctaaattttgcttaaggaaggcctttatcatgctgaaagcactcagacatgtctgtcctcacagcagaatgtagaagtcatatgaatgagggatcgtgcacggtagcgtcagcccgaattgacacgacaactctgaatgtgtggccctctatgaaagctggtgccagttttcatcactgttattaaatactagattgggaacctcattcagccgtattgcacagatgagcaattacagcagagaaaattcattagtgctcccactcatatccttatgtgtgagttggtgaaatttagcctgagcttgattcttaggtcttgagactcagtttccaacaccttcattattaatgttaagaatggccatataccacttcatttacgtaaaaggaataaaataagcaagttaagcttcagggtcctagaatttttctgatttctataatccttcagcagaatattaagaaataaagcatgatctgcaatggaaaggtttttttggcactaacttcatgcagaatttcacagacatctatgcattaatttaaattcttggtgcaaatgtgtgctttgtagttcaaccttattaaaaattcttcagccagttaggatttcaaaatacattagtgagagtaacagctagcagaataattacaatggctaaaacgtttttatagagaatcttgtttttcaaaaaagaataaaaagtttgaatagctattattaaagaaaagccatgtcttcaacatctgagtcaccaagaagtaacactttttaaacttgttagaaatccctggaggcatttcaaattcatcttctaacctacctaagcactttaaaatacagcctccttctgttcctctgttccccttcatgcctccttttgaattgatatctcagctgtcaatatttctttgacttcagcattgttattttatttctctatatcaatgtgtccttagttttcttagcctgttaatttaaaaatccagacttgggggtcattgtgttgctacccaagagaaaatgctacagttttatagattgcacatcattctttaaggcatacttttacctcaggaaacttactctagtatgttctcatatattgaattctcaactaagtaactatttctttatacctataaactagtacctaattcactgttagttaaatgagctatagataaggcagctaaatttctgaaagatagccagagtaagtaagcagccactgcaagctctgaatcagttttttaaaaaaaagaaaaaaaaaaaaaaggagctgtgccccattgaacaatgacaacatcacaaggggaagggagggattttgccaaaagttagaaaggtggagctgtaagccatgtgcttgttgcctttgacagtgacagtgcgcgtcttacaactaattccactaggcatgggaatgtcacctcctttgccactgtaccccatcaagcttactctgaatcaaaggttttgtaaaacttttgaaaatgaacttagctgcaaaatatagctaaccactttccattgcaagctttgcaaagtgaagagaggttcgtacttctcataattggtatttagcacaattgtaagatacagttttactgtttgtacatcgtttttttccattaaacttttctagagaagacaaaagcttacactggtgacatggataagtgagatggtgtctaacgagcagtgcaatattaggcggtgcaatagaggccctgttggcaagatgagttttgctggagagctggacagtgttggttagcttcctgcattgattgcccctgggcgttcttcccccttaactgtgaaagcagagtctataaatgaactctttgctcttacaaggtaatttacatattttctttctgttgaaataactgaaaatgttaaatctaccagtttatgtcttgtaaacagagtgtcatatgtatttaagttgtgtatttttataaagtaaagccaagtatcaaacaaaaaaa

SEQ ID NO: 369398 - DNA, 888 bp, Homo sapiens
ataactcactgtctaacaaagttttgaaaatttgtctgatatgtaattaggtactttagggttattaggttttcataaaaattctggttagggctcttgccctgctcccaatgaaagcctttccacagggcaaatataaaagagagagtagagggaatccccctgaggtttaaataagtcaaaccagtaagtaatagtgctaagtttgtcagtgcctctctttcttactgtacttaacatctaaagggcacctcatttattttcagctaattatgttctttatgagtgactgtcaaatcagggaagggtgtgacgatcatgtggagataccttttctaattaatagctgccttgctcctcaagattctgatgaatgttgggaaaggaaaaaagttgaggtgcaaacaatgtgagaaatttaataattgagagatacttaaattttttatctattgctgtataacaaactacccctaaacttagcagcttaaaacaatgaacatttatctattatctcacatagttttgtgcatcagaaatttaggagccacttagcagagttgttctggctcagggattctcataacattgtaggcaagatgttggcaaggctgaagtcatctgaaggcctctttggggtgggaggatggctattgtcaggagactttacttcctctctggcttttggcaggaagccttagttgttaatcatgtggacctctctgtagagctgtttgggtaatctcaggacatggcctagagtgagtagtcccagctacttgggaagctgaggtgggaggattgcttgagcctggaaggttgaggctgtagtgagccgtgatcgtggcatggcaccccagcctaggtggcaaagtgagaccctatctc

SEQ ID NO: 369399 - DNA, 668 bp, Homo sapiens
acgggcacacggacaccccaaagtaatgccagctgggaagcacctgggaaggacccagcacaaatgggaagacggaccagggatggtccacagaccaacgtcaccccgaccacacagggcaccctgagaacacaaccacccgcttcaggtctgtctgaagagcctccaatcacctagacttccctaattcactggaacaggaaaggtgttgccacaggcatacaaagcacttggtggtgagagtgagaacacttttggctccccctaatccaagccaggggaactcgcggggctcaggcgcagccctcgctgggtaatggaaggccctctcgcccaccttgccctttctgcggggctggcaaacactgacatctgaggaccgtggggtgccaggccttcccattatcctctttcacaatcttccgaatcaaggtccactaacacctcatttatccaaaaatcagtcaatgaatgatcccagctgctcaagaaagccactccccacccctgcccaggagcccagaaggtgccactaatgccacacctcacccagggccagtattctcttcctttatacccagctgtagctggctttccgggtaggcatgggtgagcagaaagagggtgaagagcacctggctgggcacggtgaccatggccggcagggc

SEQ ID NO: 369400 - DNA, 560 bp, Homo sapiens
  misc_feature (535)..(535): n is a, c, g, or t
acgggcacacggacaccccaaagtaatgccagctgggaagcacctgggaaggacccagcacaaatgggaagacggaccagggatggtccacagaccaacgtcaccccgaccacacagggcaccctgagaacacaaccacccgcttcaggtctgtctgaagagcctccaatcacctagacttccctaattcactggaacaggaaaggtgttgccacaggcatacaaagcacttggtggtgagagtgagaacacttttggctccccctaatccaagccaggggaactcgcggggctcaggcgcagccctcgctgggtaatggaaggccctctcgcccaccttgccctttctgcggggctggcaaacactgacatctgaggaccgtggggtgccaggccttcccattatcctctttcacaatcttccgaatcaaggtccactaacacctcatttatccaaaaatcagtcaatgaatgatcccagctgctcaagaaagccactccccacccctgcccaggagcccagaaggtgggaggnggcatcgataaacaccgggtaccga

SEQ ID NO: 369401 - DNA, 1219 bp, Homo sapiens
gcacgaggcggcacgaggcggcacgaggctgatgtggaaaaaagaaatgcaagggaaaacataaaacagatagtaaaactccttgcaagtgttcgagctttggatcatgctatgtctgttgcaagtgaccacaatgtgaaagaatttaagtctttgatcgaaggaaaatagatctatgagactgaaaaacctatttgcttgattaccattcccaatgtgtaaattttgtatatatgtaaagtttcttaaactgtaaaatagcaattcttgttttaatacaaaaaacattatattcaatactgtgtccttaaatgatatttcttcagaatgaaaggaattcagattatttctaggagtctatgaatgttttctttactgcctgtcatactttgtttactgaagtattttgtatggtcatttaaattaaccctctcagttaattgtcccctgtaaacgatgtgtgcagtgtaaattgtgtaattatgcatatatatatttataccaccatggacttactttcacactgggaaatttgtggtgtttttccacagaggaagccttttaacagcagaaaattatccggtagcaaattgtcttagggaaattactacactgttgtaacaaaagggctggcaagtgactaaatgttcattaccttttggttagcgttgctatcactgtagctgtgctgccttaacattgagagttgagttgtggacttagtcattgagtgaatgttgaactttcttccttgaatcagcgttagagtcaaatgtgggtttaatgtgaatgctaaatgaatatgcaacatagtttcaaatggaacatagaaatttcacttttgaaaataataaacccacaacctaattgcatggttttgggctgaccgtcctgtctcattcatgattttactccctgcccagcttgcagatacatgcatttgaattttagtagtctgtcatatttaaaatcccacatatgtgagttaaatatgcaataaagaatacgccttgctgattagccacacccaggcaatttaatatccatggtcttctataatgtttataccacattgtaaatattcagagaacttgttttaaagtttatgctttctgattctgtgattttcaaaagaggaatttttttggaaattaaggactatcgtttgataattatatatgtaattaagatttagccaagcattaaattaatttttaaa

SEQ ID NO: 369402 - DNA, 1024 bp, Homo sapiens
gagtgtaattttgaatggaggacacttacctaagactcagcactccctgatagtactgtctgcaatgatggaaaatgttctgtatctgtgctgaccagtgctgtagccactagctacatgtggctgtttcgattttgactaattaaaattgaatattcaaatgtaaccattctaggaaatatctgtacctttgaaagtattaatatttcttagtactttggcaagacatggtctgctgtatttcatatggtgttttactatgtaacttatttactttgtacctaatctaattgtttcacattacctattttttttcttctttccagctgttaggcaattttcttcagtggtatggcattttctcaaataaaactctgcaagagttatcaatagatggtttattaaatcgatatattctcatggcttttcagaattcagaatatggagatgacagcatcaaaaaagcccaaaatgtgagttaaatgcatagtacagtttttaaagcatataatttaaaatgaattaagtttttgtttgtttgaagagggatttgagaattttatgaaacccctttgattactggacttgcatgtaaggttgacagtttgcctacccaggtagttccaaccccctacagcattttttacataaaaatgcatactgttatatatatatatatccatctatatccatatttttatagatattagtgaaagttttgatatttttataggtataaataaaagttttgatttcagaataataaccttattatcttaacctcagtctgggccaactcgacttcccttagcagcatgcatggatgtctattcgtggaattattgcaggggatgggggtgctgtaatttcatttttataccactcatttttacatcaaaagctgctggaaaaggaaattcagtatatttaggccatcctagaagactggaaaatgaagcagttggttgtcagttttatgttactaatttactcaaatattggacagattatcttttgctttgag

SEQ ID NO: 369403 - DNA, 423 bp, Homo sapiens
tggataaatgtaaacttttttttttttaacatgctgtagcttgcatatctgtttcctttctttgaaaatgtgtgcttggaaaaattgattgcagaagctctaaaatagccatgaaatcagtagcaaattttctcttagatatactaattaatgagatgctgctatatttttttcttttagggaaaacataaaacagatagtaaaactccttgcaagtgttcgagctttggatcatgctatgtctgttgcaagtgaccacaatgtgaaagaatttaagtctttgatcgaaggaaaatagatctatgagactgaaaaacctatttgcttgattaccattcccaatgtgtaaattttgtatatatgtaaagtttcttaaactgtaaaatagcaattcttgttttaatacaaaaaacattatattca

SEQ ID NO: 369404 - DNA, 480 bp, Homo sapiens
tttgcttttaatactttaatttattctgtcttaactattttattttacgtctttcttctccacaggtaatcaattgtttccccaaacaatggttcatgaatagttccgcatgggtgggaaggcctcaggaaacttacaatcttgacgaaaggcacgtcttcacagggtggctggggctgtctctctcctgatggaaagtcacatcagccttgtgttaatttcttgtagctggtgttacaaattaccatgaactgggtggtttaaaacaacaaaaatgtattttcttgcagttctggaggccagaaccaacagggccatgctccttccaaaggctctaggctcaaatccttccttgcctcttccaacttctgatggctgctgacatagcttggctatggccacatcgctccaatctctgctgctgtcttcacatcacttttttttctctctctctctctcctgtgtgcgtgtttaattttc

SEQ ID NO: 369405 - DNA, 4107 bp, Homo sapiens
agtattgagagcgcgtgggagcataggcgcatgcgcgctcgtggggtgcgcggtagcaacagaggactcgacccggctggagctccggagagcgcgcgtgcgccgtcacgagctcggcgctgccggggccgcggtgtggaagcgagtattcgaccgccgtgcgggccgcggggatgttccgaaaggcccggcgggtgaacgtgcgcaagcggaacgactccgaagaggaagagcgggaacgcgatgaggagcaggagccgccgccgttgttgccgccgccgggcacgggcgaagaggcgggccccggtggcggcgacagggcccctggcggggagtcgctgctgggcccggggccgtcgccgccttccgcgctgaccccgggcctcggggctgaggccgggggcggcttccccggcggcgcggagcccggcaacgggctgaagccgcgcaagaggcctcgcgagaacaaagaggtgccccgggccagcctgctcagcttccaggacgaggaggaagaaaatgaagaagttttcaaagtgaagaaatcaagttatagcaaaaagatagtaaaattgctcaagaaggaatataaagaagatcttgaaaaatcgaagattaagacagaactcaactcatcagctgaaagtgaacaacctttggacaaaacaggacatgttaaggatacaaatcaagaagatggagttatcatcagtgaacatggtgaagatgaaatggatatggaaagtgaaaaagaggaagaaaagccaaagactggtggagctttttcaaatgctttatcttcattgaatgttcttcgtccaggagaaattccagatgcagcttttatacatgctgcaaggaaaaagcgccaaatggcccgagaattgggagatttcactcctcatgataatgagcctggtaaaggccgccttgttagagaagatgagaatgatgccagtgatgatgaagatgacgatgagaaacgccggatagttttttctgtgaaagaaaagtcacaaagacaaaaaattgctgaggaaataggaattgaggggagtgatgatgatgctttagtaactggagaacaggatgaagagctcagccgatgggaacaggagcagataaggaaaggaattaatatccctcaggttcaagccagtcaacccgcagaagtgaatatgtactaccagaacacttaccagacaatgccttacggctcatcctatggcattccttatagttatacggcctatggatcatcagatgccaaatctcaaaaaacagataatacagtccctttcaaaactcccagtaatgagatgactcccgttactattgatttggtaaagaaacagcttaaagacaggttggactccatgaaagaattgcacaaaacaaatcgacagcagcatgagaaacatctgcaaagccgagtggactctaccagggctattgaaagattagaagggtcttctgggggtattggtgaacggtataaatttttgcaagaaatgcgagggtatgtccaagacttgcttgagtgtttcagtgaaaaggtgccactgattaatgaacttgaatcagcaatacatcagctgtacaaacagcgagcttcccgccttgtccaaagacgacaagatgatattaaagatgaatcttcggagttttcaagccattcaaacaaagctctgatggcaccaaatcttgactcctttggacgcgatcgggcactgtatcaagagcatgcaaaacgtcgcattgcagagcgggaggccaggaggactcgtcgtagacaagccagagaacaaaccggtaagatggcagatcaccttgaaggcctttccagtgatgatgaagaaacttctacagatattactaatttcaatctggaaaaagatcgaatttcaaaagaatccggcaaagtttttgaagatgtccttgaaagtttctattcaattgactgtattaaatcacagtttgaagcatggcgttcaaaatactacacatcctacaaagatgcttacattggcctttgtttgccaaaattattcaaccccctcatacgacttcagctcctcacttggactcctcttgaggcaaaatgtcgtgactttgagaatatgctgtggtttgaatctttgctgttttatggttgtgaagaacgagagcaagaaaaagatgatgtagatgttgccctactacctaccattgtggaaaaggtgattcttcctaaactaacagtgatagctgaaaatatgtgggaccctttttctacaacacagacttcaagaatggtgggaattacactaaaattaatcaatggatatccttcagtagtgaatgcagaaaataaaaatacacaggtatacctaaaggcacttttattgagaatgagaagaactttagatgatgatgtatttatgcccttatatcccaaaaatgtcttagaaaataaaaattctgggccttacttgttttttcaacgacagttttggtcttcagttaagctgttaggcaattttcttcagtggtatggcattttctcaaataaaactctgcaagagttatcaatagatggtttattaaatcgatatattctcatggcttttcagaattcagaatatggagatgacagcatcaaaaaagcccaaaatgtaatcaattgtttccccaaacaatggttcatgaatctgaaaggagaaaggactatttctcagttagaaaacttttgccgataccttgtacacttagcggatacaatttatagaaatagtatcgggtgttctgatgtggaaaaaagaaatgcaagggaaaacataaaacagatagtaaaactccttgcaagtgttcgagctttggatcatgctatgtctgttgcaagtgaccacaatgtgaaagaatttaagtctttgatcgaaggaaaatagatctatgagactgaaaaacctatttgcttgattaccattcccaatgtgtaaattttgtatatatgtaaagtttcttaaactgtaaaatagcaattcttgttttaatacaaaaaacattatattcaatactgtgtccttaaatgatatttcttcagaatgaaaggaattcagattatttctaggagtctatgaatgttttctttactgcctgtcatactttgtttactgaagtattttgtatggtcatttaaattaaccctctcagttaattgtcccctgtaaacgatgtgtgcagtgtaaattgtgtaattatgcatatatatatttataccaccatggacttactttcacactgggaaatttgtggtgtttttccacagaggaagccttttaacagcagaaaattatccggtagcaaattgtcttagggaaattactacactgttgtaacaaaagggctggcaagtgactaaatgttcattaccttttggttagcgttgctatcactgtagctgtgctgccttaacattgagagttgagttgtggacttagtcattgagtgaatgttgaactttcttccttgaatcagcgttagagtcaaatgtgggtttaatgtgaatgctaaatgaatatgcaacatagtttcaaatggaacatagaaatttcacttttgaaaataataaacccacaacctaattgcatggttttgggctgaccgtcctgtctcattcatgattttactccctgcccagcttgcagatacatgcatttgaattttagtagtctgtcatatttaaaatcccacatatgtgagttaaatatgcaataaagaatacgccttgctgattagccacacccaggcaatttaatatccatggtcttctataatgtttataccacattgtaaatattcagagaacttgttttaaagtttatgctttctgattctgtgattttcaaaagaggaatttttttggaaattaaggactatcgtttgataattatatatgtaattaagatttagccaagcattaaattaatttttaaaaacacaacacaaaaaaataaaaaaaaaaattttggtggggcgcttgtgggcctggaagaaagtttttaaaaaccctttggttgtgggggggggggcccaaggtgggtttggtggacctgggccaataggggt

SEQ ID NO: 369406 - DNA, 2628 bp, Homo sapiens
gggtgtcatggccggctcctaccctgaaggtgcacctgcagtcctcgccgataagaggcagcagttcggaagccggttcctgagagatccggcgcgcgtcttccaccacaatgcctgggacaatgtggagtggtcggaagagcaagccgcggcggcggagagaaaagtccaggagaacagtatccagcgggtgtgccaggagaaacaaggtgccactgattaatgaacttgaatcagcaatacatcagctgtacaaacagcgagcttcccgccttgtccaaagacgacaagatgatattaaagatgaatcttcggagttttcaagccattcaaacaaagctctgatggcaccaaatcttgactcctttggacgcgatcgggcactgtatcaagagcatgcaaaacgtcgcattgcagagcgggaggccaggaggactcgtcgtagacaagccagagaacaaaccggtaagatggcagatcaccttgaaggcctttccagtgatgatgaagaaacttctacagatattactaatttcaatctggaaaaagatcgaatttcaaaagaatccggcaaagtttttgaagatgtccttgaaagtttctattcaattgactgtattaaatcacagtttgaagcatggcgttcaaaatactacacatcctacaaagatgcttacattggcctttgtttgccaaaattattcaaccccctcatacgacttcagctcctcacttggactcctcttgaggcaaaatgtcgtgactttgagaatatgctgtggtttgaatctttgctgttttatggttgtgaagaacgagagcaagaaaaagatgatgtagatgttgccctactacctaccattgtggaaaaggtgattcttcctaaactaacagtgatagctgaaaatatgtgggaccctttttctacaacacagacttcaagaatggtgggaattacactaaaattaatcaatggatatccttcagtagtgaatgcagaaaataaaaatacacaggtatacctaaaggcacttttattgagaatgagaagaactttagatgatgatgtatttatgcccttatatcccaaaaatgtcttagaaaataaaaattctgggccttacttgttttttcaacgacagttttggtcttcagttaagctgttaggcaattttcttcagtggtatggcattttctcaaataaaactctgcaagagttatcaatagatggtttattaaatcgatatattctcatggcttttcagaattcagaatatggagatgacagcatcaaaaaagcccaaaatgtaatcaattgtttccccaaacaatggttcatgaatctgaaaggagaaaggactatttctcagttagaaaacttttgccgataccttgtacacttagcggatacaatttatagaaatagtatcgggtgttctgatgtggaaaaaagaaatgcaagggaaaacataaaacagatagtaaaactccttgcaagtgttcgagctttggatcatgctatgtctgttgcaagtgaccacaatgtgaaagaatttaagtctttgatcgaaggaaaatagatctatgagactgaaaaacctatttgcttgattaccattcccaatgtgtaaattttgtatatatgtaaagtttcttaaactgtaaaatagcaattcttgttttaatacaaaaaacattatattcaatactgtgtccttaaatgatatttcttcagaatgaaaggaattcagattatttctaggagtctatgaatgttttctttactgcctgtcatactttgtttactgaagtattttgtatggtcatttaaattaaccctctcagttaattgtcccctgtaaacgatgtgtgcagtgtaaattgtgtaattatgcatatatatatttataccaccatggacttactttcacactgggaaatttgtggtgtttttccacagaggaagccttttaacagcagaaaattatccggtagcaaattgtcttagggaaattactacactgttgtaacaaaagggctggcaagtgactaaatgttcattaccttttggttagcgttgctatcactgtagctgtgctgccttaacattgagagttgagttgtggacttagtcattgagtgaatgttgaactttcttccttgaatcagcgttagagtcaaatgtgggtttaatgtgaatgctaaatgaatatgcaacatagtttcaaatggaacatagaaatttcacttttgaaaataataaacccacaacctaattgcatggttttgggctgaccgtcctgtctcattcatgattttactccctgcccagcttgcagatacatgcatttgaattttagtagtctgtcatatttaaaatcccacatatgtgagttaaatatgcaataaagaatacgccttgctgattagccacacccaggcaatttaatatccatggtcttctataatgtttataccacattgtaaatattcagagaacttgttttaaagtttatgctttctgattctgtgattttcaaaagaggaatttttttggaaattaaggactatcgtttgataattatatatgtaattaagatttagccaagcattaaattaatttttaaa

SEQ ID NO: 369407 - DNA, 2411 bp, Homo sapiens
cagaatcttgccgttgagattagcaagcagtctgtcgtaatggcttattctgtgcaaactctttcctcaagattgttgaaagatggcttttaattttaactgttgttgttttgcagacaaagctctgatggcaccaaatcttgactcctttggacgcgatcgggcactgtatcaagagcatgcaaaacgtcgcattgcagagcgggaggccaggaggactcgtcgtagacaagccagagaacaaaccggtaagatggcagatcaccttgaaggcctttccagtgatgatgaagaaacttctacagatattactaatttcaatctggaaaaagatcgaatttcaaaagaatccggcaaagtttttgaagatgtccttgaaagtttctattcaattgactgtattaaatcacagtttgaagcatggcgttcaaaatactacacatcctacaaagatgcttacattggcctttgtttgccaaaattattcaaccccctcatacgacttcagctcctcacttggactcctcttgaggcaaaatgtcgtgactttgagaatatgctgtggtttgaatctttgctgttttatggttgtgaagaacgagagcaagaaaaagatgatgtagatgttgccctactacctaccattgtggaaaaggtgattcttcctaaactaacagtgatagctgaaaatatgtgggaccctttttctacaacacagacttcaagaatggtgggaattacactaaaattaatcaatggatatccttcagtagtgaatgcagaaaataaaaatacacaggtatacctaaaggcacttttattgagaatgagaagaactttagatgatgatgtatttatgcccttatatcccaaaaatgtcttagaaaataaaaattctgggccttacttgttttttcaacgacagttttggtcttcagttaagctgttaggcaattttcttcagtggtatggcattttctcaaataaaactctgcaagagttatcaatagatggtttattaaatcgatatattctcatggcttttcagaattcagaatatggagatgacagcatcaaaaaagcccaaaatgtaatcaattgtttccccaaacaatggttcatgaatctgaaaggagaaaggactatttctcagttagaaaacttttgccgataccttgtacacttagcggatacaatttatagaaatagtatcgggtgttctgatgtggaaaaaagaaatgcaagggaaaacataaaacagatagtaaaactccttgcaagtgttcgagctttggatcatgctatgtctgttgcaagtgaccacaatgtgaaagaatttaagtctttgatcgaaggaaaatagatctatgagactgaaaaacctatttgcttgattaccattcccaatgtgtaaattttgtatatatgtaaagtttcttaaactgtaaaatagcaattcttgttttaatacaaaaaacattatattcaatactgtgtccttaaatgatatttcttcagaatgaaaggaattcagattatttctaggagtctatgaatgttttctttactgcctgtcatactttgtttactgaagtattttgtatggtcatttaaattaaccctctcagttaattgtcccctgtaaacgatgtgtgcagtgtaaattgtgtaattatgcatatatatatttataccaccatggacttactttcacactgggaaatttgtggtgtttttccacagaggaagccttttaacagcagaaaattatccggtagcaaattgtcttagggaaattactacactgttgtaacaaaagggctggcaagtgactaaatgttcattaccttttggttagcgttgctatcactgtagctgtgctgccttaacattgagagttgagttgtggacttagtcattgagtgaatgttgaactttcttccttgaatcagcgttagagtcaaatgtgggtttaatgtgaatgctaaatgaatatgcaacatagtttcaaatggaacatagaaatttcacttttgaaaataataaacccacaacctaattgcatggttttgggctgaccgtcctgtctcattcatgattttactccctgcccagcttgcagatacatgcatttgaattttagtagtctgtcatatttaaaatcccacatatgtgagttaaatatgcaataaagaatacgccttgctgattagccacacccaggcaatttaatatccatggtcttctataatgtttataccacattgtaaatattcagagaacttgttttaaagtttatgctttctgattctgtgattttcaaaagaggaatttttttggaaattaaggactatcgtttgataattatatatgtaattaagatttagccaagcattaaattaatttttaaa

SEQ ID NO: 369408 - DNA, 1346 bp, Homo sapiens
tggataaatgtaaacttttttttttttaacatgctgtagcttgcatatctgtttcctttctttgaaaatgtgtgcttggaaaaattgattgcagaagctctaaaatagccatgaaatcagtagcaaattttctcttagatatactaattaatgagatgctgctatatttttttcttttagggaaaacataaaacagatagtaaaactccttgcaagtgttcgagctttggatcatgctatgtctgttgcaagtgaccacaatgtgaaagaatttaagtctttgatcgaaggaaaatagatctatgagactgaaaaacctatttgcttgattaccattcccaatgtgtaaattttgtatatatgtaaagtttcttaaactgtaaaatagcaattcttgttttaatacaaaaaacattatattcaatactgtgtccttaaatgatatttcttcagaatgaaaggaattcagattatttctaggagtctatgaatgttttctttactgcctgtcatactttgtttactgaagtattttgtatggtcatttaaattaaccctctcagttaattgtcccctgtaaacgatgtgtgcagtgtaaattgtgtaattatgcatatatatatttataccaccatggacttactttcacactgggaaatttgtggtgtttttccacagaggaagccttttaacagcagaaaattatccggtagcaaattgtcttagggaaattactacactgttgtaacaaaagggctggcaagtgactaaatgttcattaccttttggttagcgttgctatcactgtagctgtgctgccttaacattgagagttgagttgtggacttagtcattgagtgaatgttgaactttcttccttgaatcagcgttagagtcaaatgtgggtttaatgtgaatgctaaatgaatatgcaacatagtttcaaatggaacatagaaatttcacttttgaaaataataaacccacaacctaattgcatggttttgggctgaccgtcctgtctcattcatgattttactccctgcccagcttgcagatacatgcatttgaattttagtagtctgtcatatttaaaatcccacatatgtgagttaaatatgcaataaagaatacgccttgctgattagccacacccaggcaatttaatatccatggtcttctataatgtttataccacattgtaaatattcagagaacttgttttaaagtttatgctttctgattctgtgattttcaaaagaggaatttttttggaaattaaggactatcgtttgataattatatatgtaattaagatttagccaagcattaaattaatttttaaa

SEQ ID NO: 369409 - DNA, 2791 bp, Homo sapiens
agtattgagagcgcgtgggagcataggcgcatgcgcgctcgtggggtgcgcggtagcaacagaggactcgacccggctggagctccggagagcgcgcgtgcgccgtcacgagctcggcgctgccggggccgcggtgtggaagcgagtattcgaccgccgtgcgggccgcggggatgttccgaaaggcccggcgggtgaacgtgcgcaagcggaacgactccgaagaggaagagcgggaacgcgatgaggagcaggagccgccgccgttgttgccgccgccgggcacgggcgaagaggcgggccccggtggcggcgacagggcccctggcggggagtcgctgctgggcccggggccgtcgccgccttccgcgctgaccccgggcctcggggctgaggccgggggcggcttccccggcggcgcggagcccggcaacgggctgaagccgcgcaagaggcctcgcgagaacaaagaggtgccccgggccagcctgctcagcttccaggacgaggaggaagaaaatgaagaagttttcaaagtgaagaaatcaagttatagcaaaaagatagtaaaattgctcaagaaggaatataaagaagatcttgaaaaatcgaagattaagacagaactcaactcatcagctgaaagtgaacaacctttggacaaaacaggacatgttaaggatacaaatcaagaagatggagttatcatcagtgaacatggtgaagatgaaatggatatggaaagtgaaaaagaggaagaaaagccaaagactggtggagctttttcaaatgctttatcttcattgaatgttcttcgtccaggagaaattccagatgcagcttttatacatgctgcaaggaaaaagcgccaaatggcccgagaattgggagatttcactcctcatgataatgagcctggtaaaggccgccttgttagagaagatgagaatgatgccagtgatgatgaagatgacgatgagaaacgccggatagttttttctgtgaaagaaaagtcacaaagacaaaaaattgctgaggaaataggaattgaggggagtgatgatgatgctttagtaactggagaacaggatgaagagctcagccgatgggaacaggagcagataaggaaaggaattaatatccctcaggttcaagccagtcaacccgcagaagtgaatatgtactaccagaacacttaccagacaatgccttacggctcatcctatggcattccttatagttatacggcctatggatcatcagatgccaaatctcaaaaaacagataatacagtccctttcaaaactcccagtaatgagatgactcccgttactattgatttggtaaagaaacagcttaaagacaggttggactccatgaaagaattgcacaaaacaaatcgacagcagcatgagaaacatctgcaaagccgagtggactctaccagggctattgaaagattagaagggtcttctgggggtattggtgaacggtataaatttttgcaagaaatgcgagggtatgtccaagacttgcttgagtgtttcagtgaaaaggtgccactgattaatgaacttgaatcagcaatacatcagctgtacaaacagcgagcttcccgccttgtccaaagacgacaagatgatattaaagatgaatcttcggagttttcaagccattcaaacaaagctctgatggcaccaaatcttgactcctttggacgcgatcgggcactgtatcaagagcatgcaaaacgtcgcattgcagagcgggaggccaggaggactcgtcgtagacaagccagagaacaaaccggtaagatggcagatcaccttgaaggcctttccagtgatgatgaagaaacttctacagatattactaatttcaatctggaaaaagatcgaatttcaaaagaatccggcaaagtttttgaagatgtccttgaaagtttctattcaattgactgtattaaatcacagtttgaagcatggcgttcaaaatactacacatcctacaaagatgcttacattggcctttgtttgccaaaattattcaaccccctcatacgacttcagctcctcacttggactcctcttgaggcaaaatgtcgtgactttgagaatatgctgtggtttgaatctttgctgttttatggttgtgaagaacgagagcaagaaaaagatgatgtagatgttgccctactacctaccattgtggaaaaggtgattcttcctaaactaacagtgatagctgaaaatatgtgggaccctttttctacaacacagacttcaagaatggtgggaattacactaaaattaatcaatggatatccttcagtagtgaatgcagaaaataaaaatacacaggtatacctaaaggcacttttattgagaatgagaagaactttagatgatgatgtatttatgcccttatatcccaaaaatgtcttagaaaataaaaattctgggccttacttgttttttcaacgacagttttggtcttcagttaaggtcataaaacccccattccagagagggtcctgccccatacccagaaggaaagaatgctgctcagagaggccaagaagaatctggacggacaggccttgtgttgtcttctcttgagcagtagatcatacctttttgtccagtcatgtttctgcatgcctgtacatatttcgttaaacctaaacatagtagacaatttctcctccatctttgggtcttcattctgaaggctgtcatgttacataaaactgtgatcaaataaatttatatgccttttctcctgttaa

SEQ ID NO: 369410 - DNA, 1056 bp, Homo sapiens
ttttttttttccattttacaaagtattttattccaaaagttcattcaagtttgatattttcacaggagaaagtgatttctgagttccaaagtaaggtccatcgtactcaacgaaatgcctgactaagccacaattaattttttcagcaagtagactacagtagtcctccctgtatccatggggtatatgttctaagatgcccagtggctacctgaaaccacagatagtaccgaaccctatatatactgttttttcctctacatacatacctatgataaagtttaacttataaattaggcacagtaagagattaacaataactaataatagaacagttattaataatatactgtggtaaaggttatatgaatgtagtttctctctcaaaatatgttattgtactgtgccacagctgactgaaaccacagataaggagtactgctgtagcagatactcttctgaggttcggggatatagcactgagtaagctagaagtggaatctttgtggagttcacagtccagcacagttgacaacaaataggtaatctcaggtgtgatgagttatgaaaggggacattcaaggtaatgtggaacatatgacaaggggcacagagaccttgactagctagtcccagaagatttccttccaccctgaggaagtgatatttagatcattcgacctggagaaaaaatagaagttagccctgaggtgaaagagagcaggctacactggaggcgctgaagaaagcataggacagctggagtgagcaagtcataaaacccccattccagagagggtcctgccccatacccagaaggaaagaatgctgctcagagaggccaagaagaatctggacggacaggccttgtgttgtcttctcttgagcagtagatcatacctttttgtccagtcatgtttctgcatgcctgtacatatttcgttaaacctaaacatagtagacaatttctcctccatctttgggtcttcattctgaaggctgtcatgttacataaaactgtgatcaaataaatttatatgccttttctcctgttaa

SEQ ID NO: 369411 - DNA, 597 bp, Homo sapiens
ttttttttttccattttacaaagtattttattccaaaagttcattcaagtttgatattttcacaggagaaagtgatttctgagttccaaagtaaggtccatcgtactcaacgaaatgcctgactaagccacaattaattttttcagcaagtagactacagtagtcctcccttcccagaagatttccttccaccctgaggaagtgatatttagatcattcgacctggagaaaaaatagaagttagccctgaggtgaaagagagcaggctacactggaggcgctgaagaaagcataggacagctggagtgagcaagtcataaaacccccattccagagagggtcctgccccatacccagaaggaaagaatgctgctcagagaggccaagaagaatctggacggacaggccttgtgttgtcttctcttgagcagtagatcatacctttttgtccagtcatgtttctgcatgcctgtacatatttcgttaaacctaaacatagtagacaatttctcctccatctttgggtcttcattctgaaggctgtcatgttacataaaactgtgatcaaataaatttatatgccttttctcctgttaa

SEQ ID NO: 369412 - DNA, 338 bp, Homo sapiens
agggctattgaaagattagaagggtcttctgggggtattggtgaacggtataaatttttgcaagaaatgcgagggtatgtccaagacttgcttgagtgtttcagtgaaaaggtaagaatgcaaaaatactaatctctttgaataaggcaaaattagggaggtctagatggccttgtgtagaacattctataattctcagaaagtacccactgaactcaacattagaagtgatgaaaagtcatgcttcatttttcttcacttcattagtggcattatctcttaagggcaatataatacctttgttgaaaacagaaataaagataatatcttaaagcaca

SEQ ID NO: 369413 - DNA, 563 bp, Homo sapiens
cagttattaataatatactgtggtaaaggttatatgaatgtagtttctctctcaaaatatgttattgtactgtgccacagctgactgaaaccacagataaggagtactgctgtagcagatactcttctgaggttcggggatatagcactgagtaagctagaagtggaatctttgtggagttcacagtccagcacagttgacaacaaataggtaatctcaggtgtgatgagttatgaaaggggacattcaaggtaatgtggaacatatgacaaggggcacagagaccttgactagctagtcccagaagatttccttccaccctgaggaagtgatatttagatcattcgacctggagaaaaaatagaagttagccctgaggtgaaagagagcaggctacactggaggcgctgaagaaagcataggacagctggagtgagcaagtaagtccatagtccagatgatagaggatcttgtaggtcatttgaaatactttggtccttatcccaaaagttgtaggaagtcacaggaagattttttccttaaaaaaaaaataaaaggtataa

SEQ ID NO: 369414 - DNA, 3975 bp, Homo sapiens
agtattgagagcgcgtgggagcataggcgcatgcgcgctcgtggggtgcgcggtagcaacagaggactcgacccggctggagctccggagagcgcgcgtgcgccgtcacgagctcggcgctgccggggccgcggtgtggaagcgagtattcgaccgccgtgcgggccgcggggatgttccgaaaggcccggcgggtgaacgtgcgcaagcggaacgactccgaagaggaagagcgggaacgcgatgaggagcaggagccgccgccgttgttgccgccgccgggcacgggcgaagaggcgggccccggtggcggcgacagggcccctggcggggagtcgctgctgggcccggggccgtcgccgccttccgcgctgaccccgggcctcggggctgaggccgggggcggcttccccggcggcgcggagcccggcaacgggctgaagccgcgcaagaggcctcgcgagaacaaagaggtgccccgggccagcctgctcagcttccaggacgaggaggaagaaaatgaagaagttttcaaagtgaagaaatcaagttatagcaaaaagatagtaaaattgctcaagaaggaatataaagaagatcttgaaaaatcgaagattaagacagaactcaactcatcagctgaaagtgaacaacctttggacaaaacaggacatgttaaggatacaaatcaagaagatggagttatcatcagtgaacatggtgaagatgaaatggatatggaaagtgaaaaagaggaagaaaagccaaagactggtggagctttttcaaatgctttatcttcattgaatgttcttcgtccaggagaaattccagatgcagcttttatacatgctgcaaggaaaaagcgccaaatggcccgagaattgggagatttcactcctcatgataatgagcctggtaaaggccgccttgttagagaagatgagaatgatgccagtgatgatgaagatgacgatgagaaacgccggatagttttttctgtgaaagaaaagtcacaaagacaaaaaattgctgaggaaataggaattgaggggagtgatgatgatgctttagtaactggagaacaggatgaagagctcagccgatgggaacaggagcagataaggaaaggaattaatatccctcaggttcaagccagtcaacccgcagaagtgaatatgtactaccagaacacttaccagacaatgccttacggctcatcctatggcattccttatagttatacggcctatggatcatcagatgccaaatctcaaaaaacagataatacagtccctttcaaaactcccagtaatgagatgactcccgttactattgatttggtaaagaaacagcttaaagacaggttggactccatgaaagaattgcacaaaacaaatcgacagcagcatgagaaacatctgcaaagccgagtggactctaccagggctattgaaagattagaagggtcttctgggggtattggtgaacggtataaatttttgcaagaaatgcgagggtatgtccaagacttgcttgagtgtttcagtgaaaaggtgccactgattaatgaacttgaatcagcaatacatcagctgtacaaacagcgagcttcccgccttgtccaaagacgacaagatgatattaaagatgaatcttcggagttttcaagccattcaaacaaagctctgatggcaccaaatcttgactcctttggacgcgatcgggcactgtatcaagagcatgcaaaacgtcgcattgcagagcgggaggccaggaggactcgtcgtagacaagccagagaacaaaccggtaagatggcagatcaccttgaaggcctttccagtgatgatgaagaaacttctacagatattactaatttcaatctggaaaaagatcgaatttcaaaagaatccggcaaagtttttgaagatgtccttgaaagtttctattcaattgactgtattaaatcacagtttgaagcatggcgttcaaaatactacacatcctacaaagatgcttacattggcctttgtttgccaaaattattcaaccccctcatacgacttcagctcctcacttggactcctcttgaggcaaaatgtcgtgactttgagaatatgctgtggtttgaatctttgctgttttatggttgtgaagaacgagagcaagaaaaagatgatgtagatgttgccctactacctaccattgtggaaaaggtgattcttcctaaactaacagtgatagctgaaaatatgtgggaccctttttctacaacacagacttcaagaatggtgggaattacactaaaattaatcaatggatatccttcagtagtgaatgcagaaaataaaaatacacaggtatacctaaaggcacttttattgagaatgagaagaactttagatgatgatgtatttatgcccttatatcccaaaaatgtcttagaaaataaaaattctgggccttacttgttttttcaacgacagttttggtcttcagttaagctgttaggcaattttcttcagtggtatggcattttctcaaataaaactctgcaagagttatcaatagatggtttattaaatcgatatattctcatggcttttcagaattcagaatatggagatgacagcatcaaaaaagcccaaaatgtaatcaattgtttccccaaacaatggttcatgaatctgaaaggagaaaggactatttctcagttagaaaacttttgccgataccttgtacacttagcggatacaatttatagaaatagtatcgggtgttctgatgtggaaaaaagaaatgcaagggaaaacataaaacagatagtaaaactccttgcaagtgttcgagctttggatcatgctatgtctgttgcaagtgaccacaatgtgaaagaatttaagtctttgatcgaaggaaaatagatctatgagactgaaaaacctatttgcttgattaccattcccaatgtgtaaattttgtatatatgtaaagtttcttaaactgtaaaatagcaattcttgttttaatacaaaaaacattatattcaatactgtgtccttaaatgatatttcttcagaatgaaaggaattcagattatttctaggagtctatgaatgttttctttactgcctgtcatactttgtttactgaagtattttgtatggtcatttaaattaaccctctcagttaattgtcccctgtaaacgatgtgtgcagtgtaaattgtgtaattatgcatatatatatttataccaccatggacttactttcacactgggaaatttgtggtgtttttccacagaggaagccttttaacagcagaaaattatccggtagcaaattgtcttagggaaattactacactgttgtaacaaaagggctggcaagtgactaaatgttcattaccttttggttagcgttgctatcactgtagctgtgctgccttaacattgagagttgagttgtggacttagtcattgagtgaatgttgaactttcttccttgaatcagcgttagagtcaaatgtgggtttaatgtgaatgctaaatgaatatgcaacatagtttcaaatggaacatagaaatttcacttttgaaaataataaacccacaacctaattgcatggttttgggctgaccgtcctgtctcattcatgattttactccctgcccagcttgcagatacatgcatttgaattttagtagtctgtcatatttaaaatcccacatatgtgagttaaatatgcaataaagaatacgccttgctgattagccacacccaggcaatttaatatccatggtcttctataatgtttataccacattgtaaatattcagagaacttgttttaaagtttatgctttctgattctgtgattttcaaaagaggaatttttttggaaattaaggactatcgtttgataattatatatgtaattaagatttagccaagcattaaattaatttttaaa

SEQ ID NO: 369415 - DNA, 3859 bp, Homo sapiens
agtattgagagcgcgtgggagcataggcgcatgcgcgctcgtggggtgcgcggtagcaacagaggactcgacccggctggagctccggagagcgcgcgtgcgccgtcacgagctcggcgctgccggggccgcggtgtggaagcgagtattcgaccgccgtgcgggccgcggggatgttccgaaaggcccggcgggtgaacgtgcgcaagcggaacgactccgaagaggaagagcgggaacgcgatgaggagcaggagccgccgccgttgttgccgccgccgggcacgggcgaagaggcgggccccggtggcggcgacagggcccctggcggggagtcgctgctgggcccggggccgtcgccgccttccgcgctgaccccgggcctcggggctgaggccgggggcggcttccccggcggcgcggagcccggcaacgggctgaagccgcgcaagaggcctcgcgagaacaaagaggtgccccgggccagcctgctcagcttccaggacgaggaggaagaaaatgaagaagttttcaaagtgaagaaatcaagttatagcaaaaagatagtaaaattgctcaagaaggaatataaagaagatcttgaaaaatcgaagattaagacagaactcaactcatcagctgaaagtgaacaacctttggacaaaacaggacatgttaaggatacaaatcaagaagatggagttatcatcagtgaacatggtgaagatgaaatggatatggaaagtgaaaaagaggaagaaaagccaaagactggtggagctttttcaaatgctttatcttcattgaatgttcttcgtccaggagaaattccagatgcagcttttatacatgctgcaaggaaaaagcgccaaatggcccgagaattgggagatttcactcctcatgataatgagcctggtaaaggccgccttgttagagaagatgagaatgatgccagtgatgatgaagatgacgatgagaaacgccggatagttttttctgtgaaagaaaagtcacaaagacaaaaaattgctgaggaaataggaattgaggggagtgatgatgatgctttagtaactggagaacaggatgaagagctcagccgatgggaacaggagcagataaggaaaggaattaatatccctcaggttcaagccagtcaacccgcagaagtgaatatgtactaccagaacacttaccagacaatgccttacggctcatcctatggcattccttatagttatacggcctatggatcatcagatgccaaatctcaaaaaacagataatacagtccctttcaaaactcccagtaatgagatgactcccgttactattgatttggtaaagaaacagcttaaagacaggttggactccatgaaagaattgcacaaaacaaatcgacagcagcatgagaaacatctgcaaagccgagtggactctaccagggctattgaaagattagaagggtcttctgggggtattggtgaacggtataaatttttgcaagaaatgcgagggtatgtccaagacttgcttgagtgtttcagtgaaaaggtgccactgattaatgaacttgaatcagcaatacatcagctgtacaaacagcgagcttcccgccttgtccaaagacgacaagatgatattaaagatgaatcttcggagttttcaagccattcaaacaaagctctgatggcaccaaatcttgactcctttggacgcgatcgggcactgtatcaagagcatgcaaaacgtcgcattgcagagcgggaggccaggagatcgaatttcaaaagaatccggcaaagtttttgaagatgtccttgaaagtttctattcaattgactgtattaaatcacagtttgaagcatggcgttcaaaatactacacatcctacaaagatgcttacattggcctttgtttgccaaaattattcaaccccctcatacgacttcagctcctcacttggactcctcttgaggcaaaatgtcgtgactttgagaatatgctgtggtttgaatctttgctgttttatggttgtgaagaacgagagcaagaaaaagatgatgtagatgttgccctactacctaccattgtggaaaaggtgattcttcctaaactaacagtgatagctgaaaatatgtgggaccctttttctacaacacagacttcaagaatggtgggaattacactaaaattaatcaatggatatccttcagtagtgaatgcagaaaataaaaatacacaggtatacctaaaggcacttttattgagaatgagaagaactttagatgatgatgtatttatgcccttatatcccaaaaatgtcttagaaaataaaaattctgggccttacttgttttttcaacgacagttttggtcttcagttaagctgttaggcaattttcttcagtggtatggcattttctcaaataaaactctgcaagagttatcaatagatggtttattaaatcgatatattctcatggcttttcagaattcagaatatggagatgacagcatcaaaaaagcccaaaatgtaatcaattgtttccccaaacaatggttcatgaatctgaaaggagaaaggactatttctcagttagaaaacttttgccgataccttgtacacttagcggatacaatttatagaaatagtatcgggtgttctgatgtggaaaaaagaaatgcaagggaaaacataaaacagatagtaaaactccttgcaagtgttcgagctttggatcatgctatgtctgttgcaagtgaccacaatgtgaaagaatttaagtctttgatcgaaggaaaatagatctatgagactgaaaaacctatttgcttgattaccattcccaatgtgtaaattttgtatatatgtaaagtttcttaaactgtaaaatagcaattcttgttttaatacaaaaaacattatattcaatactgtgtccttaaatgatatttcttcagaatgaaaggaattcagattatttctaggagtctatgaatgttttctttactgcctgtcatactttgtttactgaagtattttgtatggtcatttaaattaaccctctcagttaattgtcccctgtaaacgatgtgtgcagtgtaaattgtgtaattatgcatatatatatttataccaccatggacttactttcacactgggaaatttgtggtgtttttccacagaggaagccttttaacagcagaaaattatccggtagcaaattgtcttagggaaattactacactgttgtaacaaaagggctggcaagtgactaaatgttcattaccttttggttagcgttgctatcactgtagctgtgctgccttaacattgagagttgagttgtggacttagtcattgagtgaatgttgaactttcttccttgaatcagcgttagagtcaaatgtgggtttaatgtgaatgctaaatgaatatgcaacatagtttcaaatggaacatagaaatttcacttttgaaaataataaacccacaacctaattgcatggttttgggctgaccgtcctgtctcattcatgattttactccctgcccagcttgcagatacatgcatttgaattttagtagtctgtcatatttaaaatcccacatatgtgagttaaatatgcaataaagaatacgccttgctgattagccacacccaggcaatttaatatccatggtcttctataatgtttataccacattgtaaatattcagagaacttgttttaaagtttatgctttctgattctgtgattttcaaaagaggaatttttttggaaattaaggactatcgtttgataattatatatgtaattaagatttagccaagcattaaattaatttttaaa

SEQ ID NO: 369416 - DNA, 3052 bp, Homo sapiens
agtattgagagcgcgtgggagcataggcgcatgcgcgctcgtggggtgcgcggtagcaacagaggactcgacccggctggagctccggagagcgcgcgtgcgccgtcacgagctcggcgctgccggggccgcggtgtggaagcgagtattcgaccgccgtgcgggccgcggggatgttccgaaaggcccggcgggtgaacgtgcgcaagcggaacgactccgaagaggaagagcgggaacgcgatgaggagcaggagccgccgccgttgttgccgccgccgggcacgggcgaagaggcgggccccggtggcggcgacagggcccctggcggggagtcgctgctgggcccggggccgtcgccgccttccgcgctgaccccgggcctcggggctgaggccgggggcggcttccccggcggcgcggagcccggcaacgggctgaagccgcgcaagaggcctcgcgagaacaaagaggtgccccgggccagcctgctcagcttccaggacgaggaggaagaaaatgaagaagttttcaaagtgaagaaatcaagttatagcaaaaagatagtaaaattgctcaagaaggaatataaagaagatcttgaaaaatcgaagattaagacagaactcaactcatcagctgaaagtgaacaacctttggacaaaacaggacatgttaaggatacaaatcaagaagatggagttatcatcagtgaacatggtgaagatgaaatggatatggaaagtgaaaaagaggaagaaaagccaaagactggtggagctttttcaaatgctttatcttcattgaatgttcttcgtccaggagaaattccagatgcagcttttatacatgctgcaaggaaaaagcgccaaatggcccgagaattgggagatttcactcctcatgataatgagcctggtaaaggccgccttgttagagaagatgagaatgatgccagtgatgatgaagatgacgatgagaaacgccggatagttttttctgtgaaagaaaagtcacaaagacaaaaaattgctgaggaaataggaattgaggggagtgatgatgatgctttagtaactggagaacaggatgaagagctcagccgatgggaacaggagcagataaggaaaggaattaatatccctcaggttcaagccagtcaacccgcagaagtgaatatgtactaccagaacacttaccagacaatgccttacggctcatcctatggcattccttatagttatacggcctatggatcatcagatgccaaatctcaaaaaacagataatacagtccctttcaaaactcccagtaatgagatgactcccgttactattgatttggtaaagaaacagcttaaagacaggttggactccatgaaagaattgcacaaaacaaatcgacagcagcatgagaaacatctgcaaagccgagtggactctaccagggctattgaaagattagaagggtcttctgggggtattggtgaacggtataaatttttgcaagaaatgcgagggtatgtccaagacttgcttgagtgtttcagtgaaaaggtgccactgattaatgaacttgaatcagcaatacatcagctgtacaaacagcgagcttcccgccttgtccaaagacgacaagatgatattaaagatgaatcttcggagttttcaagccattcaaacaaagctctgatggcaccaaatcttgactcctttggacgcgatcgggcactgtatcaagagcatgcaaaacgtcgcattgcagagcgggaggccaggaggactcgtcgtagacaagccagagaacaaaccggtaagatggcagatcaccttgaaggcctttccagtgatgatgaagaaacttctacagatattactaatttcaatctggaaaaagatcgaatttcaaaagaatccggcaaagtttttgaagatgtccttgaaagtttctattcaattgactgtattaaatcacagtttgaagcatggcgttcaaaatactacacatcctacaaagatgcttacattggcctttgtttgccaaaattattcaaccccctcatacgacttcagctcctcacttggactcctcttgaggcaaaatgtcgtgactttgagaatatgctgtggtttgaatctttgctgttttatggttgtgaagaacgagagcaagaaaaagatgatgtagatgttgccctactacctaccattgtggaaaaggtgattcttcctaaactaacagtgatagctgaaaatatgtgggaccctttttctacaacacagacttcaagaatggtgggaattacactaaaattaatcaatggatatccttcagtagtgaatgcagaaaataaaaatacacaggtatacctaaaggcacttttattgagaatgagaagaactttagatgatgatgtatttatgcccttatatcccaaaaatgtcttagaaaataaaaattctgggccttacttgttttttcaacgacagttttggtcttcagttaagctgttaggcaattttcttcagtggtatggcattttctcaaataaaactctgcaagagttatcaatagatggtttattaaatcgatatattctcatggcttttcagaattcagaatatggagatgacagcatcaaaaaagcccaaaatgtaatcaattgtttccccaaacaatggttcatgaatctgaaaggagaaaggactatttctcagttagaaaacttttgccgataccttgtacacttagcggatacaatttatagaaatagtatcgggtgttctgatgtggaaaaaagaaatgcaagggaaaacataaaacagatagtaaaactccttgcaagtgttcgagctttggatcatgctatgtctgttgcaagtgaccacaatgtgaaagaatttaagtctttgatcgaaggaaaatagatctatgagactgaaaaacctatttgcttgattaccattcccaatgtgtaaattttgtatatatgtaaagtttcttaaactgtaaaatagcaattcttgttttaatacaaaaaacattatattca

SEQ ID NO: 369417 - DNA, 3205 bp, Homo sapiens
agtattgagagcgcgtgggagcataggcgcatgcgcgctcgtggggtgcgcggtagcaacagaggactcgacccggctggagctccggagagcgcgcgtgcgccgtcacgagctcggcgctgccggggccgcggtgtggaagcgagtattcgaccgccgtgcgggccgcggggatgttccgaaaggcccggcgggtgaacgtgcgcaagcggaacgactccgaagaggaagagcgggaacgcgatgaggagcaggagccgccgccgttgttgccgccgccgggcacgggcgaagaggcgggccccggtggcggcgacagggcccctggcggggagtcgctgctgggcccggggccgtcgccgccttccgcgctgaccccgggcctcggggctgaggccgggggcggcttccccggcggcgcggagcccggcaacgggctgaagccgcgcaagaggcctcgcgagaacaaagaggtgccccgggccagcctgctcagcttccaggacgaggaggaagaaaatgaagaagttttcaaagtgaagaaatcaagttatagcaaaaagatagtaaaattgctcaagaaggaatataaagaagatcttgaaaaatcgaagattaagacagaactcaactcatcagctgaaagtgaacaacctttggacaaaacaggacatgttaaggatacaaatcaagaagatggagttatcatcagtgaacatggtgaagatgaaatggatatggaaagtgaaaaagaggaagaaaagccaaagactggtggagctttttcaaatgctttatcttcattgaatgttcttcgtccaggagaaattccagatgcagcttttatacatgctgcaaggaaaaagcgccaaatggcccgagaattgggagatttcactcctcatgataatgagcctggtaaaggccgccttgttagagaagatgagaatgatgccagtgatgatgaagatgacgatgagaaacgccggatagttttttctgtgaaagaaaagtcacaaagacaaaaaattgctgaggaaataggaattgaggggagtgatgatgatgctttagtaactggagaacaggatgaagagctcagccgatgggaacaggagcagataaggaaaggaattaatatccctcaggttcaagccagtcaacccgcagaagtgaatatgtactaccagaacacttaccagacaatgccttacggctcatcctatggcattccttatagttatacggcctatggatcatcagatgccaaatctcaaaaaacagataatacagtccctttcaaaactcccagtaatgagatgactcccgttactattgatttggtaaagaaacagcttaaagacaggttggactccatgaaagaattgcacaaaacaaatcgacagcagcatgagaaacatctgcaaagccgagtggactctaccagggctattgaaagattagaagggtcttctgggggtattggtgaacggtataaatttttgcaagaaatgcgagggtatgtccaagacttgcttgagtgtttcagtgaaaaggtgccactgattaatgaacttgaatcagcaatacatcagctgtacaaacagcgagcttcccgccttgtccaaagacgacaagatgatattaaagatgaatcttcggagttttcaagccattcaaacaaagctctgatggcaccaaatcttgactcctttggacgcgatcgggcactgtatcaagagcatgcaaaacgtcgcattgcagagcgggaggccaggaggactcgtcgtagacaagccagagaacaaaccggtaagatggcagatcaccttgaaggcctttccagtgatgatgaagaaacttctacagatattactaatttcaatctggaaaaagatcgaatttcaaaagaatccggcaaagtttttgaagatgtccttgaaagtttctattcaattgactgtattaaatcacagtttgaagcatggcgttcaaaatactacacatcctacaaagatgcttacattggcctttgtttgccaaaattattcaaccccctcatacgacttcagctcctcacttggactcctcttgaggcaaaatgtcgtgactttgagaatatgctgtggtttgaatctttgctgttttatggttgtgaagaacgagagcaagaaaaagatgatgtagatgttgccctactacctaccattgtggaaaaggtgattcttcctaaactaacagtgatagctgaaaatatgtgggaccctttttctacaacacagacttcaagaatggtgggaattacactaaaattaatcaatggatatccttcagtagtgaatgcagaaaataaaaatacacaggtatacctaaaggcacttttattgagaatgagaagaactttagatgatgatgtatttatgcccttatatcccaaaaatgtcttagaaaataaaaattctgggccttacttgttttttcaacgacagttttggtcttcagttaagctgttaggcaattttcttcagtggtatggcattttctcaaataaaactctgcaagagttatcaatagatggtttattaaatcgatatattctcatggcttttcagaattcagaatatggagatgacagcatcaaaaaagcccaaaatgtgagttaaatgcatagtacagtttttaaagcatataatttaaaatgaattaagtttttgtttgtttgaagagggatttgagaattttatgaaacccctttgattactggacttgcatgtaaggttgacagtttgcctacccaggtagttccaaccccctacagcattttttacataaaaatgcatactgttatatatatatatatccatctatatccatatttttatagatattagtgaaagttttgatatttttataggtataaataaaagttttgatttcagaataataaccttattatcttaacctcagtctgggccaactcgacttcccttagcagcatgcatggatgtctattcgtggaattattgcaggggatgggggtgctgtaatttcatttttataccactcatttttacatcaaaagctgctggaaaaggaaattcagtatatttaggccatcctagaagactggaaaatgaagcagttggttgtcagttttatgttactaatttactcaaatattggacagattatcttttgctttgag

SEQ ID NO: 369418 - DNA, 416 bp, Homo sapiens
aacagacatagccagagaataataggtatctacccattcccataacccagttaaatttcacttataacctttcagagttacatactgcttttttcccatttacagagaattcatcattctccttgctattttttccttcctaatagctaataacggatcatttcttcccttttgtttatgcccactcccttttgattggtcttcaaatacagagtaatgacctctgggtaaagatggggcttgaacactagggtatagtttcactctctcccaaaaaccacactgaaatgatggtagaggttttgttcatgacggtggtattttttgtttttaagcacaaacctaaaagaatgggaaaaaagaaaaagggaaccaccatggaatttttaaagtggcagcagatgaataaatactta

SEQ ID NO: 369419 - DNA, 198 bp, Homo sapiens
tctgtgtcatccctgatatcaatagagaaaaggaagtgtttggcactttgagagggaatttggtgttgtgtggaatatcagctctgttaatacctggcttggaccttgatcaaggcactaaaatctcctttggtcctagatcttatctataaatgtctaggtttcattatctatcagtaaagatatatgcatatccac

SEQ ID NO: 369420 - DNA, 370 bp, Homo sapiens
ttttctttgttatggaaaaacgcccatttgttacagaaacattagagtgtacaaatatgccaaaaaggaaagagaaaggaagagtggcccatgaccccaccactcagaaataacttatgatttttctctgtattacagatttgcatatatgtgcttttaaaataaaaatgaaataatactgtctatattgtcttgtgacctgcttttttcaatgtgctataccatgaatttttccatgtcaataaatttgcttctataaaataatacttagggcctgtatgctattcaattttatgaatatgttataacttttaaactgacttctttctgttaagtaatagtacaataaaggtttttatagtaaaatatt

SEQ ID NO: 369421 - DNA, 698 bp, Homo sapiens
gcggccgcgcgcgcggacatgggggagaagctggagctgagactgaagtcgcccgtgggggctgagcccgccgtctacccgtggccgctgccggtctacgataaacatcacgatgctgctcatgaaatcatcgagaccatccgatgggtctgtgaagaaatcccggatctcaagctcgctatggagaattacgttttaattgactatgacaccaaaagcttcgagagcatgcagaggctctgcgacaagtacaaccgtgccatcgacagcatccaccagctgtggaagggcaccacgcagcccatgaagctgaacacgcggccgtccactggactcctgcgccatatcctgcagcaggtctacaaccactcggtgaccgaccccgagaagctcaacaactacgagcccttctcccccgaggtgtacggggagacctccttcgacctggtggcccagatgattgatgagatcaagatgaccgacgacgacctgtttgtggacttggggagcggtgtgggccaggtcgtgctccaggttgctgctgccaccaactgcaaacatcactatggcgtcgagaaagcagacatcccggccaagtatgcggagaccatggaccgcgagttcaggaagtggatgaaatggtatggaaaaaagcatgcagaatacacagtgagtgccatcgctccgccccggctccc

SEQ ID NO: 369422 - DNA, 6802 bp, Homo sapiens
gcggccgcgcgcgcggacatgggggagaagctggagctgagactgaagtcgcccgtgggggctgagcccgccgtctacccgtggccgctgccggtctacgataaacatcacgatgctgctcatgaaatcatcgagaccatccgatgggtctgtgaagaaatcccggatctcaagctcgctatggagaattacgttttaattgactatgacaccaaaagcttcgagagcatgcagaggctctgcgacaagtacaaccgtgccatcgacagcatccaccagctgtggaagggcaccacgcagcccatgaagctgaacacgcggccgtccactggactcctgcgccatatcctgcagcaggtctacaaccactcggtgaccgaccccgagaagctcaacaactacgagcccttctcccccgaggtgtacggggagacctccttcgacctggtggcccagatgattgatgagatcaagatgaccgacgacgacctgtttgtggacttggggagcggtgtgggccaggtcgtgctccaggttgctgctgccaccaactgcaaacatcactatggcgtcgagaaagcagacatcccggccaagtatgcggagaccatggaccgcgagttcaggaagtggatgaaatggtatggaaaaaagcatgcagaatacacattggagagaggcgatttcctctcagaagagtggagggagcgaatcgccaacacgagtgttatatttgtgaataattttgcctttggtcctgaggtggatcaccagctgaaggagcggtttgcaaacatgaaggaaggtggcagaatcgtgtcctcgaaaccctttgcacctctgaacttcagaataaacagtagaaacttgagtgacatcggcaccatcatgcgcgtggtggagctctcgcccctgaagggctcggtgtcgtggacggggaagccagtctcctactacctgcacactatcgaccgcaccatacttgaaaactatttttctagtctgaaaaacccaaaactcagggaggaacaggaggcagcccggcgccgccagcagcgcgagagcaagagcaacgcggcacgcccactaagggcccagagggcaaggtggccggccccgccgacgcccccatggactctggtgctgaggaagagaaggcgggagcagccaccgtgaagaagccgtctccctccaaagcccgcaagaagaagctaaacaagaaggggaggaagatggctggccgcaagcgcgggcgccccaagaagatgaacactgcgaaccccgagcggaagcccaagaagaaccaaagtgcagcggcactcccccaacccgctgctggtggcgcccaccccgcccgcgctgcagaagcttctagagtccttcaagatccagtacctgcagttcctggcatacacaaagaccccccagtacaaggccagcctgcaggagctgctgggccaggagaaggagaagaacgcccagctcctgggtgcggctcagcagctcctcagccactgccaggcccagaaggaggagatcaggaggctgtttcagcaaaaattggatgagctgggtgtgaaggcgctgacctacaacgacctgattcaagcgcagaaggagatctccgcccataaccagcagctgcgggagcagtcggagcagctggagcaggacaaccgcgcgctccgcggccagagcttgcagctgctcaaggctcgctgcgaggagctgcagctggactgggccacgctgtcgctggagaagctgttgaaggagaagcaggccctgaagagccagatctcggagaagcagaggcactgcctggagctgcagatcagcattgtggagctagagaagagccagcggcagcaggagctcctgcagctcaagtcctgtgtgccgcctgacgacgccctgtccctgcacctgcgtgggaagggcgccctgggccgcgagctggagcctgacgccagccggctgcacctggagctggactgcaccaagttctcgctgcctcacttgagcagcatgagcccggagctctccatgaacggccaggctgctggctatgagctctgcggtgtgctgagccggccttcgtcgaagcagaacacgccccagtacctggcctcacccctggaccaggaggtggtgccctgtacccctagccacgtcggccggccgcgcctggagaagctgtctggcctagccgcacccgactacactaggctgtccccggccaagattgtgctgaggcggcacctgagccaggaccacacggtgcccggcaggccggctgccagtgagctgcattcgagagctgagcacaccaaggagaacggccttccctaccagagccccagcgtgcctggcagcatgaagctgagccctcaggacccgcggcccctgtcccctggggccttgcagcttgctggagagaagagcagtgagaagggcctgagagagcgcgcctacggcagcagcggggagctcatcaccagcctgcccatcagcatcccgctcagcaccgtgcagcccaacaagctcccggtcagcattcccctggccagcgtggtgctgcccagccgcgccgagagggcgaggagcacccccagtcccgtgctgcagccccgtgacccctcgtccacacttgaaaagcagattggtgctaatgcccacggtgctgggagcagaagccttgccctggcccccgcaggcttctcctacgctggctcggtggccatcagcggggccttggcgggcagcccggcctctctcacacctggagccgagccggccaccttggatgagtcctccagctctgggagcctttttgccaccgtggggtcccgcagctccacgccacagcaccccctgctgctggcacagccccggaactcgcttcctgcctctcccgcccaccagctctcctccagtccccggcttggtggggccgcccagggcccgttgcccgaggccagcaagggagacctgccctccgattccggcttctcagatcctgagagtgaagccaagaggaggattgtgttcaccatcaccactggtgcgggcagtgccaagcagtcgccctccagcaagcacagccccctgaccgccagcgcccgtggggactgtgtgccgagccacgggcaggacagtcgcaggcgcggccggcggaagcgagcatctgcggggacgcccagcttgagcgcaggcgtgtcccccaagcgccgagccctgccgtccgtcgctggccttttcacacagccttcggggtctcccctcaacctcaactccatggtcagtaacatcaaccagcccctggagattacagccatctcgtccccggagacctccctgaagagctcccctgtgccctaccaggaccacgaccagccccccgtgctcaagaaggagcggcctctgagccagaccaatggggcacactactccccactcacctcagacgaggagccaggctctgaggacgagcccagcagtgctcgaattgagagaaaaattgcaacaatctccttagaaagcaaatctcccccgaaaaccttggaaaatggtggtggcttggcgggaaggaagcccgcgcccgccggcgagccagtcaatagcagcaagtggaagtccaccttctcgcccatctccgacatcggcctggccaagtcggcggacagcccgctgcaggccagctccgccctcagccagaactccctgttcacgttccggcccgccctggaggagccctctgccgatgccaagctggccgctcaccccaggaaaggctttcccggctccctgtcgggggctgacggactcagcccgggcaccaaccctgccaacggctgcaccttcggcgggggcctggccgcggacctgagtttacacagcttcagtgatggtgcttctcttccccacaagggccccgaggcggccggcctgagctccccgctgagcttcccctcgcagcgcggcaaggagggctcggacgccaaccctttcctgagcaagaggcagctggacggcctggctgggctgaagggcgagggcagccgcggcaaggaggcaggggagggcggcctaccgctgtgcgggcccacggacaagaccccactgctgagcggcaaggccgccaaggcccgggaccgcgaggtcgacctcaagaatggccacaacctcttcatctctgcggcggccgtgcctcccggaagcctcctcagcggccccggcctggccccggcggcgtcctccgcaggcggcgcggcgtcctccgcccagacgcaccggtccttcctgggccccttcccgccgggaccgcagttcgcgctcggccccatgtccctgcaggccaacctcggctccgtggccggctcctccgtgctgcagtcgctgttcagctctgtgccggccgccgcaggcctggtgcacgtgtcgtccgctgccaccagactgaccaactcgcacgccatgggcagcttttccggggtggcaggcggcacagttggaggtgtctttaaccacgcggtgccctccgcctctgctcatccgtttggagcccgtgtcggccgcggggctgcatgtggcagcgccacactgggcccgagcccgctgcaggcggcggccagcgcctcggcctcttcctttcaggccccggcctcggttgagacccggccgccccctccgcctccgcctccgcctcccccgctgcccccgcctgcgcacctgggccggtcccccgcggggccgcccgtcctccacgccccccctccacctaacgccgccttgcctcctcccccaacgctgctggcctctaaccctgagcccgcgcttctgcagagcctcgcgtccctcccgcctaaccaagctttcttgccccccacctctgctgcctctctgccgcctgctaacgcctctttgtctatcaagctcacctccctcccgcacaagggcgcccgcccctccttcacggtgcaccaccagcccctgccccggctggccctggcccaggccgcgcccgggatcccacaggccagcgccacggggccgtccgcggtgtgggtgtccctcggcatgccgcctccctatgccgcgcacctttcgggggttaagccgcgataaagaccttgcttagctagcagtgcgtattgtgtaaggtaaggccagagccctgcgcggtggctcactccagacactgaactgtccttcctttggcagagaagacggccacagggctcggcagaagttccgggggtcctgaggagggaagagggagagagccagggagaccagggagatggtcgcgagaggagggactacaggacgggcaccagccatggagtggcctgagtgtgttgggttccagctgcccgcagctgggttcctgcggtgacgccgcaggactgaggccagccctgggggcagctgtgccagcccctgtgggcgaggctcacggggtgccaggccagggggctgggagctctagctcctagagcagtctccagggctccatccgcaccaggcccaggtcactcatgacgggtggcgtggcttggtgctgttccccaggcgcccagcatgtagcaggcacggtgccggctgcagaggtcctggagagccagggtggctggctggatgcctctggtcggggctgtctggccagtagcctcggatgccctcatagggagccagtgaagccccaagtgccctgcctgcctgggggctgatgggttcccggcggggtcgagaggcaagctctgtgccctgcgtgttgaggcccccttgctggacacggctgatggccacactgccctgtggtcatggcccacagccgaggggctttcagctgctcagatgtcagcaccaagctgggcaggttagtgtagacggtgcccacctttgagaccagaaggaagttggaagcaggagtgattttgatgatgtgaggccttcagggaatgtcctgttcactcctcccccaagaggctgtggagactgtggccgctgacccctgagggcagttggccacccgtgccctccagggacatggcgtgcctggcggcgtagtgcaaaggtgccctctgcttgcccctggccttctgcctcaggggcccctgggacacaggccttcctgggcgagtccaaagcccaccgggcaaggagaggaggactgggagccaggagccaaggcggaggctgtggccagggctggtcagcctggcgggtcaatgcgggcacctgcgggctggacaagctatgctgggtctcttaggagatgagctgcaggtagggtggctttagctggactcggctgtgtgtctcctttggaggaaggctggagcttggccggcgtgtccaggtgtcaggctccctggtctgtcacggggcacgcccgtcgtctgttgtggttagaggagctggcactatgcctgtcatggtgctggccccaggtggcgtgtgtgctcgtgggaggcctcggtccccagcctgggtgagtgttgggctcccccaggcgcgatggtaacctcaggccgctcttcccgctgtgcccttctgcaggtaactaggatttctacctcaaccgcgagacctatgcaaggacggtgtggaccaactcgcgcccgcggcatggtgcccgccggcctgccgggctcccacccctggacggcagaggcaaggacggacgggagctccactgtgaatcggcggcacgcgccgcaggaggctgggactggtccagtttgtactgtcgatagttttagataaagtatttatcattttttaaaaagtataaaca

SEQ ID NO: 369423 - DNA, 7425 bp, Homo sapiens
gcggccgcgcgcgcggacatgggggagaagctggagctgagactgaagtcgcccgtgggggctgagcccgccgtctacccgtggccgctgccggtctacgataaacatcacgatgctgctcatgaaatcatcgagaccatccgatgggtctgtgaagaaatcccggatctcaagctcgctatggagaattacgttttaattgactatgacaccaaaagcttcgagagcatgcagaggctctgcgacaagtacaaccgtgccatcgacagcatccaccagctgtggaagggcaccacgcagcccatgaagctgaacacgcggccgtccactggactcctgcgccatatcctgcagcaggtctacaaccactcggtgaccgaccccgagaagctcaacaactacgagcccttctcccccgaggtgtacggggagacctccttcgacctggtggcccagatgattgatgagatcaagatgaccgacgacgacctgtttgtggacttggggagcggtgtgggccaggtcgtgctccaggttgctgctgccaccaactgcaaacatcactatggcgtcgagaaagcagacatcccggccaagtatgcggagaccatggaccgcgagttcaggaagtggatgaaatggtatggaaaaaagcatgcagaatacacattggagagaggcgatttcctctcagaagagtggagggagcgaatcgccaacacgagtgttatatttgtgaataattttgcctttggtcctgaggtggatcaccagctgaaggagcggtttgcaaacatgaaggaaggtggcagaatcgtgtcctcgaaaccctttgcacctctgaacttcagaataaacagtagaaacttgagtgacatcggcaccatcatgcgcgtggtggagctctcgcccctgaagggctcggtgtcgtggacggggaagccagtctcctactacctgcacactatcgaccgcaccatacttgaaaactatttttctagtctgaaaaacccaaaactcagggaggaacaggaggcagcccggcgccgccagcagcgcgagagcaagagcaacgcggcacgcccactaagggcccagagggcaaggtggccggccccgccgacgcccccatggactctggtgctgaggaagagaaggcgggagcagccaccgtgaagaagccgtctccctccaaagcccgcaagaagaagctaaacaagaaggggaggaagatggctggccgcaagcgcgggcgccccaagaagatgaacactgcgaaccccgagcggaagcccaagaagaaccaaactgcactggatgccctgcacgctcagaccgtgtctcagacggcggcctcctcaccccaggatgcctacagatcccctcacagcccgttctaccagctacctccgagcgtgcagcggcactcccccaacccgctgctggtggcgcccaccccgcccgcgctgcagaagcttctagagtccttcaagatccagtacctgcagttcctggcatacacaaagaccccccagtacaaggccagcctgcaggagctgctgggccaggagaaggagaagaacgcccagctcctgggtgcggctcagcagctcctcagccactgccaggcccagaaggaggagatcaggaggctgtttcagcaaaaattggatgagctgggtgtgaaggcgctgacctacaacgacctgattcaagcgcagaaggagatctccgcccataaccagcagctgcgggagcagtcggagcagctggagcaggacaaccgcgcgctccgcggccagagcttgcagctgctcaaggctcgctgcgaggagctgcagctggactgggccacgctgtcgctggagaagctgttgaaggagaagcaggccctgaagagccagatctcggagaagcagaggcactgcctggagctgcagatcagcattgtggagctagagaagagccagcggcagcaggagctcctgcagctcaagtcctgtgtgccgcctgacgacgccctgtccctgcacctgcgtgggaagggcgccctgggccgcgagctggagcctgacgccagccggctgcacctggagctggactgcaccaagttctcgctgcctcacttgagcagcatgagcccggagctctccatgaacggccaggctgctggctatgagctctgcggtgtgctgagccggccttcgtcgaagcagaacacgccccagtacctggcctcacccctggaccaggaggtggtgccctgtacccctagccacgtcggccggccgcgcctggagaagctgtctggcctagccgcacccgactacactaggctgtccccggccaagattgtgctgaggcggcacctgagccaggaccacacggtgcccggcaggccggctgccagtgagctgcattcgagagctgagcacaccaaggagaacggccttccctaccagagccccagcgtgcctggcagcatgaagctgagccctcaggacccgcggcccctgtcccctggggccttgcagcttgctggagagaagagcagtgagaagggcctgagagagcgcgcctacggcagcagcggggagctcatcaccagcctgcccatcagcatcccgctcagcaccgtgcagcccaacaagctcccggtcagcattcccctggccagcgtggtgctgcccagccgcgccgagagggcgaggagcacccccagtcccgtgctgcagccccgtgacccctcgtccacacttgaaaagcagattggtgctaatgcccacggtgctgggagcagaagccttgccctggcccccgcaggcttctcctacgctggctcggtggccatcagcggggccttggcgggcagcccggcctctctcacacctggagccgagccggccaccttggatgagtcctccagctctgggagcctttttgccaccgtggggtcccgcagctccacgccacagcaccccctgctgctggcacagccccggaactcgcttcctgcctctcccgcccaccagctctcctccagtccccggcttggtggggccgcccagggcccgttgcccgaggccagcaagggagacctgccctccgattccggcttctcagatcctgagagtgaagccaagaggaggattgtgttcaccatcaccactggtgcgggcagtgccaagcagtcgccctccagcaagcacagccccctgaccgccagcgcccgtggggactgtgtgccgagccacgggcaggacagtcgcaggcgcggccggcggaagcgagcatctgcggggacgcccagcttgagcgcaggcgtgtcccccaagcgccgagccctgccgtccgtcgctggccttttcacacagccttcggggtctcccctcaacctcaactccatggtcagtaacatcaaccagcccctggagattacagccatctcgtccccggagacctccctgaagagctcccctgtgccctaccaggaccacgaccagccccccgtgctcaagaaggagcggcctctgagccagaccaatggggcacactactccccactcacctcagacgaggagccaggctctgaggacgagcccagcagtgctcgaattgagagaaaaattgcaacaatctccttagaaagcaaatctcccccgaaaaccttggaaaatggtggtggcttggcgggaaggaagcccgcgcccgccggcgagccagtcaatagcagcaagtggaagtccaccttctcgcccatctccgacatcggcctggccaagtcggcggacagcccgctgcaggccagctccgccctcagccagaactccctgttcacgttccggcccgccctggaggagccctctgccgatgccaagctggccgctcaccccaggaaaggctttcccggctccctgtcgggggctgacggactcagcccgggcaccaaccctgccaacggctgcaccttcggcgggggcctggccgcggacctgagtttacacagcttcagtgatggtgcttctcttccccacaagggccccgaggcggccggcctgagctccccgctgagcttcccctcgcagcgcggcaaggagggctcggacgccaaccctttcctgagcaagaggcagctggacggcctggctgggctgaagggcgagggcagccgcggcaaggaggcaggggagggcggcctaccgctgtgcgggcccacggacaagaccccactgctgagcggcaaggccgccaaggcccgggaccgcgaggtcgacctcaagaatggccacaacctcttcatctctgcggcggccgtgcctcccggaagcctcctcagcggccccggcctggccccggcggcgtcctccgcaggcggcgcggcgtcctccgcccagacgcaccggtccttcctgggccccttcccgccgggaccgcagttcgcgctcggccccatgtccctgcaggccaacctcggctccgtggccggctcctccgtgctgcagtcgctgttcagctctgtgccggccgccgcaggcctggtgcacgtgtcgtccgctgccaccagactgaccaactcgcacgccatgggcagcttttccggggtggcaggcggcacagttggaggtaactaggatttctacctcaaccgcgagacctatgcaaggacggtgtggaccaactcgcgcccgcggcatggtgcccgccggcctgccgggctcccacccctggacggcagaggcaaggacggacgggagctccactgtgaatcggcggcacgcgccgcaggaggctgggactggtccagtttgtactgtcgatagttttagataaagtatttatcattttttaaaaagtataaacaattctgacttattttattccatctaagtggtaaaaggcaacttattgagaaatataaatatctatatatgagagctctatataaagacacgtgtctgcagggcgggcccgccagcggattcgccacagcctgccccggtgctatctcgtccccaggcccgcgcctgcctccacccgcttggtgctgactagacgctgacaacgccgaaccccgttctcggaaacgccgcccggccggctcccccgacgcgctgctcccgtaccaaaggcaggcccgtcgccaccacattcctcggaggcctccccgcggcctgagccccttcctgagcgccctggcgcctgccctgagctcttcacctttaccccggcactgtgaacccccagactgttcaccctccggggcgtgggttgcgcccttgcatgtgaaggggcctgcgcggtgacgcagctggccatgtgctgcgcgatggtgctgtgaggacggcgcgggcacgttgaacaagtgcatttacttttgtatttctcggctgtccatggctcgcagcatgccctgcgatgcggggcaggcctgtcgtgggtcccttggtgtttctgtacaggagagagtcacactaatgagtggcagtattttatagagatgtgatgagaatttataaatttcatagatttgacagcttttatttttagatggtataatgcacagtgaagaggaaagaaaagcgaggggaaaaaaccttatttattcaaacagtgcacaaaatggccccagcgtcagccccgaccctagacccctcagttgcagctcccagcagcccagacagagctgccggcgcccctgcctgccccacatcccttcctgtcagggccacgcctggcacccatcccttggagcctgtgctggttctcccagctgctgtgggtgtgctggggccagggtgcactgctgaaacctggcctctctggccctaggccccagggtgacgtcggccccccactctgcagccttggcgggtgcctgggactgggtgtggaaggagaggagctgaggccggggtgtagcaggcaggcagggccactccagtgcttctggagccctgagcagtcagggcctgggttgtctgagcagtggtggctctgtgccctccctggaggatgggatctgggagtctgagctccccgcatctggccctgggctgtgtggcacttgctgagcccaccttctcaagtgcttgctcctgtgagatggcatcggggagccccttccccaaggtgccacagatccaccctccagggagctgccagccctgtgttctggttcccaagggcaggatggacacacgtcacatccctaccacgtggcctccaaagggagccacggaggaaaggcttctgtggttgctaggtgggggagtcctgtgtgggagggcctgaagacccctgcttgtgcctggtgaggggggtgctgcctcccccagcccccaacaacctctcagacccccaccctccaacatagctgagttctgaagatggtgctccggacctgtcctcttaagtggtgcccagtgccctccccaccccacgttggtgctctcagctagaaggtgctgtgcctctgcctgagccccaagccccgagcctggccttcaggacaggcagcctgctctgtgtcgccacgggccggatacgccacagggttgatggcagagacggccgagtccctggtctagaacaagacacattctttaaacactgtattacttctgcctccctctaggtgacagtggcagtccgggtgccatcacgggtcctgcagatggccatgcagggctcctgcccacgcaggccaccgtatgttcaggacacgcactgggtctcagagccactggcccaggcagaagtctccttgagcccactgggtcatatgcgtgtcaccacacgtgaactagtgtggtggctgcctgcggacaccctcctgttctgagccctgggcctgtgttcttctcagacactcccagactgaggggtggtgtgtggcgggtggcagggtggctgtggagactggggatctggagcctggtgctggcacctggcctgagtttccgtgggcagctggcggggacctgtgctgctgctgctgactgtgggtgggcgggcggcgcctgggagtggctcttgctcaggaattgataggaaccctaaaaactaggataccccctcctcggcccatgaggcacgcacagtgacttatttaagacttcccccttaatttatctgcccccaggatgcgtcagtctgttcagtggtcagcaggccccccaccccccgccgactgccctcgccatcgtggtcagacccccctcccaacacaacacgctgctggtctgtgtcagcctttgtaacgtgggaggctctgccgtgtcttccgggtgaactgtatttggattgcgcgcattgtcacggtccgcccctgggctgcaggcgccccttcctctgggcacccctgcattctgcatccccacctctagacgctgtaataaacagactgttttcactcggaaaaaaaat

SEQ ID NO: 369424 - DNA, 7964 bp, Homo sapiens
gcggccgcgcgcgcggacatgggggagaagctggagctgagactgaagtcgcccgtgggggctgagcccgccgtctacccgtggccgctgccggtctacgataaacatcacgatgctgctcatgaaatcatcgagaccatccgatgggtctgtgaagaaatcccggatctcaagctcgctatggagaattacgttttaattgactatgacaccaaaagcttcgagagcatgcagaggctctgcgacaagtacaaccgtgccatcgacagcatccaccagctgtggaagggcaccacgcagcccatgaagctgaacacgcggccgtccactggactcctgcgccatatcctgcagcaggtctacaaccactcggtgaccgaccccgagaagctcaacaactacgagcccttctcccccgaggtgtacggggagacctccttcgacctggtggcccagatgattgatgagatcaagatgaccgacgacgacctgtttgtggacttggggagcggtgtgggccaggtcgtgctccaggttgctgctgccaccaactgcaaacatcactatggcgtcgagaaagcagacatcccggccaagtatgcggagaccatggaccgcgagttcaggaagtggatgaaatggtatggaaaaaagcatgcagaatacacattggagagaggcgatttcctctcagaagagtggagggagcgaatcgccaacacgagtgttatatttgtgaataattttgcctttggtcctgaggtggatcaccagctgaaggagcggtttgcaaacatgaaggaaggtggcagaatcgtgtcctcgaaaccctttgcacctctgaacttcagaataaacagtagaaacttgagtgacatcggcaccatcatgcgcgtggtggagctctcgcccctgaagggctcggtgtcgtggacggggaagccagtctcctactacctgcacactatcgaccgcaccatacttgaaaactatttttctagtctgaaaaacccaaaactcagggaggaacaggaggcagcccggcgccgccagcagcgcgagagcaagagcaacgcggcacgcccactaagggcccagagggcaaggtggccggccccgccgacgcccccatggactctggtgctgaggaagagaaggcgggagcagccaccgtgaagaagccgtctccctccaaagcccgcaagaagaagctaaacaagaaggggaggaagatggctggccgcaagcgcgggcgccccaagaagatgaacactgcgaaccccgagcggaagcccaagaagaaccaaagtgcagcggcactcccccaacccgctgctggtggcgcccaccccgcccgcgctgcagaagcttctagagtccttcaagatccagtacctgcagttcctggcatacacaaagaccccccagtacaaggccagcctgcaggagctgctgggccaggagaaggagaagaacgcccagctcctgggtgcggctcagcagctcctcagccactgccaggcccagaaggaggagatcaggaggctgtttcagcaaaaattggatgagctgggtgtgaaggcgctgacctacaacgacctgattcaagcgcagaaggagatctccgcccataaccagcagctgcgggagcagtcggagcagctggagcaggacaaccgcgcgctccgcggccagagcttgcagctgctcaaggctcgctgcgaggagctgcagctggactgggccacgctgtcgctggagaagctgttgaaggagaagcaggccctgaagagccagatctcggagaagcagaggcactgcctggagctgcagatcagcattgtggagctagagaagagccagcggcagcaggagctcctgcagctcaagtcctgtgtgccgcctgacgacgccctgtccctgcacctgcgtgggaagggcgccctgggccgcgagctggagcctgacgccagccggctgcacctggagctggactgcaccaagttctcgctgcctcacttgagcagcatgagcccggagctctccatgaacggccaggctgctggctatgagctctgcggtgtgctgagccggccttcgtcgaagcagaacacgccccagtacctggcctcacccctggaccaggaggtggtgccctgtacccctagccacgtcggccggccgcgcctggagaagctgtctggcctagccgcacccgactacactaggctgtccccggccaagattgtgctgaggcggcacctgagccaggaccacacggtgcccggcaggccggctgccagtgagctgcattcgagagctgagcacaccaaggagaacggccttccctaccagagccccagcgtgcctggcagcatgaagctgagccctcaggacccgcggcccctgtcccctggggccttgcagcttgctggagagaagagcagtgagaagggcctgagagagcgcgcctacggcagcagcggggagctcatcaccagcctgcccatcagcatcccgctcagcaccgtgcagcccaacaagctcccggtcagcattcccctggccagcgtggtgctgcccagccgcgccgagagggcgaggagcacccccagtcccgtgctgcagccccgtgacccctcgtccacacttgaaaagcagattggtgctaatgcccacggtgctgggagcagaagccttgccctggcccccgcaggcttctcctacgctggctcggtggccatcagcggggccttggcgggcagcccggcctctctcacacctggagccgagccggccaccttggatgagtcctccagctctgggagcctttttgccaccgtggggtcccgcagctccacgccacagcaccccctgctgctggcacagccccggaactcgcttcctgcctctcccgcccaccagctctcctccagtccccggcttggtggggccgcccagggcccgttgcccgaggccagcaagggagacctgccctccgattccggcttctcagatcctgagagtgaagccaagaggaggattgtgttcaccatcaccactggtgcgggcagtgccaagcagtcgccctccagcaagcacagccccctgaccgccagcgcccgtggggactgtgtgccgagccacgggcaggacagtcgcaggcgcggccggcggaagcgagcatctgcggggacgcccagcttgagcgcaggcgtgtcccccaagcgccgagccctgccgtccgtcgctggccttttcacacagccttcggggtctcccctcaacctcaactccatggtcagtaacatcaaccagcccctggagattacagccatctcgtccccggagacctccctgaagagctcccctgtgccctaccaggaccacgaccagccccccgtgctcaagaaggagcggcctctgagccagaccaatggggcacactactccccactcacctcagacgaggagccaggctctgaggacgagcccagcagtgctcgaattgagagaaaaattgcaacaatctccttagaaagcaaatctcccccgaaaaccttggaaaatggtggtggcttggcgggaaggaagcccgcgcccgccggcgagccagtcaatagcagcaagtggaagtccaccttctcgcccatctccgacatcggcctggccaagtcggcggacagcccgctgcaggccagctccgccctcagccagaactccctgttcacgttccggcccgccctggaggagccctctgccgatgccaagctggccgctcaccccaggaaaggctttcccggctccctgtcgggggctgacggactcagcccgggcaccaaccctgccaacggctgcaccttcggcgggggcctggccgcggacctgagtttacacagcttcagtgatggtgcttctcttccccacaagggccccgaggcggccggcctgagctccccgctgagcttcccctcgcagcgcggcaaggagggctcggacgccaaccctttcctgagcaagaggcagctggacggcctggctgggctgaagggcgagggcagccgcggcaaggaggcaggggagggcggcctaccgctgtgcgggcccacggacaagaccccactgctgagcggcaaggccgccaaggcccgggaccgcgaggtcgacctcaagaatggccacaacctcttcatctctgcggcggccgtgcctcccggaagcctcctcagcggccccggcctggccccggcggcgtcctccgcaggcggcgcggcgtcctccgcccagacgcaccggtccttcctgggccccttcccgccgggaccgcagttcgcgctcggccccatgtccctgcaggccaacctcggctccgtggccggctcctccgtgctgcagtcgctgttcagctctgtgccggccgccgcaggcctggtgcacgtgtcgtccgctgccaccagactgaccaactcgcacgccatgggcagcttttccggggtggcaggcggcacagttggaggtgtctttaaccacgcggtgccctccgcctctgctcatccgtttggagcccgtgtcggccgcggggctgcatgtggcagcgccacactgggcccgagcccgctgcaggcggcggccagcgcctcggcctcttcctttcaggccccggcctcggttgagacccggccgccccctccgcctccgcctccgcctcccccgctgcccccgcctgcgcacctgggccggtcccccgcggggccgcccgtcctccacgccccccctccacctaacgccgccttgcctcctcccccaacgctgctggcctctaaccctgagcccgcgcttctgcagagcctcgcgtccctcccgcctaaccaagctttcttgccccccacctctgctgcctctctgccgcctgctaacgcctctttgtctatcaagctcacctccctcccgcacaagggcgcccgcccctccttcacggtgcaccaccagcccctgccccggctggccctggcccaggccgcgcccgggatcccacaggccagcgccacggggccgtccgcggtgtgggtgtccctcggcatgccgcctccctatgccgcgcacctttcgggggttaagccgcgataaagaccttgcttagctagcagtgcgtattgtgtaaggtaactaggatttctacctcaaccgcgagacctatgcaaggacggtgtggaccaactcgcgcccgcggcatggtgcccgccggcctgccgggctcccacccctggacggcagaggcaaggacggacgggagctccactgtgaatcggcggcacgcgccgcaggaggctgggactggtccagtttgtactgtcgatagttttagataaagtatttatcattttttaaaaagtataaacaattctgacttattttattccatctaagtggtaaaaggcaacttattgagaaatataaatatctatatatgagagctctatataaagacacgtgtctgcagggcgggcccgccagcggattcgccacagcctgccccggtgctatctcgtccccaggcccgcgcctgcctccacccgcttggtgctgactagacgctgacaacgccgaaccccgttctcggaaacgccgcccggccggctcccccgacgcgctgctcccgtaccaaaggcaggcccgtcgccaccacattcctcggaggcctccccgcggcctgagccccttcctgagcgccctggcgcctgccctgagctcttcacctttaccccggcactgtgaacccccagactgttcaccctccggggcgtgggttgcgcccttgcatgtgaaggggcctgcgcggtgacgcagctggccatgtgctgcgcgatggtgctgtgaggacggcgcgggcacgttgaacaagtgcatttacttttgtatttctcggctgtccatggctcgcagcatgccctgcgatgcggggcaggcctgtcgtgggtcccttggtgtttctgtacaggagagagtcacactaatgagtggcagtattttatagagatgtgatgagaatttataaatttcatagatttgacagcttttatttttagatggtataatgcacagtgaagaggaaagaaaagcgaggggaaaaaaccttatttattcaaacagtgcacaaaatggccccagcgtcagccccgaccctagacccctcagttgcagctcccagcagcccagacagagctgccggcgcccctgcctgccccacatcccttcctgtcagggccacgcctggcacccatcccttggagcctgtgctggttctcccagctgctgtgggtgtgctggggccagggtgcactgctgaaacctggcctctctggccctaggccccagggtgacgtcggccccccactctgcagccttggcgggtgcctgggactgggtgtggaaggagaggagctgaggccggggtgtagcaggcaggcagggccactccagtgcttctggagccctgagcagtcagggcctgggttgtctgagcagtggtggctctgtgccctccctggaggatgggatctgggagtctgagctccccgcatctggccctgggctgtgtggcacttgctgagcccaccttctcaagtgcttgctcctgtgagatggcatcggggagccccttccccaaggtgccacagatccaccctccagggagctgccagccctgtgttctggttcccaagggcaggatggacacacgtcacatccctaccacgtggcctccaaagggagccacggaggaaaggcttctgtggttgctaggtgggggagtcctgtgtgggagggcctgaagacccctgcttgtgcctggtgaggggggtgctgcctcccccagcccccaacaacctctcagacccccaccctccaacatagctgagttctgaagatggtgctccggacctgtcctcttaagtggtgcccagtgccctccccaccccacgttggtgctctcagctagaaggtgctgtgcctctgcctgagccccaagccccgagcctggccttcaggacaggcagcctgctctgtgtcgccacgggccggatacgccacagggttgatggcagagacggccgagtccctggtctagaacaagacacattctttaaacactgtattacttctgcctccctctaggtgacagtggcagtccgggtgccatcacgggtcctgcagatggccatgcagggctcctgcccacgcaggccaccgtatgttcaggacacgcactgggtctcagagccactggcccaggcagaagtctccttgagcccactgggtcatatgcgtgtcaccacacgtgaactagtgtggtggctgcctgcggacaccctcctgttctgagccctgggcctgtgttcttctcagacactcccagactgaggggtggtgtgtggcgggtggcagggtggctgtggagactggggatctggagcctggtgctggcacctggcctgagtttccgtgggcagctggcggggacctgtgctgctgctgctgactgtgggtgggcgggcggcgcctgggagtggctcttgctcaggaattgataggaaccctaaaaactaggataccccctcctcggcccatgaggcacgcacagtgacttatttaagacttcccccttaatttatctgcccccaggatgcgtcagtctgttcagtggtcagcaggccccccaccccccgccgactgccctcgccatcgtggtcagacccccctcccaacacaacacgctgctggtctgtgtcagcctttgtaacgtgggaggctctgccgtgtcttccgggtgaactgtatttggattgcgcgcattgtcacggtccgcccctgggctgcaggcgccccttcctctgggcacccctgcattctgcatccccacctctagacgctgtaataaacagactgttttcactcggaaaaaaaat

SEQ ID NO: 369425 - DNA, 6730 bp, Homo sapiens
gcggccgcgcgcgcggacatgggggagaagctggagctgagactgaagtcgcccgtgggggctgagcccgccgtctacccgtggccgctgccggtctacgataaacatcacgatgctgctcatgaaatcatcgagaccatccgatgggtctgtgaagaaatcccggatctcaagctcgctatggagaattacgttttaattgactatgacaccaaaagcttcgagagcatgcagaggctctgcgacaagtacaaccgtgccatcgacagcatccaccagctgcaggtctacaaccactcggtgaccgaccccgagaagctcaacaactacgagcccttctcccccgaggtgtacggggagacctccttcgacctggtggcccagatgattgatgagatcaagatgaccgacgacgacctgtttgtggacttggggagcggtgtgggccaggtcgtgctccaggttgctgctgccaccaactgcaaacatcactatggcgtcgagaaagcagacatcccggccaagtatgcggagaccatggaccgcgagttcaggaagtggatgaaatggtatggaaaaaagcatgcagaatacacattggagagaggcgatttcctctcagaagagtggagggagcgaatcgccaacacgagtgttatatttgtgaataattttgcctttggtcctgaggtggatcaccagctgaaggagcggtttgcaaacatgaaggaaggtggcagaatcgtgtcctcgaaaccctttgcacctctgaacttcagaataaacagtagaaacttgagtgacatcggcaccatcatgcgcgtggtggagctctcgcccctgaagggctcggtgtcgtggacggggaagccagtctcctactacctgcacactatcgaccgcaccatacttgaaaactatttttctagtctgaaaaacccaaaactcagggaggaacaggaggcagcccggcgccgccagcagcgcgagagcaagagcaacgcggcacgcccactaagggcccagagggcaaggtggccggccccgccgacgcccccatggactctggtgctgaggaagagaaggcgggagcagccaccgtgaagaagccgtctccctccaaagcccgcaagaagaagctaaacaagaaggggaggaagatggctggccgcaagcgcgggcgccccaagaagatgaacactgcgaaccccgagcggaagcccaagaagaaccaaagtgcagcggcactcccccaacccgctgctggtggcgcccaccccgcccgcgctgcagaagcttctagagtccttcaagatccagtacctgcagttcctggcatacacaaagaccccccagtacaaggccagcctgcaggagctgctgggccaggagaaggagaagaacgcccagctcctgggtgcggctcagcagctcctcagccactgccaggcccagaaggaggagatcaggaggctgtttcagcaaaaattggatgagctgggtgtgaaggcgctgacctacaacgacctgattcaagcgcagaaggagatctccgcccataaccagcagctgcgggagcagtcggagcagctggagcaggacaaccgcgcgctccgcggccagagcttgcagctgctcaaggctcgctgcgaggagctgcagctggactgggccacgctgtcgctggagaagctgttgaaggagaagcaggccctgaagagccagatctcggagaagcagaggcactgcctggagctgcagatcagcattgtggagctagagaagagccagcggcagcaggagctcctgcagctcaagtcctgtgtgccgcctgacgacgccctgtccctgcacctgcgtgggaagggcgccctgggccgcgagctggagcctgacgccagccggctgcacctggagctggactgcaccaagttctcgctgcctcacttgagcagcatgagcccggagctctccatgaacggccaggctgctggctatgagctctgcggtgtgctgagccggccttcgtcgaagcagaacacgccccagtacctggcctcacccctggaccaggaggtggtgccctgtacccctagccacgtcggccggccgcgcctggagaagctgtctggcctagccgcacccgactacactaggctgtccccggccaagattgtgctgaggcggcacctgagccaggaccacacggtgcccggcaggccggctgccagtgagctgcattcgagagctgagcacaccaaggagaacggccttccctaccagagccccagcgtgcctggcagcatgaagctgagccctcaggacccgcggcccctgtcccctggggccttgcagcttgctggagagaagagcagtgagaagggcctgagagagcgcgcctacggcagcagcggggagctcatcaccagcctgcccatcagcatcccgctcagcaccgtgcagcccaacaagctcccggtcagcattcccctggccagcgtggtgctgcccagccgcgccgagagggcgaggagcacccccagtcccgtgctgcagccccgtgacccctcgtccacacttgaaaagcagattggtgctaatgcccacggtgctgggagcagaagccttgccctggcccccgcaggcttctcctacgctggctcggtggccatcagcggggccttggcgggcagcccggcctctctcacacctggagccgagccggccaccttggatgagtcctccagctctgggagcctttttgccaccgtggggtcccgcagctccacgccacagcaccccctgctgctggcacagccccggaactcgcttcctgcctctcccgcccaccagctctcctccagtccccggcttggtggggccgcccagggcccgttgcccgaggccagcaagggagacctgccctccgattccggcttctcagatcctgagagtgaagccaagaggaggattgtgttcaccatcaccactggtgcgggcagtgccaagcagtcgccctccagcaagcacagccccctgaccgccagcgcccgtggggactgtgtgccgagccacgggcaggacagtcgcaggcgcggccggcggaagcgagcatctgcggggacgcccagcttgagcgcaggcgtgtcccccaagcgccgagccctgccgtccgtcgctggccttttcacacagccttcggggtctcccctcaacctcaactccatggtcagtaacatcaaccagcccctggagattacagccatctcgtccccggagacctccctgaagagctcccctgtgccctaccaggaccacgaccagccccccgtgctcaagaaggagcggcctctgagccagaccaatggggcacactactccccactcacctcagacgaggagccaggctctgaggacgagcccagcagtgctcgaattgagagaaaaattgcaacaatctccttagaaagcaaatctcccccgaaaaccttggaaaatggtggtggcttggcgggaaggaagcccgcgcccgccggcgagccagtcaatagcagcaagtggaagtccaccttctcgcccatctccgacatcggcctggccaagtcggcggacagcccgctgcaggccagctccgccctcagccagaactccctgttcacgttccggcccgccctggaggagccctctgccgatgccaagctggccgctcaccccaggaaaggctttcccggctccctgtcgggggctgacggactcagcccgggcaccaaccctgccaacggctgcaccttcggcgggggcctggccgcggacctgagtttacacagcttcagtgatggtgcttctcttccccacaagggccccgaggcggccggcctgagctccccgctgagcttcccctcgcagcgcggcaaggagggctcggacgccaaccctttcctgagcaagaggcagctggacggcctggctgggctgaagggcgagggcagccgcggcaaggaggcaggggagggcggcctaccgctgtgcgggcccacggacaagaccccactgctgagcggcaaggccgccaaggcccgggaccgcgaggtcgacctcaagaatggccacaacctcttcatctctgcggcggccgtgcctcccggaagcctcctcagcggccccggcctggccccggcggcgtcctccgcaggcggcgcggcgtcctccgcccagacgcaccggtccttcctgggccccttcccgccgggaccgcagttcgcgctcggccccatgtccctgcaggccaacctcggctccgtggccggctcctccgtgctgcagtcgctgttcagctctgtgccggccgccgcaggcctggtgcacgtgtcgtccgctgccaccagactgaccaactcgcacgccatgggcagcttttccggggtggcaggcggcacagttggaggtgtctttaaccacgcggtgccctccgcctctgctcatccgtttggagcccgtgtcggccgcggggctgcatgtggcagcgccacactgggcccgagcccgctgcaggcggcggccagcgcctcggcctcttcctttcaggccccggcctcggttgagacccggccgccccctccgcctccgcctccgcctcccccgctgcccccgcctgcgcacctgggccggtcccccgcggggccgcccgtcctccacgccccccctccacctaacgccgccttgcctcctcccccaacgctgctggcctctaaccctgagcccgcgcttctgcagagcctcgcgtccctcccgcctaaccaagctttcttgccccccacctctgctgcctctctgccgcctgctaacgcctctttgtctatcaagctcacctccctcccgcacaagggcgcccgcccctccttcacggtgcaccaccagcccctgccccggctggccctggcccaggccgcgcccgggatcccacaggccagcgccacggggccgtccgcggtgtgggtgtccctcggcatgccgcctccctatgccgcgcacctttcgggggttaagccgcgataaagaccttgcttagctagcagtgcgtattgtgtaaggtaaggccagagccctgcgcggtggctcactccagacactgaactgtccttcctttggcagagaagacggccacagggctcggcagaagttccgggggtcctgaggagggaagagggagagagccagggagaccagggagatggtcgcgagaggagggactacaggacgggcaccagccatggagtggcctgagtgtgttgggttccagctgcccgcagctgggttcctgcggtgacgccgcaggactgaggccagccctgggggcagctgtgccagcccctgtgggcgaggctcacggggtgccaggccagggggctgggagctctagctcctagagcagtctccagggctccatccgcaccaggcccaggtcactcatgacgggtggcgtggcttggtgctgttccccaggcgcccagcatgtagcaggcacggtgccggctgcagaggtcctggagagccagggtggctggctggatgcctctggtcggggctgtctggccagtagcctcggatgccctcatagggagccagtgaagccccaagtgccctgcctgcctgggggctgatgggttcccggcggggtcgagaggcaagctctgtgccctgcgtgttgaggcccccttgctggacacggctgatggccacactgccctgtggtcatggcccacagccgaggggctttcagctgctcagatgtcagcaccaagctgggcaggttagtgtagacggtgcccacctttgagaccagaaggaagttggaagcaggagtgattttgatgatgtgaggccttcagggaatgtcctgttcactcctcccccaagaggctgtggagactgtggccgctgacccctgagggcagttggccacccgtgccctccagggacatggcgtgcctggcggcgtagtgcaaaggtgccctctgcttgcccctggccttctgcctcaggggcccctgggacacaggccttcctgggcgagtccaaagcccaccgggcaaggagaggaggactgggagccaggagccaaggcggaggctgtggccagggctggtcagcctggcgggtcaatgcgggcacctgcgggctggacaagctatgctgggtctcttaggagatgagctgcaggtagggtggctttagctggactcggctgtgtgtctcctttggaggaaggctggagcttggccggcgtgtccaggtgtcaggctccctggtctgtcacggggcacgcccgtcgtctgttgtggttagaggagctggcactatgcctgtcatggtgctggccccaggtggcgtgtgtgctcgtgggaggcctcggtccccagcctgggtgagtgttgggctcccccaggcgcgatggtaacctcaggccgctcttcccgctgtgcccttctgcaggtaactaggatttctacctcaaccgcgagacctatgcaaggacggtgtggaccaactcgcgcccgcggcatggtgcccgccggcctgccgggctcccacccctggacggcagaggcaaggacggacgggagctccactgtgaatcggcggcacgcgccgcaggaggctgggactggtccagtttgtactgtcgatagttttagataaagtatttatcattttttaaaaagtataaaca

SEQ ID NO: 369426 - DNA, 6046 bp, Homo sapiens
gcggccgcgcgcgcggacatgggggagaagctggagctgagactgaagtcgcccgtgggggctgagcccgccgtctacccgtggccgctgccggtctacgataaacatcacgatgctgctcatgaaatcatcgagaccatccgatgggtctgtgaagaaatcccggatctcaagctcgctatggagaattacgttttaattgactatgacaccaaaagcttcgagagcatgcagaggctctgcgacaagtacaaccgtgccatcgacagcatccaccagctgtggaagggcaccacgcagcccatgaagctgaacacgcggccgtccactggactcctgcgccatatcctgcagcaggtctacaaccactcggtgaccgaccccgagaagctcaacaactacgagcccttctcccccgaggtgtacggggagacctccttcgacctggtggcccagatgattgatgagatcaagatgaccgacgacgacctgtttgtggacttggggagcggtgtgggccaggtcgtgctccaggttgctgctgccaccaactgcaaacatcactatggcgtcgagaaagcagacatcccggccaagtatgcggagaccatggaccgcgagttcaggaagtggatgaaatggtatggaaaaaagcatgcagaatacacattggagagaggcgatttcctctcagaagagtggagggagcgaatcgccaacacgagtgttatatttgtgaataattttgcctttggtcctgaggtggatcaccagctgaaggagcggtttgcaaacatgaaggaaggtggcagaatcgtgtcctcgaaaccctttgcacctctgaacttcagaataaacagtagaaacttgagtgacatcggcaccatcatgcgcgtggtggagctctcgcccctgaagggctcggtgtcgtggacggggaagccagtctcctactacctgcacactatcgaccgcaccatacttgaaaactatttttctagtctgaaaaacccaaaactcagggaggaacaggaggcagcccggcgccgccagcagcgcgagagcaagagcaacgcggcacgcccactaagggcccagagggcaaggtggccggccccgccgacgcccccatggactctggtgctgaggaagagaaggcgggagcagccaccgtgaagaagccgtctccctccaaagcccgcaagaagaagctaaacaagaaggggaggaagatggctggccgcaagcgcgggcgccccaagaagatgaacactgcgaaccccgagcggaagcccaagaagaaccaaagtgcagcggcactcccccaacccgctgctggtggcgcccaccccgcccgcgctgcagaagcttctagagtccttcaagatccagtacctgcagttcctggcatacacaaagaccccccagtacaaggccagcctgcaggagctgctgggccaggagaaggagaagaacgcccagctcctgggtgcggctcagcagctcctcagccactgccaggcccagaaggaggagatcaggaggctgtttcagcaaaaattggatgagctgggtgtgaaggcgctgacctacaacgacctgattcaagcgcagaaggagatctccgcccataaccagcagctgcgggagcagtcggagcagctggagcaggacaaccgcgcgctccgcggccagagcttgcagctgctcaaggctcgctgcgaggagctgcagctggactgggccacgctgtcgctggagaagctgttgaaggagaagcaggccctgaagagccagatctcggagaagcagaggcactgcctggagctgcagatcagcattgtggagctagagaagagccagcggcagcaggagctcctgcagctcaagtcctgtgtgccgcctgacgacgccctgtccctgcacctgcgtgggaagggcgccctgggccgcgagctggagcctgacgccagccggctgcacctggagctggactgcaccaagttctcgctgcctcacttgagcagcatgagcccggagctctccatgaacggccaggctgctggctatgagctctgcggtgtgctgagccggccttcgtcgaagcagaacacgccccagtacctggcctcacccctggaccaggaggtggtgccctgtacccctagccacgtcggccggccgcgcctggagaagctgtctggcctagccgcacccgactacactaggctgtccccggccaagattgtgctgaggcggcacctgagccaggaccacacggtgcccggcaggccggctgccagtgagctgcattcgagagctgagcacaccaaggagaacggccttccctaccagagccccagcgtgcctggcagcatgaagctgagccctcaggacccgcggcccctgtcccctggggccttgcagcttgctggagagaagagcagtgagaagggcctgagagagcgcgcctacggcagcagcggggagctcatcaccagcctgcccatcagcatcccgctcagcaccgtgcagcccaacaagctcccggtcagcattcccctggccagcgtggtgctgcccagccgcgccgagagggcgaggagcacccccagtcccgtgctgcagccccgtgacccctcgtccacacttgaaaagcagattggtgctaatgcccacggtgctgggagcagaagccttgccctggcccccgcaggcttctcctacgctggctcggtggccatcagcggggccttggcgggcagcccggcctctctcacacctggagccgagccggccaccttggatgagtcctccagctctgggagcctttttgccaccgtggggtcccgcagctccacgccacagcaccccctgctgctggcacagccccggaactcgcttcctgcctctcccgcccaccagctctcctccagtccccggcttggtggggccgcccagggcccgttgcccgaggccagcaagggagacctgccctccgattccggcttctcagatcctgagagtgaagccaagaggaggattgtgttcaccatcaccactggtgcgggcagtgccaagcagtcgccctccagcaagcacagccccctgaccgccagcgcccgtggggactgtgtgccgagccacgggcaggacagtcgcaggcgcggccggcggaagcgagcatctgcggggacgcccagcttgagcgcaggcgtgtcccccgtgctcaagaaggagcggcctctgagccagaccaatggggcacactactccccactcaactccatggtcagtaacatcaaccagcccctggagattacagccatctcgtccccggagacctccctgaagagctcccctgtgccctaccaggaccactgtgaatcggcggcacgcgccgcaggaggctgggactggtccagtttgtactgtcgatagttttagataaagtatttatcattttttaaaaagtataaacaattctgacttattttattccatctaagtggtaaaaggcaacttattgagaaatataaatatctatatatgagagctctatataaagacacgtgtctgcagggcgggcccgccagcggattcgccacagcctgccccggtgctatctcgtccccaggcccgcgcctgcctccacccgcttggtgctgactagacgctgacaacgccgaaccccgttctcggaaacgccgcccggccggctcccccgacgcgctgctcccgtaccaaaggcaggcccgtcgccaccacattcctcggaggcctccccgcggcctgagccccttcctgagcgccctggcgcctgccctgagctcttcacctttaccccggcactgtgaacccccagactgttcaccctccggggcgtgggttgcgcccttgcatgtgaaggggcctgcgcggtgacgcagctggccatgtgctgcgcgatggtgctgtgaggacggcgcgggcacgttgaacaagtgcatttacttttgtatttctcggctgtccatggctcgcagcatgccctgcgatgcggggcaggcctgtcgtgggtcccttggtgtttctgtacaggagagagtcacactaatgagtggcagtattttatagagatgtgatgagaatttataaatttcatagatttgacagcttttatttttagatggtataatgcacagtgaagaggaaagaaaagcgaggggaaaaaaccttatttattcaaacagtgcacaaaatggccccagcgtcagccccgaccctagacccctcagttgcagctcccagcagcccagacagagctgccggcgcccctgcctgccccacatcccttcctgtcagggccacgcctggcacccatcccttggagcctgtgctggttctcccagctgctgtgggtgtgctggggccagggtgcactgctgaaacctggcctctctggccctaggccccagggtgacgtcggccccccactctgcagccttggcgggtgcctgggactgggtgtggaaggagaggagctgaggccggggtgtagcaggcaggcagggccactccagtgcttctggagccctgagcagtcagggcctgggttgtctgagcagtggtggctctgtgccctccctggaggatgggatctgggagtctgagctccccgcatctggccctgggctgtgtggcacttgctgagcccaccttctcaagtgcttgctcctgtgagatggcatcggggagccccttccccaaggtgccacagatccaccctccagggagctgccagccctgtgttctggttcccaagggcaggatggacacacgtcacatccctaccacgtggcctccaaagggagccacggaggaaaggcttctgtggttgctaggtgggggagtcctgtgtgggagggcctgaagacccctgcttgtgcctggtgaggggggtgctgcctcccccagcccccaacaacctctcagacccccaccctccaacatagctgagttctgaagatggtgctccggacctgtcctcttaagtggtgcccagtgccctccccaccccacgttggtgctctcagctagaaggtgctgtgcctctgcctgagccccaagccccgagcctggccttcaggacaggcagcctgctctgtgtcgccacgggccggatacgccacagggttgatggcagagacggccgagtccctggtctagaacaagacacattctttaaacactgtattacttctgcctccctctaggtgacagtggcagtccgggtgccatcacgggtcctgcagatggccatgcagggctcctgcccacgcaggccaccgtatgttcaggacacgcactgggtctcagagccactggcccaggcagaagtctccttgagcccactgggtcatatgcgtgtcaccacacgtgaactagtgtggtggctgcctgcggacaccctcctgttctgagccctgggcctgtgttcttctcagacactcccagactgaggggtggtgtgtggcgggtggcagggtggctgtggagactggggatctggagcctggtgctggcacctggcctgagtttccgtgggcagctggcggggacctgtgctgctgctgctgactgtgggtgggcgggcggcgcctgggagtggctcttgctcaggaattgataggaaccctaaaaactaggataccccctcctcggcccatgaggcacgcacagtgacttatttaagacttcccccttaatttatctgcccccaggatgcgtcagtctgttcagtggtcagcaggccccccaccccccgccgactgccctcgccatcgtggtcagacccccctcccaacacaacacgctgctggtctgtgtcagcctttgtaacgtgggaggctctgccgtgtcttccgggtgaactgtatttggattgcgcgcattgtcacggtccgcccctgggctgcaggcgccccttcctctgggcacccctgcattctgcatccccacctctagacgctgtaataaacagactgttttcactcggaaaaaaaat

SEQ ID NO: 369427 - DNA, 5051 bp, Homo sapiens
attagtgcctctgcgtcgacgaaggccggctgccagtgagctgcattcgagagctgagcacaccaaggagaacggccttccctaccagagccccagcgtgcctggcagcatgaagctgagccctcaggacccgcggcccctgtcccctggggccttgcagcttgctggagagaagagcagtgagaagggcctgagagagcgcgcctacggcagcagcggggagctcatcaccagcctgcccatcagcatcccgctcagcaccgtgcagcccaacaagctcccggtcagcattcccctggccagcgtggtgctgcccagccgcgccgagagggcgaggagcacccccagtcccgtgctgcagccccgtgacccctcgtccacacttgaaaagcagattggtgctaatgcccacggtgctgggagcagaagccttgccctggcccccgcaggcttctcctacgctggctcggtggccatcagcggggccttggcgggcagcccggcctctctcacacctggagccgagccggccaccttggatgagtcctccagctctgggagcctttttgccaccgtggggtcccgcagctccacgccacagcaccccctgctgctggcacagccccggaactcgcttcctgcctctcccgcccaccagctctcctccagtccccggcttggtggggccgcccagggcccgttgcccgaggccagcaagggagacctgccctccgattccggcttctcagatcctgagagtgaagccaagaggaggattgtgttcaccatcaccactggtgcgggcagtgccaagcagtcgccctccagcaagcacagccccctgaccgccagcgcccgtggggactgtgtgccgagccacgggcaggacagtcgcaggcgcggccggcggaagcgagcatctgcggggacgcccagcttgagcgcaggcgtgtcccccaagcgccgagccctgccgtccgtcgctggccttttcacacagccttcggggtctcccctcaacctcaactccatggtcagtaacatcaaccagcccctggagattacagccatctcgtccccggagacctccctgaagagctcccctgtgccctaccaggaccacgaccagccccccgtgctcaagaaggagcggcctctgagccagaccaatggggcacactactccccactcacctcagacgaggagccaggctctgaggacgagcccagcagtgctcgaattgagagaaaaattgcaacaatctccttagaaagcaaatctcccccgaaaaccttggaaaatggtggtggcttggcgggaaggaagcccgcgcccgccggcgagccagtcaatagcagcaagtggaagtccaccttctcgcccatctccgacatcggcctggccaagtcggcggacagcccgctgcaggccagctccgccctcagccagaactccctgttcacgttccggcccgccctggaggagccctctgccgatgccaagctggccgctcaccccaggaaaggctttcccggctccctgtcgggggctgacggactcagcccgggcaccaaccctgccaacggctgcaccttcggcgggggcctggccgcggacctgagtttacacagcttcagtgatggtgcttctcttccccacaagggccccgaggcggccggcctgagctccccgctgagcttcccctcgcagcgcggcaaggagggctcggacgccaaccctttcctgagcaagaggcagctggacggcctggctgggctgaagggcgagggcagccgcggcaaggaggcaggggagggcggcctaccgctgtgcgggcccacggacaagaccccactgctgagcggcaaggccgccaaggcccgggaccgcgaggtcgacctcaagaatggccacaacctcttcatctctgcggcggccgtgcctcccggaagcctcctcagcggccccggcctggccccggcggcgtcctccgcaggcggcgcggcgtcctccgcccagacgcaccggtccttcctgggccccttcccgccgggaccgcagttcgcgctcggccccatgtccctgcaggccaacctcggctccgtggccggctcctccgtgctgcagtcgctgttcagctctgtgccggccgccgcaggcctggtgcacgtgtcgtccgctgccaccagactgaccaactcgcacgccatgggcagcttttccggggtggcaggcggcacagttggaggtaactaggatttctacctcaaccgcgagacctatgcaaggacggtgtggaccaactcgcgcccgcggcatggtgcccgccggcctgccgggctcccacccctggacggcagaggcaaggacggacgggagctccactgtgaatcggcggcacgcgccgcaggaggctgggactggtccagtttgtactgtcgatagttttagataaagtatttatcattttttaaaaagtataaacaattctgacttattttattccatctaagtggtaaaaggcaacttattgagaaatataaatatctatatatgagagctctatataaagacacgtgtctgcagggcgggcccgccagcggattcgccacagcctgccccggtgctatctcgtccccaggcccgcgcctgcctccacccgcttggtgctgactagacgctgacaacgccgaaccccgttctcggaaacgccgcccggccggctcccccgacgcgctgctcccgtaccaaaggcaggcccgtcgccaccacattcctcggaggcctccccgcggcctgagccccttcctgagcgccctggcgcctgccctgagctcttcacctttaccccggcactgtgaacccccagactgttcaccctccggggcgtgggttgcgcccttgcatgtgaaggggcctgcgcggtgacgcagctggccatgtgctgcgcgatggtgctgtgaggacggcgcgggcacgttgaacaagtgcatttacttttgtatttctcggctgtccatggctcgcagcatgccctgcgatgcggggcaggcctgtcgtgggtcccttggtgtttctgtacaggagagagtcacactaatgagtggcagtattttatagagatgtgatgagaatttataaatttcatagatttgacagcttttatttttagatggtataatgcacagtgaagaggaaagaaaagcgaggggaaaaaaccttatttattcaaacagtgcacaaaatggccccagcgtcagccccgaccctagacccctcagttgcagctcccagcagcccagacagagctgccggcgcccctgcctgccccacatcccttcctgtcagggccacgcctggcacccatcccttggagcctgtgctggttctcccagctgctgtgggtgtgctggggccagggtgcactgctgaaacctggcctctctggccctaggccccagggtgacgtcggccccccactctgcagccttggcgggtgcctgggactgggtgtggaaggagaggagctgaggccggggtgtagcaggcaggcagggccactccagtgcttctggagccctgagcagtcagggcctgggttgtctgagcagtggtggctctgtgccctccctggaggatgggatctgggagtctgagctccccgcatctggccctgggctgtgtggcacttgctgagcccaccttctcaagtgcttgctcctgtgagatggcatcggggagccccttccccaaggtgccacagatccaccctccagggagctgccagccctgtgttctggttcccaagggcaggatggacacacgtcacatccctaccacgtggcctccaaagggagccacggaggaaaggcttctgtggttgctaggtgggggagtcctgtgtgggagggcctgaagacccctgcttgtgcctggtgaggggggtgctgcctcccccagcccccaacaacctctcagacccccaccctccaacatagctgagttctgaagatggtgctccggacctgtcctcttaagtggtgcccagtgccctccccaccccacgttggtgctctcagctagaaggtgctgtgcctctgcctgagccccaagccccgagcctggccttcaggacaggcagcctgctctgtgtcgccacgggccggatacgccacagggttgatggcagagacggccgagtccctggtctagaacaagacacattctttaaacactgtattacttctgcctccctctaggtgacagtggcagtccgggtgccatcacgggtcctgcagatggccatgcagggctcctgcccacgcaggccaccgtatgttcaggacacgcactgggtctcagagccactggcccaggcagaagtctccttgagcccactgggtcatatgcgtgtcaccacacgtgaactagtgtggtggctgcctgcggacaccctcctgttctgagccctgggcctgtgttcttctcagacactcccagactgaggggtggtgtgtggcgggtggcagggtggctgtggagactggggatctggagcctggtgctggcacctggcctgagtttccgtgggcagctggcggggacctgtgctgctgctgctgactgtgggtgggcgggcggcgcctgggagtggctcttgctcaggaattgataggaaccctaaaaactaggataccccctcctcggcccatgaggcacgcacagtgacttatttaagacttcccccttaatttatctgcccccaggatgcgtcagtctgttcagtggtcagcaggccccccaccccccgccgactgccctcgccatcgtggtcagacccccctcccaacacaacacgctgctggtctgtgtcagcctttgtaacgtgggaggctctgccgtgtcttccgggtgaactgtatttggattgcgcgcattgtcacggtccgcccctgggctgcaggcgccccttcctctgggcacccctgcattctgcatccccacctctagacgctgtaataaacagactgttttcactcggaaaaaaaat

SEQ ID NO: 369428 - DNA, 4255 bp, Homo sapiens
ttcccacaaacacaacacacaccaccacacacccccacaccacacacacccaacaccaccccaacccaacggctaggagcgaggctgggtgtcggtcgcaggcgcggccggcggaagcgagcatctgcggggacgcccagcttgagcgcaggcgtgtcccccaagcgccgagccctgccgtccgtcgctggccttttcacacagccttcggggtctcccctcaacctcaactccatggtcagtaacatcaaccagcccctggagattacagccatctcgtccccggagacctccctgaagagctcccctgtgccctaccaggaccacgaccagccccccgtgctcaagaaggagcggcctctgagccagaccaatggggcacactactccccactcacctcagacgaggagccaggctctgaggacgagcccagcagtgctcgaattgagagaaaaattgcaacaatctccttagaaagcaaatctcccccgaaaaccttggaaaatggtggtggcttggcgggaaggaagcccgcgcccgccggcgagccagtcaatagcagcaagtggaagtccaccttctcgcccatctccgacatcggcctggccaagtcggcggacagcccgctgcaggccagctccgccctcagccagaactccctgttcacgttccggcccgccctggaggagccctctgccgatgccaagctggccgctcaccccaggaaaggctttcccggctccctgtcgggggctgacggactcagcccgggcaccaaccctgccaacggctgcaccttcggcgggggcctggccgcggacctgagtttacacagcttcagtgatggtgcttctcttccccacaagggccccgaggcggccggcctgagctccccgctgagcttcccctcgcagcgcggcaaggagggctcggacgccaaccctttcctgagcaagaggcagctggacggcctggctgggctgaagggcgagggcagccgcggcaaggaggcaggggagggcggcctaccgctgtgcgggcccacggacaagaccccactgctgagcggcaaggccgccaaggcccgggaccgcgaggtcgacctcaagaatggccacaacctcttcatctctgcggcggccgtgcctcccggaagcctcctcagcggccccggcctggccccggcggcgtcctccgcaggcggcgcggcgtcctccgcccagacgcaccggtccttcctgggccccttcccgccgggaccgcagttcgcgctcggccccatgtccctgcaggccaacctcggctccgtggccggctcctccgtgctgcagtcgctgttcagctctgtgccggccgccgcaggcctggtgcacgtgtcgtccgctgccaccagactgaccaactcgcacgccatgggcagcttttccggggtggcaggcggcacagttggaggtaactaggatttctacctcaaccgcgagacctatgcaaggacggtgtggaccaactcgcgcccgcggcatggtgcccgccggcctgccgggctcccacccctggacggcagaggcaaggacggacgggagctccactgtgaatcggcggcacgcgccgcaggaggctgggactggtccagtttgtactgtcgatagttttagataaagtatttatcattttttaaaaagtataaacaattctgacttattttattccatctaagtggtaaaaggcaacttattgagaaatataaatatctatatatgagagctctatataaagacacgtgtctgcagggcgggcccgccagcggattcgccacagcctgccccggtgctatctcgtccccaggcccgcgcctgcctccacccgcttggtgctgactagacgctgacaacgccgaaccccgttctcggaaacgccgcccggccggctcccccgacgcgctgctcccgtaccaaaggcaggcccgtcgccaccacattcctcggaggcctccccgcggcctgagccccttcctgagcgccctggcgcctgccctgagctcttcacctttaccccggcactgtgaacccccagactgttcaccctccggggcgtgggttgcgcccttgcatgtgaaggggcctgcgcggtgacgcagctggccatgtgctgcgcgatggtgctgtgaggacggcgcgggcacgttgaacaagtgcatttacttttgtatttctcggctgtccatggctcgcagcatgccctgcgatgcggggcaggcctgtcgtgggtcccttggtgtttctgtacaggagagagtcacactaatgagtggcagtattttatagagatgtgatgagaatttataaatttcatagatttgacagcttttatttttagatggtataatgcacagtgaagaggaaagaaaagcgaggggaaaaaaccttatttattcaaacagtgcacaaaatggccccagcgtcagccccgaccctagacccctcagttgcagctcccagcagcccagacagagctgccggcgcccctgcctgccccacatcccttcctgtcagggccacgcctggcacccatcccttggagcctgtgctggttctcccagctgctgtgggtgtgctggggccagggtgcactgctgaaacctggcctctctggccctaggccccagggtgacgtcggccccccactctgcagccttggcgggtgcctgggactgggtgtggaaggagaggagctgaggccggggtgtagcaggcaggcagggccactccagtgcttctggagccctgagcagtcagggcctgggttgtctgagcagtggtggctctgtgccctccctggaggatgggatctgggagtctgagctccccgcatctggccctgggctgtgtggcacttgctgagcccaccttctcaagtgcttgctcctgtgagatggcatcggggagccccttccccaaggtgccacagatccaccctccagggagctgccagccctgtgttctggttcccaagggcaggatggacacacgtcacatccctaccacgtggcctccaaagggagccacggaggaaaggcttctgtggttgctaggtgggggagtcctgtgtgggagggcctgaagacccctgcttgtgcctggtgaggggggtgctgcctcccccagcccccaacaacctctcagacccccaccctccaacatagctgagttctgaagatggtgctccggacctgtcctcttaagtggtgcccagtgccctccccaccccacgttggtgctctcagctagaaggtgctgtgcctctgcctgagccccaagccccgagcctggccttcaggacaggcagcctgctctgtgtcgccacgggccggatacgccacagggttgatggcagagacggccgagtccctggtctagaacaagacacattctttaaacactgtattacttctgcctccctctaggtgacagtggcagtccgggtgccatcacgggtcctgcagatggccatgcagggctcctgcccacgcaggccaccgtatgttcaggacacgcactgggtctcagagccactggcccaggcagaagtctccttgagcccactgggtcatatgcgtgtcaccacacgtgaactagtgtggtggctgcctgcggacaccctcctgttctgagccctgggcctgtgttcttctcagacactcccagactgaggggtggtgtgtggcgggtggcagggtggctgtggagactggggatctggagcctggtgctggcacctggcctgagtttccgtgggcagctggcggggacctgtgctgctgctgctgactgtgggtgggcgggcggcgcctgggagtggctcttgctcaggaattgataggaaccctaaaaactaggataccccctcctcggcccatgaggcacgcacagtgacttatttaagacttcccccttaatttatctgcccccaggatgcgtcagtctgttcagtggtcagcaggccccccaccccccgccgactgccctcgccatcgtggtcagacccccctcccaacacaacacgctgctggtctgtgtcagcctttgtaacgtgggaggctctgccgtgtcttccgggtgaactgtatttggattgcgcgcattgtcacggtccgcccctgggctgcaggcgccccttcctctgggcacccctgcattctgcatccccacctctagacgctgtaataaacagactgttttcactcggaaaaaaaat

SEQ ID NO: 369429 - DNA, 5400 bp, Homo sapiens
gcggccgcgcgcgcggacatgggggagaagctggagctgagactgaagtcgcccgtgggggctgagcccgccgtctacccgtggccgctgccggtctacgataaacatcacgatgctgctcatgaaatcatcgagaccatccgatgggtctgtgaagaaatcccggatctcaagctcgctatggagaattacgttttaattgactatgacaccaaaagcttcgagagcatgcagaggctctgcgacaagtacaaccgtgccatcgacagcatccaccagctgtggaagggcaccacgcagcccatgaagctgaacacgcggccgtccactggactcctgcgccatatcctgcagcaggtctacaaccactcggtgaccgaccccgagaagctcaacaactacgagcccttctcccccgaggtgtacggggagacctccttcgacctggtggcccagatgattgatgagatcaagatgaccgacgacgacctgtttgtggacttggggagcggtgtgggccaggtcgtgctccaggttgctgctgccaccaactgcaaacatcactatggcgtcgagaaagcagacatcccggccaagtatgcggagaccatggaccgcgagttcaggaagtggatgaaatggtatggaaaaaagcatgcagaatacacattggagagaggcgatttcctctcagaagagtggagggagcgaatcgccaacacgagtgttatatttgtgaataattttgcctttggtcctgaggtggatcaccagctgaaggagcggtttgcaaacatgaaggaaggtggcagaatcgtgtcctcgaaaccctttgcacctctgaacttcagaataaacagtagaaacttgagtgacatcggcaccatcatgcgcgtggtggagctctcgcccctgaagggctcggtgtcgtggacggggaagccagtctcctactacctgcacactatcgaccgcaccatacttgaaaactatttttctagtctgaaaaacccaaaactcagggaggaacaggaggcagcccggcgccgccagcagcgcgagagcaagagcaacgcggcacgcccactaagggcccagagggcaaggtggccggccccgccgacgcccccatggactctggtgctgaggaagagaaggcgggagcagccaccgtgaagaagccgtctccctccaaagcccgcaagaagaagctaaacaagaaggggaggaagatggctggccgcaagcgcgggcgccccaagaagatgaacactgcgaaccccgagcggaagcccaagaagaaccaaagtgcagcggcactcccccaacccgctgctggtggcgcccaccccgcccgcgctgcagaagcttctagagtccttcaagatccagtacctgcagttcctggcatacacaaagaccccccagtacaaggccagcctgcaggagctgctgggccaggagaaggagaagaacgcccagctcctgggtgcggctcagcagctcctcagccactgccaggcccagaaggaggagatcaggaggctgtttcagcaaaaattggatgagctgggtgtgaaggcgctgacctacaacgacctgattcaagcgcagaaggagatctccgcccataaccagcagctgcgggagcagtcggagcagctggagcaggacaaccgcgcgctccgcggccagagcttgcagctgctcaaggctcgctgcgaggagctgcagctggactgggccacgctgtcgctggagaagctgttgaaggagaagcaggccctgaagagccagatctcggagaagcagaggcactgcctggagctgcagatcagcattgtggagctagagaagagccagcggcagcaggagctcctgcagctcaagtcctgtgtgccgcctgacgacgccctgtccctgcacctgcgtgggaagggcgccctgggccgcgagctggagcctgacgccagccggctgcacctggagctggactgcaccaagttctcgctgcctcacttgagcagcatgagcccggagctctccatgaacggccaggctgctggctatgagctctgcggtgtgctgagccggccttcgtcgaagcagaacacgccccagtacctggcctcacccctggaccaggaggtggtgccctgtacccctagccacgtcggccggccgcgcctggagaagctgtctggcctagccgcacccgactacactaggctgtccccggccaagattgtgctgaggcggcacctgagccaggaccacacggtgcccggcaggccggctgccagtgagctgcattcgagagctgagcacaccaaggagaacggccttccctaccagagccccagcgtgcctggcagcatgaagctgagccctcaggacccgcggcccctgtcccctggggccttgcagcttgctggagagaagagcagtgagaagggcctgagagagcgcgcctacggcagcagcggggagctcatcaccagcctgcccatcagcatcccgctcagcaccgtgcagcccaacaagctcccggtcagcattcccctggccagcgtggtgctgcccagccgcgccgagagggcgaggagcacccccagtcccgtgctgcagccccgtgacccctcgtccacacttgaaaagcagattggtgctaatgcccacggtgctgggagcagaagccttgccctggcccccgcaggcttctcctacgctggctcggtggccatcagcggggccttggcgggcagcccggcctctctcacacctggagccgagccggccaccttggatgagtcctccagctctgggagcctttttgccaccgtggggtcccgcagctccacgccacagcaccccctgctgctggcacagccccggaactcgcttcctgcctctcccgcccaccagctctcctccagtccccggcttggtggggccgcccagggcccgttgcccgaggccagcaagggagacctgccctccgattccggcttctcagatcctgagagtgaagccaagaggaggattgtgttcaccatcaccactggtgcgggcagtgccaagcagtcgccctccagcaagcacagccccctgaccgccagcgcccgtggggactgtgtgccgagccacgggcaggacagtcgcaggcgcggccggcggaagcgagcatctgcggggacgcccagcttgagcgcaggcgtgtcccccaagcgccgagccctgccgtccgtcgctggccttttcacacagccttcggggtctcccctcaacctcaactccatggtcagtaacatcaaccagcccctggagattacagccatctcgtccccggagacctccctgaagagctcccctgtgccctaccaggaccacgaccagccccccgtgctcaagaaggagcggcctctgagccagaccaatggggcacactactccccactcacctcagacgaggagccaggctctgaggacgagcccagcagtgctcgaattgagagaaaaattgcaacaatctccttagaaagcaaatctcccccgaaaaccttggaaaatggtggtggcttggcgggaaggaagcccgcgcccgccggcgagccagtcaatagcagcaagtggaagtccaccttctcgcccatctccgacatcggcctggccaagtcggcggacagcccgctgcaggccagctccgccctcagccagaactccctgttcacgttccggcccgccctggaggagccctctgccgatgccaagctggccgctcaccccaggaaaggctttcccggctccctgtcgggggctgacggactcagcccgggcaccaaccctgccaacggctgcaccttcggcgggggcctggccgcggacctgagtttacacagcttcagtgatggtgcttctcttccccacaagggccccgaggcggccggcctgagctccccgctgagcttcccctcgcagcgcggcaaggagggctcggacgccaaccctttcctgagcaagaggcagctggacggcctggctgggctgaagggcgagggcagccgcggcaaggaggcaggggagggcggcctaccgctgtgcgggcccacggacaagaccccactgctgagcggcaaggccgccaaggcccgggaccgcgaggtcgacctcaagaatggccacaacctcttcatctctgcggcggccgtgcctcccggaagcctcctcagcggccccggcctggccccggcggcgtcctccgcaggcggcgcggcgtcctccgcccagacgcaccggtccttcctgggccccttcccgccgggaccgcagttcgcgctcggccccatgtccctgcaggccaacctcggctccgtggccggctcctccgtgctgcagtcgctgttcagctctgtgccggccgccgcaggcctggtgcacgtgtcgtccgctgccaccagactgaccaactcgcacgccatgggcagcttttccggggtggcaggcggcacagttggaggtgtctttaaccacgcggtgccctccgcctctgctcatccgtttggagcccgtgtcggccgcggggctgcatgtggcagcgccacactgggcccgagcccgctgcaggcggcggccagcgcctcggcctcttcctttcaggccccggcctcggttgagacccggccgccccctccgcctccgcctccgcctcccccgctgcccccgcctgcgcacctgggccggtcccccgcggggccgcccgtcctccacgccccccctccacctaacgccgccttgcctcctcccccaacgctgctggcctctaaccctgagcccgcgcttctgcagagcctcgcgtccctcccgcctaaccaagctttcttgccccccacctctgctgcctctctgccgcctgctaacgcctctttgtctatcaagctcacctccctcccgcacaagggcgcccgcccctccttcacggtgcaccaccagcccctgccccggctggccctggcccaggccgcgcccgggatcccacaggccagcgccacggggccgtccgcggtgtgggtgtccctcggcatgccgcctccctatgccgcgcacctttcgggggttaagccgcgataaagaccttgcttagctagcagtgcgtattgtgtaaggtaactaggatttctacctcaaccgcgagacctatgcaaggacggtgtggaccaactcgcgcccgcggcatggtgcccgccggcctgccgggctcccacccctggacggcagaggcaaggacggacgggagctccactgtgaatcggcggcacgcgccgcaggaggctgggactggtccagtttgtactgtcgatagttttagataaagtatttatcattttttaaaaagtataaaca

SEQ ID NO: 369430 - DNA, 7497 bp, Homo sapiens
gcggccgcgcgcgcggacatgggggagaagctggagctgagactgaagtcgcccgtgggggctgagcccgccgtctacccgtggccgctgccggtctacgataaacatcacgatgctgctcatgaaatcatcgagaccatccgatgggtctgtgaagaaatcccggatctcaagctcgctatggagaattacgttttaattgactatgacaccaaaagcttcgagagcatgcagaggctctgcgacaagtacaaccgtgccatcgacagcatccaccagctgtggaagggcaccacgcagcccatgaagctgaacacgcggccgtccactggactcctgcgccatatcctgcagcaggtctacaaccactcggtgaccgaccccgagaagctcaacaactacgagcccttctcccccgaggtgtacggggagacctccttcgacctggtggcccagatgattgatgagatcaagatgaccgacgacgacctgtttgtggacttggggagcggtgtgggccaggtcgtgctccaggttgctgctgccaccaactgcaaacatcactatggcgtcgagaaagcagacatcccggccaagtatgcggagaccatggaccgcgagttcaggaagtggatgaaatggtatggaaaaaagcatgcagaatacacattggagagaggcgatttcctctcagaagagtggagggagcgaatcgccaacacgagtgttatatttgtgaataattttgcctttggtcctgaggtggatcaccagctgaaggagcggtttgcaaacatgaaggaaggtggcagaatcgtgtcctcgaaaccctttgcacctctgaacttcagaataaacagtagaaacttgagtgacatcggcaccatcatgcgcgtggtggagctctcgcccctgaagggctcggtgtcgtggacggggaagccagtctcctactacctgcacactatcgaccgcaccatacttgaaaactatttttctagtctgaaaaacccaaaactcagggaggaacaggaggcagcccggcgccgccagcagcgcgagagcaagagcaacgcggcacgcccactaagggcccagagggcaaggtggccggccccgccgacgcccccatggactctggtgctgaggaagagaaggcgggagcagccaccgtgaagaagccgtctccctccaaagcccgcaagaagaagctaaacaagaaggggaggaagatggctggccgcaagcgcgggcgccccaagaagatgaacactgcgaaccccgagcggaagcccaagaagaaccaaagtgcagcggcactcccccaacccgctgctggtggcgcccaccccgcccgcgctgcagaagcttctagagtccttcaagatccagtacctgcagttcctggcatacacaaagaccccccagtacaaggccagcctgcaggagctgctgggccaggagaaggagaagaacgcccagctcctgggtgcggctcagcagctcctcagccactgccaggcccagaaggaggagatcaggaggctgtttcagcaaaaattggatgagctgggtgtgaaggcgctgacctacaacgacctgattcaagcgcagaaggagatctccgcccataaccagcagctgcgggagcagtcggagcagctggagcaggacaaccgcgcgctccgcggccagagcttgcagctgctcaaggctcgctgcgaggagctgcagctggactgggccacgctgtcgctggagaagctgttgaaggagaagcaggccctgaagagccagatctcggagaagcagaggcactgcctggagctgcagatcagcattgtggagctagagaagagccagcggcagcaggagctcctgcagctcaagtcctgtgtgccgcctgacgacgccctgtccctgcacctgcgtgggaagggcgccctgggccgcgagctggagcctgacgccagccggctgcacctggagctggactgcaccaagttctcgctgcctcacttgagcagcatgagcccggagctctccatgaacggccaggctgctggctatgagctctgcggtgtgctgagccggccttcgtcgaagcagaacacgccccagtacctggcctcacccctggaccaggaggtggtgccctgtacccctagccacgtcggccggccgcgcctggagaagctgtctggcctagccgcacccgactacactaggctgtccccggccaagattgtgctgaggcggcacctgagccaggaccacacggtgcccggcaggccggctgccagtgagctgcattcgagagctgagcacaccaaggagaacggccttccctaccagagccccagcgtgcctggcagcatgaagctgagccctcaggacccgcggcccctgtcccctggggccttgcagcttgctggagagaagagcagtgagaagggcctgagagagcgcgcctacggcagcagcggggagctcatcaccagcctgcccatcagcatcccgctcagcaccgtgcagcccaacaagctcccggtcagcattcccctggccagcgtggtgctgcccagccgcgccgagagggcgaggagcacccccagtcccgtgctgcagccccgtgacccctcgtccacacttgaaaagcagattggtgctaatgcccacggtgctgggagcagaagccttgccctggcccccgcaggcttctcctacgctggctcggtggccatcagcggggccttggcgggcagcccggcctctctcacacctggagccgagccggccaccttggatgagtcctccagctctgggagcctttttgccaccgtggggtcccgcagctccacgccacagcaccccctgctgctggcacagccccggaactcgcttcctgcctctcccgcccaccagctctcctccagtccccggcttggtggggccgcccagggcccgttgcccgaggccagcaagggagacctgccctccgattccggcttctcagatcctgagagtgaagccaagaggaggattgtgttcaccatcaccactggtgcgggcagtgccaagcagtcgccctccagcaagcacagccccctgaccgccagcgcccgtggggactgtgtgccgagccacgggcaggacagtcgcaggcgcggccggcggaagcgagcatctgcggggacgcccagcttgagcgcaggcgtgtcccccaagcgccgagccctgccgtccgtcgctggccttttcacacagccttcggggtctcccctcaacctcaactccatggtcagtaacatcaaccagcccctggagattacagccatctcgtccccggagacctccctgaagagctcccctgtgccctaccaggaccacgaccagccccccgtgctcaagaaggagcggcctctgagccagaccaatggggcacactactccccactcacctcagacgaggagccaggctctgaggacgagcccagcagtgctcgaattgagagaaaaattgcaacaatctccttagaaagcaaatctcccccgaaaaccttggaaaatggtggtggcttggcgggaaggaagcccgcgcccgccggcgagccagtcaatagcagcaagtggaagtccaccttctcgcccatctccgacatcggcctggccaagtcggcggacagcccgctgcaggccagctccgccctcagccagaactccctgttcacgttccggcccgccctggaggagccctctgccgatgccaagctggccgctcaccccaggaaaggctttcccggctccctgtcgggggctgacggactcagcccgggcaccaaccctgccaacggctgcaccttcggcgggggcctggccgcggacctgagtttacacagcttcagtgatggtgcttctcttccccacaagggccccgaggcggccggcctgagctccccgctgagcttcccctcgcagcgcggcaaggagggctcggacgccaaccctttcctgagcaagaggcagctggacggcctggctgggctgaagggcgagggcagccgcggcaaggaggcaggggagggcggcctaccgctgtgcgggcccacggacaagaccccactgctgagcggcaaggccgccaaggcccgggaccgcgaggtcgacctcaagaatggccacaacctcttcatctctgcggcggccgtgcctcccggaagcctcctcagcggccccggcctggccccggcggcgtcctccgcaggcggcgcggcgtcctccgcccagacgcaccggtccttcctgggccccttcccgccgggaccgcagttcgcgctcggccccatgtccctgcaggccaacctcggctccgtggccggctcctccgtgctgcagtcgctgttcagctctgtgccggccgccgcaggcctggtgcacgtgtcgtccgctgccaccagactgaccaactcgcacgccatgggcagcttttccggggtggcaggcggcacagttggaggtgtctttaaccacgcggtgccctccgcctctgctcatccgtttggagcccgtgtcggccgcggggctgcatgtggcagcgccacactgggcccgagcccgctgcaggcggcggccagcgcctcggcctcttcctttcaggccccggcctcggttgagacccggccgccccctccgcctccgcctccgcctcccccgctgcccccgcctgcgcacctgggccggtcccccgcggggccgcccgtcctccacgccccccctccacctaacgccgccttgcctcctcccccaacgctgctggcctctaaccctgagcccgcgcttctgcagagcctcgcgtccctcccgcctaaccaagctttcttgccccccacctctgctgcctctctgccgcctgctaacgcctctttgtctatcaagctcacctccctcccgcacaagggcgcccgcccctccttcacggtgcaccaccagcccctgccccggctggccctggcccaggccgcgcccgggatcccacaggccagcgccacggggccgtccgcggtgtgggtgtccctcggcatgccgcctccctatgccgcgcacctttcgggggttaagccgcgataaagaccttgcttagctagcagtgcgtattgtgtaaggtaaggccagagccctgcgcggtggctcactccagacactgaactgtccttcctttggcagagaagacggccacagggctcggcagaagttccgggggtcctgaggagggaagagggagagagccagggagaccagggagatggtcgcgagaggagggactacaggacgggcaccagccatggagtggcctgagtgtgttgggttccagctgcccgcagctgggttcctgcggtgacgccgcaggactgaggccagccctgggggcagctgtgccagcccctgtgggcgaggctcacggggtgccaggccagggggctgggagctctagctcctagagcagtctccagggctccatccgcaccaggcccaggtcactcatgacgggtggcgtggcttggtgctgttccccaggcgcccagcatgtagcaggcacggtgccggctgcagaggtcctggagagccagggtggctggctggatgcctctggtcggggctgtctggccagtagcctcggatgccctcatagggagccagtgaagccccaagtgccctgcctgcctgggggctgatgggttcccggcggggtcgagaggcaagctctgtgccctgcgtgttgaggcccccttgctggacacggctgatggccacactgccctgtggtcatggcccacagccgaggggctttcagctgctcagatgtcagcaccaagctgggcaggttagtgtagacggtgcccacctttgagaccagaaggaagttggaagcaggagtgattttgatgatgtgaggccttcagggaatgtcctgttcactcctcccccaagaggctgtggagactgtggccgctgacccctgagggcagttggccacccgtgccctccagggacatggcgtgcctggcggcgtagtgcaaaggtgccctctgcttgcccctggccttctgcctcaggggcccctgggacacaggccttcctgggcgagtccaaagcccaccgggcaaggagaggaggactgggagccaggagccaaggcggaggctgtggccagggctggtcagcctggcgggtcaatgcgggcacctgcgggctggacaagctatgctgggtctcttaggagatgagctgcaggtagggtggctttagctggactcggctgtgtgtctcctttggaggaaggctggagcttggccggcgtgtccaggtgtcaggctccctggtctgtcacggggcacgcccgtcgtctgttgtggttagaggagctggcactatgcctgtcatggtgctggccccaggtggcgtgtgtgctcgtgggaggcctcggtccccagcctgggtgagtgttgggctcccccaggcgcgatggtaacctcaggccgctcttcccgctgtgcccttctgcaggtaactaggatttctacctcaaccgcgagacctatgcaaggacggtgtggaccaactcgcgcccgcggcatggtgcccgccggcctgccgggctcccacccctggacggcagaggcaaggacggacgggagctccactgtgaatcggcggcacgcgccgcaggaggctgggactggtccagtttgtactgtcgatagttttagataaagtatttatcattttttaaaaagtataaacaattctgacttattttattccatctaagtggtaaaaggcaacttattgagaaatataaatatctatatatgagagctctatataaagaaaaagcgaggggaaaaaaccttatttattcaaacagtgcacaaaatggccccagcgtcagccccgaccctagacccctcagttgcagctcccagcagcccagacagagctgccggcgcccctgcctgcccaagaatcgctatcctgttagtggaccagagacctggcagcggatttcatatggaagcctgtgtgcatggtatcatagctatccttgcgttaggcgcgcgtgtggctgcgagtgcccgcggtgttgcacctagcctggttgacaccttgagactcgttcgtcttggcctcgctcatgggcgcgcccaggggggtgcactggttcgcgtgccgcccccattgtccgtgctggtgctttgtgacgtgcgatgaccttcgtgcgcaccctgagggttggttggcgacatgggatgatgagtcggcctggagtgcccaggagggttggtagcagagaggaagaagccatggggccatcattcggaaactgcttggactgtgttatgccacctgtgtggccatttaaaggggtcacatgtaggtacaggctggagcacgatagcatgtggtgcatggagagcatagcaacgaggagggatatgg

SEQ ID NO: 369431 - DNA, 3482 bp, Homo sapiens
gcggccgcgcgcgcggacatgggggagaagctggagctgagactgaagtcgcccgtgggggctgagcccgccgtctacccgtggccgctgccggtctacgataaacatcacgatgctgctcatgaaatcatcgagaccatccgatgggtctgtgaagaaatcccggatctcaagctcgctatggagaattacgttttaattgactatgacaccaaaagcttcgagagcatgcagaggctctgcgacaagtacaaccgtgccatcgacagcatccaccagctgtggaagggcaccacgcagcccatgaagctgaacacgcggccgtccactggactcctgcgccatatcctgcagcaggtctacaaccactcggtgaccgaccccgagaagctcaacaactacgagcccttctcccccgaggtgtacggggagacctccttcgacctggtggcccagatgattgatgagatcaagatgaccgacgacgacctgtttgtggacttggggagcggtgtgggccaggtcgtgctccaggttgctgctgccaccaactgcaaacatcactatggcgtcgagaaagcagacatcccggccaagtatgcggagaccatggaccgcgagttcaggaagtggatgaaatggtatggaaaaaagcatgcagaatacacattggagagaggcgatttcctctcagaagagtggagggagcgaatcgccaacacgagtgttatatttgtgaataattttgcctttggtcctgaggtggatcaccagctgaaggagcggtttgcaaacatgaaggaaggtggcagaatcgtgtcctcgaaaccctttgcacctctgaacttcagaataaacagtagaaacttgagtgacatcggcaccatcatgcgcgtggtggagctctcgcccctgaagggctcggtgtcgtggacggggaagccagtctcctactacctgcacactatcgaccgcaccatacttgaaaactatttttctagtctgaaaaacccaaaactcagggaggaacaggaggcagcccggcgccgccagcagcgcgagagcaagagcaacgcggcacgcccactaagggcccagagggcaaggtggccggccccgccgacgcccccatggactctggtgctgaggaagagaaggcgggagcagccaccgtgaagaagccgtctccctccaaagcccgcaagaagaagctaaacaagaaggggaggaagatggctggccgcaagcgcgggcgccccaagaagatgaacactgcgaaccccgagcggaagcccaagaagaaccaaagtgcagcggcactcccccaacccgctgctggtggcgcccaccccgcccgcgctgcagaagcttctagagtccttcaagatccagtacctgcagttcctggcatacacaaagaccccccagtacaaggccagcctgcaggagctgctgggccaggagaaggagaagaacgcccagctcctgggtgcggctcagcagctcctcagccactgccaggcccagaaggaggagatcaggaggctgtttcagcaaaaattggatgagctgggtgtgaaggcgctgacctacaacgacctgattcaagcgcagaaggagatctccgcccataaccagcagctgcgggagcagtcggagcagctggagcaggacaaccgcgcgctccgcggccagagcttgcagctgctcaaggctcgctgcgaggagctgcagctggactgggccacgctgtcgctggagaagctgttgaaggagaagcaggccctgaagagccagatctcggagaagcagaggcactgcctggagctgcagatcagcattgtggagctagagaagagccagcggcagcaggagctcctgcagctcaagtcctgtgtgccgcctgacgacgccctgtccctgcacctgcgtgggaagggcgccctgggccgcgagctggagcctgacgccagccggctgcacctggagctggactgcaccaagttctcgctgcctcacttgagcagcatgagcccggagctctccatgaacggccaggctgctggctatgagctctgcggtgtgctgagccggccttcgtcgaagcagaacacgccccagtacctggcctcacccctggaccaggaggtggtgccctgtacccctagccacgtcggccggccgcgcctggagaagctgtctggcctagccgcacccgactacactaggctgtccccggccaagattgtgctgaggcggcacctgagccaggaccacacggtgcccggcaggccggctgccagtgagctgcattcgagagctgagcacaccaaggagaacggccttccctaccagagccccagcgtgcctggcagcatgaagctgagccctcaggacccgcggcccctgtcccctggggccttgcagcttgctggagagaagagcagtgagaagggcctgagagagcgcgcctacggcagcagcggggagctcatcaccagcctgcccatcagcatcccgctcagcaccgtgcagcccaacaagctcccggtcagcattcccctggccagcgtggtgctgcccagccgcgccgagagggcgaggagcacccccagtcccgtgctgcagccccgtgacccctcgtccacacttgaaaagcagattggtgctaatgcccacggtgctgggagcagaagccttgccctggcccccgcaggcttctcctacgctggctcggtggccatcagcggggccttggcgggcagcccggcctctctcacacctggagccgagccggccaccttggatgagtcctccagctctgggagcctttttgccaccgtggggtcccgcagctccacgccacagcaccccctgctgctggcacagccccggaactcgcttcctgcctctcccgcccaccagctctcctccagtccccggcttggtggggccgcccagggcccgttgcccgaggccagcaagggagacctgccctccgattccggcttctcagatcctgagagtgaagccaagaggaggattgtgttcaccatcaccactggtgcgggcagtgccaagcagtcgccctccagcaagcacagccccctgaccgccagcgcccgtggggactgtgtgccgagccacgggcaggacagtcgcaggcgcggccggcggaagcgagcatctgcggggacgcccagcttgagcgcaggcgtgtcccccgtgctcaagaaggagcggcctctgagccagaccaatggggcacactactccccactcaactccatggtcagtaacatcaaccagcccctggagattacagccatctcgtccccggagacctccctgaagagctcccctgtgccctaccaggaccactgtgaatcggcggcacgcgccgcaggaggctgggactggtccagtttgtactgtcgatagttttagataaagtatttatcattttttaaaaagtataaaca

SEQ ID NO: 369432 - DNA, 2640 bp, Homo sapiens
gcggccgcgcgcgcggacatgggggagaagctggagctgagactgaagtcgcccgtgggggctgagcccgccgtctacccgtggccgctgccggtctacgataaacatcacgatgctgctcatgaaatcatcgagaccatccgatgggtctgtgaagaaatcccggatctcaagctcgctatggagaattacgttttaattgactatgacaccaaaagcttcgagagcatgcagaggctctgcgacaagtacaaccgtgccatcgacagcatccaccagctgtggaagggcaccacgcagcccatgaagctgaacacgcggccgtccactggactcctgcgccatatcctgcagcaggtctacaaccactcggtgaccgaccccgagaagctcaacaactacgagcccttctcccccgaggtgtacggggagacctccttcgacctggtggcccagatgattgatgagatcaagatgaccgacgacgacctgtttgtggacttggggagcggtgtgggccaggtcgtgctccaggttgctgctgccaccaactgcaaacatcactatggcgtcgagaaagcagacatcccggccaagtatgcggagaccatggaccgcgagttcaggaagtggatgaaatggtatggaaaaaagcatgcagaatacacattggagagaggcgatttcctctcagaagagtggagggagcgaatcgccaacacgagtgttatatttgtgaataattttgcctttggtcctgaggtggatcaccagctgaaggagcggtttgcaaacatgaaggaaggtggcagaatcgtgtcctcgaaaccctttgcacctctgaacttcagaataaacagtagaaacttgagtgacatcggcaccatcatgcgcgtggtggagctctcgcccctgaagggctcggtgtcgtggacggggaagccagtctcctactacctgcacactatcgaccgcaccatacttgaaaactatttttctagtctgaaaaacccaaaactcagggaggaacaggaggcagcccggcgccgccagcagcgcgagagcaagagcaacgcggcacgcccactaagggcccagagggcaaggtggccggccccgccgacgcccccatggactctggtgctgaggaagagaaggcgggagcagccaccgtgaagaagccgtctccctccaaagcccgcaagaagaagctaaacaagaaggggaggaagatggctggccgcaagcgcgggcgccccaagaagatgaacactgcgaaccccgagcggaagcccaagaagaaccaaagtgcagcggcactcccccaacccgctgctggtggcgcccaccccgcccgcgctgcagaagcttctagagtccttcaagatccagtacctgcagttcctggcatacacaaagaccccccagtacaaggccagcctgcaggagctgctgggccaggagaaggagaagaacgcccagctcctgggtgcggctcagcagctcctcagccactgccaggcccagaaggaggagatcaggaggctgtttcagcaaaaattggatgagctgggtgtgaaggcgctgacctacaacgacctgattcaagcgcagaaggagatctccgcccataaccagcagctgcgggagcagtcggagcagctggagcaggacaaccgcgcgctccgcggccagagcttgcagctgctcaaggctcgctgcgaggagctgcagctggactgggccacgctgtcgctggagaagctgttgaaggagaagcaggccctgaagagccagatctcggagaagcagaggcactgcctggagctgcagatcagcattgtggagctagagaagagccagcggcagcaggagctcctgcagctcaagtcctgtgtgccgcctgacgacgccctgtccctgcacctgcgtgggaagggcgccctgggccgcgagctggagcctgacgccagccggctgcacctggagctggactgcaccaagttctcgctgcctcacttgagcagcatgagcccggagctctccatgaacggccaggctgctggctatgagctctgcggtgtgctgagccggccttcgtcgaagcagaacacgccccagtacctggcctcacccctggaccaggaggtggtgccctgtacccctagccacgtcggccggccgcgcctggagaagctgtctggcctagccgcacccgactacactaggctgtccccggccaagattgtgctgaggcggcacctgagccaggaccacacggtgcccggcaggccggctgccagtgagctgcattcgagagctgagcacaccaaggagaacggccttccctaccagagccccagcgtgcctggcagcatgaagctgagccctcaggacccgcggcccctgtcccctggggccttgcagcttgctggagagaagagcagtgagaagggcctgagagaacgcgcctaatattaggcgcgttctgcgtggagaatactttttgcgatgcctactggagactttgattcgatacgcccagttgggccgaccaggtcgaggaggagggggaggacgacaaatgtgtcaccagcgagctcctcacggggatccctctggccacaggtgacaccagcc

SEQ ID NO: 369433 - DNA, 191 bp, Homo sapiens
cccgctcaagttcccccgctgccctcttcccacgcggtactggacggtgaccccggcggcctcccccagccagctgcaggcctcaacactcactgtttccagctgggttctgggtctcctggggcacctgctgcccctgacacacagggttttctctctgcagaggagcacccccagtcccgtgctgcagc

SEQ ID NO: 369434 - DNA, 446 bp, Homo sapiens
acaaaacacaaaacaaaacaaaaaaaaccaaacccttcctgatcgtttctgctgctgtgtttcagatgggtctgtgaagaaatcccggatctcaagctcgctatggagaattacgttttaattgactatgacaccaaaaggtaagcagagtcctgtccagccgctccgctccgaggacagactcggctcttggggaggacaggaggacgcatcctataattagctcttcttagatggtgcaagctgatctgaaatttccttttagagttggccgtggccaccataaagttattttggtaggaaatgtttatcaactcttggcaaaggctgtcagaggccggacagaattggaaactccggttgtggaaagtgggattggcatgtgtggagtcagcccgcgctagtgatcgctctttttatagcgggcggctgacggccagaagtcc

SEQ ID NO: 369435 - DNA, 301 bp, Homo sapiens
gcggccgcgcgcgcggacatgggggagaagctggagctgagactgaagtcgcccgtgggggctgagcccgccgtctacccgtggccgctgccggtctacgataaacatcacgatgctgctcatgaaatcatcgagaccatccgatgggtctgtgaagaaatcccggatctcaagctcgctatggagaattacgttttaattgactatgacaccaaaagctgctggttaaggaaaacatgaacttggcctgtggagcactggttttcctatgaggaaggggaagtgtgaacctcggcacatg

SEQ ID NO: 369436 - DNA, 7318 bp, Homo sapiens
gcggccgcgcgcgcggacatgggggagaagctggagctgagactgaagtcgcccgtgggggctgagcccgccgtctacccgtggccgctgccggtctacgataaacatcacgatgctgctcatgaaatcatcgagaccatccgatgggtctgtgaagaaatcccggatctcaagctcgctatggagaattacgttttaattgactatgacaccaaaagcttcgagagcatgcagaggctctgcgacaagtacaaccgtgccatcgacagcatccaccagctgtggaagggcaccacgcagcccatgaagctgaacacgcggccgtccactggactcctgcgccatatcctgcagcaggtctacaaccactcggtgaccgaccccgagaagctcaacaactacgagcccttctcccccgaggtgtacggggagacctccttcgacctggtggcccagatgattgatgagatcaagatgaccgacgacgacctgtttgtggacttggggagcggtgtgggccaggtcgtgctccaggttgctgctgccaccaactgcaaacatcactatggcgtcgagaaagcagacatcccggccaagtatgcggagaccatggaccgcgagttcaggaagtggatgaaatggtatggaaaaaagcatgcagaatacacattggagagaggcgatttcctctcagaagagtggagggagcgaatcgccaacacgagtgttatatttgtgaataattttgcctttggtcctgaggtggatcaccagctgaaggagcggtttgcaaacatgaaggaaggtggcagaatcgtgtcctcgaaaccctttgcacctctgaacttcagaataaacagtagaaacttgagtgacatcggcaccatcatgcgcgtggtggagctctcgcccctgaagggctcggtgtcgtggacggggaagccagtctcctactacctgcacactatcgaccgcaccatacttgaaaactatttttctagtctgaaaaacccaaaactcagggaggaacaggaggcagcccggcgccgccagcagcgcgagagcaagagcaacgcggcacgcccactaagggcccagagggcaaggtggccggccccgccgacgcccccatggactctggtgctgaggaagagaaggcgggagcagccaccgtgaagaagccgtctccctccaaagcccgcaagaagaagctaaacaagaaggggaggaagatggctggccgcaagcgcgggcgccccaagaagatgaacactgcgaaccccgagcggaagcccaagaagaaccaaagtgcagcggcactcccccaacccgctgctggtggcgcccaccccgcccgcgctgcagaagcttctagagtccttcaagatccagtacctgcagttcctggcatacacaaagaccccccagtacaaggccagcctgcaggagctgctgggccaggagaaggagaagaacgcccagctcctgggtgcggctcagcagctcctcagccactgccaggcccagaaggaggagatcaggaggctgtttcagcaaaaattggatgagctgggtgtgaaggcgctgacctacaacgacctgattcaagcgcagaaggagatctccgcccataaccagcagctgcgggagcagtcggagcagctggagcaggacaaccgcgcgctccgcggccagagcttgcagctgctcaaggctcgctgcgaggagctgcagctggactgggccacgctgtcgctggagaagctgttgaaggagaagcaggccctgaagagccagatctcggagaagcagaggcactgcctggagctgcagatcagcattgtggagctagagaagagccagcggcagcaggagctcctgcagctcaagtcctgtgtgccgcctgacgacgccctgtccctgcacctgcgtgggaagggcgccctgggccgcgagctggagcctgacgccagccggctgcacctggagctggactgcaccaagttctcgctgcctcacttgagcagcatgagcccggagctctccatgaacggccaggctgctggctatgagctctgcggtgtgctgagccggccttcgtcgaagcagaacacgccccagtacctggcctcacccctggaccaggaggtggtgccctgtacccctagccacgtcggccggccgcgcctggagaagctgtctggcctagccgcacccgactacactaggctgtccccggccaagattgtgctgaggcggcacctgagccaggaccacacggtgcccggcaggccggctgccagtgagctgcattcgagagctgagcacaccaaggagaacggccttccctaccagagccccagcgtgcctggcagcatgaagctgagccctcaggacccgcggcccctgtcccctggggccttgcagcttgctggagagaagagcagtgagaagggcctgagagagcgcgcctacggcagcagcggggagctcatcaccagcctgcccatcagcatcccgctcagcaccgtgcagcccaacaagctcccggtcagcattcccctggccagcgtggtgctgcccagccgcgccgagagggcgaggagcacccccagtcccgtgctgcagccccgtgacccctcgtccacacttgaaaagcagattggtgctaatgcccacggtgctgggagcagaagccttgccctggcccccgcaggcttctcctacgctggctcggtggccatcagcggggccttggcgggcagcccggcctctctcacacctggagccgagccggccaccttggatgagtcctccagctctgggagcctttttgccaccgtggggtcccgcagctccacgccacagcaccccctgctgctggcacagccccggaactcgcttcctgcctctcccgcccaccagctctcctccagtccccggcttggtggggccgcccagggcccgttgcccgaggccagcaagggagacctgccctccgattccggcttctcagatcctgagagtgaagccaagaggaggattgtgttcaccatcaccactggtgcgggcagtgccaagcagtcgccctccagcaagcacagccccctgaccgccagcgcccgtggggactgtgtgccgagccacgggcaggacagtcgcaggcgcggccggcggaagcgagcatctgcggggacgcccagcttgagcgcaggcgtgtcccccaagcgccgagccctgccgtccgtcgctggccttttcacacagccttcggggtctcccctcaacctcaactccatggtcagtaacatcaaccagcccctggagattacagccatctcgtccccggagacctccctgaagagctcccctgtgccctaccaggaccacgaccagccccccgtgctcaagaaggagcggcctctgagccagaccaatggggcacactactccccactcacctcagacgaggagccaggctctgaggacgagcccagcagtgctcgaattgagagaaaaattgcaacaatctccttagaaagcaaatctcccccgaaaaccttggaaaatggtggtggcttggcgggaaggaagcccgcgcccgccggcgagccagtcaatagcagcaagtggaagtccaccttctcgcccatctccgacatcggcctggccaagtcggcggacagcccgctgcaggccagctccgccctcagccagaactccctgttcacgttccggcccgccctggaggagccctctgccgatgccaagctggccgctcaccccaggaaaggctttcccggctccctgtcgggggctgacggactcagcccgggcaccaaccctgccaacggctgcaccttcggcgggggcctggccgcggacctgagtttacacagcttcagtgatggtgcttctcttccccacaagggccccgaggcggccggcctgagctccccgctgagcttcccctcgcagcgcggcaaggagggctcggacgccaaccctttcctgagcaagaggcagctggacggcctggctgggctgaagggcgagggcagccgcggcaaggaggcaggggagggcggcctaccgctgtgcgggcccacggacaagaccccactgctgagcggcaaggccgccaaggcccgggaccgcgaggtcgacctcaagaatggccacaacctcttcatctctgcggcggccgtgcctcccggaagcctcctcagcggccccggcctggccccggcggcgtcctccgcaggcggcgcggcgtcctccgcccagacgcaccggtccttcctgggccccttcccgccgggaccgcagttcgcgctcggccccatgtccctgcaggccaacctcggctccgtggccggctcctccgtgctgcagtcgctgttcagctctgtgccggccgccgcaggcctggtgcacgtgtcgtccgctgccaccagactgaccaactcgcacgccatgggcagcttttccggggtggcaggcggcacagttggaggtaactaggatttctacctcaaccgcgagacctatgcaaggacggtgtggaccaactcgcgcccgcggcatggtgcccgccggcctgccgggctcccacccctggacggcagaggcaaggacggacgggagctccactgtgaatcggcggcacgcgccgcaggaggctgggactggtccagtttgtactgtcgatagttttagataaagtatttatcattttttaaaaagtataaacaattctgacttattttattccatctaagtggtaaaaggcaacttattgagaaatataaatatctatatatgagagctctatataaagacacgtgtctgcagggcgggcccgccagcggattcgccacagcctgccccggtgctatctcgtccccaggcccgcgcctgcctccacccgcttggtgctgactagacgctgacaacgccgaaccccgttctcggaaacgccgcccggccggctcccccgacgcgctgctcccgtaccaaaggcaggcccgtcgccaccacattcctcggaggcctccccgcggcctgagccccttcctgagcgccctggcgcctgccctgagctcttcacctttaccccggcactgtgaacccccagactgttcaccctccggggcgtgggttgcgcccttgcatgtgaaggggcctgcgcggtgacgcagctggccatgtgctgcgcgatggtgctgtgaggacggcgcgggcacgttgaacaagtgcatttacttttgtatttctcggctgtccatggctcgcagcatgccctgcgatgcggggcaggcctgtcgtgggtcccttggtgtttctgtacaggagagagtcacactaatgagtggcagtattttatagagatgtgatgagaatttataaatttcatagatttgacagcttttatttttagatggtataatgcacagtgaagaggaaagaaaagcgaggggaaaaaaccttatttattcaaacagtgcacaaaatggccccagcgtcagccccgaccctagacccctcagttgcagctcccagcagcccagacagagctgccggcgcccctgcctgccccacatcccttcctgtcagggccacgcctggcacccatcccttggagcctgtgctggttctcccagctgctgtgggtgtgctggggccagggtgcactgctgaaacctggcctctctggccctaggccccagggtgacgtcggccccccactctgcagccttggcgggtgcctgggactgggtgtggaaggagaggagctgaggccggggtgtagcaggcaggcagggccactccagtgcttctggagccctgagcagtcagggcctgggttgtctgagcagtggtggctctgtgccctccctggaggatgggatctgggagtctgagctccccgcatctggccctgggctgtgtggcacttgctgagcccaccttctcaagtgcttgctcctgtgagatggcatcggggagccccttccccaaggtgccacagatccaccctccagggagctgccagccctgtgttctggttcccaagggcaggatggacacacgtcacatccctaccacgtggcctccaaagggagccacggaggaaaggcttctgtggttgctaggtgggggagtcctgtgtgggagggcctgaagacccctgcttgtgcctggtgaggggggtgctgcctcccccagcccccaacaacctctcagacccccaccctccaacatagctgagttctgaagatggtgctccggacctgtcctcttaagtggtgcccagtgccctccccaccccacgttggtgctctcagctagaaggtgctgtgcctctgcctgagccccaagccccgagcctggccttcaggacaggcagcctgctctgtgtcgccacgggccggatacgccacagggttgatggcagagacggccgagtccctggtctagaacaagacacattctttaaacactgtattacttctgcctccctctaggtgacagtggcagtccgggtgccatcacgggtcctgcagatggccatgcagggctcctgcccacgcaggccaccgtatgttcaggacacgcactgggtctcagagccactggcccaggcagaagtctccttgagcccactgggtcatatgcgtgtcaccacacgtgaactagtgtggtggctgcctgcggacaccctcctgttctgagccctgggcctgtgttcttctcagacactcccagactgaggggtggtgtgtggcgggtggcagggtggctgtggagactggggatctggagcctggtgctggcacctggcctgagtttccgtgggcagctggcggggacctgtgctgctgctgctgactgtgggtgggcgggcggcgcctgggagtggctcttgctcaggaattgataggaaccctaaaaactaggataccccctcctcggcccatgaggcacgcacagtgacttatttaagacttcccccttaatttatctgcccccaggatgcgtcagtctgttcagtggtcagcaggccccccaccccccgccgactgccctcgccatcgtggtcagacccccctcccaacacaacacgctgctggtctgtgtcagcctttgtaacgtgggaggctctgccgtgtcttccgggtgaactgtatttggattgcgcgcattgtcacggtccgcccctgggctgcaggcgccccttcctctgggcacccctgcattctgcatccccacctctagacgctgtaataaacagactgttttcactcggaaaaaaaat

SEQ ID NO: 369437 - DNA, 9255 bp, Homo sapiens
gcggccgcgcgcgcggacatgggggagaagctggagctgagactgaagtcgcccgtgggggctgagcccgccgtctacccgtggccgctgccggtctacgataaacatcacgatgctgctcatgaaatcatcgagaccatccgatgggtctgtgaagaaatcccggatctcaagctcgctatggagaattacgttttaattgactatgacaccaaaagcttcgagagcatgcagaggctctgcgacaagtacaaccgtgccatcgacagcatccaccagctgtggaagggcaccacgcagcccatgaagctgaacacgcggccgtccactggactcctgcgccatatcctgcagcaggtctacaaccactcggtgaccgaccccgagaagctcaacaactacgagcccttctcccccgaggtgtacggggagacctccttcgacctggtggcccagatgattgatgagatcaagatgaccgacgacgacctgtttgtggacttggggagcggtgtgggccaggtcgtgctccaggttgctgctgccaccaactgcaaacatcactatggcgtcgagaaagcagacatcccggccaagtatgcggagaccatggaccgcgagttcaggaagtggatgaaatggtatggaaaaaagcatgcagaatacacattggagagaggcgatttcctctcagaagagtggagggagcgaatcgccaacacgagtgttatatttgtgaataattttgcctttggtcctgaggtggatcaccagctgaaggagcggtttgcaaacatgaaggaaggtggcagaatcgtgtcctcgaaaccctttgcacctctgaacttcagaataaacagtagaaacttgagtgacatcggcaccatcatgcgcgtggtggagctctcgcccctgaagggctcggtgtcgtggacggggaagccagtctcctactacctgcacactatcgaccgcaccatacttgaaaactatttttctagtctgaaaaacccaaaactcagggaggaacaggaggcagcccggcgccgccagcagcgcgagagcaagagcaacgcggcacgcccactaagggcccagagggcaaggtggccggccccgccgacgcccccatggactctggtgctgaggaagagaaggcgggagcagccaccgtgaagaagccgtctccctccaaagcccgcaagaagaagctaaacaagaaggggaggaagatggctggccgcaagcgcgggcgccccaagaagatgaacactgcgaaccccgagcggaagcccaagaagaaccaaagtgcagcggcactcccccaacccgctgctggtggcgcccaccccgcccgcgctgcagaagcttctagagtccttcaagatccagtacctgcagttcctggcatacacaaagaccccccagtacaaggccagcctgcaggagctgctgggccaggagaaggagaagaacgcccagctcctgggtgcggctcagcagctcctcagccactgccaggcccagaaggaggagatcaggaggctgtttcagcaaaaattggatgagctgggtgtgaaggcgctgacctacaacgacctgattcaagcgcagaaggagatctccgcccataaccagcagctgcgggagcagtcggagcagctggagcaggacaaccgcgcgctccgcggccagagcttgcagctgctcaaggctcgctgcgaggagctgcagctggactgggccacgctgtcgctggagaagctgttgaaggagaagcaggccctgaagagccagatctcggagaagcagaggcactgcctggagctgcagatcagcattgtggagctagagaagagccagcggcagcaggagctcctgcagctcaagtcctgtgtgccgcctgacgacgccctgtccctgcacctgcgtgggaagggcgccctgggccgcgagctggagcctgacgccagccggctgcacctggagctggactgcaccaagttctcgctgcctcacttgagcagcatgagcccggagctctccatgaacggccaggctgctggctatgagctctgcggtgtgctgagccggccttcgtcgaagcagaacacgccccagtacctggcctcacccctggaccaggaggtggtgccctgtacccctagccacgtcggccggccgcgcctggagaagctgtctggcctagccgcacccgactacactaggctgtccccggccaagattgtgctgaggcggcacctgagccaggaccacacggtgcccggcaggccggctgccagtgagctgcattcgagagctgagcacaccaaggagaacggccttccctaccagagccccagcgtgcctggcagcatgaagctgagccctcaggacccgcggcccctgtcccctggggccttgcagcttgctggagagaagagcagtgagaagggcctgagagagcgcgcctacggcagcagcggggagctcatcaccagcctgcccatcagcatcccgctcagcaccgtgcagcccaacaagctcccggtcagcattcccctggccagcgtggtgctgcccagccgcgccgagagggcgaggagcacccccagtcccgtgctgcagccccgtgacccctcgtccacacttgaaaagcagattggtgctaatgcccacggtgctgggagcagaagccttgccctggcccccgcaggcttctcctacgctggctcggtggccatcagcggggccttggcgggcagcccggcctctctcacacctggagccgagccggccaccttggatgagtcctccagctctgggagcctttttgccaccgtggggtcccgcagctccacgccacagcaccccctgctgctggcacagccccggaactcgcttcctgcctctcccgcccaccagctctcctccagtccccggcttggtggggccgcccagggcccgttgcccgaggccagcaagggagacctgccctccgattccggcttctcagatcctgagagtgaagccaagaggaggattgtgttcaccatcaccactggtgcgggcagtgccaagcagtcgccctccagcaagcacagccccctgaccgccagcgcccgtggggactgtgtgccgagccacgggcaggacagtcgcaggcgcggccggcggaagcgagcatctgcggggacgcccagcttgagcgcaggcgtgtcccccaagcgccgagccctgccgtccgtcgctggccttttcacacagccttcggggtctcccctcaacctcaactccatggtcagtaacatcaaccagcccctggagattacagccatctcgtccccggagacctccctgaagagctcccctgtgccctaccaggaccacgaccagccccccgtgctcaagaaggagcggcctctgagccagaccaatggggcacactactccccactcacctcagacgaggagccaggctctgaggacgagcccagcagtgctcgaattgagagaaaaattgcaacaatctccttagaaagcaaatctcccccgaaaaccttggaaaatggtggtggcttggcgggaaggaagcccgcgcccgccggcgagccagtcaatagcagcaagtggaagtccaccttctcgcccatctccgacatcggcctggccaagtcggcggacagcccgctgcaggccagctccgccctcagccagaactccctgttcacgttccggcccgccctggaggagccctctgccgatgccaagctggccgctcaccccaggaaaggctttcccggctccctgtcgggggctgacggactcagcccgggcaccaaccctgccaacggctgcaccttcggcgggggcctggccgcggacctgagtttacacagcttcagtgatggtgcttctcttccccacaagggccccgaggcggccggcctgagctccccgctgagcttcccctcgcagcgcggcaaggagggctcggacgccaaccctttcctgagcaagaggcagctggacggcctggctgggctgaagggcgagggcagccgcggcaaggaggcaggggagggcggcctaccgctgtgcgggcccacggacaagaccccactgctgagcggcaaggccgccaaggcccgggaccgcgaggtcgacctcaagaatggccacaacctcttcatctctgcggcggccgtgcctcccggaagcctcctcagcggccccggcctggccccggcggcgtcctccgcaggcggcgcggcgtcctccgcccagacgcaccggtccttcctgggccccttcccgccgggaccgcagttcgcgctcggccccatgtccctgcaggccaacctcggctccgtggccggctcctccgtgctgcagtcgctgttcagctctgtgccggccgccgcaggcctggtgcacgtgtcgtccgctgccaccagactgaccaactcgcacgccatgggcagcttttccggggtggcaggcggcacagttggaggtgtctttaaccacgcggtgccctccgcctctgctcatccgtttggagcccgtgtcggccgcggggctgcatgtggcagcgccacactgggcccgagcccgctgcaggcggcggccagcgcctcggcctcttcctttcaggccccggcctcggttgagacccggccgccccctccgcctccgcctccgcctcccccgctgcccccgcctgcgcacctgggccggtcccccgcggggccgcccgtcctccacgccccccctccacctaacgccgccttgcctcctcccccaacgctgctggcctctaaccctgagcccgcgcttctgcagagcctcgcgtccctcccgcctaaccaagctttcttgccccccacctctgctgcctctctgccgcctgctaacgcctctttgtctatcaagctcacctccctcccgcacaagggcgcccgcccctccttcacggtgcaccaccagcccctgccccggctggccctggcccaggccgcgcccgggatcccacaggccagcgccacggggccgtccgcggtgtgggtgtccctcggcatgccgcctccctatgccgcgcacctttcgggggttaagccgcgataaagaccttgcttagctagcagtgcgtattgtgtaaggtaaggccagagccctgcgcggtggctcactccagacactgaactgtccttcctttggcagagaagacggccacagggctcggcagaagttccgggggtcctgaggagggaagagggagagagccagggagaccagggagatggtcgcgagaggagggactacaggacgggcaccagccatggagtggcctgagtgtgttgggttccagctgcccgcagctgggttcctgcggtgacgccgcaggactgaggccagccctgggggcagctgtgccagcccctgtgggcgaggctcacggggtgccaggccagggggctgggagctctagctcctagagcagtctccagggctccatccgcaccaggcccaggtcactcatgacgggtggcgtggcttggtgctgttccccaggcgcccagcatgtagcaggcacggtgccggctgcagaggtcctggagagccagggtggctggctggatgcctctggtcggggctgtctggccagtagcctcggatgccctcatagggagccagtgaagccccaagtgccctgcctgcctgggggctgatgggttcccggcggggtcgagaggcaagctctgtgccctgcgtgttgaggcccccttgctggacacggctgatggccacactgccctgtggtcatggcccacagccgaggggctttcagctgctcagatgtcagcaccaagctgggcaggttagtgtagacggtgcccacctttgagaccagaaggaagttggaagcaggagtgattttgatgatgtgaggccttcagggaatgtcctgttcactcctcccccaagaggctgtggagactgtggccgctgacccctgagggcagttggccacccgtgccctccagggacatggcgtgcctggcggcgtagtgcaaaggtgccctctgcttgcccctggccttctgcctcaggggcccctgggacacaggccttcctgggcgagtccaaagcccaccgggcaaggagaggaggactgggagccaggagccaaggcggaggctgtggccagggctggtcagcctggcgggtcaatgcgggcacctgcgggctggacaagctatgctgggtctcttaggagatgagctgcaggtagggtggctttagctggactcggctgtgtgtctcctttggaggaaggctggagcttggccggcgtgtccaggtgtcaggctccctggtctgtcacggggcacgcccgtcgtctgttgtggttagaggagctggcactatgcctgtcatggtgctggccccaggtggcgtgtgtgctcgtgggaggcctcggtccccagcctgggtgagtgttgggctcccccaggcgcgatggtaacctcaggccgctcttcccgctgtgcccttctgcaggtaactaggatttctacctcaaccgcgagacctatgcaaggacggtgtggaccaactcgcgcccgcggcatggtgcccgccggcctgccgggctcccacccctggacggcagaggcaaggacggacgggagctccactgtgaatcggcggcacgcgccgcaggaggctgggactggtccagtttgtactgtcgatagttttagataaagtatttatcattttttaaaaagtataaacaattctgacttattttattccatctaagtggtaaaaggcaacttattgagaaatataaatatctatatatgagagctctatataaagacacgtgtctgcagggcgggcccgccagcggattcgccacagcctgccccggtgctatctcgtaccaaaggcaggcccgtcgccaccacattcctcggaggcctccccgcggcctgagccccttcctgagcgccctggcgcctgccctgagctcttcacctttaccccggcactgtgaacccccagactgttcaccctccggggcgtgggttgcgcccttgcatgtgaaggggcctgcgcggtgacgcagctggccatgtgctgcgcgatggtgctgtgaggacggcgcgggcacgttgaacaagtgcatttacttttgtatttctcggctgtccatggctcgcagcatgccctgcgatgcggggcaggcctgtcgtgggtcccttggtgtttctgtacaggagagagtcacactaatgagtggcagtattttatagagatgtgatgagaatttataaatttcatagatttgacagcttttatttttagatggtataatgcacagtgaagaggaaagaaaagcgaggggaaaaaaccttatttattcaaacagtgcacaaaatggccccagcgtcagccccgaccctagacccctcagttgcagctcccagcagcccagacagagctgccggcgcccctgcctgccccacatcccttcctgtcagggccacgcctggcacccatcccttggagcctgtgctggttctcccagctgctgtgggtgtgctggggccagggtgcactgctgaaacctggcctctctggccctaggccccagggtgacgtcggccccccactctgcagccttggcgggtgcctgggactgggtgtggaaggagaggagctgaggccggggtgtagcaggcaggcagggccactccagtgcttctggagccctgagcagtcagggcctgggttgtctgagcagtggtggctctgtgccctccctggaggatgggatctgggagtctgagctccccgcatctggccctgggctgtgtggcacttgctgagcccaccttctcaagtgcttgctcctgtgagatggcatcggggagccccttccccaaggtgccacagatccaccctccagggagctgccagccctgtgttctggttcccaagggcaggatggacacacgtcacatccctaccacgtggcctccaaagggagccacggaggaaaggcttctgtggttgctaggtgggggagtcctgtgtgggagggcctgaagacccctgcttgtgcctggtgaggggggtgctgcctcccccagcccccaacaacctctcagacccccaccctccaacatagctgagttctgaagatggtgctccggacctgtcctcttaagtggtgcccagtgccctccccaccccacgttggtgctctcagctagaaggtgctgtgcctctgcctgagccccaagccccgagcctggccttcaggacaggcagcctgctctgtgtcgccacgggccggatacgccacagggttgatggcagagacggccgagtccctggtctagaacaagacacattctttaaacactgtattacttctgcctccctctaggtgacagtggcagtccgggtgccatcacgggtcctgcagatggccatgcagggctcctgcccacgcaggccaccgtatgttcaggacacgcactgggtctcagagccactggcccaggcagaagtctccttgagcccactgggtcatatgcgtgtcaccacacgtgaactagtgtggtggctgcctgcggacaccctcctgttctgagccctgggcctgtgttcttctcagacactcccagactgaggggtggtgtgtggcgggtggcagggtggctgtggagactggggatctggagcctggtgctggcacctggcctgagtttccgtgggcagctggcggggacctgtgctgctgctgctgactgtgggtgggcgggcggcgcctgggagtggctcttgctcaggaattgataggaaccctaaaaactaggataccccctcctcggcccatgaggcacgcacagtgacttatttaagacttcccccttaatttatctgcccccaggatgcgtcagtctgttcagtggtcagcaggccccccaccccccgccgactgccctcgccatcgtggtcagacccccctcccaacacaacacgctgctggtctgtgtcagcctttgtaacgtgggaggctctgccgtgtcttccgggtgaactgtatttggattgcgcgcattgtcacggtccgcccctgggctgcaggcgccccttcctctgggcacccctgcattctgcatccccacctctagacgctgtaataaacagactgttttcactcggaaaaaaaat

SEQ ID NO: 369438 - DNA, 5714 bp, Homo sapiens
gtaagcttgtcgagcgcgtcacagcaggcaggcctgggcccctcggctggatggtttctcagcggccctgggtgtcatggagccacactctggcaggctcgagctcaaggctcgctgcgaggagctgcagctggactgggccacgctgtcgctggagaagctgttgaaggagaagcaggccctgaagagccagatctcggagaagcagaggcactgcctggagctgcagatcagcattgtggagctagagaagagccagcggcagcaggagctcctgcagctcaagtcctgtgtgccgcctgacgacgccctgtccctgcacctgcgtgggaagggcgccctgggccgcgagctggagcctgacgccagccggctgcacctggagctggactgcaccaagttctcgctgcctcacttgagcagcatgagcccggagctctccatgaacggccaggctgctggctatgagctctgcggtgtgctgagccggccttcgtcgaagcagaacacgccccagtacctggcctcacccctggaccaggaggtggtgccctgtacccctagccacgtcggccggccgcgcctggagaagctgtctggcctagccgcacccgactacactaggctgtccccggccaagattgtgctgaggcggcacctgagccaggaccacacggtgcccggcaggccggctgccagtgagctgcattcgagagctgagcacaccaaggagaacggccttccctaccagagccccagcgtgcctggcagcatgaagctgagccctcaggacccgcggcccctgtcccctggggccttgcagcttgctggagagaagagcagtgagaagggcctgagagagcgcgcctacggcagcagcggggagctcatcaccagcctgcccatcagcatcccgctcagcaccgtgcagcccaacaagctcccggtcagcattcccctggccagcgtggtgctgcccagccgcgccgagagggcgaggagcacccccagtcccgtgctgcagccccgtgacccctcgtccacacttgaaaagcagattggtgctaatgcccacggtgctgggagcagaagccttgccctggcccccgcaggcttctcctacgctggctcggtggccatcagcggggccttggcgggcagcccggcctctctcacacctggagccgagccggccaccttggatgagtcctccagctctgggagcctttttgccaccgtggggtcccgcagctccacgccacagcaccccctgctgctggcacagccccggaactcgcttcctgcctctcccgcccaccagctctcctccagtccccggcttggtggggccgcccagggcccgttgcccgaggccagcaagggagacctgccctccgattccggcttctcagatcctgagagtgaagccaagaggaggattgtgttcaccatcaccactggtgcgggcagtgccaagcagtcgccctccagcaagcacagccccctgaccgccagcgcccgtggggactgtgtgccgagccacgggcaggacagtcgcaggcgcggccggcggaagcgagcatctgcggggacgcccagcttgagcgcaggcgtgtcccccaagcgccgagccctgccgtccgtcgctggccttttcacacagccttcggggtctcccctcaacctcaactccatggtcagtaacatcaaccagcccctggagattacagccatctcgtccccggagacctccctgaagagctcccctgtgccctaccaggaccacgaccagccccccgtgctcaagaaggagcggcctctgagccagaccaatggggcacactactccccactcacctcagacgaggagccaggctctgaggacgagcccagcagtgctcgaattgagagaaaaattgcaacaatctccttagaaagcaaatctcccccgaaaaccttggaaaatggtggtggcttggcgggaaggaagcccgcgcccgccggcgagccagtcaatagcagcaagtggaagtccaccttctcgcccatctccgacatcggcctggccaagtcggcggacagcccgctgcaggccagctccgccctcagccagaactccctgttcacgttccggcccgccctggaggagccctctgccgatgccaagctggccgctcaccccaggaaaggctttcccggctccctgtcgggggctgacggactcagcccgggcaccaaccctgccaacggctgcaccttcggcgggggcctggccgcggacctgagtttacacagcttcagtgatggtgcttctcttccccacaagggccccgaggcggccggcctgagctccccgctgagcttcccctcgcagcgcggcaaggagggctcggacgccaaccctttcctgagcaagaggcagctggacggcctggctgggctgaagggcgagggcagccgcggcaaggaggcaggggagggcggcctaccgctgtgcgggcccacggacaagaccccactgctgagcggcaaggccgccaaggcccgggaccgcgaggtcgacctcaagaatggccacaacctcttcatctctgcggcggccgtgcctcccggaagcctcctcagcggccccggcctggccccggcggcgtcctccgcaggcggcgcggcgtcctccgcccagacgcaccggtccttcctgggccccttcccgccgggaccgcagttcgcgctcggccccatgtccctgcaggccaacctcggctccgtggccggctcctccgtgctgcagtcgctgttcagctctgtgccggccgccgcaggcctggtgcacgtgtcgtccgctgccaccagactgaccaactcgcacgccatgggcagcttttccggggtggcaggcggcacagttggaggtaactaggatttctacctcaaccgcgagacctatgcaaggacggtgtggaccaactcgcgcccgcggcatggtgcccgccggcctgccgggctcccacccctggacggcagaggcaaggacggacgggagctccactgtgaatcggcggcacgcgccgcaggaggctgggactggtccagtttgtactgtcgatagttttagataaagtatttatcattttttaaaaagtataaacaattctgacttattttattccatctaagtggtaaaaggcaacttattgagaaatataaatatctatatatgagagctctatataaagacacgtgtctgcagggcgggcccgccagcggattcgccacagcctgccccggtgctatctcgtccccaggcccgcgcctgcctccacccgcttggtgctgactagacgctgacaacgccgaaccccgttctcggaaacgccgcccggccggctcccccgacgcgctgctcccgtaccaaaggcaggcccgtcgccaccacattcctcggaggcctccccgcggcctgagccccttcctgagcgccctggcgcctgccctgagctcttcacctttaccccggcactgtgaacccccagactgttcaccctccggggcgtgggttgcgcccttgcatgtgaaggggcctgcgcggtgacgcagctggccatgtgctgcgcgatggtgctgtgaggacggcgcgggcacgttgaacaagtgcatttacttttgtatttctcggctgtccatggctcgcagcatgccctgcgatgcggggcaggcctgtcgtgggtcccttggtgtttctgtacaggagagagtcacactaatgagtggcagtattttatagagatgtgatgagaatttataaatttcatagatttgacagcttttatttttagatggtataatgcacagtgaagaggaaagaaaagcgaggggaaaaaaccttatttattcaaacagtgcacaaaatggccccagcgtcagccccgaccctagacccctcagttgcagctcccagcagcccagacagagctgccggcgcccctgcctgccccacatcccttcctgtcagggccacgcctggcacccatcccttggagcctgtgctggttctcccagctgctgtgggtgtgctggggccagggtgcactgctgaaacctggcctctctggccctaggccccagggtgacgtcggccccccactctgcagccttggcgggtgcctgggactgggtgtggaaggagaggagctgaggccggggtgtagcaggcaggcagggccactccagtgcttctggagccctgagcagtcagggcctgggttgtctgagcagtggtggctctgtgccctccctggaggatgggatctgggagtctgagctccccgcatctggccctgggctgtgtggcacttgctgagcccaccttctcaagtgcttgctcctgtgagatggcatcggggagccccttccccaaggtgccacagatccaccctccagggagctgccagccctgtgttctggttcccaagggcaggatggacacacgtcacatccctaccacgtggcctccaaagggagccacggaggaaaggcttctgtggttgctaggtgggggagtcctgtgtgggagggcctgaagacccctgcttgtgcctggtgaggggggtgctgcctcccccagcccccaacaacctctcagacccccaccctccaacatagctgagttctgaagatggtgctccggacctgtcctcttaagtggtgcccagtgccctccccaccccacgttggtgctctcagctagaaggtgctgtgcctctgcctgagccccaagccccgagcctggccttcaggacaggcagcctgctctgtgtcgccacgggccggatacgccacagggttgatggcagagacggccgagtccctggtctagaacaagacacattctttaaacactgtattacttctgcctccctctaggtgacagtggcagtccgggtgccatcacgggtcctgcagatggccatgcagggctcctgcccacgcaggccaccgtatgttcaggacacgcactgggtctcagagccactggcccaggcagaagtctccttgagcccactgggtcatatgcgtgtcaccacacgtgaactagtgtggtggctgcctgcggacaccctcctgttctgagccctgggcctgtgttcttctcagacactcccagactgaggggtggtgtgtggcgggtggcagggtggctgtggagactggggatctggagcctggtgctggcacctggcctgagtttccgtgggcagctggcggggacctgtgctgctgctgctgactgtgggtgggcgggcggcgcctgggagtggctcttgctcaggaattgataggaaccctaaaaactaggataccccctcctcggcccatgaggcacgcacagtgacttatttaagacttcccccttaatttatctgcccccaggatgcgtcagtctgttcagtggtcagcaggccccccaccccccgccgactgccctcgccatcgtggtcagacccccctcccaacacaacacgctgctggtctgtgtcagcctttgtaacgtgggaggctctgccgtgtcttccgggtgaactgtatttggattgcgcgcattgtcacggtccgcccctgggctgcaggcgccccttcctctgggcacccctgcattctgcatccccacctctagacgctgtaataaacagactgttttcactcggaaaaaaaat

SEQ ID NO: 369439 - DNA, 6970 bp, Homo sapiens
gcggccgcgcgcgcggacatgggggagaagctggagctgagactgaagtcgcccgtgggggctgagcccgccgtctacccgtggccgctgccggtctacgataaacatcacgatgctgctcatgaaatcatcgagaccatccgatgggtctgtgaagaaatcccggatctcaagctcgctatggagaattacgttttaattgactatgacaccaaaagcttcgagagcatgcagaggctctgcgacaagtacaaccgtgccatcgacagcatccaccagctgtggaagggcaccacgcagcccatgaagctgaacacgcggccgtccactggactcctgcgccatatcctgcagcaggtctacaaccactcggtgaccgaccccgagaagctcaacaactacgagcccttctcccccgaggtgtacggggagacctccttcgacctggtggcccagatgattgatgagatcaagatgaccgacgacgacctgtttgtggacttggggagcggtgtgggccaggtcgtgctccaggttgctgctgccaccaactgcaaacatcactatggcgtcgagaaagcagacatcccggccaagtatgcggagaccatggaccgcgagttcaggaagtggatgaaatggtatggaaaaaagcatgcagaatacacattggagagaggcgatttcctctcagaagagtggagggagcgaatcgccaacacgagtgttatatttgtgaataattttgcctttggtcctgaggtggatcaccagctgaaggagcggtttgcaaacatgaaggaaggtggcagaatcgtgtcctcgaaaccctttgcacctctgaacttcagaataaacagtagaaacttgagtgacatcggcaccatcatgcgcgtggtggagctctcgcccctgaagggctcggtgtcgtggacggggaagccagtctcctactacctgcacactatcgaccgcaccatacttgaaaactatttttctagtctgaaaaacccaaaactcagggaggaacaggaggcagcccggcgccgccagcagcgcgagagcaagagcaacgcggcacgcccactaagggcccagagggcaaggtggccggccccgccgacgcccccatggactctggtgctgaggaagagaaggcgggagcagccaccgtgaagaagccgtctccctccaaagcccgcaagaagaagctaaacaagaaggggaggaagatggctggccgcaagcgcgggcgccccaagaagatgaacactgcgaaccccgagcggaagcccaagaagaaccaaagtgcagcggcactcccccaacccgctgctggtggcgcccaccccgcccgcgctgcagaagcttctagagtccttcaagatccagtacctgcagttcctggcatacacaaagaccccccagtacaaggccagcctgcaggagctgctgggccaggagaaggagaagaacgcccagctcctgggtgcggctcagcagctcctcagccactgccaggcccagaaggaggagatcaggaggctgtttcagcaaaaattggatgagctgggtgtgaaggcgctgacctacaacgacctgattcaagcgcagaaggagatctccgcccataaccagcagctgcgggagcagtcggagcagctggagcaggacaaccgcgcgctccgcggccagagcttgcagctgctcaaggctcgctgcgaggagctgcagctggactgggccacgctgtcgctggagaagctgttgaaggagaagcaggccctgaagagccagatctcggagaagcagaggcactgcctggagctgcagatcagcattgtggagctagagaagagccagcggcagcaggagctcctgcagctcaagtcctgtgtgccgcctgacgacgccctgtccctgcacctgcgtgggaagggcgccctgggccgcgagctggagcctgacgccagccggctgcacctggagctggactgcaccaagttctcgctgcctcacttgagcagcatgagcccggagctctccatgaacggccaggctgctggctatgagctctgcggtgtgctgagccggccttcgtcgaagcagaacacgccccagtacctggcctcacccctggaccaggaggtggtgccctgtacccctagccacgtcggccggccgcgcctggagaagctgtctggcctagccgcacccgactacactaggctgtccccggccaagattgtgctgaggcggcacctgagccaggaccacacggtgcccggcaggccggctgccagtgagctgcattcgagagctgagcacaccaaggagaacggccttccctaccagagccccagcgtgcctggcagcatgaagctgagccctcaggacccgcggcccctgtcccctggggccttgcagcttgctggagagaagagcagtgagaagggcctgagagagcgcgcctacggcagcagcggggagctcatcaccagcctgcccatcagcatcccgctcagcaccgtgcagcccaacaagctcccggtcagcattcccctggccagcgtggtgctgcccagccgcgccgagagggcgaggagcacccccagtcccgtgctgcagccccgtgacccctcgtccacacttgaaaagcagattggtgctaatgcccacggtgctgggagcagaagccttgccctggcccccgcaggcttctcctacgctggctcggtggccatcagcggggccttggcgggcagcccggcctctctcacacctggagccgagccggccaccttggatgagtcctccagctctgggagcctttttgccaccgtggggtcccgcagctccacgccacagcaccccctgctgctggcacagccccggaactcgcttcctgcctctcccgcccaccagctctcctccagtccccggcttggtggggccgcccagggcccgttgcccgaggccagcaagggagacctgccctccgattccggcttctcagatcctgagagtgaagccaagaggaggattgtgttcaccatcaccactggtgcgggcagtgccaagcagtcgccctccagcaagcacagccccctgaccgccagcgcccgtggggactgtgtgccgagccacgggcaggacagtcgcaggcgcggccggcggaagcgagcatctgcggggacgcccagcttgagcgcaggcgtgtcccccaagcgccgagccctgccgtccgtcgctggccttttcacacagccttcggggtctcccctcaacctcaactccatggtcagtaacatcaaccagcccctggagattacagccatctcgtccccggagacctccctgaagagctcccctgtgccctaccaggaccacgaccagccccccgtgctcaagaaggagcggcctctgagccagaccaatggggcacactactccccactcacctcagacgaggagccaggctctgaggacgagcccagcagtgctcgaattgagagaaaaattgcaacaatctccttagaaagcaaatctcccccgaaaaccttggaaaatggtggtggcttggcgggaaggaagcccgcgcccgccggcgagccagtcaatagcagcaagtggaagtccaccttctcgcccatctccgacatcggcctggccaagtcggcggacagcccgctgcaggccagctccgccctcagccagaactccctgttcacgttccggcccgccctggaggagccctctgccgatgccaagctggccgctcaccccaggaaaggctttcccggctccctgtcgggggctgacggactcagcccgggcaccaaccctgccaacggctgcaccttcggcgggggcctggccgcggacctgagtttacacagcttcagtgatggtgcttctcttccccacaagggccccgaggcggccggcctgagctccccgctgagcttcccctcgcagcgcggcaaggagggctcggacgccaaccctttcctgagcaagaggcagctggacggcctggctgggctgaagggcgagggcagccgcggcaaggaggcaggggagggcggcctaccgctgtgcgggcccacggacaagaccccactgctgagcggcaaggccgccaaggcccgggaccgcgaggtcgacctcaagaatggccacaacctcttcatctctgcggcggccgtgcctcccggaagcctcctcagcggccccggcctggccccggcggcgtcctccgcaggcggcgcggcgtcctccgcccagacgcaccggtccttcctgggccccttcccgccgggaccgcagttcgcgctcggccccatgtccctgcaggccaacctcggctccgtggccggctcctccgtgctgcagtcgctgttcagctctgtgccggccgccgcaggcctggtgcacgtgtcgtccgctgccaccagactgaccaactcgcacgccatgggcagcttttccggggtggcaggcggcacagttggaggtaactaggatttctacctcaaccgcgagacctatgcaaggacggtgtggaccaactcgcgcccgcggcatggtgcccgccggcctgccgggctcccacccctggacggcagaggcaaggacggacgggagctccactgtgaatcggcggcacgcgccgcaggaggctgggactggtccagtttgtactgtcgatagttttagataaagtatttatcattttttaaaaagtataaacaattctgacttattttattccatctaagtggtaaaaggcaacttattgagaaatataaatatctatatatgagagctctatataaagacacgtgtctgcagggcgggcccgccagcggattcgccacagcctgccccggtgctatctcgtccccaggcccgcgcctgcctccacccgcttggtgctgactagacgctgacaacgccgaaccccgttctcggaaacgccgcccggccggctcccccgacgcgctgctcccgtaccaaaggcaggcccgtcgccaccacattcctcggaggcctccccgcggcctgagccccttcctgagcgccctggcgcctgccctgagctcttcacctttaccccggcactgtgaacccccagactgttcaccctccggggcgtgggttgcgcccttgcatgtgaaggggcctgcgcggtgacgcagctggccatgtgctgcgcgatggtgctgtgaggacggcgcgggcacgttgaacaagtgcatttacttttgtatttctcggctgtccatggctcgcagcatgccctgcgatgcggggcaggcctgtcgtgggtcccttggtgtttctgtacaggagagagtcacactaatgagtggcagtattttatagagatgtgatgagaatttataaatttcatagatttgacagcttttatttttagatggtataatgcacagtgaagaggaaagaaaagcgaggggaaaaaaccttatttattcaaacagtgcacaaaatggccccagcgtcagccccgaccctagacccctcagttgcagctcccagcagcccagacagagctgccggcgcccctgcctgccccacatcccttcctgtcagggccacgcctggcacccatcccttggagcctgtgctggttctcccagctgctgtgggtgtgctggggccagggtgcactgctgaaacctggcctctctggccctaggccccagggtgacgtcggccccccactctgcagccttggcgggtgcctgggactgggtgtggaaggagaggagctgaggccggggtgtagcaggcaggcagggccactccagtgcttctggagccctgagcagtcagggcctgggttgtctgagcagtggtggctctgtgccctccctggaggatgggatctgggagtctgagctccccgcatctggccctgggctgtgtggcacttgctgagcccaccttctcaagtgcttgctcctgtgagatggcatcggggagccccttccccaaggtgccacagatccaccctccagggagctgccagccctgtgttctggttcccaagggcaggatggacacacgtcacatccctaccacgtggcctccaaagggagccacggaggaaaggcttctgtggttgctaggtgggggagtcctgtgtgggagggcctgaagacccctgcttgtgcctggtgaggggggtgctgcctcccccagcccccaacaacctctcagacccccaccctccaacatagctgagttctgaagatggtgctccggacctgtcctcttaagtggtgcccagtgccctccccaccccacgttggtgctctcagctagaaggtgctgtgcctctgcctgagccccaagccccgagcctggccttcaggacaggcagcctgctctgtgtcgccacgggccggatacgccacagggttgatggcagagacggccgagtccctggtctagaacaagacacattctttaaacactgtattacttctgcctccctctaggtgacagtggcagtccgggtgccatcacgggtcctgcagatggccatgcagggctcctgcccacgcaggccaccgtatgttcaggacacgcactgggtctcagagccactggcccaggcagaagtctccttgagcccactgggtcatatgcgtgtcaccacacgtgaactagtgtggtggctgcctgcggacaccctcctgttctgagccctgggcctgtgttcttctcagacacctcccaacacaacacgctgctggtctgtgtcagcctttgtaacgtgggaggctctgccgtgtcttccgggtgaactgtatttggattgcgcgcattgtcacggtccgcccctgggctgcaggcgccccttcctctgggcacccctgcattctgcatccccacctctagacgctgtaataaacagactgttttcactcggaaaaaaaat

SEQ ID NO: 369440 - DNA, 4754 bp, Homo sapiens
gcggccgcgcgcgcggacatgggggagaagctggagctgagactgaagtcgcccgtgggggctgagcccgccgtctacccgtggccgctgccggtctacgataaacatcacgatgctgctcatgaaatcatcgagaccatccgatgggtctgtgaagaaatcccggatctcaagctcgctatggagaattacgttttaattgactatgacaccaaaagcttcgagagcatgcagaggctctgcgacaagtacaaccgtgccatcgacagcatccaccagctgtggaagggcaccacgcagcccatgaagctgaacacgcggccgtccactggactcctgcgccatatcctgcagcaggtctacaaccactcggtgaccgaccccgagaagctcaacaactacgagcccttctcccccgaggtgtacggggagacctccttcgacctggtggcccagatgattgatgagatcaagatgaccgacgacgacctgtttgtggacttggggagcggtgtgggccaggtcgtgctccaggttgctgctgccaccaactgcaaacatcactatggcgtcgagaaagcagacatcccggccaagtatgcggagaccatggaccgcgagttcaggaagtggatgaaatggtatggaaaaaagcatgcagaatacacattggagagaggcgatttcctctcagaagagtggagggagcgaatcgccaacacgagtgttatatttgtgaataattttgcctttggtcctgaggtggatcaccagctgaaggagcggtttgcaaacatgaaggaaggtggcagaatcgtgtcctcgaaaccctttgcacctctgaacttcagaataaacagtagaaacttgagtgacatcggcaccatcatgcgcgtggtggagctctcgcccctgaagggctcggtgtcgtggacggggaagccagtctcctactacctgcacactatcgaccgcaccatacttgaaaactatttttctagtctgaaaaacccaaaactcagggaggaacaggaggcagcccggcgccgccagcagcgcgagagcaagagcaacgcggcacgcccactaagggcccagagggcaaggtggccggccccgccgacgcccccatggactctggtgctgaggaagagaaggcgggagcagccaccgtgaagaagccgtctccctccaaagcccgcaagaagaagctaaacaagaaggggaggaagatggctggccgcaagcgcgggcgccccaagaagatgaacactgcgaaccccgagcggaagcccaagaagaaccaaagtgcagcggcactcccccaacccgctgctggtggcgcccaccccgcccgcgctgcagaagcttctagagtccttcaagatccagtacctgcagttcctggcatacacaaagaccccccagtacaaggccagcctgcaggagctgctgggccaggagaaggagaagaacgcccagctcctgggtgcggctcagcagctcctcagccactgccaggcccagaaggaggagatcaggaggctgtttcagcaaaaattggatgagctgggtgtgaaggcgctgacctacaacgacctgattcaagcgcagaaggagatctccgcccataaccagcagctgcgggagcagtcggagcagctggagcaggacaaccgcgcgctccgcggccagagcttgcagctgctcaaggctcgctgcgaggagctgcagctggactgggccacgctgtcgctggagaagctgttgaaggagaagcaggccctgaagagccagatctcggagaagcagaggcactgcctggagctgcagatcagcattgtggagctagagaagagccagcggcagcaggagctcctgcagctcaagtcctgtgtgccgcctgacgacgccctgtccctgcacctgcgtgggaagggcgccctgggccgcgagctggagcctgacgccagccggctgcacctggagctggactgcaccaagttctcgctgcctcacttgagcagcatgagcccggagctctccatgaacggccaggctgctggctatgagctctgcggtgtgctgagccggccttcgtcgaagcagaacacgccccagtacctggcctcacccctggaccaggaggtggtgccctgtacccctagccacgtcggccggccgcgcctggagaagctgtctggcctagccgcacccgactacactaggctgtccccggccaagattgtgctgaggcggcacctgagccaggaccacacggtgcccggcaggccggctgccagtgagctgcattcgagagctgagcacaccaaggagaacggccttccctaccagagccccagcgtgcctggcagcatgaagctgagccctcaggacccgcggcccctgtcccctggggccttgcagcttgctggagagaagagcagtgagaagggcctgagagagcgcgcctacggcagcagcggggagctcatcaccagcctgcccatcagcatcccgctcagcaccgtgcagcccaacaagctcccggtcagcattcccctggccagcgtggtgctgcccagccgcgccgagagggcgaggagcacccccagtcccgtgctgcagccccgtgacccctcgtccacacttgaaaagcagattggtgctaatgcccacggtgctgggagcagaagccttgccctggcccccgcaggcttctcctacgctggctcggtggccatcagcggggccttggcgggcagcccggcctctctcacacctggagccgagccggccaccttggatgagtcctccagctctgggagcctttttgccaccgtggggtcccgcagctccacgccacagcaccccctgctgctggcacagccccggaactcgcttcctgcctctcccgcccaccagctctcctccagtccccggcttggtggggccgcccagggcccgttgcccgaggccagcaagggagacctgccctccgattccggcttctcagatcctgagagtgaagccaagaggaggattgtgttcaccatcaccactggtgcgggcagtgccaagcagtcgccctccagcaagcacagccccctgaccgccagcgcccgtggggactgtgtgccgagccacgggcaggacagtcgcaggcgcggccggcggaagcgagcatctgcggggacgcccagcttgagcgcaggcgtgtcccccaagcgccgagccctgccgtccgtcgctggccttttcacacagccttcggggtctcccctcaacctcaactccatggtcagtaacatcaaccagcccctggagattacagccatctcgtccccggagacctccctgaagagctcccctgtgccctaccaggaccacgaccagccccccgtgctcaagaaggagcggcctctgagccagaccaatggggcacactactccccactcacctcagacgaggagccaggctctgaggacgagcccagcagtgctcgaattgagagaaaaattgcaacaatctccttagaaagcaaatctcccccgaaaaccttggaaaatggtggtggcttggcgggaaggaagcccgcgcccgccggcgagccagtcaatagcagcaagtggaagtccaccttctcgcccatctccgacatcggcctggccaagtcggcggacagcccgctgcaggccagctccgccctcagccagaactccctgttcacgttccggcccgccctggaggagccctctgccgatgccaagctggccgctcaccccaggaaaggctttcccggctccctgtcgggggctgacggactcagcccgggcaccaaccctgccaacggctgcaccttcggcgggggcctggccgcggacctgagtttacacagcttcagtgatggtgcttctcttccccacaagggccccgaggcggccggcctgagctccccgctgagcttcccctcgcagcgcggcaaggagggctcggacgccaaccctttcctgagcaagaggcagctggacggcctggctgggctgaagggcgagggcagccgcggcaaggaggcaggggagggcggcctaccgctgtgcgggcccacggacaagaccccactgctgagcggcaaggccgccaaggcccgggaccgcgaggtcgacctcaagaatggccacaacctcttcatctctgcggcggccgtgcctcccggaagcctcctcagcggccccggcctggccccggcggcgtcctccgcaggcggcgcggcgtcctccgcccagacgcaccggtccttcctgggccccttcccgccgggaccgcagttcgcgctcggccccatgtccctgcaggccaacctcggctccgtggccggctcctccgtgctgcagtcgctgttcagctctgtgccggccgccgcaggcctggtgcacgtgtcgtccgctgccaccagactgaccaactcgcacgccatgggcagcttttccggggtggcaggcggcacagttggaggtaactaggatttctacctcaaccgcgagacctatgcaaggacggtgtggaccaactcgcgcccgcggcatggtgcccgccggcctgccgggctcccacccctggacggcagaggcaaggacggacgggagctccactgtgaatcggcggcacgcgccgcaggaggctgggactggtccagtttgtactgtcgatagttttagataaagtatttatcattttttaaaaagtataaaca

SEQ ID NO: 369441 - DNA, 3544 bp, Homo sapiens
gcggccgcgcgcgcggacatgggggagaagctggagctgagactgaagtcgcccgtgggggctgagcccgccgtctacccgtggccgctgccggtctacgataaacatcacgatgctgctcatgaaatcatcgagaccatccgatgggtctgtgaagaaatcccggatctcaagctcgctatggagaattacgttttaattgactatgacaccaaaagcttcgagagcatgcagaggctctgcgacaagtacaaccgtgccatcgacagcatccaccagctgtggaagggcaccacgcagcccatgaagctgaacacgcggccgtccactggactcctgcgccatatcctgcagcaggtctacaaccactcggtgaccgaccccgagaagctcaacaactacgagcccttctcccccgaggtgtacggggagacctccttcgacctggtggcccagatgattgatgagatcaagatgaccgacgacgacctgtttgtggacttggggagcggtgtgggccaggtcgtgctccaggttgctgctgccaccaactgcaaacatcactatggcgtcgagaaagcagacatcccggccaagtatgcggagaccatggaccgcgagttcaggaagtggatgaaatggtatggaaaaaagcatgcagaatacacattggagagaggcgatttcctctcagaagagtggagggagcgaatcgccaacacgagtgttatatttgtgaataattttgcctttggtcctgaggtggatcaccagctgaaggagcggtttgcaaacatgaaggaaggtggcagaatcgtgtcctcgaaaccctttgcacctctgaacttcagaataaacagtagaaacttgagtgacatcggcaccatcatgcgcgtggtggagctctcgcccctgaagggctcggtgtcgtggacggggaagccagtctcctactacctgcacactatcgaccgcaccatacttgaaaactatttttctagtctgaaaaacccaaaactcagggaggaacaggaggcagcccggcgccgccagcagcgcgagagcaagagcaacgcggcacgcccactaagggcccagagggcaaggtggccggccccgccgacgcccccatggactctggtgctgaggaagagaaggcgggagcagccaccgtgaagaagccgtctccctccaaagcccgcaagaagaagctaaacaagaaggggaggaagatggctggccgcaagcgcgggcgccccaagaagatgaacactgcgaaccccgagcggaagcccaagaagaaccaaagtgcagcggcactcccccaacccgctgctggtggcgcccaccccgcccgcgctgcagaagcttctagagtccttcaagatccagtacctgcagttcctggcatacacaaagaccccccagtacaaggccagcctgcaggagctgctgggccaggagaaggagaagaacgcccagctcctgggtgcggctcagcagctcctcagccactgccaggcccagaaggaggagatcaggaggctgtttcagcaaaaattggatgagctgggtgtgaaggcgctgacctacaacgacctgattcaagcgcagaaggagatctccgcccataaccagcagctgcgggagcagtcggagcagctggagcaggacaaccgcgcgctccgcggccagagcttgcagctgctcaaggctcgctgcgaggagctgcagctggactgggccacgctgtcgctggagaagctgttgaaggagaagcaggccctgaagagccagatctcggagaagcagaggcactgcctggagctgcagatcagcattgtggagctagagaagagccagcggcagcaggagctcctgcagctcaagtcctgtgtgccgcctgacgacgccctgtccctgcacctgcgtgggaagggcgccctgggccgcgagctggagcctgacgccagccggctgcacctggagctggactgcaccaagttctcgctgcctcacttgagcagcatgagcccggagctctccatgaacggccaggctgctggctatgagctctgcggtgtgctgagccggccttcgtcgaagcagaacacgccccagtacctggcctcacccctggaccaggaggtggtgccctgtacccctagccacgtcggccggccgcgcctggagaagctgtctggcctagccgcacccgactacactaggctgtccccggccaagattgtgctgaggcggcacctgagccaggaccacacggtgcccggcaggccggctgccagtgagctgcattcgagagctgagcacaccaaggagaacggccttccctaccagagccccagcgtgcctggcagcatgaagctgagccctcaggacccgcggcccctgtcccctggggccttgcagcttgctggagagaagagcagtgagaagggcctgagagagcgcgcctacggcagcagcggggagctcatcaccagcctgcccatcagcatcccgctcagcaccgtgcagcccaacaagctcccggtcagcattcccctggccagcgtggtgctgcccagccgcgccgagagggcgaggagcacccccagtcccgtgctgcagccccgtgacccctcgtccacacttgaaaagcagattggtgctaatgcccacggtgctgggagcagaagccttgccctggcccccgcaggcttctcctacgctggctcggtggccatcagcggggccttggcgggcagcccggcctctctcacacctggagccgagccggccaccttggatgagtcctccagctctgggagcctttttgccaccgtggggtcccgcagctccacgccacagcaccccctgctgctggcacagccccggaactcgcttcctgcctctcccgcccaccagctctcctccagtccccggcttggtggggccgcccagggcccgttgcccgaggccagcaagggagacctgccctccgattccggcttctcagatcctgagagtgaagccaagaggaggattgtgttcaccatcaccactggtgcgggcagtgccaagcagtcgccctccagcaagcacagccccctgaccgccagcgcccgtggggactgtgtgccgagccacgggcaggacagtcgcaggcgcggccggcggaagcgagcatctgcggggacgcccagcttgagcgcaggcgtgtcccccgtgctcaagaaggagcggcctctgagccagaccaatggggcacactactccccactcaactccatggtcagtaacatcaaccagcccctggagattacagccatctcgtccccggagacctccctgaagagctcccctgtgccctaccaggaccactgtgaatcggcggcacgcgccgcaggaggctgggactggtccagtttgtactgtcgatagttttagataaagtatttatcattttttaaaaagtataaacacattataaatttttatttttataaaaaaaattgaccggtcgaaactttattccttttatgag

SEQ ID NO: 369442 - DNA, 1986 bp, Homo sapiens
gcggccgcgcgcgcggacatgggggagaagctggagctgagactgaagtcgcccgtgggggctgagcccgccgtctacccgtggccgctgccggtctacgataaacatcacgatgctgctcatgaaatcatcgagaccatccgatgggtctgtgaagaaatcccggatctcaagctcgctatggagaattacgttttaattgactatgacaccaaaagcttcgagagcatgcagaggctctgcgacaagtacaaccgtgccatcgacagcatccaccagctgtggaagggcaccacgcagcccatgaagctgaacacgcggccgtccactggactcctgcgccatatcctgcagcaggtctacaaccactcggtgaccgaccccgagaagctcaacaactacgagcccttctcccccgaggtgtacggggagacctccttcgacctggtggcccagatgattgatgagatcaagatgaccgacgacgacctgtttgtggacttggggagcggtgtgggccaggtcgtgctccaggttgctgctgccaccaactgcaaacatcactatggcgtcgagaaagcagacatcccggccaagtatgcggagaccatggaccgcgagttcaggaagtggatgaaatggtatggaaaaaagcatgcagaatacacattggagagaggcgatttcctctcagaagagtggagggagcgaatcgccaacacgagtgttatatttgtgaataattttgcctttggtcctgaggtggatcaccagctgaaggagcggtttgcaaacatgaaggaaggtggcagaatcgtgtcctcgaaaccctttgcacctctgaacttcagaataaacagtagaaacttgagtgacatcggcaccatcatgcgcgtggtggagctctcgcccctgaagggctcggtgtcgtggacggggaagccagtctcctactacctgcacactatcgaccgcaccatacttgaaaactatttttctagtctgaaaaacccaaaactcagggaggaacaggaggcagcccggcgccgccagcagcgcgagagcaagagcaacgcggcacgcccactaagggcccagagggcaaggtggccggccccgccgacgcccccatggactctggtgctgaggaagagaaggcgggagcagccaccgtgaagaagccgtctccctccaaagcccgcaagaagaagctaaacaagaaggggaggaagatggctggccgcaagcgcgggcgccccaagaagatgaacactgcgaaccccgagcggaagcccaagaagaaccaaagtgcagcggcactcccccaacccgctgctggtggcgcccaccccgcccgcgctgcagaagcttctagagtccttcaagatccagtacctgcagttcctggcatacacaaagaccccccagtacaaggccagcctgcaggagctgctgggccaggagaaggagaagaacgcccagctcctgggtgcggctcagcagctcctcagccactgccaggcccagaaggaggagatcaggaggctgtttcagcaaaaattggatgagctgggtgtgaaggcgctgacctacaacgacctgattcaagcgcagaaggagatctccgcccataaccagcagctgcgggagcagtcggagcagctggagcaggacaaccgcgcgctccgcggccagagcttgcagctgctcaaggctcgctgcgaggagctgcagctggactgggccacgctgtcgctggagaagctgttgaaggagaagcaggccctgaagagccagatctcggagaagcagaggcactgcctggagctgcaggtgggctgcgcgcgaggctgcactccgtggtgtccgagcctctcccatcagcctccctgtgacgtcgttgagcctagggtggttgcggttgcagcagcctaggaagaaggtggaggaggacagttgggtggaggcttatggaaccttctgtct

SEQ ID NO: 369443 - DNA, 384 bp, Homo sapiens
tgaagcaaaaggggaataaccatagtattgagctcatagggttgtaggggaaatgaagtgatattgtccatgtaaagtaacttagggcaatgcatggcccatggtaagtgactaatacattactgtagtaggtataagatggtgatgggattccttaagaaaaattccataaaattgacaaaattagggcgctgttcttagttagctgctgtgtgtgtgtgtggtttgtatgtgtgtgttgtgggtggggggtgacagaagattactatagccagcatcagtttatcaagcatgaatttaaagaatgaattgaaagaaacaattcgtccagcttttatgtgccaggtactgtagtaagcatgttagatacacattgtatttagt

SEQ ID NO: 369444 - DNA, 2200 bp, Homo sapiens
gatagataatagtgtaaaatggacttgccttgcttctactgatgtttttcacatgtttcccgtaactgatacttttcatcagttgtggaattcccataattgcagggattccttttctgtccttaggatcccctgaaggccttttaatcttgttcaccaaatgtgtgttccttgctgacacaaaatggtctctaccatcagtggtggtactcttttttccccctttgttcaattcaatctcaggaacgtatttcctacattaataaatatttactgagcacctaccaaatgccaagcactttcctagaacaaaagttcttttgaaacaaaaaagtatcttggcagttaaggcaaaatgacctaaagaagttttaaaatgaaaggtctcctatatttcagggtctttgagatgaaaccctgcaagtagacttacgtgaatgatttttgctgtggtaagtatacaaatgcagtgggagttgccagactttaaaagacgtgaataacaatcatataaaatgccagacattgttgtggaaaagagaaagaagataccctactagggggtttttacctcctttaagaaacagactaaaactagttttctcaagtgcctgaatatatatggtttaaataacaatatacaacactttcaaaataaaatctaggaatgtttacatatgcttttaatctcaaagtctaatgtcttgagaaaagtaaatctgtgagatcactgactcacagaattttagcaaatagaaaaaatccagtatcttcagaacacaagggctgatcttttgtcccctacccgcaagacattgcttggtaccaaaatagaaagttatttttttaagggggaattatgggttttttctgagaacagataatatgaaaatagttaatagtattggtatgaccacatattttcctaattcaaaataaggacgctatgctctacaagagtattttaaaacaataatgagataatgtttgaaatagaaacaaaatatttgtgagtatttctggagtatctggctggtccatatcaactggaatacagataacccaggtgtagatttctttgctcttagagggtgaaaaaagctttttgttgttttattttcagttatattggttttaattatccagcctccagcaaaattaaatacatatggattcaaagctgatagctaccatagtttgccaaaatacaaccagatgttttcaaaatgtggaaaaattgtttttggactctacaggaatagaacccttcccccaacactgggaaaaggttgttttctaggcattttcagtgttactgatatcccaggaactgtcagatcaccacccggcacatttttcatttttatctgcacttgtcttacatgcgaaatattttcttaattcatgtctcttttttgtagcatctttttttcccaagtaaataccaaaaaaaaaaaagcccaaaatacattttttaaagctaacttaaaactgaatattgtattctagtaaaactaatcaagggaaaagctttgagtaacaatatatttcacaattttgcatttagacacatttacagtgaagaaatataattaaaaacaaaaccttctatcaatccagaaattctctccacaaaggtagtaacgaaagaaacactttcattattgactaagcattaaaccagaatgtgacgcatatcacaggcaatccactaagagactgcaaagactctcgccactatgtaaccaggcagataccacccattacaggaatctcatccctgtgtagccaagcagataccacccattacatatacgttttcaggacaagcaataacgaatccttaaggaagaagatttgacaacaccttttgtcacacataattcatcctaactttacctggtaaatggagtgaccatctgtgttagcttattggccttattcagagaaaaataaatttctgtcttcatgacaggaggtagttttgcaactggaagcaagatctcaccaaagttaggaccccaccttcccaccagagctgggagatgtccttggaaaatacattcttgcatcataaaggtgacaaaaagcctatctagtcttcaaaaggatttaaagacatttcaaagagaggagaaagtacttatagttaaaagttttctaaagtaaaagctctgagaaaaagaaaggaaaagaaatc

SEQ ID NO: 369445 - DNA, 2235 bp, Homo sapiens
ggaaaatttcagcagctggggccatgtaatttaaaacctctgaaaagtgtgctgcggtccgtgcacagcattagtataacgtgagggctgaatgcagcccattctctggagaacttcctcacacaccgcagcaaagagaagactgaaagacaaacctgggtgcagccagagaggtccagatagatgagcttgtggcatccattccccaagttcagcctagggactccacgtaccccagctgggtctcattgttccagaactgcattagttaagattacccagacttggatttcaaaggaatactttcattgttccgtctgtaacacgaagtaattggggccagctggatgtcaggatgcgtgtggttaccattgtaatcttgctctgcttttgcaaagcggctgagctgcgcaaagcaagcccaggcagtgtgagaagccgagtgaatcatggccgggcgggtggaggccggagaggctccaacccggtcaaacgctacgcaccaggcctcccgtgtgacgtgtacacatatctccatgagaaatacttagattgtcaagaaagaaaattagtttatgtgctgcctggttggcctcaggatttgctgcacatgctgctagcaagaaacaagatccgcacattgaagaacaacatgttttccaagtttaaaaagctgaaaagcctggatctgcagcagaatgagatctctaaaattgagagtgaggcgttctttggtttaaacaaactcaccaccctcttactgcagcacaaccagatcaaagtcttgacggaggaagtgttcatttacacacctctcttgagctacctgcgtctttatgacaacccctggcactgtacttgtgagatagaaacgcttatttcaatgttgcagattcccaggaaccggaatttggggaactacgccaagtgtgaaagtccacaagaacaaaaaaataaaaaactgcggcagataaaatctgaacagttgtgtaatgaagaagaaaaggaacaattggacccgaaaccccaagtgtcagggagacccccagtcatcaagcctgaggtggactcaactttttgccacaattatgtgtttcccatacaaacactggactgcaaaaggaaagagttgaaaaaagtgccaaacaacatccctccagatattgttaaacttgacttgtcatacaataaaatcaaccaacttcgacccaaggaatttgaagatgttcatgagctgaagaaattaaacctcagcagcaatggcattgaattcatcgatcctgggtctttgagatgaaaccctgcaagtagacttacgtgaatgatttttgctgtgccgcttttttagggctcacacatttagaagaattagatttatcaaacaacagtctgcaaaactttgactatggcgtattagaagacttgtattttttgaaactcttgtggctcagagataacccttggagatgtgactacaacattcactacctctactactggttaaagcaccactacaatgtccattttaatggcctggaatgcaaaacgcctgaagaatacaaaggatggtctgtgggaaaatatattagaagttactatgaagaatgccccaaagacaagttaccagcatatcctgagtcatttgaccaagacacagaagatgatgaatgggaaaaaaaacatagagatcacaccgcaaagaagcaaagcgtaataattactatagtaggataaggtagaaattgttctgattgtaattagttttgtattttctatactggtgttagaaaacatatgtttacatttgattaactgtgttgcctatttatgcagggtaatccagctaaaggaagctttctttaattataagtattattgtgactattatagtaatcaagagaatgctatcatcctgcttgcctgtccatttgtggaacagcatctggtgatatgcaattccacactggtaacctgcagcagttgggtcctaatgatggcattagactttcataatgtcctgtataaatgtttttactgcttttagaaaataaagaaaaaaaacttggttcatgtttacatgcctttcgatagctgtttgtgcatacttaaagatgatcaaaatgattttatacaaatgctgttataataaaatgtcattccctacccctctactttttttcagtaagtcatcttatacattaaataaatttccatttctgatttctgtgcattcca

SEQ ID NO: 369446 - DNA, 2182 bp, Homo sapiens
ggaaaatttcagcagctggggccatgtaatttaaaacctctgaaaagtgtgctgcggtccgtgcacagcattagtataacgtgagggctgaatgcagcccattctctggagaacttcctcacacaccgcagcaaagagaagactgaaagacaaacctgggtgcagccagagaggtccagatagatgagcttgtggcatccattccccaagttcagcctagggactccacgtaccccagctgggtctcattgttccagaactgcattagttaagattacccagacttggatttcaaaggaatactttcattgttccgtctgtaacacgaagtaattggggccagctggatgtcaggatgcgtgtggttaccattgtaatcttgctctgcttttgcaaagcggctgagctgcgcaaagcaagcccaggcagtgtgagaagccgagtgaatcatggccgggcgggtggaggccggagaggctccaacccggtcaaacgctacgcaccaggcctcccgtgtgacgtgtacacatatctccatgagaaatacttagattgtcaagaaagaaaattagtttatgtgctgcctggttggcctcaggatttgctgcacatgctgctagcaagaaacaagatccgcacattgaagaacaacatgttttccaagtttaaaaagctgaaaagcctggatctgcagcagaatgagatctctaaaattgagagtgaggcgttctttggtttaaacaaactcaccaccctcttactgcagcacaaccagatcaaagtcttgacggaggaagtgttcatttacacacctctcttgagctacctgcgtctttatgacaacccctggcactgtacttgtgagatagaaacgcttatttcaatgttgcagattcccaggaaccggaatttggggaactacgccaagtgtgaaagtccacaagaacaaaaaaataaaaaactgcggcagataaaatctgaacagttgtgtaatgaagaagaaaaggaacaattggacccgaaaccccaagtgtcagggagacccccagtcatcaagcctgaggtggactcaactttttgccacaattatgtgtttcccatacaaacactggactgcaaaaggaaagagttgaaaaaagtgccaaacaacatccctccagatattgttaaacttgacttgtcatacaataaaatcaaccaacttcgacccaaggaatttgaagatgttcatgagctgaagaaattaaacctcagcagcaatggcattgaattcatcgatcctgccgcttttttagggctcacacatttagaagaattagatttatcaaacaacagtctgcaaaactttgactatggcgtattagaagacttgtattttttgaaactcttgtggctcagagataacccttggagatgtgactacaacattcactacctctactactggttaaagcaccactacaatgtccattttaatggcctggaatgcaaaacgcctgaagaatacaaaggatggtctgtgggaaaatatattagaagttactatgaagaatgccccaaagacaagttaccagcatatcctgagtcatttgaccaagacacagaagatgatgaatgggaaaaaaaacatagagatcacaccgcaaagaagcaaagcgtaataattactatagtaggataaggtagaaattgttctgattgtaattagttttgtattttctatactggtgttagaaaacatatgtttacatttgattaactgtgttgcctatttatgcagggtaatccagctaaaggaagctttctttaattataagtattattgtgactattatagtaatcaagagaatgctatcatcctgcttgcctgtccatttgtggaacagcatctggtgatatgcaattccacactggtaacctgcagcagttgggtcctaatgatggcattagactttcataatgtcctgtataaatgtttttactgcttttagaaaataaagaaaaaaaacttggttcatgtttacatgcctttcgatagctgtttgtgcatacttaaagatgatcaaaatgattttatacaaatgctgttataataaaatgtcattccctacccctctactttttttcagtaagtcatcttatacattaaataaatttccatttctgatttctgtgcattcca

SEQ ID NO: 369447 - DNA, 2030 bp, Homo sapiens
ggaaaatttcagcagctggggccatgtaatttaaaacctctgaaaagtgtgctgcggtccgtgcacagcattagtataacgtgagggctgaatgcagcccattctctggagaacttcctcacacaccgcagcaaagagaagactgaaagacaaacctgggtgcagccagagaggtccagatagatgagcttgtggcatccattccccaagttcagcctagggactccacgtaccccagctgggtctcattgttccagaactgcattagttaagattacccagacttggatttcaaaggaatactttcattgttccgtctgtaacacgaagtaattggggccagctggatgtcaggcctcccgtgtgacgtgtacacatatctccatgagaaatacttagattgtcaagaaagaaaattagtttatgtgctgcctggttggcctcaggatttgctgcacatgctgctagcaagaaacaagatccgcacattgaagaacaacatgttttccaagtttaaaaagctgaaaagcctggatctgcagcagaatgagatctctaaaattgagagtgaggcgttctttggtttaaacaaactcaccaccctcttactgcagcacaaccagatcaaagtcttgacggaggaagtgttcatttacacacctctcttgagctacctgcgtctttatgacaacccctggcactgtacttgtgagatagaaacgcttatttcaatgttgcagattcccaggaaccggaatttggggaactacgccaagtgtgaaagtccacaagaacaaaaaaataaaaaactgcggcagataaaatctgaacagttgtgtaatgaagaagaaaaggaacaattggacccgaaaccccaagtgtcagggagacccccagtcatcaagcctgaggtggactcaactttttgccacaattatgtgtttcccatacaaacactggactgcaaaaggaaagagttgaaaaaagtgccaaacaacatccctccagatattgttaaacttgacttgtcatacaataaaatcaaccaacttcgacccaaggaatttgaagatgttcatgagctgaagaaattaaacctcagcagcaatggcattgaattcatcgatcctgccgcttttttagggctcacacatttagaagaattagatttatcaaacaacagtctgcaaaactttgactatggcgtattagaagacttgtattttttgaaactcttgtggctcagagataacccttggagatgtgactacaacattcactacctctactactggttaaagcaccactacaatgtccattttaatggcctggaatgcaaaacgcctgaagaatacaaaggatggtctgtgggaaaatatattagaagttactatgaagaatgccccaaagacaagttaccagcatatcctgagtcatttgaccaagacacagaagatgatgaatgggaaaaaaaacatagagatcacaccgcaaagaagcaaagcgtaataattactatagtaggataaggtagaaattgttctgattgtaattagttttgtattttctatactggtgttagaaaacatatgtttacatttgattaactgtgttgcctatttatgcagggtaatccagctaaaggaagctttctttaattataagtattattgtgactattatagtaatcaagagaatgctatcatcctgcttgcctgtccatttgtggaacagcatctggtgatatgcaattccacactggtaacctgcagcagttgggtcctaatgatggcattagactttcataatgtcctgtataaatgtttttactgcttttagaaaataaagaaaaaaaacttggttcatgtttacatgcctttcgatagctgtttgtgcatacttaaagatgatcaaaatgattttatacaaatgctgttataataaaatgtcattccctacccctctactttttttcagtaagtcatcttatacattaaataaatttccatttctgatttctgtgcattcca

SEQ ID NO: 369448 - DNA, 1247 bp, Homo sapiens
ctgggacatgccattctaggctccaggtacccacacacgcatgctgtctacaacttccaggaagatagtaacattcccatttacagatgaggaaaatgaggctcaaagaggttcagtcacttgaccatggatctcacagagttgaaaaaagtgccaaacaacatccctccagatattgttaaacttgacttgtcatacaataaaatcaaccaacttcgacccaaggaatttgaagatgttcatgagctgaagaaattaaacctcagcagcaatggcattgaattcatcgatcctgggtctttgagatgaaaccctgcaagtagacttacgtgaatgatttttgctgtgccgcttttttagggctcacacatttagaagaattagatttatcaaacaacagtctgcaaaactttgactatggcgtattagaagacttgtattttttgaaactcttgtggctcagagataacccttggagatgtgactacaacattcactacctctactactggttaaagcaccactacaatgtccattttaatggcctggaatgcaaaacgcctgaagaatacaaaggatggtctgtgggaaaatatattagaagttactatgaagaatgccccaaagacaagttaccagcatatcctgagtcatttgaccaagacacagaagatgatgaatgggaaaaaaaacatagagatcacaccgcaaagaagcaaagcgtaataattactatagtaggataaggtagaaattgttctgattgtaattagttttgtattttctatactggtgttagaaaacatatgtttacatttgattaactgtgttgcctatttatgcagggtaatccagctaaaggaagctttctttaattataagtattattgtgactattatagtaatcaagagaatgctatcatcctgcttgcctgtccatttgtggaacagcatctggtgatatgcaattccacactggtaacctgcagcagttgggtcctaatgatggcattagactttcataatgtcctgtataaatgtttttactgcttttagaaaataaagaaaaaaaacttggttcatgtttacatgcctttcgatagctgtttgtgcatacttaaagatgatcaaaatgattttatacaaatgctgttataataaaatgtcattccctacccctctactttttttcagtaagtcatcttatacattaaataaatttccatttctgatttctgtgcattcca

SEQ ID NO: 369449 - DNA, 2163 bp, Homo sapiens
ggaaaatttcagcagctggggccatgtaatttaaaacctctgaaaagtgtgctgcggtccgtgcacagcattagtataacgtgagggctgaatgcagcccattctctggagaacttcctcacacaccgcagcaaagagaagactgaaagacaaacctgggtgcagccagagaggtccagatagatgagcttgtggcatccattccccaagttcagcctagggactccacgtaccccagctgggtctcattgttccagaactgcattagttaagattacccagacttggatttcaaaggaatactttcattgttccgtctgtaacacgaagtaattggggccagctggatgtcaggatgcgtgtggttaccattgtaatcttgctctgcttttgcaaagcggctgagctgcgcaaagcaagcccaggcagtgtgagaagccgagtgaatcatggccgggcgggtggaggccggagaggctccaacccggtcaaacgctacgcaccaggcctcccgtgtgacgtgtacacatatctccatgagaaatacttagattgtcaagaaagaaaattagtttatgtgctgcctggttggcctcaggatttgctgcacatgctgctagcaagaaacaagatccgcacattgaagaacaacatgttttccaagtttaaaaagctgaaaagcctggatctgcagcagaatgagatctctaaaattgagagtgaggcgttctttggtttaaacaaactcaccaccctcttactgcagcacaaccagatcaaagtcttgacggaggaagtgttcatttacacacctctcttgagctacctgcgtctttatgacaacccctggcactgtacttgtgagatagaaacgcttatttcaatgttgcagattcccaggaaccggaatttggggaactacgccaagtgtgaaagtccacaagaacaaaaaaataaaaaactgcggcagataaaatctgaacagttgtgtaatgaagaagaaaaggaacaattggacccgaaaccccaagtgtcagggagacccccagtcatcaagcctgaggtggactcaactttttgccacaattatgtgtttcccatacaaacactggactgcaaaaggaaagagttgaaaaaagtgccaaacaacatccctccagatattgttaaacttgacttgtcatacaataaaatcaaccaacttcgacccaaggaatttgaagatgttcatgagctgaagaaattaaacctcagcagcaatggcattgaattcatcgatcctgggtctttgagatgaaaccctgcaagtagacttacgtgaatgatttttgctgtgccgcttttttagggctcacacatttagaagaattagatttatcaaacaacagtctgcaaaactttgactatggcgtattagaagacttgtattttttgaaactcttgtggctcagagataacccttggagatgtgactacaacattcactacctctactactggttaaagcaccactacaatgtccattttaatggcctggaatgcaaaacgcctgaagaatacaaaggatggtctgtgggaaaatatattagaagttactatgaagaatgccccaaagacaagttaccagcatatcctgagtcatttgaccaagacacagaagatgatgaatgggaaaaaaaacatagagatcacaccgcaaagaagcaaagcgtaataattactatagtaggataaggtagaaattgttctgattgtaattagttttgtattttctatactggtgttagaaaacatatgtttacatttgattaactgtgttgcctatttatgcagggtaatccagctaaaggaagctttctttaattataagtattattgtgactattatagtaatcaagagaatgctatcatcctgcttgcctgtccatttgtggaacagcatctggtgatatgcaattccacactggtaacctgcagcagttgggtcctaatgatggcattagactttcataatgtcctgtataaatgtttttactgcttttagaaaataaagaaaaaaaacttggttcatgtttacatgcctttcgatagctgtttgtgcatacttaaagatgatcaaaatgattttatacaaatgctgttataataaaatgtcattcccta

SEQ ID NO: 369450 - DNA, 3084 bp, Homo sapiens
ggaaaatttcagcagctggggccatgtaatttaaaacctctgaaaagtgtgctgcggtccgtgcacagcattagtataacgtgagggctgaatgcagcccattctctggagaacttcctcacacaccgcagcaaagagaagactgaaagacaaacctgggtgcagccagagaggtccagatagatgagcttgtggcatccattccccaagttcagcctagggactccacgtaccccagctgggtctcattgttccagaactgcattagttaagattacccagacttggatttcaaaggaatactttcattgttccgtctgtaacacgaagtaattggggccagctggatgtcaggatgcgtgtggttaccattgtaatcttgctctgcttttgcaaagcggctgagctgcgcaaagcaagcccaggcagtgtgagaagccgagtgaatcatggccgggcgggtggaggccggagaggctccaacccggtcaaacgctacgcaccaggcctcccgtgtgacgtgtacacatatctccatgagaaatacttagattgtcaagaaagaaaattagtttatgtgctgcctggttggcctcaggatttgctgcacatgctgctagcaagaaacaagatccgcacattgaagaacaacatgttttccaagtttaaaaagctgaaaagcctggatctgcagcagaatgagatctctaaaattgagagtgaggcgttctttggtttaaacaaactcaccaccctcttactgcagcacaaccagatcaaagtcttgacggaggaagtgttcatttacacacctctcttgagctacctgcgtctttatgacaacccctggcactgtacttgtgagatagaaacgcttatttcaatgttgcagattcccaggaaccggaatttggggaactacgccaagtgtgaaagtccacaagaacaaaaaaataaaaaactgcggcagataaaatctgaacagttgtgtaatgaagaagaaaaggaacaattggacccgaaaccccaagtgtcagggagacccccagtcatcaagcctgaggtggactcaactttttgccacaattatgtgtttcccatacaaacactggactgcaaaaggaaagagttgaaaaaagtgccaaacaacatccctccagatattgttaaacttgacttgtcatacaataaaatcaaccaacttcgacccaaggaatttgaagatgttcatgagctgaagaaattaaacctcagcagcaatggcattgaattcatcgatcctgggtctttgagatgaaaccctgcaagtagacttacgtgaatgatttttgctgtggtaagtatacaaatgcagtgggagttgccagactttaaaagacgtgaataacaatcatataaaatgccagacattgttgtggaaaagagaaagaagataccctactagggggtttttacctcctttaagaaacagactaaaactagttttctcaagtgcctgaatatatatggtttaaataacaatatacaacactttcaaaataaaatctaggaatgtttacatatgcttttaatctcaaagtctaatgtcttgagaaaagtaaatctgtgagatcactgactcacagaattttagcaaatagaaaaaatccagtatcttcagaacacaagggctgatcttttgtcccctacccgcaagacattgcttggtaccaaaatagaaagttatttttttaagggggaattatgggttttttctgagaacagataatatgaaaatagttaatagtattggtatgaccacatattttcctaattcaaaataaggacgctatgctctacaagagtattttaaaacaataatgagataatgtttgaaatagaaacaaaatatttgtgagtatttctggagtatctggctggtccatatcaactggaatacagataacccaggtgtagatttctttgctcttagagggtgaaaaaagctttttgttgttttattttcagttatattggttttaattatccagcctccagcaaaattaaatacatatggattcaaagctgatagctaccatagtttgccaaaatacaaccagatgttttcaaaatgtggaaaaattgtttttggactctacaggaatagaacccttcccccaacactgggaaaaggttgttttctaggcattttcagtgttactgatatcccaggaactgtcagatcaccacccggcacatttttcatttttatctgcacttgtcttacatgcgaaatattttcttaattcatgtctcttttttgtagcatctttttttcccaagtaaataccaaaaaaaaaaaagcccaaaatacattttttaaagctaacttaaaactgaatattgtattctagtaaaactaatcaagggaaaagctttgagtaacaatatatttcacaattttgcatttagacacatttacagtgaagaaatataattaaaaacaaaaccttctatcaatccagaaattctctccacaaaggtagtaacgaaagaaacactttcattattgactaagcattaaaccagaatgtgacgcatatcacaggcaatccactaagagactgcaaagactctcgccactatgtaaccaggcagataccacccattacaggaatctcatccctgtgtagccaagcagataccacccattacatatacgttttcaggacaagcaataacgaatccttaaggaagaagatttgacaacaccttttgtcacacataattcatcctaactttacctggtaaatggagtgaccatctgtgttagcttattggccttattcagagaaaaataaatttctgtcttcatgacaggaggtagttttgcaactggaagcaagatctcaccaaagttaggaccccaccttcccaccagagctgggagatgtccttggaaaatacattcttgcatcataaaggtgacaaaaagcctatctagtcttcaaaaggatttaaagacatttcaaagagaggagaaagtacttatagttaaaagttttctaaagtaaaagctctgagaaaaagaaaggaaaagaaatc

SEQ ID NO: 369451 - DNA, 1288 bp, Homo sapiens
ggaaaatttcagcagctggggccatgtaatttaaaacctctgaaaagtgtgctgcggtccgtgcacagcattagtataacgtgagggctgaatgcagcccattctctggagaacttcctcacacaccgcagcaaagagaagactgaaagacaaacctgggtgcagccagagaggtccagatagatgagcttgtggcatccattccccaagttcagcctagggactccacgtaccccagctgggtctcattgttccagaactgcattagttaagattacccagacttggatttcaaaggaatactttcattgttccgtctgtaacacgaagtaattggggccagctggatgtcaggatgcgtgtggttaccattgtaatcttgctctgcttttgcaaagcggctgagctgcgcaaagcaagcccaggcagtgtgagaagccgagtgaatcatggccgggcgggtggaggccggagaggctccaacccggtcaaacgctacgcaccaggcctcccgtgtgacgtgtacacatatctccatgagaaatacttagattgtcaagaaagaaaattagtttatgtgctgcctggttggcctcaggatttgctgcacatgctgctagcaagaaacaagatccgcacattgaagaacaacatgttttccaagtttaaaaagctgaaaagcctggatctgcagcagaatgagatctctaaaattgagagtgaggcgttctttggtttaaacaaactcaccaccctcttactgcagcacaaccagatcaaagtcttgacggaggaagtgttcatttacacacctctcttgagctacctgcgtctttatgacaacccctggcactgtacttgtgagatagaaacgcttatttcaatgttgcagattcccaggaaccggaatttggggaactacgccaagtgtgaaagtccacaagaacaaaaaaataaaaaactgcggcagataaaatctgaacagttgtgtaatgaagaagaaaaggaacaattggacccgaaaccccaagtgtcagggagacccccagtcatcaagcctgaggtggactcaactttttgccacaattatgtgtttcccatacaaacactggactgcaaaaggaaaggtttgtacttttcttactttttcattttcatgaataacttgaaatgctctttgaatcttataatcctccctacatcccaccatgtcttggaattcgtgatgtcacttccaccagaaatccttccctattgacaatggaatttaccacaagtttttctgggg

SEQ ID NO: 369452 - DNA, 909 bp, Homo sapiens
caggaagtaagtacagccctggaattcccctcctactggaaaactggacaacaagcaatacatgattatgatccctaggaaaagagaaacaaatacggttcattccagcctgaagacattttcgatagcggcatgctgggcagttttttcttcgaattttatcgatgatgcaatcattccttccagcacatagagacggggtctcgttatgttgctcaggctggtctcaaactccaggcctcaagcaatcctcccatcttggcctcccaaattgctgggataataggtgtgagccacagtgcacagcccattttccttgagccacagtgcccagcccattttcctgtcaacccttctgataagacaatgagatatcttattttggagttcctgtgtcttctactacttggtaaattccctttctaactaatagaaagatgagtcttcaagtcagctgaaattttgtgactttgttttgtttatatggtattcatttttgtggttaaagtctatttttggcaaataattctggttttctatttatggtgggtgtggtagccagcctcccaagatggcccccagtgatctctgcctccttgaatgcatggtcttgtgcagtccctttccgtcctttaccaagattggtctgtgtggccaataaaatatggcagaagtgatggcatgttacatgtgaaatcagataataaaagacaatagttctgctgcattgatcacatactctcttggatcatttgttatgggggatgtaaattataatgctactcacgttactccacagagaccacaaggatgccagctttggccagtgtagtagtcccacctattgattagagtcaaaagtaaagcccacccctgcctagtgtaaagctctgaataaagtgcaacaac

SEQ ID NO: 369453 - DNA, 391 bp, Homo sapiens
caggaagtaagtacagccctggaattcccctcctactggaaaactggacaacaagcaatacatgattatgatccctaggaaaagagaaacaaatacgaaccagtccaaatgcccatcaatcaacgagtggataaagaaaatgtggtatatatataccatggaatactactcagccacaaaaaggaacaaaataatggcatttgcagcaacctggatggaactggaaaccattattgttcattccagcctgaagacattttcgatagcggcatgctgggcagttttttcttcgaattttatcgatgatgcaatcattccttccagcacataggtaattgtgctgtcctatatggaataaaaggcactattaaagtttcacaggtcttcaaac

SEQ ID NO: 369454 - DNA, 882 bp, Homo sapiens
caggaagtaagtacagccctggaattcccctcctactggaaaactggacaacaagcaatacatgattatgatccctaggaaaagagaaacaaatacggttcattccagcctgaagacattttcgatagcggcatgctgggcagttttttcttcgaattttatcgatgatgcaatcattccttccagcacatagagacggggtctcgttatgttgctcaggctggtctcaaactccaggcctcaagcaatcctcccatcttggcctcccaaattgctgggataataggtgtgagccacagtgcacagcccattttccctgtcaacccttctgataagacaatgagatatcttattttggagttcctgtgtcttctactacttggtaaattccctttctaactaatagaaagatgagtcttcaagtcagctgaaattttgtgactttgttttgtttatatggtattcatttttgtggttaaagtctatttttggcaaataattctggttttctatttatggtgggtgtggtagccagcctcccaagatggcccccagtgatctctgcctccttgaatgcatggtcttgtgcagtccctttccgtcctttaccaagattggtctgtgtggccaataaaatatggcagaagtgatggcatgttacatgtgaaatcagataataaaagacaatagttctgctgcattgatcacatactctcttggatcatttgttatgggggatgtaaattataatgctactcacgttactccacagagaccacaaggatgccagctttggccagtgtagtagtcccacctattgattagagtcaaaagtaaagcccacccctgcctagtgtaaagctctgaataaagtgcaacaac

SEQ ID NO: 369455 - DNA, 460 bp, Homo sapiens
caggaagtaagtacagccctggaattcccctcctactggaaaactggacaacaagcaatacatgattatgatccctaggaaaagagaaacaaatacgatccatccactgccttttcaactgcatttatatttccatcccttgtttttaaacttactaaatatacagaaccagtccaaatgcccatcaatcaacgagtggataaagaaaatgtggtatatatataccatggaatactactcagccacaaaaaggaacaaaataatggcatttgcagcaacctggatggaactggaaaccattattgttcattccagcctgaagacattttcgatagcggcatgctgggcagttttttcttcgaattttatcgatgatgcaatcattccttccagcacataggtaattgtgctgtcctatatggaataaaaggcactattaaagtttcacaggtcttcaaac

SEQ ID NO: 369456 - DNA, 930 bp, Homo sapiens
ctttttcttataaccttttagagagacagagaacagaaatcaatgtataattaatatcagtaatatggtgggtccctattctttgaaagtttgggcttttcatgtagattgagatcaagtatttctttatctttcttaaggtggcagtagtaaggctaaataacattcctcccgattccacccccgccagagtccccaggcctggctcccaacaagggaatggagagctgccagtgtgtactgcttgtgggcttctcccttgccgtggatgcctcttccctcagctgtcaggacggtcatgctttgttcagagagggataatgtcacagcacaatttgcctcctgctgagaatagacatgttctgcccctgggtgaatctttatcatttcagttcacccacaactatttccttctgtgccctccttaagcttcaagccccatcccatccagcctgcacatgcacagcttaggtagcttggagggaataaggtcctagaggactgatgactccctgcctccagggagatctctgatctccacctcggagacaggggagatagacaggggagccacagtggcaagaacttggcgccttctactccagacactcgctcttaagaaaggtggtctcttccctactctctggcattttgctctggcattcctagagcgtcctgtcctgccttgtgattctgtggttgtgaaggttctaattctgctgaacccagatcttttggctttgcatgcacactgtactgtattggggtaaaagtgaaaacttgcatttacctgttaatggcatccctgagctaaggatgcatttgaggtaccatctccctactgggaagaatctaagcagcccacttgctctcctgcctggctggaaacaccaaaaggggctgtcagcagctgtcagagggcagagggtc

SEQ ID NO: 369457 - DNA, 454 bp, Homo sapiens
tattgtagtcccaaaataaaaatatattaactcttctttatagaaaggagatggatccataaagatagactcaacatatttccgatgaagtacattattcagagtatgatctctaaccacaaagggattaagctagcatttatttatttatttatttttaaacgataacctccaaatcccaaactccatagaaattaggatacctctaattattccagggtcaaagaagaactcaaaatgcaaattgaaaatgtttaaaatgaaagataatgaagctataaaacattttaaagtgtggaatacaggtaaagcaaatttttgaaagaaatttttaggcttaatcatatatattagaaaaactatcaaggctaaaaatcagtggttgaaatattcattccaaaattctggaagaagtaagtcagatgaaaccaaagaatgtacaagacaagtacca

SEQ ID NO: 369458 - DNA, 465 bp, Homo sapiens
caaggaagcagaagtctgtaaaagagatctcttcatatacaccaaaggactgtacttcaagaaatggtccagaaaggggatgtgacagaggaataatagtatcaacacgtttgttgactgattctagcactgatgctttggaaaaagtgtccacatcgaatgaagatttctctttaaaggatgatgctcttgctaaaacctcaaaacgaaaaactaaggtacagaaagatgaaatctgtgcaaagttatcacatgtaataaagaagcaacacaggaagagtactttggtcgataatactatcaatttagatgaaaatttgactgtatctaacattgagagtttctattcaaggaaagatacaggagttcagaaaggagatggtttcatacacaatctttctttagaccctagtggtgttctggatgataagaatggagaacaaaaatctcaaaacaatgtattgc

SEQ ID NO: 369459 - DNA, 423 bp, Homo sapiens
gaggcggaggttgcagtgagttgagatcgcaccactgcactccagcctgggtgacagagcaagattctgttcccctccccaaaaatagggaatcttgacccctagttctgaccaagcacaaaaattactttgagaggaatcataaatctttggaaaattggcaatatctgcggaagccaagcaggtgaacaccctgtggtccagaagccccccttccccgccagggcatgcccaacagaaataatgagaacttaagtcaccaaaagacacatgtaagagccatcagatctccattgttcaataggcccaaactggtatctacaggatggacatgtggcttagtggtgtcatggagtaccacgcaccacaaacaaccacatcctcctccaggcagcagtgcgggccacatctagtgaagaaagc

SEQ ID NO: 369460 - DNA, 434 bp, Homo sapiens
cttttaagagcagacagagctggcctgggcccaggagctgggcttgggcattaggcattcagttaacaggcgttcctggcacccaccatgtgcagcacacacaggggcctggggcccatcccagcctgccaggtgctcctcaggccgggggaggagctcactgagccaggctgggggctggggtgggctttaggggtctactgaaggctatatgtacatgtacatgggccttaccccagaaaagaggtccaaaactttgctccaactctcaaaggcaatcatgaccctgaaagaagaagaacccctaaactgggggacatcttctgcgtgttggcttctttttttttttttttacttatttatttacttttgagacagagtcttgttctgcactccagcctggcaacagagcgagactccatcttaaaaaaaaa

SEQ ID NO: 369461 - DNA, 1264 bp, Homo sapiens
tccccgccccggccgccgcggcccggcgctgaccagctcggtccgcccgcctctgaccttctgttctcgccggtctccgtgcggcggcatctccgtgtccctgtgactcgagaccgcggctgtcgggtctccccctctctgaccctgcgtctctgtccccgctgtgtccgccctctctccgtgactctgtgtgtctctcgctgtcttgctgtggctgtcactcccaggctgtctcccagtacttcctggactctacctcggaaacttcattgatgccaaagacctggatcagctgggccgaaataagatcacacacatcatctctatccatgagtcaccccagcctctgctgcaggatatcacctaccttcgcatcccggtcgctgatacccctgaggtacccatcaaaaagcacttcaaagaatgtatcaacttcatccactgctgccgccttaatggggggaactgccttgtgcactgctttgcaggcatctctcgcagcaccacgattgtgacagcgtatgtgatgactgtgacggggctaggctggcgggacgtgcttgaagccatcaaggccaccaggcccatcgccaaccccaacccaggctttaggcagcagcttgaagagtttggctgggccagttcccagaagcttcgccggcagctggaggagcgcttcggcgagagccccttccgcgacgaggaggagttgcgcgcgctgctgccgctgtgcaagcgctgccggcagggctccgcgacctcggcctcctccgccgggccgcactcagcagcctccgagggaaccgtgcagcgcctggtgccgcgcacgccccgggaagcccaccggccgctgccgctgctggcgcgcgtcaagcagactttctcttgcctcccccggtgtctgtcccgcaagggcggcaagtgaggatgcagtccagccgtggctccccacttccgactggctcccttcgggggctgtctgcgccttccacgccccccaggacgggcccagaggctgggggagccccgcggcggcctgaaccctgcctcccgcgcccgccctgctcgtccgcgtctgcagtcagcgtccccaacctgtgcgtctctgtgtccgggccggcctgctgcagccacctggtgccttagtccttgggctgggggagggggcccacccttaaaggcggcgggaggggagggagggagagtggagggtttgacgggcctggagggtattaaagagacacagaagaagctgcctgtcaga

SEQ ID NO: 369462 - DNA, 1215 bp, Homo sapiens
cctcggctctctccggggctgtttctccatcctgtcccgcctctgcctgtcattgcctttctgcctccccagccccagaatttccatccctgcaccctgcaagtctacctctctcctctcctctcctcctaagacctgccttcctcctctcccctctcatacccaagctggcctcccttggttccctcggtacttcctggactctacctcggaaacttcattgatgccaaagacctggatcagctgggccgaaataagatcacacacatcatctctatccatgagtcaccccagcctctgctgcaggatatcacctaccttcgcatcccggtcgctgatacccctgaggtacccatcaaaaagcacttcaaagaatgtatcaacttcatccactgctgccgccttaatggggggaactgccttgtgcactgctttgcaggcatctctcgcagcaccacgattgtgacagcgtatgtgatgactgtgacggggctaggctggcgggacgtgcttgaagccatcaaggccaccaggcccatcgccaaccccaacccaggctttaggcagcagcttgaagagtttggctgggccagttcccagaagcttcgccggcagctggaggagcgcttcggcgagagccccttccgcgacgaggaggagttgcgcgcgctgctgccgctgtgcaagcgctgccggcagggctccgcgacctcggcctcctccgccgggccgcactcagcagcctccgagggaaccgtgcagcgcctggtgccgcgcacgccccgggaagcccaccggccgctgccgctgctggcgcgcgtcaagcagactttctcttgcctcccccggtgtctgtcccgcaagggcggcaagtgaggatgcagtccagccgtggctccccacttccgactggctcccttcgggggctgtctgcgccttccacgccccccaggacgggcccagaggctgggggagccccgcggcggcctgaaccctgcctcccgcgcccgccctgctcgtccgcgtctgcagtcagcgtccccaacctgtgcgtctctgtgtccgggccggcctgctgcagccacctggtgccttagtccttgggctgggggagggggcccacccttaaaggcggcgggaggggagggagggagagtggagggtttgacgggcctggagggtattaaagagacacagaagaagctgcctgtcaga

SEQ ID NO: 369463 - DNA, 473 bp, Homo sapiens
gcttgggatggagccaagcagacagtgctgccccttgggaatcttgctcccagcctgctgctgcccatcattgtgcccaggtgctctgattgcagaccccagaggagtgggacccctgtgtttcctccctcccatttctctgaaaggccacaataaacccaacatgaaaacagggtccacaggaggagtgctcctgcctagatggtgagatttgtcctgactggtctctctcactgcctgaaatgccaccattcttgcttcacacaaacacacctccagctcatactaagtactggcccatattcactgcatgtgctggctgacctggggaccccagggctctatgtcccttgctatcctgtaattggggtgggggcggaacaactcctgagaggtctgccctgcagtgctccctaccctattgctttctcctctagcaaaaagcacttcaaagaatgtatcaacttcatcca

SEQ ID NO: 369464 - DNA, 1459 bp, Homo sapiens
cccgcgcctgccggtgccagggtggggtaaggcccccgcccccacctccggaggtggcggccccacgcggccccaacaaactgccgttgtcccgcgggccgtgggcccggcacactggggctttgtccggccccccgccgcgacccgaggcgggggccccacatgaccgaaggggtaggaggagcctgcggcggcggcggtggcagcggcggctccaccaccatttccctcccgggccgggggtcggcgggcggtggcggtggctgggcagggctgggcagggccgcggacgccaggccccccgttccccgccaggctgcaggcgtcgggcctgggccgtcagggcagctgtgaccggatcgcttcccgggcggcgagctgggggtgcacccggaccgccgcccccgggatcatgggcaatggcatgaccaaggtacttcctggactctacctcggaaacttcattgatgccaaagacctggatcagctgggccgaaataagatcacacacatcatctctatccatgagtcaccccagcctctgctgcaggatatcacctaccttcgcatcccggtcgctgatacccctgaggtacccatcaaaaagcacttcaaagaatgtatcaacttcatccactgctgccgccttaatggggggaactgccttgtgcactgctttgcaggcatctctcgcagcaccacgattgtgacagcgtatgtgatgactgtgacggggctaggctggcgggacgtgcttgaagccatcaaggccaccaggcccatcgccaaccccaacccaggctttaggcagcagcttgaagagtttggctgggccagttcccagaagcttcgccggcagctggaggagcgcttcggcgagagccccttccgcgacgaggaggagttgcgcgcgctgctgccgctgtgcaagcgctgccggcagggctccgcgacctcggcctcctccgccgggccgcactcagcagcctccgagggaaccgtgcagcgcctggtgccgcgcacgccccgggaagcccaccggccgctgccgctgctggcgcgcgtcaagcagactttctcttgcctcccccggtgtctgtcccgcaagggcggcaagtgaggatgcagtccagccgtggctccccacttccgactggctcccttcgggggctgtctgcgccttccacgccccccaggacgggcccagaggctgggggagccccgcggcggcctgaaccctgcctcccgcgcccgccctgctcgtccgcgtctgcagtcagcgtccccaacctgtgcgtctctgtgtccgggccggcctgctgcagccacctggtgccttagtccttgggctgggggagggggcccacccttaaaggcggcgggaggggagggagggagagtggagggtttgacgggcctggagggtattaaagagacacagaagaagctgcctgtcaga

SEQ ID NO: 369465 - DNA, 1081 bp, Homo sapiens
cccgcgcctgccggtgccagggtggggtaaggcccccgcccccacctccggaggtggcggccccacgcggccccaacaaactgccgttgtcccgcgggccgtgggcccggcacactggggctttgtccggccccccgccgcgacccgaggcgggggccccacatgaccgaaggggtaggaggagcctgcggcggcggcggtggcagcggcggctccaccaccatttccctcccgggccgggggtcggcgggcggtggcggtggctgggcagggctgggcagggccgcggacgccaggccccccgttccccgccaggctgcaggcgtcgggcctgggccgtcagggcagctgtgaccggatcgcttcccgggcggcgagctgggggtgcacccggaccgccgcccccgggatcatgggcaatggcatgaccaaggtacttcctggactctacctcggaaacttcattgatgccaaagacctggatcagctgggccgaaataagatcacacacatcatctctatccatgagtcaccccagcctctgctgcaggatatcacctaccttcgcatcccggtcgctgatacccctgaggtacccatgtgctctgattgcagaccccagaggagtgggacccctgtgtttcctccctcccatttctctgaaaggccacaataaacccaacatgaaaacagggtccacaggaggagtgctcctgcctagatgcaaaaagcacttcaaagaatgtatcaacttcatccactgctgccgccttaatggggggaactgccttgtgcactggtgagttaagcggagggggataaggtgggggaggaaggaagtggctgtgccctctgctgaacacacactccccctgtgggaaggttggacctgtgagggatcttctccagcctgtcacagtgcctgagggcccaccattcactggagagaggccaacccgggactctattccttatgagctgtgtggccatagccaagtagctgtttctctctgagactcaatgtcctcatctgtaaaatgcggaaaagaaagctgacctgatgggactgttgggagggata

SEQ ID NO: 369466 - DNA, 732 bp, Homo sapiens
ggataatcaagatatagtgttagtctattcatacaatggaaaatgaacgggcataaaagagaatgacatgacccgtgctacaatgtggagcaatcttgaaaatgtgctaagtgaaagaagccagcaagccatgctgaaacaagtcagcattcatacaatatgattcaatttatatgaaatacccagaacagaaaaatgtatagagacaggctgtagattagtggttgtctagggctgggggcaatagaaggcagagtgactgctaataggaagtttccttggagggatcatgaaaatgttctaaaatcagattatacgtccatttgcacaattttgtgaatatactcggaaccactgaattgtatactttaagtgggtgaggtatgtgaaaattaaatgtcagtaaagctgtttaaaaaagtttcatcccaaagctacattttacctaaggcaaatgtttactaccgcttctctttcagtcccaaataatttccagccatatgttccagtcaagcctcgacaaaattaaacaacaccacaacttactccagttacaagccaatgtgcaaatgccccaaacttgaccataaatttaccacccaacccccatcgtctcattcccaggaaaaactaaacacaagatcaactccccttgcaagttgaagtcctgacattgaagtctaaagaaattacagcccacaataaaattcttaaagtgtacaaacaaaaaat

SEQ ID NO: 369467 - DNA, 1641 bp, Homo sapiens
atcagcttctctgtgcttcttttcttatggatttttccatggcacatatgggaagtggggatcaaatgaggtcttttctgactgatacagaattgttttcccctacaggtttttgggggcatagttccaagcacactggcaattttgcctcattccttaatgcagaggtggccttaaagatgtggccttcttcattttctgttggtttggtttcgtttctatgagagatttcctctgatagctctgctttccccagcacttactctctgagcttttaaatgttctctctgggagcttcatataagctcggtgacatttgagccacagtttttagatcagcacctggaatacatgacacattcttactgaggtcatccagcactgccatggtggctgcccagtcttctggccagtgtgccaggcacatgtccctgtcacacaggttccaagaaacacatacgcagccatgcatagaccaacagatttaatattatattgcagttttcagcgatgcagaatgcagctgcaattgtgttttaaggagaagccaaatggggatggttgtccctgcaacatggtgccactcctgggccatgtgcagcctcagtggacactcttccatagcgctgaggccctggccccgcctccagttaccctgtactgcccactgccttacagttcagtgcgcaggccttcaccttttcatcaccagcctctctgctcagtgctctggagttcttgaccttgtcctttatcatgagatttgctgaaatcactaatgaaaataactcccaaaagcaacaaacaaaaatattagtttaactggcactgtggtatattaaaaggcacaagggcattgtggcttaacacttttgctggatcccaagagacgcacatgatgttaaaaagagatctggcagcagtactaatactacatttcagtgtaatcatcttggggtggtttggccaggatttcccaattccttgatatctggagtttcttcaccattgtccggcatcctgcggaggcttaatatacaggcgtaaggtcagcagcaatttgtctaataagtgatgagatcagtagctgaagtctctaagctgggccattactaaataccatagccatgttgatctggaaatttatccctctagtgtcttacctcacataagccatttgcccactgtgcaatatagaaaggtgttttcaaaagtatttggccgtagattttcacatccatcataaggttggcattcaataaggaaaaagttctaactccagtattaaattgtacataaatcccaaatgttcttaaagaacactcagggacatgtttgttgcctgggattggtaatgaaaggttggtttttgaaacttgaaatttcaccattggtttttttcctatcatttctgcatatccagcaaaaggaatctcatgttgactcctggcagagttcagtggcttcagtctgtctatctgttctgaggggaaaattgtgttctggatccagtaatcaatttggcaactttaatcgaggttttcaaaattccaaggagggttaataaagaatgataatcagttttatttgctaatagctaagacaaatttgtaataaagtgttttataatacttcaaaagc

SEQ ID NO: 369468 - DNA, 4271 bp, Homo sapiens
acgcagaaagtgccgccgctttggccactcagagcccccgggccgcggtcgtcgtacgcctgaaggcgggtcgtgccggcggccgctctagtctccgcctccgctcaggccggtcctccggggcttctcaatggtttcccggtggcctctcaatggttttcccggcggcccttgcgccgacgccaggagacttccggagcttggtgacgtcacgagcgagcttttctacccaaatacgcggcgggggaataggctcgagggcggtgagcagtgacaattgctaggcggagacagtgcagggaagagagaccttagaaaggatcaggactggcgggaggtatttaactgaaaggaatatctgcttcactgttgcaaccaaaccagatgccttcttccacttcaccagaccaaggagatgacctggagaactgcattttaagattttctgacctggatttaaaagatatgagtcttattaatcccagcagcagtcttaaagcagaattagatggcagtacaaaaaagaaatactcgtttgcaaagaaaaaggcctttgccctttttgtcaaaaccaaagaagttccaacaaaaaggagttttgaatgtaaagaaaaattgtggaaatgctgtcagcagctattcacagaccaaaccagcatccatagacatgtggcaacacaacatgctgatgaaatttatcaccagacagcttctattttaaagcaactggctgtgacattgagcacctcaaagagtctttcgtctgcagatgaaaagaaccctttaaaagagtgccttccacatagccatgacgtgtctgcttggctccctgatataagctgctttaaccctgatgagctgataagtggccagggcagtgaagaaggggaggtgctcctttattactgctaccatgacctggaggatccccaatggatctgtgcctggcagacagctctgtgtcagcacctgcacctcacaggcaagattcgaattgctgcagaaggaatcaatgggacagttggtggaagcaaattggctaccagactttatgtggaagtcatgctttccttcccattgtttaaggatgacctgtgtaaagatgattttaagaccagcaaaggaggagctcactgttttccagaattgcgtgttggtgtatttgaagaaatcgtgcccatggggatcagccccaaaaagatctcctacaagaagcctggaatccatttatccccaggtgaatttcataaagaagtagaaaagtttttatctcaggcaaatcaagaacaaagtgatactatccttcttgattgcagaaacttctatgaaagcaaaatagtggacgattccaaggctgcttagccccagacatcaggaaattcagttacttccctagctacgttgacaaaaatctagaacttttcagagagaagagagtgctgatgtactgtaccgggggcatccgctgtgagcggggttcagcctacctcaaagccaagggagtgtgcaaggaggtgttccagctcaagggtggcatccacaagtacctggaagagtttcctgatggcttttacaaagggaagttgtttgtttttgatgaacgctatgctctgtcctacaacagtgatgtggtgtcagagtgttcatactgtggagcccgctgggaccagtataaactctgctctactccccagtgccgccagctcgttttgacctgccctgcctgtcaaggacaaggattcacagcctgttgtgtcacatgtcaagacaaggggagcaggaaagtttcaggccctatgcaagacagctttaaagaggaatgcgagtgcacagcccgacggccacgcatacctagggaactcttgcagcatgtgcgacagcctgtgagcccagagccagggcctgatgctgatgaggatgggccagtgcttatgtgagcagcacctttggcattttcccaggccctcggtaaaagtaggtttggggtgactatacagagaaagcatggcaagactgcagaaacagagaaatcgggaacttcagttctggccgctgccaccgtggcagccgtctacacttcacagcgggaggggaggagtcacgttgtctaccacttacctgagacattctgatttggatgatgctagagcacagaaaataggtgagctgcatgggatcccaaagctgctgagggatagagcctgagcctggtggccacagcatatgccctttctgttccatgcagctggggctgttagtagtcattgcccttgtcagcagaccttctaccctggtggcaaacacatgaaagctgtggccctgggagtggcctcctaaaacaagccacttaggtcatctgccatctacccttaacctctgtctctcgcctgaggggaatctgcaagctgtgcattgggcttacctcctgcttttgtagaaataaccatcctttggtatacatggaggatagttccagaacgcctgagtatacaaaaacccaatgcatactcaagtcccacagtgggccctacagaacccacgtatgtgataaatcagccctccatgtacgcaggtttcgccccctgccaatactgtattttcaacctgtatggttgaaaaaaatccatatataagtgcagccatgcagttcaaacccatattgttcaagggtcaactgtatagtttattgaacagccacacccattcctttacacatgatctatggcagagttgaatagttgcaacagacactatgtggcctgcaaaatcggaaatttttactgtctggccttttacagtggccttaaagatgtggccttcttcattttctgttggtttggtttcgtttctatgagagatttcctctgatagctctgctttccccagcacttactctctgagcttttaaatgttctctctgggagcttcatataagctcggtgacatttgagccacagtttttagatcagcacctggaatacatgacacattcttactgaggtcatccagcactgccatggtggctgcccagtcttctggccagtgtgccaggcacatgtccctgtcacacaggttccaagaaacacatacgcagccatgcatagaccaacagatttaatattatattgcagttttcagcgatgcagaatgcagctgcaattgtgttttaaggagaagccaaatggggatggttgtccctgcaacatggtgccactcctgggccatgtgcagcctcagtggacactcttccatagcgctgaggccctggccccgcctccagttaccctgtactgcccactgccttacagttcagtgcgcaggccttcaccttttcatcaccagcctctctgctcagtgctctggagttcttgaccttgtcctttatcatgagatttgctgaaatcactaatgaaaataactcccaaaagcaacaaacaaaaatattagtttaactggcactgtggtatattaaaaggcacaagggcattgtggcttaacacttttgctggatcccaagagacgcacatgatgttaaaaagagatctggcagcagtactaatactacatttcagtgtaatcatcttggggtggtttggccaggatttcccaattccttgatatctggagtttcttcaccattgtccggcatcctgcggaggcttaatatacaggcgtaaggtcagcagcaatttgtctaataagtgatgagatcagtagctgaagtctctaagctgggccattactaaataccatagccatgttgatctggaaatttatccctctagtgtcttacctcacataagccatttgcccactgtgcaatatagaaaggtgttttcaaaagtatttggccgtagattttcacatccatcataaggttggcattcaataaggaaaaagttctaactccagtattaaattgtacataaatcccaaatgttcttaaagaacactcagggacatgtttgttgcctgggattggtaatgaaaggttggtttttgaaacttgaaatttcaccattggtttttttcctatcatttctgcatatccagcaaaaggaatctcatgttgactcctggcagagttcagtggcttcagtctgtctatctgttctgaggggaaaattgtgttctggatccagtaatcaatttggcaactttaatcgaggttttcaaaattccaaggagggttaataaagaatgataatcagttttatttgctaatagctaagacaaatttgtaataaagtgttttataatacttcaaaagc

SEQ ID NO: 369469 - DNA, 3662 bp, Homo sapiens
acgcagaaagtgccgccgctttggccactcagagcccccgggccgcggtcgtcgtacgcctgaaggcgggtcgtgccggcggccgctctagtctccgcctccgctcaggccggtcctccggggcttctcaatggtttcccggtggcctctcaatggttttcccggcggcccttgcgccgacgccaggagacttccggagcttggtgacgtcacgagcgagcttttctacccaaatacgcggcgggggaataggctcgagggcggtgagcagtgacaattgctaggcggagacagtgcagggaagagagaccttagaaaggatcaggactggcgggaggtatttaactgaaaggaatatctgcttcactgttgcaaccaaaccagatgccttcttccacttcaccagaccaaggagatgacctggagaactgcattttaagattttctgacctggatttaaaagatatgagtcttattaatcccagcagcagtcttaaagcagaattagatggcagtacaaaaaagaaatactcgtttgcaaagaaaaaggcctttgccctttttgtcaaaaccaaagaagttccaacaaaaaggagttttgaatgtaaagaaaaattgtggaaatgctgtcagcagctattcacagaccaaaccagcatccatagacatgtggcaacacaacatgctgatgaaatttatcaccagacagcttctattttaaagcaactggctgtgacattgagcacctcaaagagtctttcgtctgcagatgaaaagaaccctttaaaagagtgccttccacatagccatgacgtgtctgcttggctccctgatataagctgctttaaccctgatgagctgataagtggccagggcagtgaagaaggggaggtgctcctttattactgctaccatgacctggaggatccccaatggatctgtgcctggcagacagctctgtgtcagcacctgcacctcacaggcaagattcgaattgctgcagaaggaatcaatgggacagttggtggaagcaaattggctaccagactttatgtggaagtcatgctttccttcccattgtttaaggatgacctgtgtaaagatgattttaagaccagcaaaggaggagctcactgttttccagaattgcgtgttggtgtatttgaagaaatcgtgcccatggggatcagccccaaaaagatctcctacaagaagcctggaatccatttatccccaggtgaatttcataaagaagtagaaaagtttttatctcaggcaaatcaagaacaaagtgatactatccttcttgattgcagaaacttctatgaaagcaaaatagtcatggcaagactgcagaaacagagaaatcgggaacttcagttctggccgctgccaccgtggcagccgtctacacttcacagcgggaggggaggagtcacgttgtctaccacttacctgagacattctgatttggatgatgctagagcacagaaaataggtgagctgcatgggatcccaaagctgctgagggatagagcctgagcctggtggccacagcatatgccctttctgttccatgcagctggggctgttagtagtcattgcccttgtcagcagaccttctaccctggtggcaaacacatgaaagctgtggccctgggagtggcctcctaaaacaagccacttaggtcatctgccatctacccttaacctctgtctctcgcctgaggggaatctgcaagctgtgcattgggcttacctcctgcttttgtagaaataaccatcctttggtatacatggaggatagttccagaacgcctgagtatacaaaaacccaatgcatactcaagtcccacagtgggccctacagaacccacgtatgtgataaatcagccctccatgtacgcaggtttcgccccctgccaatactgtattttcaacctgtatggttgaaaaaaatccatatataagtgcagccatgcagttcaaacccatattgttcaagggtcaactgtatagtttattgaacagccacacccattcctttacacatgatctatggcagagttgaatagttgcaacagacactatgtggcctgcaaaatcggaaatttttactgtctggccttttacagaaaagtttgccagcccctgatctagaccagcagctcatctgatagaggcagaggtggccttaaagatgtggccttcttcattttctgttggtttggtttcgtttctatgagagatttcctctgatagctctgctttccccagcacttactctctgagcttttaaatgttctctctgggagcttcatataagctcggtgacatttgagccacagtttttagatcagcacctggaatacatgacacattcttactgaggtcatccagcactgccatggtggctgcccagtcttctggccagtgtgccaggcacatgtccctgtcacacaggttccaagaaacacatacgcagccatgcatagaccaacagatttaatattatattgcagttttcagcgatgcagaatgcagctgcaattgtgttttaaggagaagccaaatggggatggttgtccctgcaacatggtgccactcctgggccatgtgcagcctcagtggacactcttccatagcgctgaggccctggccccgcctccagttaccctgtactgcccactgccttacagttcagtgcgcaggccttcaccttttcatcaccagcctctctgctcagtgctctggagttcttgaccttgtcctttatcatgagatttgctgaaatcactaatgaaaataactcccaaaagcaacaaacaaaaatattagtttaactggcactgtggtatattaaaaggcacaagggcattgtggcttaacacttttgctggatcccaagagacgcacatgatgttaaaaagagatctggcagcagtactaatactacatttcagtgtaatcatcttggggtggtttggccaggatttcccaattccttgatatctggagtttcttcaccattgtccggcatcctgcggaggcttaatatacaggcgtaaggtcagcagcaatttgtctaataagtgatgagatcagtagctgaagtctctaagctgggccattactaaataccatagccatgttgatctggaaatttatccctctagtgtcttacctcacataagccatttgcccactgtgcaatatagaaaggtgttttcaaaagtatttggccgtagattttcacatccatcataaggttggcattcaataaggaaaaagttctaactccagtattaaattgtacataaatcccaaatgttcttaaagaacactcagggacatgtttgttgcctgggattggtaatgaaaggttggtttttgaaacttgaaatttcaccattggtttttttcctatcatttctgcatatccagcaaaaggaatctcatgttgactcctggcagagttcagtggcttcagtctgtctatctgttctgaggggaaaattgtgttctggatccagtaatcaatttggcaactttaatcgaggttttcaaaattccaaggagggttaataaagaatgataatcagttttatttgctaatagctaagacaaatttgtaataaagtgttttataatacttcaaaagc

SEQ ID NO: 369470 - DNA, 4297 bp, Homo sapiens
acgcagaaagtgccgccgctttggccactcagagcccccgggccgcggtcgtcgtacgcctgaaggcgggtcgtgccggcggccgctctagtctccgcctccgctcaggccggtcctccggggcttctcaatggtttcccggtggcctctcaatggttttcccggcggcccttgcgccgacgccaggagacttccggagcttggtgacgtcacgagcgagcttttctacccaaatacgcggcgggggaataggctcgagggcggtgagcagtgacaattgctaggcggagacagtgcagggaagagagaccttagaaaggatcaggactggcgggaggtatttaactgaaaggaatatctgcttcactgttgcaaccaaaccagatgccttcttccacttcaccagaccaaggagatgacctggagaactgcattttaagattttctgacctggatttaaaagatatgagtcttattaatcccagcagcagtcttaaagcagaattagatggcagtacaaaaaagaaatactcgtttgcaaagaaaaagaagttccaacaaaaaggagttttgaatgtaaagaaaaattgtggaaatgctgtcagcagctattcacagaccaaaccagcatccatagacatgtggcaacacaacatgctgatgaaatttatcaccagacagcttctattttaaagcaactggctgtgacattgagcacctcaaagagtctttcgtctgcagatgaaaagaaccctttaaaagagtgccttccacatagccatgacgtgtctgcttggctccctgatataagctgctttaaccctgatgagctgataagtggccagggcagtgaagaaggggaggtgctcctttattactgctaccatgacctggaggatccccaatggatctgtgcctggcagacagctctgtgtcagcacctgcacctcacaggcaagattcgaattgctgcagaaggaatcaatgggacagttggtggaagcaaattggctaccagactttatgtggaagtcatgctttccttcccattgtttaaggatgacctgtgtaaagatgattttaagaccagcaaaggaggagctcactgttttccagaattgcgtgttggtgtatttgaagaaatcgtgcccatggggatcagccccaaaaagatctcctacaagaagcctggaatccatttatccccaggtgaatttcataaagaagtagaaaagtttttatctcaggcaaatcaagaacaaagtgatactatccttcttgattgcagaaacttctatgaaagcaaaatagtggacgattccaaggctgcttagccccagacatcaggaaattcagttacttccctagctacgttgacaaaaatctagaacttttcagagagaagagagtgctgatgtactgtaccgggggcatccgctgtgagcggggttcagcctacctcaaagccaagggagtgtgcaaggaggtgttccagctcaagggtggcatccacaagtacctggaagagtttcctgatggcttttacaaagggaagttgtttgtttttgatgaacgctatgctctgtcctacaacagtgatgtggtgtcagagtgttcatactgtggagcccgctgggaccagtataaactctgctctactccccagtgccgccagctcgttttgacctgccctgcctgtcaaggacaaggattcacagcctgttgtgtcacatgtcaagacaaggggagcaggaaagtttcaggccctatgcaagacagctttaaagaggaatgcgagtgcacagcccgacggccacgcatacctagggaactcttgcagcatgtgcgacagcctgtgagcccagagccagggcctgatgctgatgaggatgggccagtgcttatgtgagcagcacctttggcattttcccaggccctcggtaaaagtaggtttggggtgactatacagagaaagcatggcaagactgcagaaacagagaaatcgggaacttcagttctggccgctgccaccgtggcagccgtctacacttcacagcgggaggggaggagtcacgttgtctaccacttacctgagacattctgatttggatgatgctagagcacagaaaataggtgagctgcatgggatcccaaagctgctgagggatagagcctgagcctggtggccacagcatatgccctttctgttccatgcagctggggctgttagtagtcattgcccttgtcagcagaccttctaccctggtggcaaacacatgaaagctgtggccctgggagtggcctcctaaaacaagccacttaggtcatctgccatctacccttaacctctgtctctcgcctgaggggaatctgcaagctgtgcattgggcttacctcctgcttttgtagaaataaccatcctttggtatacatggaggatagttccagaacgcctgagtatacaaaaacccaatgcatactcaagtcccacagtgggccctacagaacccacgtatgtgataaatcagccctccatgtacgcaggtttcgccccctgccaatactgtattttcaacctgtatggttgaaaaaaatccatatataagtgcagccatgcagttcaaacccatattgttcaagggtcaactgtatagtttattgaacagccacacccattcctttacacatgatctatggcagagttgaatagttgcaacagacactatgtggcctgcaaaatcggaaatttttactgtctggccttttacagaaaagtttgccagcccctgatctagaccagcagctcatctgatagaggcagaggtggccttaaagatgtggccttcttcattttctgttggtttggtttcgtttctatgagagatttcctctgatagctctgctttccccagcacttactctctgagcttttaaatgttctctctgggagcttcatataagctcggtgacatttgagccacagtttttagatcagcacctggaatacatgacacattcttactgaggtcatccagcactgccatggtggctgcccagtcttctggccagtgtgccaggcacatgtccctgtcacacaggttccaagaaacacatacgcagccatgcatagaccaacagatttaatattatattgcagttttcagcgatgcagaatgcagctgcaattgtgttttaaggagaagccaaatggggatggttgtccctgcaacatggtgccactcctgggccatgtgcagcctcagtggacactcttccatagcgctgaggccctggccccgcctccagttaccctgtactgcccactgccttacagttcagtgcgcaggccttcaccttttcatcaccagcctctctgctcagtgctctggagttcttgaccttgtcctttatcatgagatttgctgaaatcactaatgaaaataactcccaaaagcaacaaacaaaaatattagtttaactggcactgtggtatattaaaaggcacaagggcattgtggcttaacacttttgctggatcccaagagacgcacatgatgttaaaaagagatctggcagcagtactaatactacatttcagtgtaatcatcttggggtggtttggccaggatttcccaattccttgatatctggagtttcttcaccattgtccggcatcctgcggaggcttaatatacaggcgtaaggtcagcagcaatttgtctaataagtgatgagatcagtagctgaagtctctaagctgggccattactaaataccatagccatgttgatctggaaatttatccctctagtgtcttacctcacataagccatttgcccactgtgcaatatagaaaggtgttttcaaaagtatttggccgtagattttcacatccatcataaggttggcattcaataaggaaaaagttctaactccagtattaaattgtacataaatcccaaatgttcttaaagaacactcagggacatgtttgttgcctgggattggtaatgaaaggttggtttttgaaacttgaaatttcaccattggtttttttcctatcatttctgcatatccagcaaaaggaatctcatgttgactcctggcagagttcagtggcttcagtctgtctatctgttctgaggggaaaattgtgttctggatccagtaatcaatttggcaactttaatcgaggttttcaaaattccaaggagggttaataaagaatgataatcagttttatttgctaatagctaagacaaatttgtaataaagtgttttataatacttcaaaagc

SEQ ID NO: 369471 - DNA, 1355 bp, Homo sapiens
acgcagaaagtgccgccgctttggccactcagagcccccgggccgcggtcgtcgtacgcctgaaggcgggtcgtgccggcggccgctctagtctccgcctccgctcaggccggtcctccggggcttctcaatggtttcccggtggcctctcaatggttttcccggcggcccttgcgccgacgccaggagacttccggagcttggtgacgtcacgagcgagcttttctacccaaatacgcggcgggggaataggctcgagggcggtgagcagtgacaattgctaggcggagacagtgcagggaagagagaccttagaaaggatcaggactggcgggaggtatttaactgaaaggaatatctgcttcactgttgcaaccaaaccagatgccttcttccacttcaccagaccaaggagatgacctggagaactgcattttaagattttctgacctggatttaaaagatatgagtcttattaatcccagcagcagtcttaaagcagaattagatggcagtacaaaaaagaaatactcgtttgcaaagaaaaaggcctttgccctttttgtcaaaaccaaagaagttccaacaaaaaggagttttgaatgtaaagaaaaattgtggaaatgctgtcagcagctattcacagaccaaaccagcatccatagacatgtggcaacacaacatgctgatgaaatttatcaccagacagcttctattttaaagcaactggctgtgacattgagcacctcaaagagtctttcgtctgcagatgaaaagaaccctttaaaagagtgccttccacatagccatgacgtgtctgcttggctccctgatataagctgctttaaccctgatgagctgataagtggccagggcagtgaagaaggggaggtgctcctttattactgctaccatgacctggaggatccccaatggatctgtgcctggcagacagctctgtgtcagcacctgcacctcacaggcaagattcgaattgctgcagaaggaatcaatgggacagttggtggaagcaaattggctaccagactttatgtggaagtcatgctttccttcccattgtttaaggatgacctgtgtaaagatgattttaagaccagcaaaggaggagctcactgttttccagaattgcgtgttggtgtatttgaagaaatcgtgcccatggggatcagccccaaaaagatctcctacaagaagcctggtatgcttgcttttagaagattgtgctttaattcacagggacaaaacttaatagacaaataagaaagctaggcactgtgatcagcagcagtcatgagtcctctctaaagcagctgtggggtggctaacacttggct

SEQ ID NO: 369472 - DNA, 601 bp, Homo sapiens
ttttccaagaaggaagatattttggtacgtttcttcctggtctttttcaatgtactttttaatgtggttaagattacattgcataagcaattttatccaatttttttcacttaatattatatcataaaatatttttccatataacttaaaactggctgcttaatattccatggtaagcatacttcataatttactttccatattcctttcgaaaataactaatagtgttatttgtgatattttaggccaaactgtattatgtattttccagtgtgacttagtcttatatcctgagaataaaattatgatgctgagagttatttaacctcctcaatataaagcctagttttaatttctctaatagtctcttctaaagcttactaataagagaagtgttacttctcagagaattgtataacataatggaacataaaactagaagcccctgtggaaagataatctaaagaatcttagtgagacttctattagccataaacctaaggttatttaacagtgttagcatttgaaatctaattgcaggcctttgccctttttgtcaaaaccaaagaagttccaacaaaaaggagttttgaatgtaaag

SEQ ID NO: 369473 - DNA, 460 bp, Homo sapiens
gttttggtttttttgtctttgttttaatataatttttttggtttggttttaggaatccatttatccccaggtgaatttcataaagaagtagaaaagtttttatctcaggcaaatcaagaacaaagtgatactatccttcttgattgcagaaacttctatgaaagcaaaatagtaagtaaaagccagaactgagttctctgaattggtagatctccccattcccacagtgtggtatatttcccaaggggaccttgtgtgtgcccacctgtggccacatggatctcctcccagtactggcagcttcagagaaaacccaagtcctaaaactcagaaatctggtgagagagtctaagaaaatatgaattaaaggcatccaggcacataatatactttgtgactcccatgagcctgcctttgacatgtatcaaggatcttgcaaagttgcctttgggcagcctct

SEQ ID NO: 369474 - DNA, 4325 bp, Homo sapiens
acgcagaaagtgccgccgctttggccactcagagcccccgggccgcggtcgtcgtacgcctgaaggcgggtcgtgccggcggccgctctagtctccgcctccgctcaggccggtcctccggggcttctcaatggtttcccggtggcctctcaatggttttcccggcggcccttgcgccgacgccaggagacttccggagcttggtgacgtcacgagcgagcttttctacccaaatacgcggcgggggaataggctcgagggcggtgagcagtgacaattgctaggcggagacagtgcagggaagagagaccttagaaaggatcaggactggcgggaggtatttaactgaaaggaatatctgcttcactgttgcaaccaaaccagatgccttcttccacttcaccagaccaaggagatgacctggagaactgcattttaagattttctgacctggatttaaaagatatgagtcttattaatcccagcagcagtcttaaagcagaattagatggcagtacaaaaaagaaatactcgtttgcaaagaaaaaggcctttgccctttttgtcaaaaccaaagaagttccaacaaaaaggagttttgaatgtaaagaaaaattgtggaaatgctgtcagcagctattcacagaccaaaccagcatccatagacatgtggcaacacaacatgctgatgaaatttatcaccagacagcttctattttaaagcaactggctgtgacattgagcacctcaaagagtctttcgtctgcagatgaaaagaaccctttaaaagagtgccttccacatagccatgacgtgtctgcttggctccctgatataagctgctttaaccctgatgagctgataagtggccagggcagtgaagaaggggaggtgctcctttattactgctaccatgacctggaggatccccaatggatctgtgcctggcagacagctctgtgtcagcacctgcacctcacaggcaagattcgaattgctgcagaaggaatcaatgggacagttggtggaagcaaattggctaccagactttatgtggaagtcatgctttccttcccattgtttaaggatgacctgtgtaaagatgattttaagaccagcaaaggaggagctcactgttttccagaattgcgtgttggtgtatttgaagaaatcgtgcccatggggatcagccccaaaaagatctcctacaagaagcctggaatccatttatccccaggtgaatttcataaagaagtagaaaagtttttatctcaggcaaatcaagaacaaagtgatactatccttcttgattgcagaaacttctatgaaagcaaaatagtggacgattccaaggctgcttagccccagacatcaggaaattcagttacttccctagctacgttgacaaaaatctagaacttttcagagagaagagagtgctgatgtactgtaccgggggcatccgctgtgagcggggttcagcctacctcaaagccaagggagtgtgcaaggaggtgttccagctcaagggtggcatccacaagtacctggaagagtttcctgatggcttttacaaagggaagttgtttgtttttgatgaacgctatgctctgtcctacaacagtgatgtggtgtcagagtgttcatactgtggagcccgctgggaccagtataaactctgctctactccccagtgccgccagctcgttttgacctgccctgcctgtcaaggacaaggattcacagcctgttgtgtcacatgtcaagacaaggggagcaggaaagtttcaggccctatgcaagacagctttaaagaggaatgcgagtgcacagcccgacggccacgcatacctagggaactcttgcagcatgtgcgacagcctgtgagcccagagccagggcctgatgctgatgaggatgggccagtgcttatgtgagcagcacctttggcattttcccaggccctcggtaaaagtaggtttggggtgactatacagagaaagcatggcaagactgcagaaacagagaaatcgggaacttcagttctggccgctgccaccgtggcagccgtctacacttcacagcgggaggggaggagtcacgttgtctaccacttacctgagacattctgatttggatgatgctagagcacagaaaataggtgagctgcatgggatcccaaagctgctgagggatagagcctgagcctggtggccacagcatatgccctttctgttccatgcagctggggctgttagtagtcattgcccttgtcagcagaccttctaccctggtggcaaacacatgaaagctgtggccctgggagtggcctcctaaaacaagccacttaggtcatctgccatctacccttaacctctgtctctcgcctgaggggaatctgcaagctgtgcattgggcttacctcctgcttttgtagaaataaccatcctttggtatacatggaggatagttccagaacgcctgagtatacaaaaacccaatgcatactcaagtcccacagtgggccctacagaacccacgtatgtgataaatcagccctccatgtacgcaggtttcgccccctgccaatactgtattttcaacctgtatggttgaaaaaaatccatatataagtgcagccatgcagttcaaacccatattgttcaagggtcaactgtatagtttattgaacagccacacccattcctttacacatgatctatggcagagttgaatagttgcaacagacactatgtggcctgcaaaatcggaaatttttactgtctggccttttacagaaaagtttgccagcccctgatctagaccagcagctcatctgatagaggcagaggtggccttaaagatgtggccttcttcattttctgttggtttggtttcgtttctatgagagatttcctctgatagctctgctttccccagcacttactctctgagcttttaaatgttctctctgggagcttcatataagctcggtgacatttgagccacagtttttagatcagcacctggaatacatgacacattcttactgaggtcatccagcactgccatggtggctgcccagtcttctggccagtgtgccaggcacatgtccctgtcacacaggttccaagaaacacatacgcagccatgcatagaccaacagatttaatattatattgcagttttcagcgatgcagaatgcagctgcaattgtgttttaaggagaagccaaatggggatggttgtccctgcaacatggtgccactcctgggccatgtgcagcctcagtggacactcttccatagcgctgaggccctggccccgcctccagttaccctgtactgcccactgccttacagttcagtgcgcaggccttcaccttttcatcaccagcctctctgctcagtgctctggagttcttgaccttgtcctttatcatgagatttgctgaaatcactaatgaaaataactcccaaaagcaacaaacaaaaatattagtttaactggcactgtggtatattaaaaggcacaagggcattgtggcttaacacttttgctggatcccaagagacgcacatgatgttaaaaagagatctggcagcagtactaatactacatttcagtgtaatcatcttggggtggtttggccaggatttcccaattccttgatatctggagtttcttcaccattgtccggcatcctgcggaggcttaatatacaggcgtaaggtcagcagcaatttgtctaataagtgatgagatcagtagctgaagtctctaagctgggccattactaaataccatagccatgttgatctggaaatttatccctctagtgtcttacctcacataagccatttgcccactgtgcaatatagaaaggtgttttcaaaagtatttggccgtagattttcacatccatcataaggttggcattcaataaggaaaaagttctaactccagtattaaattgtacataaatcccaaatgttcttaaagaacactcagggacatgtttgttgcctgggattggtaatgaaaggttggtttttgaaacttgaaatttcaccattggtttttttcctatcatttctgcatatccagcaaaaggaatctcatgttgactcctggcagagttcagtggcttcagtctgtctatctgttctgaggggaaaattgtgttctggatccagtaatcaatttggcaactttaatcgaggttttcaaaattccaaggagggttaataaagaatgataatcagttttatttgctaatagctaagacaaatttgtaataaagtgttttataatacttcaaaagc

SEQ ID NO: 369475 - DNA, 4105 bp, Homo sapiens
acgcagaaagtgccgccgctttggccactcagagcccccgggccgcggtcgtcgtacgcctgaaggcgggtcgtgccggcggccgctctagtctccgcctccgctcaggccggtcctccggggcttctcaatggtttcccggtggcctctcaatggttttcccggcggcccttgcgccgacgccaggagacttccggagcttggtgacgtcacgagcgagcttttctacccaaatacgcggcgggggaataggctcgagggcggtgagcagtgacaattgctaggcggagacagtgcagggaagagagaccttagaaaggatcaggactggcgggaggtatttaactgaaaggaatatctgcttcactgttgcaaccaaaccagatgccttcttccacttcaccagaccaaggagatgacctggagaactgcattttaagattttctgacctggatttaaaagatatgagtcttattaatcccagcagcagtcttaaagcagaattagatggcagtacaaaaaagaaatactcgtttgcaaagaaaaagatgaaaagaaccctttaaaagagtgccttccacatagccatgacgtgtctgcttggctccctgatataagctgctttaaccctgatgagctgataagtggccagggcagtgaagaaggggaggtgctcctttattactgctaccatgacctggaggatccccaatggatctgtgcctggcagacagctctgtgtcagcacctgcacctcacaggcaagattcgaattgctgcagaaggaatcaatgggacagttggtggaagcaaattggctaccagactttatgtggaagtcatgctttccttcccattgtttaaggatgacctgtgtaaagatgattttaagaccagcaaaggaggagctcactgttttccagaattgcgtgttggtgtatttgaagaaatcgtgcccatggggatcagccccaaaaagatctcctacaagaagcctggaatccatttatccccaggtgaatttcataaagaagtagaaaagtttttatctcaggcaaatcaagaacaaagtgatactatccttcttgattgcagaaacttctatgaaagcaaaatagtggacgattccaaggctgcttagccccagacatcaggaaattcagttacttccctagctacgttgacaaaaatctagaacttttcagagagaagagagtgctgatgtactgtaccgggggcatccgctgtgagcggggttcagcctacctcaaagccaagggagtgtgcaaggaggtgttccagctcaagggtggcatccacaagtacctggaagagtttcctgatggcttttacaaagggaagttgtttgtttttgatgaacgctatgctctgtcctacaacagtgatgtggtgtcagagtgttcatactgtggagcccgctgggaccagtataaactctgctctactccccagtgccgccagctcgttttgacctgccctgcctgtcaaggacaaggattcacagcctgttgtgtcacatgtcaagacaaggggagcaggaaagtttcaggccctatgcaagacagctttaaagaggaatgcgagtgcacagcccgacggccacgcatacctagggaactcttgcagcatgtgcgacagcctgtgagcccagagccagggcctgatgctgatgaggatgggccagtgcttatgtgagcagcacctttggcattttcccaggccctcggtaaaagtaggtttggggtgactatacagagaaagcatggcaagactgcagaaacagagaaatcgggaacttcagttctggccgctgccaccgtggcagccgtctacacttcacagcgggaggggaggagtcacgttgtctaccacttacctgagacattctgatttggatgatgctagagcacagaaaataggtgagctgcatgggatcccaaagctgctgagggatagagcctgagcctggtggccacagcatatgccctttctgttccatgcagctggggctgttagtagtcattgcccttgtcagcagaccttctaccctggtggcaaacacatgaaagctgtggccctgggagtggcctcctaaaacaagccacttaggtcatctgccatctacccttaacctctgtctctcgcctgaggggaatctgcaagctgtgcattgggcttacctcctgcttttgtagaaataaccatcctttggtatacatggaggatagttccagaacgcctgagtatacaaaaacccaatgcatactcaagtcccacagtgggccctacagaacccacgtatgtgataaatcagccctccatgtacgcaggtttcgccccctgccaatactgtattttcaacctgtatggttgaaaaaaatccatatataagtgcagccatgcagttcaaacccatattgttcaagggtcaactgtatagtttattgaacagccacacccattcctttacacatgatctatggcagagttgaatagttgcaacagacactatgtggcctgcaaaatcggaaatttttactgtctggccttttacagaaaagtttgccagcccctgatctagaccagcagctcatctgatagaggcagaggtggccttaaagatgtggccttcttcattttctgttggtttggtttcgtttctatgagagatttcctctgatagctctgctttccccagcacttactctctgagcttttaaatgttctctctgggagcttcatataagctcggtgacatttgagccacagtttttagatcagcacctggaatacatgacacattcttactgaggtcatccagcactgccatggtggctgcccagtcttctggccagtgtgccaggcacatgtccctgtcacacaggttccaagaaacacatacgcagccatgcatagaccaacagatttaatattatattgcagttttcagcgatgcagaatgcagctgcaattgtgttttaaggagaagccaaatggggatggttgtccctgcaacatggtgccactcctgggccatgtgcagcctcagtggacactcttccatagcgctgaggccctggccccgcctccagttaccctgtactgcccactgccttacagttcagtgcgcaggccttcaccttttcatcaccagcctctctgctcagtgctctggagttcttgaccttgtcctttatcatgagatttgctgaaatcactaatgaaaataactcccaaaagcaacaaacaaaaatattagtttaactggcactgtggtatattaaaaggcacaagggcattgtggcttaacacttttgctggatcccaagagacgcacatgatgttaaaaagagatctggcagcagtactaatactacatttcagtgtaatcatcttggggtggtttggccaggatttcccaattccttgatatctggagtttcttcaccattgtccggcatcctgcggaggcttaatatacaggcgtaaggtcagcagcaatttgtctaataagtgatgagatcagtagctgaagtctctaagctgggccattactaaataccatagccatgttgatctggaaatttatccctctagtgtcttacctcacataagccatttgcccactgtgcaatatagaaaggtgttttcaaaagtatttggccgtagattttcacatccatcataaggttggcattcaataaggaaaaagttctaactccagtattaaattgtacataaatcccaaatgttcttaaagaacactcagggacatgtttgttgcctgggattggtaatgaaaggttggtttttgaaacttgaaatttcaccattggtttttttcctatcatttctgcatatccagcaaaaggaatctcatgttgactcctggcagagttcagtggcttcagtctgtctatctgttctgaggggaaaattgtgttctggatccagtaatcaatttggcaactttaatcgaggttttcaaaattccaaggagggttaataaagaatgataatcagttttatttgctaatagctaagacaaatttgtaataaagtgttttataatacttcaaaagc

SEQ ID NO: 369476 - DNA, 3351 bp, Homo sapiens
gctggactcgatgggtacctgcgtgtgagtatgaaggagagagggaaggctcagaggtagcttagataagcaaggtaaggaaaagtgaggaagaatgatgttatcaatagtaacaggaggtcatcagggaaaaacaggtgaagaagatggtgtgagttttaggaatcagatggtcaagtgccctagcaacagcaggagagacacaggcctcggggagaggggtgtggactgcgcatgttcactgtaggtgggttatcgcctgtatttaggtgtgttgtcccccctggaaaagggaacaatcaaagaggaaaagaccacttaacaagggggttgggaggtagttggccagctttggaatagctggtgagagagagaaactttcattaccatctagttaccacctgttctctagatgggaaaaagaaaaaaaaagtcagtaaatactggaagcagacagttaccagaagtcacccccacaaaaaaataagctgggtggtgggggtggtggttagttgttgttgctagaagacagaagacttactatttggaaaccttccccgggttccacaggatctacgagattctagtcagcaaagggagcaatgcctgtccacgtgtgtgtgaatgtatgtgtttataatgatggcttttccttcctccccagagtgttcatactgtggagcccgctgggaccagtataaactctgctctactccccagtgccgccagctcgttttgacctgccctgcctgtcaaggacaaggattcacagcctgttgtgtcacatgtcaagacaaggggagcaggaaagtttcaggccctatgcaagacagctttaaagaggaatgcgagtgcacagcccgacggccacgcatacctagggaactcttgcagcatgtgcgacagcctgtgagcccagagccagggcctgatgctgatgaggatgggccagtgcttatgtgagcagcacctttggcattttcccaggccctcggtaaaagtaggtttggggtgactatacagagaaagcatggcaagactgcagaaacagagaaatcgggaacttcagttctggccgctgccaccgtggcagccgtctacacttcacagcgggaggggaggagtcacgttgtctaccacttacctgagacattctgatttggatgatgctagagcacagaaaataggtgagctgcatgggatcccaaagctgctgagggatagagcctgagcctggtggccacagcatatgccctttctgttccatgcagctggggctgttagtagtcattgcccttgtcagcagaccttctaccctggtggcaaacacatgaaagctgtggccctgggagtggcctcctaaaacaagccacttaggtcatctgccatctacccttaacctctgtctctcgcctgaggggaatctgcaagctgtgcattgggcttacctcctgcttttgtagaaataaccatcctttggtatacatggaggatagttccagaacgcctgagtatacaaaaacccaatgcatactcaagtcccacagtgggccctacagaacccacgtatgtgataaatcagccctccatgtacgcaggtttcgccccctgccaatactgtattttcaacctgtatggttgaaaaaaatccatatataagtgcagccatgcagttcaaacccatattgttcaagggtcaactgtatagtttattgaacagccacacccattcctttacacatgatctatggcagagttgaatagttgcaacagacactatgtggcctgcaaaatcggaaatttttactgtctggccttttacagaaaagtttgccagcccctgatctagaccagcagctcatctgatagaggcagaggtggccttaaagatgtggccttcttcattttctgttggtttggtttcgtttctatgagagatttcctctgatagctctgctttccccagcacttactctctgagcttttaaatgttctctctgggagcttcatataagctcggtgacatttgagccacagtttttagatcagcacctggaatacatgacacattcttactgaggtcatccagcactgccatggtggctgcccagtcttctggccagtgtgccaggcacatgtccctgtcacacaggttccaagaaacacatacgcagccatgcatagaccaacagatttaatattatattgcagttttcagcgatgcagaatgcagctgcaattgtgttttaaggagaagccaaatggggatggttgtccctgcaacatggtgccactcctgggccatgtgcagcctcagtggacactcttccatagcgctgaggccctggccccgcctccagttaccctgtactgcccactgccttacagttcagtgcgcaggccttcaccttttcatcaccagcctctctgctcagtgctctggagttcttgaccttgtcctttatcatgagatttgctgaaatcactaatgaaaataactcccaaaagcaacaaacaaaaatattagtttaactggcactgtggtatattaaaaggcacaagggcattgtggcttaacacttttgctggatcccaagagacgcacatgatgttaaaaagagatctggcagcagtactaatactacatttcagtgtaatcatcttggggtggtttggccaggatttcccaattccttgatatctggagtttcttcaccattgtccggcatcctgcggaggcttaatatacaggcgtaaggtcagcagcaatttgtctaataagtgatgagatcagtagctgaagtctctaagctgggccattactaaataccatagccatgttgatctggaaatttatccctctagtgtcttacctcacataagccatttgcccactgtgcaatatagaaaggtgttttcaaaagtatttggccgtagattttcacatccatcataaggttggcattcaataaggaaaaagttctaactccagtattaaattgtacataaatcccaaatgttcttaaagaacactcagggacatgtttgttgcctgggattggtaatgaaaggttggtttttgaaacttgaaatttcaccattggtttttttcctatcatttctgcatatccagcaaaaggaatctcatgttgactcctggcagagttcagtggcttcagtctgtctatctgttctgaggggaaaattgtgttctggatccagtaatcaatttggcaactttaatcgaggttttcaaaattccaaggagggttaataaagaatgataatcagttttatttgctaatagctaagacaaatttgtaataaagtgttttataatacttcaaaagc

SEQ ID NO: 369477 - DNA, 1398 bp, Homo sapiens
acgcagaaagtgccgccgctttggccactcagagcccccgggccgcggtcgtcgtacgcctgaaggcgggtcgtgccggcggccgctctagtctccgcctccgctcaggccggtcctccggggcttctcaatggtttcccggtggcctctcaatggttttcccggcggcccttgcgccgacgccaggagacttccggagcttggtgacgtcacgagcgagcttttctacccaaatacgcggcgggggaataggctcgagggcggtgagcagtgacaattgctaggcggagacagtgcagggaagagagaccttagaaaggatcaggactggcgggaggtatttaactgaaaggaatatctgcttcactgttgcaaccaaaccagatgccttcttccacttcaccagaccaaggagatgacctggagaactgcattttaagattttctgacctggatttaaaagatatgagtcttattaatcccagcagcagtcttaaagcagaattagatggcagtacaaaaaagaaatactcgtttgcaaagaaaaaggcctttgccctttttgtcaaaaccaaagaagttccaacaaaaaggagttttgaatgtaaagaaaaattgtggaaatgctgtcagcagctattcacagaccaaaccagcatccatagacatgtggcaacacaacatgctgatgaaatttatcaccagacagcttctattttaaagcaactggctgtgacattgagcacctcaaagagtctttcgtctgcagatgaaaagaaccctttaaaagagtgccttccacatagccatgacgtgtctgcttggctccctgatataagctgctttaaccctgatgagctgataagtggccagggcagtgaagaaggggaggtgctcctttattactgctaccatgacctggaggatccccaatggatctgtgcctggcagacagctctgtgtcagcacctgcacctcacaggcaagattcgaattgctgcagaaggaatcaatgggacagttggtggaagcaaattggctaccagactttatgtggaagtcatgctttccttcccattgtttaaggatgacctgtgtaaagatgattttaaggttacgagacagtacaatagaaggagtatgctcgtccccattctttcactgagtcaccatatgattttggaccagctagtgctctagacctcagtatcccttcttataaaataagaatgttacagctcatgcaatctgggactccaaatcttggacatattagctcacttgagagaccaccagcctggtcagcagatcactgtgtttttagtaaatctggaattgtaagattaacacttcataccacatgggggaataaagttgttgctctcacaggtgggctgc

SEQ ID NO: 369478 - DNA, 1874 bp, Homo sapiens
  misc_feature (494)..(494): n is a, c, g, or t
cggggtcctcttgtagcggccacgttgatctgcgatacgcgtgtttgcccagtgagtggccccggactgctacgtgggactgcggtgaatgaacccagaaggtggagaggaaccgttctcggtgcacagaggcggctctgcagcccggtgagggcgcctgctgctcccgggcagtgctttccccaagtagtccgatggctgcggctgcgccgaggcgccctactcaggagcaacttggcgaggttcagactcttggagccagaagctacatgacccctaaacgggcacagtgacttttgaagacgtggctgtgaaatttacccaggaggaatggaatctccttagtgaggctcagagatgcctgtaccgtgatgtgactctggagaacctggcacttatgtcctccctgggttgttggtgtggagtggaagatgaggcggcaccttctaagcagagtatttatatacaaagagagactcaggtcaggactcctntgacaggtgtgtctcccaagaaggcccacccctgtgagatgtgtggcccgatcttgggagacattttgcatgtggcagatcatcagggaacacatcacaagcagaaactgcacaggtgtgaggcctgggggaataaattgtatgacagtggaaactttcatcagcaccagaatgagcacattggagagaaaccctacagagggagtgttgaggaggcgttgtttgtgaagaggtgtaagttgcatgtgtcaggggagtcatctgtcttcagtgagagtgggaaggacttttgcccaggtcaggattactccagcaggaggccagtcacactggggagaagtcaaacagcaaaactgagtgtgtgtctccctttcagtgtgggggagctcactatagccatggagattccatgaaacattttagcaccaaacatatactcagtcagcaccagagacttctccctcgagaagaatgttatgtgtgctgtgaatgtgggaaatcctttagcaaatatgttagcttcagtaatcatcagagagttcacagtggaaaaagaccttatgaatgtggagaatgtgagaaatcttttagtcaaaagagcagcctcattcaacatcagcaatttcacactggaggaaaaccttatgggtgtgaagaatgtgggaaatattttagcttagaaggatatcttaggcgccatcaaaaagttcacgctggaaaagggccttatgagtgtggagaatgtgggaaatcttttagttcaaacgtgaaccttaagagtcatcagcgcattcacactggagagagaccttacaagtgtggagaatgtgagaaatcttttagtcggaagcccagccttagttaccatcagcgcattcacactgaagtaagaccttacaagtgtggagaatgtgggaaatcttatatttcaaaggggcaccttaggatccatcagcgcatgcacactggagaaagaccttacaagtgtggagactgtgggaaatcttttaatgaaaaaggacaccttaggagtcatcagcgagttcacactacagaaagaccttataagtgtggggaatgtgggaaatgttttagtcacaagggtaacctcattctacaccagcatggccatactagaaaaaggccttatatgtgttgggaatgtggaaaattatttaagaagaagtctcacctccttgtacaccagagaattcacagtggagagaagccatatgcttgtgaggcttgtcagaaattttttaggcacaagtgccacctcactgcacaccagagagttcacactggagaaaggccatatgaatgcagtgattgtgggaagtcatttacccacagctgtgcattcattgttcataagagagt

SEQ ID NO: 369479 - DNA, 1255 bp, Homo sapiens
  misc_feature (4)..(4): n is a, c, g, or t
tacnactactaaattcgcggccgcgtcgtggcctcaacaatacaatattcatcattatggaagtcctgataattcctgtatctgcatattcatcatatacgtagtgactggatcattgtggatgcccttttaaaagacatgcattacgctgcacgtggtggctcacctgtaatcccaggactttgggaggctgaggccagcagatcacaaggtcaggagttcgagaccagcctggccaacatggtgaaaccccatctctactaaaaatacaaaaattagctgggtgtggtggcatgtgcctgtagtcccagctactcaggaggctgaggcaggagaatcgtttgaacctgggaggcagaggttgccgtgagccaagattatgccactgcactccagcctgggcaacagggtgaggctctgcctcaaaaaaaaagaaaaaaaaagaaaaaaaagacatgagttgcagttacattattctgtctcctccactgcctataaataaagtaattctataaaattataatttcacctgatagcattacaatctgtgatgttatcctacagaattctggatatcagggcatgtgtctgcattgcaagagctgggcaacagacttccctcagccgtaccaagtacaatgcaatatacctcgtaaaagaattttgtcttgttcaaaaaatgccagaaattgtcacaaaaaatgccctgtatccagctgacctatgaacccacaaattttagtatccgtgctacagataaagaccacaaagccctgaaggtcttctctggaggcctctggcagctatgcaaagcagtccacaagtggagaaagctacattctgcattcatactgttccatgagccacaaagtttagctatgccaacaaaagctgtgacccccttcatagtaacaggacctacttatttctgaaccacccatacagtgacaacaaccctcaagattgaagaaggctgaaacaataaggccttcataatagcacaaaccggagaaatgggaggcaagctgttcttaggatcatgacttggagggtagaaaatttgtcaagattgatgtgatacccacaagatctctgaaagacatagtccgtcttttcaagtcaacgtaagaggcctctgggataaaaatgggtaacgtccatggcatgacttatcagacagaaaaaaatgacaaaggaagaagtgctgaagctactcaacaaatccttctgtgactcgatcagaaattaaaagtta

SEQ ID NO: 369480 - DNA, 706 bp, Homo sapiens
acacttgagagttcacacaggagaaaggccttatgaatgcgttgagtgtggaaaatcatttcgccgaagctcttcactcttgcagcatcagagagttcacactagagaaaggccttatgaatgtagtgaatgtgggaaatcctttagcttaagatcccacctcactgaacaccagagacttcacactggggaaagaccttacaattgtagggaatgtgggaaattatttaacaggaagtatcatcttctggttcatgagagagttcacactggagaaaggccatatgcgtgtgaggtatgtgggaaattatttggcaataagcacagcgtgactatacatcagaggattcacactggagaaaggccgtatgaatgcagtgaatgtgggaaatcatttctttccagctctgcgcttcatgttcataaaagagttcattctggacaaaagccttataagtgcagtgaatgtggaaaatccttttctgaatgttccagtctcattaaacacaggagaattcacactggagaaaggccttatgaatgcaccaaatgtggaaaaacatttcagcgaagctctaccctccttcatcatcagagttcacacaggagaaaggccttatgagtgcagtgaatatgggaaatcgtttgctgaagcatcccgtctcgttaaacacaggagagttcatactggagaaaggccttatga

SEQ ID NO: 369481 - DNA, 578 bp, Homo sapiens
  misc_feature (497)..(497): n is a, c, g, or t
  misc_feature (574)..(576): n is a, c, g, or t
ctccagtgtgaactctcttgtgtttagtgagactggagctttcagcaaaagattttccacattcactgcactcataaggcttttctccagtgtgaactcttttgtgttttgtgaaactggagctttcagcgaaagattttccacattcactgcactcataaggcttttctccagtgtgaattcgcttatgaacacagaatgtagagctgtgggtaaatgattttccacaatcattgcattcataaggcctttctccagtgtgaactctctgatgtgcaatgagttggtacttgtttctaaaaaatttctgacaagcttcacaagcatatggcttttctccattgtgaattctctggtgtacaaggaggtgagacttcttcttaaataattttccacattccctacatacataaggtctttctccagtgtggccatgctggtgtagaatgaggttacccttgtgactaaaacatttcccacattccccacacttaaanggtctttctgtagtgtgaactcgctgatgattcctaaggtgtcctttttcattaaaagatttcccacagtcaaaaannnaa

SEQ ID NO: 369482 - DNA, 559 bp, Homo sapiens
cggggtcctcttgtagcggccacgttgatctgcgatacgcgtgtttgcccagtgagtggccccggactgctacgtgggactgcggtgaatgaacccagaaggtggagaggaaccgttctcggtgcacagaggcggctctgcagcccggtgagggcgcctgctgctcccgggcagtgctttccccaagtagtccgatggctgcggctgcgccgaggcgccctactcaggagcaacttggcgaggttcagactcttggagccagaagctacatgacccctaaacgggcacagtgacttttgaagacgtggctgtgaaatttacccaggaggaatggaatctccttagtgaggctcagagatgcctgtaccgtgatgtgactctggagaacctggcacttatgtcctccctggcagggcactgtgacctttgaagatgtggctgtgaacttttcccaggaggagtggtgtcttcttagtgaggctcagaggtgcttgtaccgtgatgtgatgctagagaacctggctctcatatcctcgctgggtaagttgctcacgctcac

SEQ ID NO: 369483 - DNA, 577 bp, Homo sapiens
gttttattattattcaaatcagtctccccgagcatttctggatcagagttttcaaagttaatttggcgggtaggggcttgggaagtggggagtgctgaacggtcaggttggagatggatttatagagggttgaagtgagtttttcatgctgttttctgttgtgggtgggatggcagaactgattgacccagattaccggtctgtgtgttgtcagctgatccatccagtgtaggatctccaaaatacctcaagcactgatcttagcttttacaattgttatgttatcttcaggagcaacttggcgaggttcagactcttggagccagaagctacatgacccctaaacggtaatttctaatcttatagctaaactgttagtcctgcaaaggcaggctggtccccaggcaagaagggagtcttttcaggaaagggctgttatcaattttgtttcagagtgaaaccatgaactgaattccttccctaagttaattcagcctgtgcccaggaatgaacaaggacagcttaaaggttaaaagcaagatggagtcggttaggtctgatttctttcactgtcata

SEQ ID NO: 369484 - DNA, 463 bp, Homo sapiens
ttttttcttaacgtggaatttcagtcttgttgcccaggctatccttgtgttgtctttttaattttcccttagatggtctgccctttccgtgatttctgtgtagaactctgtatcttgagctgtggtactatttttcttttgtcttttaatttaaatcttgttgggagctcttgtgatgaatattaaatacatacattttgggctgggtgtggtgcctctagcctataatcccagcactttgggaggccgaggcaggcgaatcgtgaggtcaggagatcgagaccatcctgcctaacacggtgaaacctcgtctctgcagtctcttgtcttgaattaatacaacttttgttaattctcttatgaagttaatcttcctgcttgtatgtgaattaaatatatgtcaaactttttttgtacaaaagattcatacctctttcctgtttgaaattattttactgtgttt

SEQ ID NO: 369485 - DNA, 170 bp, Homo sapiens
tcagaagccttatgagtgcagtgaatgtgggaaatcttttgctgcaagctcctatctcactagtcacaggagagttcacactggtcagaagccttatgagtgcagtgaatgtgggaaatcttttgctggaatctccagtctcactaatcacaggagagttcacactggag

SEQ ID NO: 369486 - DNA, 8494 bp, Homo sapiens
  misc_feature (4024)..(4024): n is a, c, g, or t
acgtatggtgcagtacattgattgaagtaacatgagagagaaggggtgggtgtagcaaaaacattctcaaggccaagtcatcagcccttacccttaggagggggcagtgattaagaggtggtatgagagcctcgtttctcatttctataagtgctggtaaaggacctgaccccacttccttacctactgcctgcccaggtaactgatgcctacagcatcacaggaattgccaaaatgcagaaaacaaatcctaaattgctctaattccataacacaaaggctggtttttggcttgaaataatcaggcacatatatcatgttctgtcacccagggtggagtgcagtggtgtgatctcggctcactacaaaccccgcctcctgggttcacgccattctccggcctcagcctcccgagtagctgggactacaggtgcccaccaccatgcccggctaattttttgtatttttagtagagacagggtttcaccatgttaaccagcatagtctctatcccctgactgcaagatctgcccgaatcagtgtcccaaagtgctgggattacaggcgtgagccaccgcacccagcccagaagggagtggacctttttatgtcaggacctcagcatggatacctatttgtccacctacttcttgttgctgatggcatttgaccagcaggcccatgaagagacaaaggcaccagtggatgtggtttcaactccgtgttggggaccttgggaggaggatgggcaagggtgggcgtgtgggagaggtgggttgtggtacctcagcagaggggctgcttgtggcttcatctgtcactatcatagcagggcactgtgacctttgaagatgtggctgtgaacttttcccaggaggagtggtgtcttcttagtgaggctcagaggtgcttgtaccgtgatgtgatgctagagaacctggctctcatatcctcgctgggttgttggtgtggatcaaaagatgaggaggcaccttgtaagcagagaatttctgtacaaagagagtctcagagcaggactcctagggcaggtgtttctcctaagaaggctcacccctgtgaaatgtgtggcctcatcttggaggatgtttttcactttgctgaccaccaggaaactcatcacaagcagaagctgaacaggagtggagcatgtggaaaaaacttggatgacactgcataccttcatcagcaccagaagcagcatattggagagaaattctacagaaagagtgtcagagaagcatcgtttgtaaagaaacgtaagctcagggtgtcacaggagccatttgtcttccgcgagtttgggaaggacgttctgcccagttcaggattgtgccaagaagaagctgctgtagagaagacagacagtgaaactatgcatggcccaccctttcaggagggaaaaactaattacagttgtggaaaacgcacaaaagccttcagcaccaaacactcagttattccacaccagaaacttttcactagagatggatgttatgtgtgcagtgattgtggaaaatcctttagcagatatgtcagcttcagtaatcatcagcgagatcacactgcaaaaggaccttatgattgtggagagtgtgggaaatcttatagtcgaaagagcagccttattcaacatcagcgagtccacactggacagacagcttatccctgtgaggagtgcgggaaatcttttagtcagaagggcagccttattagccatcagcttgttcacactggagaagggccttatgagtgtagagaatgtgggaaatcttttggtcaaaagggtaacctcattcaacatcagcaaggtcacactggagagagagcttatcactgtggggaatgtgggaaatcttttcgtcagaagttctgctttattaaccatcagcgtgttcacactggagaaaggccttacaagtgtggagaatgtgggaaatcttttggtcaaaagggcaacctcgttcaccatcagcgaggtcatactggagaaaggccctatgagtgcaaggaatgtgggaaatcatttaggtacagatcccacctcactgaacaccagagacttcacactggggaaagaccttacaattgtagggaatgtgggaaattatttaacaggaagtatcatcttctggttcatgagagagttcacactggagaaaggccatatgcgtgtgaggtatgtgggaaattatttggcaataagcacagcgtgactatacatcagaggattcacactggagaaaggccgtatgaatgcagtgaatgtgggaaatcatttctttccagctctgcgcttcatgttcataaaagagttcattctggacaaaagccttataagtgcagtgaatgtggaaaatccttttctgaatgttccagtctcattaaacacaggagaattcacactggagaaaggccttatgaatgcaccaaatgtggaaaaacatttcagcgaagctctaccctccttcatcatcagagttcacacaggagaaaggccttatgagtacacaccaccacgcccagctaatttttgtgtttttagtggagatggggttttaccatgttggccaggctggtctcaaactcctgacctcaagtgatccacccaccttgactcccaaagtgctgaaattacaggcatgagcctctgcacctggccttcattcttttcgtattgcttagaatatgacatgctgaaccaggcatggtggctcatgcttgtaaacctgatgctttgggaggacaaggtggttcattggaggccaggagttggagatcagcctgggcaacatggccagacctcctctctacaaaaagaaaaaagaatgacatgcttcttgtttttgtctgttataaatgaaactgctatatttgaatgcagttgttcatgtaggtatgtttcactatggtaatatggtggtgtgcagtgcctgagtcacgtgatagattaaagtacaactcttttttgagacagagtctcactctgtcacccaggcgggagttaggtggcatgatttcggctcactgcaacctctgcctcccaagttcaactgattcttctgcctcagcctcccgagtagcagggattaccggtgtgcaccaccatgcctggataacttttttttttatttctattagcaatggggtttcaccatgctggccaggcttgttatgaactgacctcaagtgatctgcctgcctcagcttctcaggtgtgacctactgtgcttggcctaatgtacaactttttaagcaatgccaaactatgacttaagaatgaaattattgctcatttgtatatctatctaccatcagtgtccaagaatttctgttctatcttaccaagagggagtatggttagtatttgaaattgtttattattttaataagtggttataacttttgagtcagtggtttatgttttgcattttttttgttttgagacaaagtctcgctctgtctcccaggctagagtaccgtggcacaatctcagctcattgcaacctctgcttcctgggctcaagcactctgcccacctcagcctccagagtagctggaaatacaggtatgcaccaccacaactggataacttttgtattttctgtagagagggttttacctttttgcccagtctgatcgcgaactcctgggctcaggcgatccacttgcctaggctccaaaagtgcttggtctacaggggtgaggcaccctgcctggcctcacctgtaggcttgttttttaaaatgaattttatctatttcccatttcattaatatatttaaaaataatgaaataacaaagacgtatgttggacttcattcattcttcagtgatgtcactttgctgcaaggaatatttggttttcttttttttttttttttccagatggagtctagctctgtctcctaagctacagtgaagtggcatgatctcggcccactgcaacctccacctcctgtgttcaagcgattctgcctcagcctcctgagtagctgggactacnggcatgtgccattatacctggctaattttatttatttattttagtagagatggggtttcaccatgttacccaggctgctctctaccttctgagctcaagtgatccacctgcctcggcctcccaaagtgctgggattacaggtgtcagccactgtacctggctgaatacttggttttcagtaccacaagaactatgagctggttatccacttcatgtggaatcataagcgtcccaaagtgacaatacatatagattgccaggcagtgaaacagttaagatgccaccatagctttcttttcaacatctttctaagattaccttactatttcttttgttccaagtttgtacttcctcacagttctcacatatggaaaggatacacactttgtagaaacaagaactttatgttatccaagttctaggatagccatgagctccaattatctcagagctctgagtcctctactcaatacccattgagatttatgtgttctgaggcttttgtcttctagctacttacttcattctccatgggtaacgtcattcatccacattaactaatttcctcactccaagctcttttctagagataatctccagtccctgtgcagaaactgtcattgcactttctgctgaaatggcagtttcttctcagcaaggtgagattatggaatccagaatcttttttcaggggtcacatgcccatttccccacttgcatgaatgtcgacactgcagccacagttttggccgtaaatgtgaatttggcaagtaaccactgttcccagggaaatgtcccaatcagaagaagattatctgggacactgatactgacagggagatgggacattctgagggacccggaggcagggtgccacctcctcaacttccctgagggctgcctagaatctgtttcctctcactctgaattattcttcctcttatggctgaccaaaaacatggaacctcacaaagtccactgtaacagctttatatttgtgaagtgaagaacatgaagacagtttcaagcaaagttattgagtggacactttgtgttttttttgagaagtctcactctttcacccaggctggagtgcagtggcacgatctcggctcactgcaactccacctcccgggttcacgccattctcttgcctcagcctcctgagtagctgggaccacaagcgcccaccacgtcagcttaatttttttgttttgtttcttgagacagagtcttgctctcttgcccaggttggagtgccgtgtcgcaatctcagctcactgcaacttctacctcctggattcaagcacttctccttgcctcagccacctctttagctgggattacaggtgcgtgccaccacacccagctaattaccttgtattacagcatgttatataagcacatacaggcacatacatgaaatagtgatacttcattctcagtaatatcttcatccttctcactggaaagatctttgatgatttttaatcaacataggagtttcaatgatatctagaagtttaaaagggctcgttcaaacaaattatgaccacacacactgaagagtatgtttgtctcttgtggtgtaaatttttttttattacaccaaattatgttcacacaaaacctttgtaatcagggggaattaaagagccttcctggaaaatggaggttgcaatcagccgagatggtgccatcgcactctagcctggggaatagagtgagatcctgcctcaaaaaaaacaaaaaaattctttattttctccataaactacagtttatataagcaaaagtttcagtactaagcaattttagtctctgcagtctcttgtcttgaattaatacaacttttgttaattctcttatgaagttaatcttcctgcttgtatgtgaattaaatatatgtcaaactttttttgtacaaaagattcatacctctttcctgtttgaaattattttactgtgtttcatcaatctaatgtttatttttattacaccagtaatttcctcattgtgttgaatcttacagtggcttataaatctacatgtacctagaaatgtttagccagtccatgtatatttgatgtggcacattttttcctttgaatcacatactctaagagaagtaacttcctcttgctaacctctactttccctaagtgttgaattaatcctctttagatgattataattctcttttcaatagctagaaagaatctataaggaactttcctggctgggtgtggtggctcatgcctgtaatcccagcacttcaggaggccgaggtgggtggatcacgaggtcaggagttccagaccagcctgaccaacatggttaaaccatgtctttactaaaaatgcaaaaattagcacctgtaatcccagctactcaggaggctgaggcatagaattgcttgaacctggcaggcagaggtggtgagccgagatcacggcactgcactccagcctgggtgacaagagcaagactccgtctcaaaataaataaataaaaataaaaaataaacatgatgatcacagatgcagtcacattttctgagttcttgtctctctgccagtgccacccagatagcctcacaaaactttgacccagccactgttagtgtcgccaccgcccataaaggagctgagcccagcaggggcactgcctggggccctgtagccaaaaggctacagcaggagctgatgaccctcatgatgcctggtgacaaaagaatttctgcctaccctgaaagccttatcaaatggacaccatccatgaagcagctggcacagtgtatgaagatctgaggtataagctcttgctggagttcctcaatgactacccacctttacgatgcacccacagtgaagttcctcacaccctgctaccaccctaacgtggacacccagggtaacatatgcctggacatcctgaaggagaagtggtctgccccgtatgatatcaggaccatcctgctctctatccagtgcctgctaggacaactcaacattgatagccctttgaacacacatgctaccaagctctgggaaaaccccatagctttaagaagtacctgcaagggtcaggcgcagtggctcacacctgtaatcccagcactttgggaggccgaggtgggtggatggatcacctgacgtagagagtccaaggcctgacaaacatggagaaatgtcatccctatttaaaaaaataaaaaaattagccaagtgtggtggcgcatgcctgtaatcccagctactcgggaggctgaggcaggagaatcacttgaacctgggaggtggaggttgcagtgagccgagatctcgctattgcactccagcctgggcaacaagagtgaaactctgcctcaaaaaaaaataaaataaaataaaaataaaaataaggaagtacctgcaagaaagctactcaaagtaggtcaccagccaggagctctgacccaggctgcccagcctatccttgtgttgtctttttaattttcccttagatggtctgccctttccgtgatttctgtgtagaactctgtatcttgagctgtggtactatttttcttttgtcttttaatttaaatcttgttgggagctcttgtgatgaatattaaatacatacattttgggctgggtgtggtgcctctagcctataatcccagcactttgggaggccgaggcaggcgaatcgtgaggtcaggagatcgagaccatcctgcctaacacggtgaaacctcgtctctactaaaaatacaaaaaaattagccgggcgtggtggcgggtgcctatagtcccagctgctcgggaggctgaggcaggagaatggcatgaacccgggaggtggagcttgcagtgagctgagattgcaccactgcactccaggctgggcacagagcaagactccatctcaaaaaaaaaaaaaaaaaaaagacaaaaagaaaacattttggtcattaaaaaacaaaaaaaaaatgatacgagagagcacccagggattataagaggaaacactttattacatcactcatctaacattccagaaaatggaaagtactctactgtacagcaaagtaaatcattggttgtctggagaacagaaagaaagcctttataaaaaggttccaagtaaatataaaggtgttaagttcattattgtgactatgttaatggtttcatgggattatatgaaactcaagatttatcacatgctacagcttaaatatgcatagcttactgaatgtcatttataactcatcacagctttaaaatatacttcagactggcagcagtggctcacacctgtattcccaccactctgggaggctgaggcaggcatatcacctgaggtcaggagtccaagatcagcctggccaacatggcaaaactccgtctctactaaaaatacaaaacttggccgggcatggtggcacatgcttccagtcccacctacatgggaggctgagcc

SEQ ID NO: 369487 - DNA, 8189 bp, Homo sapiens
  misc_feature (3719)..(3719): n is a, c, g, or t
gagatggtgtctcgctctgttggccagggtggagtgcagtggtgtgatctcggctcactacaaaccccgcctcctgggttcacgccattctccggcctcagcctcccgagtagctgggactacaggtgcccaccaccatgcccggctaattttttgtatttttagtagagacagggtttcaccatgttaaccagcatagtctctatcccctgactgcaagatctgcccgaatcagtgtcccaaagtgctgggattacaggcgtgagccaccgcacccagcccagaagggagtggacctttttatgtcaggacctcagcatggatacctatttgtccacctacttcttgttgctgatggcatttgaccagcaggcccatgaagagacaaaggcaccagtggatgtggtttcaactccgtgttggggaccttgggaggaggatgggcaagggtgggcgtgtgggagaggtgggttgtggtacctcagcagaggggctgcttgtggcttcatctgtcactatcatagcagggcactgtgacctttgaagatgtggctgtgaacttttcccaggaggagtggtgtcttcttagtgaggctcagaggtgcttgtaccgtgatgtgatgctagagaacctggctctcatatcctcgctgggttgttggtgtggatcaaaagatgaggaggcaccttgtaagcagagaatttctgtacaaagagagtctcagagcaggactcctagggcaggtgtttctcctaagaaggctcacccctgtgaaatgtgtggcctcatcttggaggatgtttttcactttgctgaccaccaggaaactcatcacaagcagaagctgaacaggagtggagcatgtggaaaaaacttggatgacactgcataccttcatcagcaccagaagcagcatattggagagaaattctacagaaagagtgtcagagaagcatcgtttgtaaagaaacgtaagctcagggtgtcacaggagccatttgtcttccgcgagtttgggaaggacgttctgcccagttcaggattgtgccaagaagaagctgctgtagagaagacagacagtgaaactatgcatggcccaccctttcaggagggaaaaactaattacagttgtggaaaacgcacaaaagccttcagcaccaaacactcagttattccacaccagaaacttttcactagagatggatgttatgtgtgcagtgattgtggaaaatcctttagcagatatgtcagcttcagtaatcatcagcgagatcacactgcaaaaggaccttatgattgtggagagtgtgggaaatcttatagtcgaaagagcagccttattcaacatcagcgagtccacactggacagacagcttatccctgtgaggagtgcgggaaatcttttagtcagaagggcagccttattagccatcagcttgttcacactggagaagggccttatgagtgtagagaatgtgggaaatcttttggtcaaaagggtaacctcattcaacatcagcaaggtcacactggagagagagcttatcactgtggggaatgtgggaaatcttttcgtcagaagttctgctttattaaccatcagcgtgttcacactggagaaaggccttacaagtgtggagaatgtgggaaatcttttggtcaaaagggcaacctcgttcaccatcagcgaggtcatactggagaaaggccctatgagtgcaaggaatgtgggaaatcatttaggtacagatcccacctcactgaacaccagagacttcacactggggaaagaccttacaattgtagggaatgtgggaaattatttaacaggaagtatcatcttctggttcatgagagagttcacactggagaaaggccatatgcgtgtgaggtatgtgggaaattatttggcaataagcacagcgtgactatacatcagaggattcacactggagaaaggccgtatgaatgcagtgaatgtgggaaatcatttctttccagctctgcgcttcatgttcataaaagagttcattctggacaaaagccttataagtgcagtgaatgtggaaaatccttttctgaatgttccagtctcattaaacacaggagaattcacactggagaaaggccttatgaatgcaccaaatgtggaaaaacatttcagcgaagctctaccctccttcatcatcagagttcacacaggagaaaggccttatgagtacacaccaccacgcccagctaatttttgtgtttttagtggagatggggttttaccatgttggccaggctggtctcaaactcctgacctcaagtgatccacccaccttgactcccaaagtgctgaaattacaggcatgagcctctgcacctggccttcattcttttcgtattgcttagaatatgacatgctgaaccaggcatggtggctcatgcttgtaaacctgatgctttgggaggacaaggtggttcattggaggccaggagttggagatcagcctgggcaacatggccagacctcctctctacaaaaagaaaaaagaatgacatgcttcttgtttttgtctgttataaatgaaactgctatatttgaatgcagttgttcatgtaggtatgtttcactatggtaatatggtggtgtgcagtgcctgagtcacgtgatagattaaagtacaactcttttttgagacagagtctcactctgtcacccaggcgggagttaggtggcatgatttcggctcactgcaacctctgcctcccaagttcaactgattcttctgcctcagcctcccgagtagcagggattaccggtgtgcaccaccatgcctggataacttttttttttatttctattagcaatggggtttcaccatgctggccaggcttgttatgaactgacctcaagtgatctgcctgcctcagcttctcaggtgtgacctactgtgcttggcctaatgtacaactttttaagcaatgccaaactatgacttaagaatgaaattattgctcatttgtatatctatctaccatcagtgtccaagaatttctgttctatcttaccaagagggagtatggttagtatttgaaattgtttattattttaataagtggttataacttttgagtcagtggtttatgttttgcattttttttgttttgagacaaagtctcgctctgtctcccaggctagagtaccgtggcacaatctcagctcattgcaacctctgcttcctgggctcaagcactctgcccacctcagcctccagagtagctggaaatacaggtatgcaccaccacaactggataacttttgtattttctgtagagagggttttacctttttgcccagtctgatcgcgaactcctgggctcaggcgatccacttgcctaggctccaaaagtgcttggtctacaggggtgaggcaccctgcctggcctcacctgtaggcttgttttttaaaatgaattttatctatttcccatttcattaatatatttaaaaataatgaaataacaaagacgtatgttggacttcattcattcttcagtgatgtcactttgctgcaaggaatatttggttttcttttttttttttttttccagatggagtctagctctgtctcctaagctacagtgaagtggcatgatctcggcccactgcaacctccacctcctgtgttcaagcgattctgcctcagcctcctgagtagctgggactacnggcatgtgccattatacctggctaattttatttatttattttagtagagatggggtttcaccatgttacccaggctgctctctaccttctgagctcaagtgatccacctgcctcggcctcccaaagtgctgggattacaggtgtcagccactgtacctggctgaatacttggttttcagtaccacaagaactatgagctggttatccacttcatgtggaatcataagcgtcccaaagtgacaatacatatagattgccaggcagtgaaacagttaagatgccaccatagctttcttttcaacatctttctaagattaccttactatttcttttgttccaagtttgtacttcctcacagttctcacatatggaaaggatacacactttgtagaaacaagaactttatgttatccaagttctaggatagccatgagctccaattatctcagagctctgagtcctctactcaatacccattgagatttatgtgttctgaggcttttgtcttctagctacttacttcattctccatgggtaacgtcattcatccacattaactaatttcctcactccaagctcttttctagagataatctccagtccctgtgcagaaactgtcattgcactttctgctgaaatggcagtttcttctcagcaaggtgagattatggaatccagaatcttttttcaggggtcacatgcccatttccccacttgcatgaatgtcgacactgcagccacagttttggccgtaaatgtgaatttggcaagtaaccactgttcccagggaaatgtcccaatcagaagaagattatctgggacactgatactgacagggagatgggacattctgagggacccggaggcagggtgccacctcctcaacttccctgagggctgcctagaatctgtttcctctcactctgaattattcttcctcttatggctgaccaaaaacatggaacctcacaaagtccactgtaacagctttatatttgtgaagtgaagaacatgaagacagtttcaagcaaagttattgagtggacactttgtgttttttttgagaagtctcactctttcacccaggctggagtgcagtggcacgatctcggctcactgcaactccacctcccgggttcacgccattctcttgcctcagcctcctgagtagctgggaccacaagcgcccaccacgtcagcttaatttttttgttttgtttcttgagacagagtcttgctctcttgcccaggttggagtgccgtgtcgcaatctcagctcactgcaacttctacctcctggattcaagcacttctccttgcctcagccacctctttagctgggattacaggtgcgtgccaccacacccagctaattaccttgtattacagcatgttatataagcacatacaggcacatacatgaaatagtgatacttcattctcagtaatatcttcatccttctcactggaaagatctttgatgatttttaatcaacataggagtttcaatgatatctagaagtttaaaagggctcgttcaaacaaattatgaccacacacactgaagagtatgtttgtctcttgtggtgtaaatttttttttattacaccaaattatgttcacacaaaacctttgtaatcagggggaattaaagagccttcctggaaaatggaggttgcaatcagccgagatggtgccatcgcactctagcctggggaatagagtgagatcctgcctcaaaaaaaacaaaaaaattctttattttctccataaactacagtttatataagcaaaagtttcagtactaagcaattttagtctctgcagtctcttgtcttgaattaatacaacttttgttaattctcttatgaagttaatcttcctgcttgtatgtgaattaaatatatgtcaaactttttttgtacaaaagattcatacctctttcctgtttgaaattattttactgtgtttcatcaatctaatgtttatttttattacaccagtaatttcctcattgtgttgaatcttacagtggcttataaatctacatgtacctagaaatgtttagccagtccatgtatatttgatgtggcacattttttcctttgaatcacatactctaagagaagtaacttcctcttgctaacctctactttccctaagtgttgaattaatcctctttagatgattataattctcttttcaatagctagaaagaatctataaggaactttcctggctgggtgtggtggctcatgcctgtaatcccagcacttcaggaggccgaggtgggtggatcacgaggtcaggagttccagaccagcctgaccaacatggttaaaccatgtctttactaaaaatgcaaaaattagcacctgtaatcccagctactcaggaggctgaggcatagaattgcttgaacctggcaggcagaggtggtgagccgagatcacggcactgcactccagcctgggtgacaagagcaagactccgtctcaaaataaataaataaaaataaaaaataaacatgatgatcacagatgcagtcacattttctgagttcttgtctctctgccagtgccacccagatagcctcacaaaactttgacccagccactgttagtgtcgccaccgcccataaaggagctgagcccagcaggggcactgcctggggccctgtagccaaaaggctacagcaggagctgatgaccctcatgatgcctggtgacaaaagaatttctgcctaccctgaaagccttatcaaatggacaccatccatgaagcagctggcacagtgtatgaagatctgaggtataagctcttgctggagttcctcaatgactacccacctttacgatgcacccacagtgaagttcctcacaccctgctaccaccctaacgtggacacccagggtaacatatgcctggacatcctgaaggagaagtggtctgccccgtatgatatcaggaccatcctgctctctatccagtgcctgctaggacaactcaacattgatagccctttgaacacacatgctaccaagctctgggaaaaccccatagctttaagaagtacctgcaagggtcaggcgcagtggctcacacctgtaatcccagcactttgggaggccgaggtgggtggatggatcacctgacgtagagagtccaaggcctgacaaacatggagaaatgtcatccctatttaaaaaaataaaaaaattagccaagtgtggtggcgcatgcctgtaatcccagctactcgggaggctgaggcaggagaatcacttgaacctgggaggtggaggttgcagtgagccgagatctcgctattgcactccagcctgggcaacaagagtgaaactctgcctcaaaaaaaaataaaataaaataaaaataaaaataaggaagtacctgcaagaaagctactcaaagtaggtcaccagccaggagctctgacccaggctgcccagcctatccttgtgttgtctttttaattttcccttagatggtctgccctttccgtgatttctgtgtagaactctgtatcttgagctgtggtactatttttcttttgtcttttaatttaaatcttgttgggagctcttgtgatgaatattaaatacatacattttgggctgggtgtggtgcctctagcctataatcccagcactttgggaggccgaggcaggcgaatcgtgaggtcaggagatcgagaccatcctgcctaacacggtgaaacctcgtctctactaaaaatacaaaaaaattagccgggcgtggtggcgggtgcctatagtcccagctgctcgggaggctgaggcaggagaatggcatgaacccgggaggtggagcttgcagtgagctgagattgcaccactgcactccaggctgggcacagagcaagactccatctcaaaaaaaaaaaaaaaaaaaagacaaaaagaaaacattttggtcattaaaaaacaaaaaaaaaatgatacgagagagcacccagggattataagaggaaacactttattacatcactcatctaacattccagaaaatggaaagtactctactgtacagcaaagtaaatcattggttgtctggagaacagaaagaaagcctttataaaaaggttccaagtaaatataaaggtgttaagttcattattgtgactatgttaatggtttcatgggattatatgaaactcaagatttatcacatgctacagcttaaatatgcatagcttactgaatgtcatttataactcatcacagctttaaaatatacttcagactggcagcagtggctcacacctgtattcccaccactctgggaggctgaggcaggcatatcacctgaggtcaggagtccaagatcagcctggccaacatggcaaaactccgtctctactaaaaatacaaaacttggccgggcatggtggcacatgcttccagtcccacctacatgggaggctgagcc

SEQ ID NO: 369488 - DNA, 8284 bp, Homo sapiens
  misc_feature (3814)..(3814): n is a, c, g, or t
tttttttggtttggttttgtttgagatggagtctcactccagcctggcagcagagggagactccatctcaaacaaacaaacaaacaaaaaaagatactttaagttgtttaaaggccagagagaggccagtggtgtgtggcagtcagctggggatggacatggaatgtacctggaagtctaaagaatgaggtgcgttcagagagggtatctctgctgtgctgaaggtgccacattgggcttcccatgacctcggccatactagggaaagtgcctgtcaggagtgggtggactttatgtcacagccactgcacagatacctatttgttcaactaactattgttggtggctgtaccccatgaccagtgggcctagtttctcctatgtttgaggaccttgagaggaggatgtgcgagagtagatgtgtgggagagatggattgtgatacctcagcataggggtggtttgtggtttcatctgtcaacatcataacagggcacagtgacttttgaagacgtggctgtgaaatttacccaggaggaatggaatctccttagtgaggctcagagatgcctgtaccgtgatgtgactctggagaacctggcacttatgtcctccctggcagggcactgtgacctttgaagatgtggctgtgaacttttcccaggaggagtggtgtcttcttagtgaggctcagaggtgcttgtaccgtgatgtgatgctagagaacctggctctcatatcctcgctgggttgttggtgtggatcaaaagatgaggaggcaccttgtaagcagagaatttctgtacaaagagagtctcagagcaggactcctagggcaggtgtttctcctaagaaggctcacccctgtgaaatgtgtggcctcatcttggaggatgtttttcactttgctgaccaccaggaaactcatcacaagcagaagctgaacaggagtggagcatgtggaaaaaacttggatgacactgcataccttcatcagcaccagaagcagcatattggagagaaattctacagaaagagtgtcagagaagcatcgtttgtaaagaaacgtaagctcagggtgtcacaggagccatttgtcttccgcgagtttgggaaggacgttctgcccagttcaggattgtgccaagaagaagctgctgtagagaagacagacagtgaaactatgcatggcccaccctttcaggagggaaaaactaattacagttgtggaaaacgcacaaaagccttcagcaccaaacactcagttattccacaccagaaacttttcactagagatggatgttatgtgtgcagtgattgtggaaaatcctttagcagatatgtcagcttcagtaatcatcagcgagatcacactgcaaaaggaccttatgattgtggagagtgtgggaaatcttatagtcgaaagagcagccttattcaacatcagcgagtccacactggacagacagcttatccctgtgaggagtgcgggaaatcttttagtcagaagggcagccttattagccatcagcttgttcacactggagaagggccttatgagtgtagagaatgtgggaaatcttttggtcaaaagggtaacctcattcaacatcagcaaggtcacactggagagagagcttatcactgtggggaatgtgggaaatcttttcgtcagaagttctgctttattaaccatcagcgtgttcacactggagaaaggccttacaagtgtggagaatgtgggaaatcttttggtcaaaagggcaacctcgttcaccatcagcgaggtcatactggagaaaggccctatgagtgcaaggaatgtgggaaatcatttaggtacagatcccacctcactgaacaccagagacttcacactggggaaagaccttacaattgtagggaatgtgggaaattatttaacaggaagtatcatcttctggttcatgagagagttcacactggagaaaggccatatgcgtgtgaggtatgtgggaaattatttggcaataagcacagcgtgactatacatcagaggattcacactggagaaaggccgtatgaatgcagtgaatgtgggaaatcatttctttccagctctgcgcttcatgttcataaaagagttcattctggacaaaagccttataagtgcagtgaatgtggaaaatccttttctgaatgttccagtctcattaaacacaggagaattcacactggagaaaggccttatgaatgcaccaaatgtggaaaaacatttcagcgaagctctaccctccttcatcatcagagttcacacaggagaaaggccttatgagtacacaccaccacgcccagctaatttttgtgtttttagtggagatggggttttaccatgttggccaggctggtctcaaactcctgacctcaagtgatccacccaccttgactcccaaagtgctgaaattacaggcatgagcctctgcacctggccttcattcttttcgtattgcttagaatatgacatgctgaaccaggcatggtggctcatgcttgtaaacctgatgctttgggaggacaaggtggttcattggaggccaggagttggagatcagcctgggcaacatggccagacctcctctctacaaaaagaaaaaagaatgacatgcttcttgtttttgtctgttataaatgaaactgctatatttgaatgcagttgttcatgtaggtatgtttcactatggtaatatggtggtgtgcagtgcctgagtcacgtgatagattaaagtacaactcttttttgagacagagtctcactctgtcacccaggcgggagttaggtggcatgatttcggctcactgcaacctctgcctcccaagttcaactgattcttctgcctcagcctcccgagtagcagggattaccggtgtgcaccaccatgcctggataacttttttttttatttctattagcaatggggtttcaccatgctggccaggcttgttatgaactgacctcaagtgatctgcctgcctcagcttctcaggtgtgacctactgtgcttggcctaatgtacaactttttaagcaatgccaaactatgacttaagaatgaaattattgctcatttgtatatctatctaccatcagtgtccaagaatttctgttctatcttaccaagagggagtatggttagtatttgaaattgtttattattttaataagtggttataacttttgagtcagtggtttatgttttgcattttttttgttttgagacaaagtctcgctctgtctcccaggctagagtaccgtggcacaatctcagctcattgcaacctctgcttcctgggctcaagcactctgcccacctcagcctccagagtagctggaaatacaggtatgcaccaccacaactggataacttttgtattttctgtagagagggttttacctttttgcccagtctgatcgcgaactcctgggctcaggcgatccacttgcctaggctccaaaagtgcttggtctacaggggtgaggcaccctgcctggcctcacctgtaggcttgttttttaaaatgaattttatctatttcccatttcattaatatatttaaaaataatgaaataacaaagacgtatgttggacttcattcattcttcagtgatgtcactttgctgcaaggaatatttggttttcttttttttttttttttccagatggagtctagctctgtctcctaagctacagtgaagtggcatgatctcggcccactgcaacctccacctcctgtgttcaagcgattctgcctcagcctcctgagtagctgggactacnggcatgtgccattatacctggctaattttatttatttattttagtagagatggggtttcaccatgttacccaggctgctctctaccttctgagctcaagtgatccacctgcctcggcctcccaaagtgctgggattacaggtgtcagccactgtacctggctgaatacttggttttcagtaccacaagaactatgagctggttatccacttcatgtggaatcataagcgtcccaaagtgacaatacatatagattgccaggcagtgaaacagttaagatgccaccatagctttcttttcaacatctttctaagattaccttactatttcttttgttccaagtttgtacttcctcacagttctcacatatggaaaggatacacactttgtagaaacaagaactttatgttatccaagttctaggatagccatgagctccaattatctcagagctctgagtcctctactcaatacccattgagatttatgtgttctgaggcttttgtcttctagctacttacttcattctccatgggtaacgtcattcatccacattaactaatttcctcactccaagctcttttctagagataatctccagtccctgtgcagaaactgtcattgcactttctgctgaaatggcagtttcttctcagcaaggtgagattatggaatccagaatcttttttcaggggtcacatgcccatttccccacttgcatgaatgtcgacactgcagccacagttttggccgtaaatgtgaatttggcaagtaaccactgttcccagggaaatgtcccaatcagaagaagattatctgggacactgatactgacagggagatgggacattctgagggacccggaggcagggtgccacctcctcaacttccctgagggctgcctagaatctgtttcctctcactctgaattattcttcctcttatggctgaccaaaaacatggaacctcacaaagtccactgtaacagctttatatttgtgaagtgaagaacatgaagacagtttcaagcaaagttattgagtggacactttgtgttttttttgagaagtctcactctttcacccaggctggagtgcagtggcacgatctcggctcactgcaactccacctcccgggttcacgccattctcttgcctcagcctcctgagtagctgggaccacaagcgcccaccacgtcagcttaatttttttgttttgtttcttgagacagagtcttgctctcttgcccaggttggagtgccgtgtcgcaatctcagctcactgcaacttctacctcctggattcaagcacttctccttgcctcagccacctctttagctgggattacaggtgcgtgccaccacacccagctaattaccttgtattacagcatgttatataagcacatacaggcacatacatgaaatagtgatacttcattctcagtaatatcttcatccttctcactggaaagatctttgatgatttttaatcaacataggagtttcaatgatatctagaagtttaaaagggctcgttcaaacaaattatgaccacacacactgaagagtatgtttgtctcttgtggtgtaaatttttttttattacaccaaattatgttcacacaaaacctttgtaatcagggggaattaaagagccttcctggaaaatggaggttgcaatcagccgagatggtgccatcgcactctagcctggggaatagagtgagatcctgcctcaaaaaaaacaaaaaaattctttattttctccataaactacagtttatataagcaaaagtttcagtactaagcaattttagtctctgcagtctcttgtcttgaattaatacaacttttgttaattctcttatgaagttaatcttcctgcttgtatgtgaattaaatatatgtcaaactttttttgtacaaaagattcatacctctttcctgtttgaaattattttactgtgtttcatcaatctaatgtttatttttattacaccagtaatttcctcattgtgttgaatcttacagtggcttataaatctacatgtacctagaaatgtttagccagtccatgtatatttgatgtggcacattttttcctttgaatcacatactctaagagaagtaacttcctcttgctaacctctactttccctaagtgttgaattaatcctctttagatgattataattctcttttcaatagctagaaagaatctataaggaactttcctggctgggtgtggtggctcatgcctgtaatcccagcacttcaggaggccgaggtgggtggatcacgaggtcaggagttccagaccagcctgaccaacatggttaaaccatgtctttactaaaaatgcaaaaattagcacctgtaatcccagctactcaggaggctgaggcatagaattgcttgaacctggcaggcagaggtggtgagccgagatcacggcactgcactccagcctgggtgacaagagcaagactccgtctcaaaataaataaataaaaataaaaaataaacatgatgatcacagatgcagtcacattttctgagttcttgtctctctgccagtgccacccagatagcctcacaaaactttgacccagccactgttagtgtcgccaccgcccataaaggagctgagcccagcaggggcactgcctggggccctgtagccaaaaggctacagcaggagctgatgaccctcatgatgcctggtgacaaaagaatttctgcctaccctgaaagccttatcaaatggacaccatccatgaagcagctggcacagtgtatgaagatctgaggtataagctcttgctggagttcctcaatgactacccacctttacgatgcacccacagtgaagttcctcacaccctgctaccaccctaacgtggacacccagggtaacatatgcctggacatcctgaaggagaagtggtctgccccgtatgatatcaggaccatcctgctctctatccagtgcctgctaggacaactcaacattgatagccctttgaacacacatgctaccaagctctgggaaaaccccatagctttaagaagtacctgcaagggtcaggcgcagtggctcacacctgtaatcccagcactttgggaggccgaggtgggtggatggatcacctgacgtagagagtccaaggcctgacaaacatggagaaatgtcatccctatttaaaaaaataaaaaaattagccaagtgtggtggcgcatgcctgtaatcccagctactcgggaggctgaggcaggagaatcacttgaacctgggaggtggaggttgcagtgagccgagatctcgctattgcactccagcctgggcaacaagagtgaaactctgcctcaaaaaaaaataaaataaaataaaaataaaaataaggaagtacctgcaagaaagctactcaaagtaggtcaccagccaggagctctgacccaggctgcccagcctatccttgtgttgtctttttaattttcccttagatggtctgccctttccgtgatttctgtgtagaactctgtatcttgagctgtggtactatttttcttttgtcttttaatttaaatcttgttgggagctcttgtgatgaatattaaatacatacattttgggctgggtgtggtgcctctagcctataatcccagcactttgggaggccgaggcaggcgaatcgtgaggtcaggagatcgagaccatcctgcctaacacggtgaaacctcgtctctactaaaaatacaaaaaaattagccgggcgtggtggcgggtgcctatagtcccagctgctcgggaggctgaggcaggagaatggcatgaacccgggaggtggagcttgcagtgagctgagattgcaccactgcactccaggctgggcacagagcaagactccatctcaaaaaaaaaaaaaaaaaaaagacaaaaagaaaacattttggtcattaaaaaacaaaaaaaaaatgatacgagagagcacccagggattataagaggaaacactttattacatcactcatctaacattccagaaaatggaaagtactctactgtacagcaaagtaaatcattggttgtctggagaacagaaagaaagcctttataaaaaggttccaagtaaatataaaggtgttaagttcattattgtgactatgttaatggtttcatgggattatatgaaactcaagatttatcacatgctacagcttaaatatgcatagcttactgaatgtcatttataactcatcacagctttaaaatatacttcagactggcagcagtggctcacacctgtattcccaccactctgggaggctgaggcaggcatatcacctgaggtcaggagtccaagatcagcctggccaacatggcaaaactccgtctctactaaaaatacaaaacttggccgggcatggtggcacatgcttccagtcccacctacatgggaggctgagcc

SEQ ID NO: 369489 - DNA, 7900 bp, Homo sapiens
  misc_feature (3430)..(3430): n is a, c, g, or t
ggccgagacttccggggtctctagtagcggctgtgtatcggcgatgcgggtgtttccccagtttgtggcccctgagtgctgggtgggaccgcggtgactgaacctagaaggtggagaggaatcgtcctcggtgcccagaggcggctctgcagccccgtgacggcgaccactgctcccgggccgtgcttccccaagtagtccgatggcagcggctgtgccgaggcgcccaactcagcagggcactgtgacctttgaagatgtggctgtgaacttttcccaggaggagtggtgtcttcttagtgaggctcagaggtgcttgtaccgtgatgtgatgctagagaacctggctctcatatcctcgctgggttgttggtgtggatcaaaagatgaggaggcaccttgtaagcagagaatttctgtacaaagagagtctcagagcaggactcctagggcaggtgtttctcctaagaaggctcacccctgtgaaatgtgtggcctcatcttggaggatgtttttcactttgctgaccaccaggaaactcatcacaagcagaagctgaacaggagtggagcatgtggaaaaaacttggatgacactgcataccttcatcagcaccagaagcagcatattggagagaaattctacagaaagagtgtcagagaagcatcgtttgtaaagaaacgtaagctcagggtgtcacaggagccatttgtcttccgcgagtttgggaaggacgttctgcccagttcaggattgtgccaagaagaagctgctgtagagaagacagacagtgaaactatgcatggcccaccctttcaggagggaaaaactaattacagttgtggaaaacgcacaaaagccttcagcaccaaacactcagttattccacaccagaaacttttcactagagatggatgttatgtgtgcagtgattgtggaaaatcctttagcagatatgtcagcttcagtaatcatcagcgagatcacactgcaaaaggaccttatgattgtggagagtgtgggaaatcttatagtcgaaagagcagccttattcaacatcagcgagtccacactggacagacagcttatccctgtgaggagtgcgggaaatcttttagtcagaagggcagccttattagccatcagcttgttcacactggagaagggccttatgagtgtagagaatgtgggaaatcttttggtcaaaagggtaacctcattcaacatcagcaaggtcacactggagagagagcttatcactgtggggaatgtgggaaatcttttcgtcagaagttctgctttattaaccatcagcgtgttcacactggagaaaggccttacaagtgtggagaatgtgggaaatcttttggtcaaaagggcaacctcgttcaccatcagcgaggtcatactggagaaaggccctatgagtgcaaggaatgtgggaaatcatttaggtacagatcccacctcactgaacaccagagacttcacactggggaaagaccttacaattgtagggaatgtgggaaattatttaacaggaagtatcatcttctggttcatgagagagttcacactggagaaaggccatatgcgtgtgaggtatgtgggaaattatttggcaataagcacagcgtgactatacatcagaggattcacactggagaaaggccgtatgaatgcagtgaatgtgggaaatcatttctttccagctctgcgcttcatgttcataaaagagttcattctggacaaaagccttataagtgcagtgaatgtggaaaatccttttctgaatgttccagtctcattaaacacaggagaattcacactggagaaaggccttatgaatgcaccaaatgtggaaaaacatttcagcgaagctctaccctccttcatcatcagagttcacacaggagaaaggccttatgagtacacaccaccacgcccagctaatttttgtgtttttagtggagatggggttttaccatgttggccaggctggtctcaaactcctgacctcaagtgatccacccaccttgactcccaaagtgctgaaattacaggcatgagcctctgcacctggccttcattcttttcgtattgcttagaatatgacatgctgaaccaggcatggtggctcatgcttgtaaacctgatgctttgggaggacaaggtggttcattggaggccaggagttggagatcagcctgggcaacatggccagacctcctctctacaaaaagaaaaaagaatgacatgcttcttgtttttgtctgttataaatgaaactgctatatttgaatgcagttgttcatgtaggtatgtttcactatggtaatatggtggtgtgcagtgcctgagtcacgtgatagattaaagtacaactcttttttgagacagagtctcactctgtcacccaggcgggagttaggtggcatgatttcggctcactgcaacctctgcctcccaagttcaactgattcttctgcctcagcctcccgagtagcagggattaccggtgtgcaccaccatgcctggataacttttttttttatttctattagcaatggggtttcaccatgctggccaggcttgttatgaactgacctcaagtgatctgcctgcctcagcttctcaggtgtgacctactgtgcttggcctaatgtacaactttttaagcaatgccaaactatgacttaagaatgaaattattgctcatttgtatatctatctaccatcagtgtccaagaatttctgttctatcttaccaagagggagtatggttagtatttgaaattgtttattattttaataagtggttataacttttgagtcagtggtttatgttttgcattttttttgttttgagacaaagtctcgctctgtctcccaggctagagtaccgtggcacaatctcagctcattgcaacctctgcttcctgggctcaagcactctgcccacctcagcctccagagtagctggaaatacaggtatgcaccaccacaactggataacttttgtattttctgtagagagggttttacctttttgcccagtctgatcgcgaactcctgggctcaggcgatccacttgcctaggctccaaaagtgcttggtctacaggggtgaggcaccctgcctggcctcacctgtaggcttgttttttaaaatgaattttatctatttcccatttcattaatatatttaaaaataatgaaataacaaagacgtatgttggacttcattcattcttcagtgatgtcactttgctgcaaggaatatttggttttcttttttttttttttttccagatggagtctagctctgtctcctaagctacagtgaagtggcatgatctcggcccactgcaacctccacctcctgtgttcaagcgattctgcctcagcctcctgagtagctgggactacnggcatgtgccattatacctggctaattttatttatttattttagtagagatggggtttcaccatgttacccaggctgctctctaccttctgagctcaagtgatccacctgcctcggcctcccaaagtgctgggattacaggtgtcagccactgtacctggctgaatacttggttttcagtaccacaagaactatgagctggttatccacttcatgtggaatcataagcgtcccaaagtgacaatacatatagattgccaggcagtgaaacagttaagatgccaccatagctttcttttcaacatctttctaagattaccttactatttcttttgttccaagtttgtacttcctcacagttctcacatatggaaaggatacacactttgtagaaacaagaactttatgttatccaagttctaggatagccatgagctccaattatctcagagctctgagtcctctactcaatacccattgagatttatgtgttctgaggcttttgtcttctagctacttacttcattctccatgggtaacgtcattcatccacattaactaatttcctcactccaagctcttttctagagataatctccagtccctgtgcagaaactgtcattgcactttctgctgaaatggcagtttcttctcagcaaggtgagattatggaatccagaatcttttttcaggggtcacatgcccatttccccacttgcatgaatgtcgacactgcagccacagttttggccgtaaatgtgaatttggcaagtaaccactgttcccagggaaatgtcccaatcagaagaagattatctgggacactgatactgacagggagatgggacattctgagggacccggaggcagggtgccacctcctcaacttccctgagggctgcctagaatctgtttcctctcactctgaattattcttcctcttatggctgaccaaaaacatggaacctcacaaagtccactgtaacagctttatatttgtgaagtgaagaacatgaagacagtttcaagcaaagttattgagtggacactttgtgttttttttgagaagtctcactctttcacccaggctggagtgcagtggcacgatctcggctcactgcaactccacctcccgggttcacgccattctcttgcctcagcctcctgagtagctgggaccacaagcgcccaccacgtcagcttaatttttttgttttgtttcttgagacagagtcttgctctcttgcccaggttggagtgccgtgtcgcaatctcagctcactgcaacttctacctcctggattcaagcacttctccttgcctcagccacctctttagctgggattacaggtgcgtgccaccacacccagctaattaccttgtattacagcatgttatataagcacatacaggcacatacatgaaatagtgatacttcattctcagtaatatcttcatccttctcactggaaagatctttgatgatttttaatcaacataggagtttcaatgatatctagaagtttaaaagggctcgttcaaacaaattatgaccacacacactgaagagtatgtttgtctcttgtggtgtaaatttttttttattacaccaaattatgttcacacaaaacctttgtaatcagggggaattaaagagccttcctggaaaatggaggttgcaatcagccgagatggtgccatcgcactctagcctggggaatagagtgagatcctgcctcaaaaaaaacaaaaaaattctttattttctccataaactacagtttatataagcaaaagtttcagtactaagcaattttagtctctgcagtctcttgtcttgaattaatacaacttttgttaattctcttatgaagttaatcttcctgcttgtatgtgaattaaatatatgtcaaactttttttgtacaaaagattcatacctctttcctgtttgaaattattttactgtgtttcatcaatctaatgtttatttttattacaccagtaatttcctcattgtgttgaatcttacagtggcttataaatctacatgtacctagaaatgtttagccagtccatgtatatttgatgtggcacattttttcctttgaatcacatactctaagagaagtaacttcctcttgctaacctctactttccctaagtgttgaattaatcctctttagatgattataattctcttttcaatagctagaaagaatctataaggaactttcctggctgggtgtggtggctcatgcctgtaatcccagcacttcaggaggccgaggtgggtggatcacgaggtcaggagttccagaccagcctgaccaacatggttaaaccatgtctttactaaaaatgcaaaaattagcacctgtaatcccagctactcaggaggctgaggcatagaattgcttgaacctggcaggcagaggtggtgagccgagatcacggcactgcactccagcctgggtgacaagagcaagactccgtctcaaaataaataaataaaaataaaaaataaacatgatgatcacagatgcagtcacattttctgagttcttgtctctctgccagtgccacccagatagcctcacaaaactttgacccagccactgttagtgtcgccaccgcccataaaggagctgagcccagcaggggcactgcctggggccctgtagccaaaaggctacagcaggagctgatgaccctcatgatgcctggtgacaaaagaatttctgcctaccctgaaagccttatcaaatggacaccatccatgaagcagctggcacagtgtatgaagatctgaggtataagctcttgctggagttcctcaatgactacccacctttacgatgcacccacagtgaagttcctcacaccctgctaccaccctaacgtggacacccagggtaacatatgcctggacatcctgaaggagaagtggtctgccccgtatgatatcaggaccatcctgctctctatccagtgcctgctaggacaactcaacattgatagccctttgaacacacatgctaccaagctctgggaaaaccccatagctttaagaagtacctgcaagggtcaggcgcagtggctcacacctgtaatcccagcactttgggaggccgaggtgggtggatggatcacctgacgtagagagtccaaggcctgacaaacatggagaaatgtcatccctatttaaaaaaataaaaaaattagccaagtgtggtggcgcatgcctgtaatcccagctactcgggaggctgaggcaggagaatcacttgaacctgggaggtggaggttgcagtgagccgagatctcgctattgcactccagcctgggcaacaagagtgaaactctgcctcaaaaaaaaataaaataaaataaaaataaaaataaggaagtacctgcaagaaagctactcaaagtaggtcaccagccaggagctctgacccaggctgcccagcctatccttgtgttgtctttttaattttcccttagatggtctgccctttccgtgatttctgtgtagaactctgtatcttgagctgtggtactatttttcttttgtcttttaatttaaatcttgttgggagctcttgtgatgaatattaaatacatacattttgggctgggtgtggtgcctctagcctataatcccagcactttgggaggccgaggcaggcgaatcgtgaggtcaggagatcgagaccatcctgcctaacacggtgaaacctcgtctctactaaaaatacaaaaaaattagccgggcgtggtggcgggtgcctatagtcccagctgctcgggaggctgaggcaggagaatggcatgaacccgggaggtggagcttgcagtgagctgagattgcaccactgcactccaggctgggcacagagcaagactccatctcaaaaaaaaaaaaaaaaaaaagacaaaaagaaaacattttggtcattaaaaaacaaaaaaaaaatgatacgagagagcacccagggattataagaggaaacactttattacatcactcatctaacattccagaaaatggaaagtactctactgtacagcaaagtaaatcattggttgtctggagaacagaaagaaagcctttataaaaaggttccaagtaaatataaaggtgttaagttcattattgtgactatgttaatggtttcatgggattatatgaaactcaagatttatcacatgctacagcttaaatatgcatagcttactgaatgtcatttataactcatcacagctttaaaatatacttcagactggcagcagtggctcacacctgtattcccaccactctgggaggctgaggcaggcatatcacctgaggtcaggagtccaagatcagcctggccaacatggcaaaactccgtctctactaaaaatacaaaacttggccgggcatggtggcacatgcttccagtcccacctacatgggaggctgagcc

SEQ ID NO: 369490 - DNA, 8139 bp, Homo sapiens
  misc_feature (3669)..(3669): n is a, c, g, or t
gttttattattattcaaatcagtctccccgagcatttctggatcagagttttcaaagttaatttggcgggtaggggcttgggaagtggggagtgctgaacggtcaggttggagatggatttatagagggttgaagtgagtttttcatgctgttttctgttgtgggtgggatggcagaactgattgacccagattaccggtctgtgtgttgtcagctgatccatccagtgtaggatctccaaaatacctcaagcactgatcttagcttttacaattgttatgttatcttcaggagcaacttggcgaggttcagactcttggagccagaagctacatgacccctaaacgggcacagtgacttttgaagacgtggctgtgaaatttacccaggaggaatggaatctccttagtgaggctcagagatgcctgtaccgtgatgtgactctggagaacctggcacttatgtcctccctggcagggcactgtgacctttgaagatgtggctgtgaacttttcccaggaggagtggtgtcttcttagtgaggctcagaggtgcttgtaccgtgatgtgatgctagagaacctggctctcatatcctcgctgggttgttggtgtggatcaaaagatgaggaggcaccttgtaagcagagaatttctgtacaaagagagtctcagagcaggactcctagggcaggtgtttctcctaagaaggctcacccctgtgaaatgtgtggcctcatcttggaggatgtttttcactttgctgaccaccaggaaactcatcacaagcagaagctgaacaggagtggagcatgtggaaaaaacttggatgacactgcataccttcatcagcaccagaagcagcatattggagagaaattctacagaaagagtgtcagagaagcatcgtttgtaaagaaacgtaagctcagggtgtcacaggagccatttgtcttccgcgagtttgggaaggacgttctgcccagttcaggattgtgccaagaagaagctgctgtagagaagacagacagtgaaactatgcatggcccaccctttcaggagggaaaaactaattacagttgtggaaaacgcacaaaagccttcagcaccaaacactcagttattccacaccagaaacttttcactagagatggatgttatgtgtgcagtgattgtggaaaatcctttagcagatatgtcagcttcagtaatcatcagcgagatcacactgcaaaaggaccttatgattgtggagagtgtgggaaatcttatagtcgaaagagcagccttattcaacatcagcgagtccacactggacagacagcttatccctgtgaggagtgcgggaaatcttttagtcagaagggcagccttattagccatcagcttgttcacactggagaagggccttatgagtgtagagaatgtgggaaatcttttggtcaaaagggtaacctcattcaacatcagcaaggtcacactggagagagagcttatcactgtggggaatgtgggaaatcttttcgtcagaagttctgctttattaaccatcagcgtgttcacactggagaaaggccttacaagtgtggagaatgtgggaaatcttttggtcaaaagggcaacctcgttcaccatcagcgaggtcatactggagaaaggccctatgagtgcaaggaatgtgggaaatcatttaggtacagatcccacctcactgaacaccagagacttcacactggggaaagaccttacaattgtagggaatgtgggaaattatttaacaggaagtatcatcttctggttcatgagagagttcacactggagaaaggccatatgcgtgtgaggtatgtgggaaattatttggcaataagcacagcgtgactatacatcagaggattcacactggagaaaggccgtatgaatgcagtgaatgtgggaaatcatttctttccagctctgcgcttcatgttcataaaagagttcattctggacaaaagccttataagtgcagtgaatgtggaaaatccttttctgaatgttccagtctcattaaacacaggagaattcacactggagaaaggccttatgaatgcaccaaatgtggaaaaacatttcagcgaagctctaccctccttcatcatcagagttcacacaggagaaaggccttatgagtacacaccaccacgcccagctaatttttgtgtttttagtggagatggggttttaccatgttggccaggctggtctcaaactcctgacctcaagtgatccacccaccttgactcccaaagtgctgaaattacaggcatgagcctctgcacctggccttcattcttttcgtattgcttagaatatgacatgctgaaccaggcatggtggctcatgcttgtaaacctgatgctttgggaggacaaggtggttcattggaggccaggagttggagatcagcctgggcaacatggccagacctcctctctacaaaaagaaaaaagaatgacatgcttcttgtttttgtctgttataaatgaaactgctatatttgaatgcagttgttcatgtaggtatgtttcactatggtaatatggtggtgtgcagtgcctgagtcacgtgatagattaaagtacaactcttttttgagacagagtctcactctgtcacccaggcgggagttaggtggcatgatttcggctcactgcaacctctgcctcccaagttcaactgattcttctgcctcagcctcccgagtagcagggattaccggtgtgcaccaccatgcctggataacttttttttttatttctattagcaatggggtttcaccatgctggccaggcttgttatgaactgacctcaagtgatctgcctgcctcagcttctcaggtgtgacctactgtgcttggcctaatgtacaactttttaagcaatgccaaactatgacttaagaatgaaattattgctcatttgtatatctatctaccatcagtgtccaagaatttctgttctatcttaccaagagggagtatggttagtatttgaaattgtttattattttaataagtggttataacttttgagtcagtggtttatgttttgcattttttttgttttgagacaaagtctcgctctgtctcccaggctagagtaccgtggcacaatctcagctcattgcaacctctgcttcctgggctcaagcactctgcccacctcagcctccagagtagctggaaatacaggtatgcaccaccacaactggataacttttgtattttctgtagagagggttttacctttttgcccagtctgatcgcgaactcctgggctcaggcgatccacttgcctaggctccaaaagtgcttggtctacaggggtgaggcaccctgcctggcctcacctgtaggcttgttttttaaaatgaattttatctatttcccatttcattaatatatttaaaaataatgaaataacaaagacgtatgttggacttcattcattcttcagtgatgtcactttgctgcaaggaatatttggttttcttttttttttttttttccagatggagtctagctctgtctcctaagctacagtgaagtggcatgatctcggcccactgcaacctccacctcctgtgttcaagcgattctgcctcagcctcctgagtagctgggactacnggcatgtgccattatacctggctaattttatttatttattttagtagagatggggtttcaccatgttacccaggctgctctctaccttctgagctcaagtgatccacctgcctcggcctcccaaagtgctgggattacaggtgtcagccactgtacctggctgaatacttggttttcagtaccacaagaactatgagctggttatccacttcatgtggaatcataagcgtcccaaagtgacaatacatatagattgccaggcagtgaaacagttaagatgccaccatagctttcttttcaacatctttctaagattaccttactatttcttttgttccaagtttgtacttcctcacagttctcacatatggaaaggatacacactttgtagaaacaagaactttatgttatccaagttctaggatagccatgagctccaattatctcagagctctgagtcctctactcaatacccattgagatttatgtgttctgaggcttttgtcttctagctacttacttcattctccatgggtaacgtcattcatccacattaactaatttcctcactccaagctcttttctagagataatctccagtccctgtgcagaaactgtcattgcactttctgctgaaatggcagtttcttctcagcaaggtgagattatggaatccagaatcttttttcaggggtcacatgcccatttccccacttgcatgaatgtcgacactgcagccacagttttggccgtaaatgtgaatttggcaagtaaccactgttcccagggaaatgtcccaatcagaagaagattatctgggacactgatactgacagggagatgggacattctgagggacccggaggcagggtgccacctcctcaacttccctgagggctgcctagaatctgtttcctctcactctgaattattcttcctcttatggctgaccaaaaacatggaacctcacaaagtccactgtaacagctttatatttgtgaagtgaagaacatgaagacagtttcaagcaaagttattgagtggacactttgtgttttttttgagaagtctcactctttcacccaggctggagtgcagtggcacgatctcggctcactgcaactccacctcccgggttcacgccattctcttgcctcagcctcctgagtagctgggaccacaagcgcccaccacgtcagcttaatttttttgttttgtttcttgagacagagtcttgctctcttgcccaggttggagtgccgtgtcgcaatctcagctcactgcaacttctacctcctggattcaagcacttctccttgcctcagccacctctttagctgggattacaggtgcgtgccaccacacccagctaattaccttgtattacagcatgttatataagcacatacaggcacatacatgaaatagtgatacttcattctcagtaatatcttcatccttctcactggaaagatctttgatgatttttaatcaacataggagtttcaatgatatctagaagtttaaaagggctcgttcaaacaaattatgaccacacacactgaagagtatgtttgtctcttgtggtgtaaatttttttttattacaccaaattatgttcacacaaaacctttgtaatcagggggaattaaagagccttcctggaaaatggaggttgcaatcagccgagatggtgccatcgcactctagcctggggaatagagtgagatcctgcctcaaaaaaaacaaaaaaattctttattttctccataaactacagtttatataagcaaaagtttcagtactaagcaattttagtctctgcagtctcttgtcttgaattaatacaacttttgttaattctcttatgaagttaatcttcctgcttgtatgtgaattaaatatatgtcaaactttttttgtacaaaagattcatacctctttcctgtttgaaattattttactgtgtttcatcaatctaatgtttatttttattacaccagtaatttcctcattgtgttgaatcttacagtggcttataaatctacatgtacctagaaatgtttagccagtccatgtatatttgatgtggcacattttttcctttgaatcacatactctaagagaagtaacttcctcttgctaacctctactttccctaagtgttgaattaatcctctttagatgattataattctcttttcaatagctagaaagaatctataaggaactttcctggctgggtgtggtggctcatgcctgtaatcccagcacttcaggaggccgaggtgggtggatcacgaggtcaggagttccagaccagcctgaccaacatggttaaaccatgtctttactaaaaatgcaaaaattagcacctgtaatcccagctactcaggaggctgaggcatagaattgcttgaacctggcaggcagaggtggtgagccgagatcacggcactgcactccagcctgggtgacaagagcaagactccgtctcaaaataaataaataaaaataaaaaataaacatgatgatcacagatgcagtcacattttctgagttcttgtctctctgccagtgccacccagatagcctcacaaaactttgacccagccactgttagtgtcgccaccgcccataaaggagctgagcccagcaggggcactgcctggggccctgtagccaaaaggctacagcaggagctgatgaccctcatgatgcctggtgacaaaagaatttctgcctaccctgaaagccttatcaaatggacaccatccatgaagcagctggcacagtgtatgaagatctgaggtataagctcttgctggagttcctcaatgactacccacctttacgatgcacccacagtgaagttcctcacaccctgctaccaccctaacgtggacacccagggtaacatatgcctggacatcctgaaggagaagtggtctgccccgtatgatatcaggaccatcctgctctctatccagtgcctgctaggacaactcaacattgatagccctttgaacacacatgctaccaagctctgggaaaaccccatagctttaagaagtacctgcaagggtcaggcgcagtggctcacacctgtaatcccagcactttgggaggccgaggtgggtggatggatcacctgacgtagagagtccaaggcctgacaaacatggagaaatgtcatccctatttaaaaaaataaaaaaattagccaagtgtggtggcgcatgcctgtaatcccagctactcgggaggctgaggcaggagaatcacttgaacctgggaggtggaggttgcagtgagccgagatctcgctattgcactccagcctgggcaacaagagtgaaactctgcctcaaaaaaaaataaaataaaataaaaataaaaataaggaagtacctgcaagaaagctactcaaagtaggtcaccagccaggagctctgacccaggctgcccagcctatccttgtgttgtctttttaattttcccttagatggtctgccctttccgtgatttctgtgtagaactctgtatcttgagctgtggtactatttttcttttgtcttttaatttaaatcttgttgggagctcttgtgatgaatattaaatacatacattttgggctgggtgtggtgcctctagcctataatcccagcactttgggaggccgaggcaggcgaatcgtgaggtcaggagatcgagaccatcctgcctaacacggtgaaacctcgtctctactaaaaatacaaaaaaattagccgggcgtggtggcgggtgcctatagtcccagctgctcgggaggctgaggcaggagaatggcatgaacccgggaggtggagcttgcagtgagctgagattgcaccactgcactccaggctgggcacagagcaagactccatctcaaaaaaaaaaaaaaaaaaaagacaaaaagaaaacattttggtcattaaaaaacaaaaaaaaaatgatacgagagagcacccagggattataagaggaaacactttattacatcactcatctaacattccagaaaatggaaagtactctactgtacagcaaagtaaatcattggttgtctggagaacagaaagaaagcctttataaaaaggttccaagtaaatataaaggtgttaagttcattattgtgactatgttaatggtttcatgggattatatgaaactcaagatttatcacatgctacagcttaaatatgcatagcttactgaatgtcatttataactcatcacagctttaaaatatacttcagactggcagcagtggctcacacctgtattcccaccactctgggaggctgaggcaggcatatcacctgaggtcaggagtccaagatcagcctggccaacatggcaaaactccgtctctactaaaaatacaaaacttggccgggcatggtggcacatgcttccagtcccacctacatgggaggctgagcc

SEQ ID NO: 369491 - DNA, 8075 bp, Homo sapiens
  misc_feature (3605)..(3605): n is a, c, g, or t
cggggtcctcttgtagcggccacgttgatctgcgatacgcgtgtttgcccagtgagtggccccggactgctacgtgggactgcggtgaatgaacccagaaggtggagaggaaccgttctcggtgcacagaggcggctctgcagcccggtgagggcgcctgctgctcccgggcagtgctttccccaagtagtccgatggctgcggctgcgccgaggcgccctactcaggagcaacttggcgaggttcagactcttggagccagaagctacatgacccctaaacgggcacagtgacttttgaagacgtggctgtgaaatttacccaggaggaatggaatctccttagtgaggctcagagatgcctgtaccgtgatgtgactctggagaacctggcacttatgtcctccctggcagggcactgtgacctttgaagatgtggctgtgaacttttcccaggaggagtggtgtcttcttagtgaggctcagaggtgcttgtaccgtgatgtgatgctagagaacctggctctcatatcctcgctgggttgttggtgtggatcaaaagatgaggaggcaccttgtaagcagagaatttctgtacaaagagagtctcagagcaggactcctagggcaggtgtttctcctaagaaggctcacccctgtgaaatgtgtggcctcatcttggaggatgtttttcactttgctgaccaccaggaaactcatcacaagcagaagctgaacaggagtggagcatgtggaaaaaacttggatgacactgcataccttcatcagcaccagaagcagcatattggagagaaattctacagaaagagtgtcagagaagcatcgtttgtaaagaaacgtaagctcagggtgtcacaggagccatttgtcttccgcgagtttgggaaggacgttctgcccagttcaggattgtgccaagaagaagctgctgtagagaagacagacagtgaaactatgcatggcccaccctttcaggagggaaaaactaattacagttgtggaaaacgcacaaaagccttcagcaccaaacactcagttattccacaccagaaacttttcactagagatggatgttatgtgtgcagtgattgtggaaaatcctttagcagatatgtcagcttcagtaatcatcagcgagatcacactgcaaaaggaccttatgattgtggagagtgtgggaaatcttatagtcgaaagagcagccttattcaacatcagcgagtccacactggacagacagcttatccctgtgaggagtgcgggaaatcttttagtcagaagggcagccttattagccatcagcttgttcacactggagaagggccttatgagtgtagagaatgtgggaaatcttttggtcaaaagggtaacctcattcaacatcagcaaggtcacactggagagagagcttatcactgtggggaatgtgggaaatcttttcgtcagaagttctgctttattaaccatcagcgtgttcacactggagaaaggccttacaagtgtggagaatgtgggaaatcttttggtcaaaagggcaacctcgttcaccatcagcgaggtcatactggagaaaggccctatgagtgcaaggaatgtgggaaatcatttaggtacagatcccacctcactgaacaccagagacttcacactggggaaagaccttacaattgtagggaatgtgggaaattatttaacaggaagtatcatcttctggttcatgagagagttcacactggagaaaggccatatgcgtgtgaggtatgtgggaaattatttggcaataagcacagcgtgactatacatcagaggattcacactggagaaaggccgtatgaatgcagtgaatgtgggaaatcatttctttccagctctgcgcttcatgttcataaaagagttcattctggacaaaagccttataagtgcagtgaatgtggaaaatccttttctgaatgttccagtctcattaaacacaggagaattcacactggagaaaggccttatgaatgcaccaaatgtggaaaaacatttcagcgaagctctaccctccttcatcatcagagttcacacaggagaaaggccttatgagtacacaccaccacgcccagctaatttttgtgtttttagtggagatggggttttaccatgttggccaggctggtctcaaactcctgacctcaagtgatccacccaccttgactcccaaagtgctgaaattacaggcatgagcctctgcacctggccttcattcttttcgtattgcttagaatatgacatgctgaaccaggcatggtggctcatgcttgtaaacctgatgctttgggaggacaaggtggttcattggaggccaggagttggagatcagcctgggcaacatggccagacctcctctctacaaaaagaaaaaagaatgacatgcttcttgtttttgtctgttataaatgaaactgctatatttgaatgcagttgttcatgtaggtatgtttcactatggtaatatggtggtgtgcagtgcctgagtcacgtgatagattaaagtacaactcttttttgagacagagtctcactctgtcacccaggcgggagttaggtggcatgatttcggctcactgcaacctctgcctcccaagttcaactgattcttctgcctcagcctcccgagtagcagggattaccggtgtgcaccaccatgcctggataacttttttttttatttctattagcaatggggtttcaccatgctggccaggcttgttatgaactgacctcaagtgatctgcctgcctcagcttctcaggtgtgacctactgtgcttggcctaatgtacaactttttaagcaatgccaaactatgacttaagaatgaaattattgctcatttgtatatctatctaccatcagtgtccaagaatttctgttctatcttaccaagagggagtatggttagtatttgaaattgtttattattttaataagtggttataacttttgagtcagtggtttatgttttgcattttttttgttttgagacaaagtctcgctctgtctcccaggctagagtaccgtggcacaatctcagctcattgcaacctctgcttcctgggctcaagcactctgcccacctcagcctccagagtagctggaaatacaggtatgcaccaccacaactggataacttttgtattttctgtagagagggttttacctttttgcccagtctgatcgcgaactcctgggctcaggcgatccacttgcctaggctccaaaagtgcttggtctacaggggtgaggcaccctgcctggcctcacctgtaggcttgttttttaaaatgaattttatctatttcccatttcattaatatatttaaaaataatgaaataacaaagacgtatgttggacttcattcattcttcagtgatgtcactttgctgcaaggaatatttggttttcttttttttttttttttccagatggagtctagctctgtctcctaagctacagtgaagtggcatgatctcggcccactgcaacctccacctcctgtgttcaagcgattctgcctcagcctcctgagtagctgggactacnggcatgtgccattatacctggctaattttatttatttattttagtagagatggggtttcaccatgttacccaggctgctctctaccttctgagctcaagtgatccacctgcctcggcctcccaaagtgctgggattacaggtgtcagccactgtacctggctgaatacttggttttcagtaccacaagaactatgagctggttatccacttcatgtggaatcataagcgtcccaaagtgacaatacatatagattgccaggcagtgaaacagttaagatgccaccatagctttcttttcaacatctttctaagattaccttactatttcttttgttccaagtttgtacttcctcacagttctcacatatggaaaggatacacactttgtagaaacaagaactttatgttatccaagttctaggatagccatgagctccaattatctcagagctctgagtcctctactcaatacccattgagatttatgtgttctgaggcttttgtcttctagctacttacttcattctccatgggtaacgtcattcatccacattaactaatttcctcactccaagctcttttctagagataatctccagtccctgtgcagaaactgtcattgcactttctgctgaaatggcagtttcttctcagcaaggtgagattatggaatccagaatcttttttcaggggtcacatgcccatttccccacttgcatgaatgtcgacactgcagccacagttttggccgtaaatgtgaatttggcaagtaaccactgttcccagggaaatgtcccaatcagaagaagattatctgggacactgatactgacagggagatgggacattctgagggacccggaggcagggtgccacctcctcaacttccctgagggctgcctagaatctgtttcctctcactctgaattattcttcctcttatggctgaccaaaaacatggaacctcacaaagtccactgtaacagctttatatttgtgaagtgaagaacatgaagacagtttcaagcaaagttattgagtggacactttgtgttttttttgagaagtctcactctttcacccaggctggagtgcagtggcacgatctcggctcactgcaactccacctcccgggttcacgccattctcttgcctcagcctcctgagtagctgggaccacaagcgcccaccacgtcagcttaatttttttgttttgtttcttgagacagagtcttgctctcttgcccaggttggagtgccgtgtcgcaatctcagctcactgcaacttctacctcctggattcaagcacttctccttgcctcagccacctctttagctgggattacaggtgcgtgccaccacacccagctaattaccttgtattacagcatgttatataagcacatacaggcacatacatgaaatagtgatacttcattctcagtaatatcttcatccttctcactggaaagatctttgatgatttttaatcaacataggagtttcaatgatatctagaagtttaaaagggctcgttcaaacaaattatgaccacacacactgaagagtatgtttgtctcttgtggtgtaaatttttttttattacaccaaattatgttcacacaaaacctttgtaatcagggggaattaaagagccttcctggaaaatggaggttgcaatcagccgagatggtgccatcgcactctagcctggggaatagagtgagatcctgcctcaaaaaaaacaaaaaaattctttattttctccataaactacagtttatataagcaaaagtttcagtactaagcaattttagtctctgcagtctcttgtcttgaattaatacaacttttgttaattctcttatgaagttaatcttcctgcttgtatgtgaattaaatatatgtcaaactttttttgtacaaaagattcatacctctttcctgtttgaaattattttactgtgtttcatcaatctaatgtttatttttattacaccagtaatttcctcattgtgttgaatcttacagtggcttataaatctacatgtacctagaaatgtttagccagtccatgtatatttgatgtggcacattttttcctttgaatcacatactctaagagaagtaacttcctcttgctaacctctactttccctaagtgttgaattaatcctctttagatgattataattctcttttcaatagctagaaagaatctataaggaactttcctggctgggtgtggtggctcatgcctgtaatcccagcacttcaggaggccgaggtgggtggatcacgaggtcaggagttccagaccagcctgaccaacatggttaaaccatgtctttactaaaaatgcaaaaattagcacctgtaatcccagctactcaggaggctgaggcatagaattgcttgaacctggcaggcagaggtggtgagccgagatcacggcactgcactccagcctgggtgacaagagcaagactccgtctcaaaataaataaataaaaataaaaaataaacatgatgatcacagatgcagtcacattttctgagttcttgtctctctgccagtgccacccagatagcctcacaaaactttgacccagccactgttagtgtcgccaccgcccataaaggagctgagcccagcaggggcactgcctggggccctgtagccaaaaggctacagcaggagctgatgaccctcatgatgcctggtgacaaaagaatttctgcctaccctgaaagccttatcaaatggacaccatccatgaagcagctggcacagtgtatgaagatctgaggtataagctcttgctggagttcctcaatgactacccacctttacgatgcacccacagtgaagttcctcacaccctgctaccaccctaacgtggacacccagggtaacatatgcctggacatcctgaaggagaagtggtctgccccgtatgatatcaggaccatcctgctctctatccagtgcctgctaggacaactcaacattgatagccctttgaacacacatgctaccaagctctgggaaaaccccatagctttaagaagtacctgcaagggtcaggcgcagtggctcacacctgtaatcccagcactttgggaggccgaggtgggtggatggatcacctgacgtagagagtccaaggcctgacaaacatggagaaatgtcatccctatttaaaaaaataaaaaaattagccaagtgtggtggcgcatgcctgtaatcccagctactcgggaggctgaggcaggagaatcacttgaacctgggaggtggaggttgcagtgagccgagatctcgctattgcactccagcctgggcaacaagagtgaaactctgcctcaaaaaaaaataaaataaaataaaaataaaaataaggaagtacctgcaagaaagctactcaaagtaggtcaccagccaggagctctgacccaggctgcccagcctatccttgtgttgtctttttaattttcccttagatggtctgccctttccgtgatttctgtgtagaactctgtatcttgagctgtggtactatttttcttttgtcttttaatttaaatcttgttgggagctcttgtgatgaatattaaatacatacattttgggctgggtgtggtgcctctagcctataatcccagcactttgggaggccgaggcaggcgaatcgtgaggtcaggagatcgagaccatcctgcctaacacggtgaaacctcgtctctactaaaaatacaaaaaaattagccgggcgtggtggcgggtgcctatagtcccagctgctcgggaggctgaggcaggagaatggcatgaacccgggaggtggagcttgcagtgagctgagattgcaccactgcactccaggctgggcacagagcaagactccatctcaaaaaaaaaaaaaaaaaaaagacaaaaagaaaacattttggtcattaaaaaacaaaaaaaaaatgatacgagagagcacccagggattataagaggaaacactttattacatcactcatctaacattccagaaaatggaaagtactctactgtacagcaaagtaaatcattggttgtctggagaacagaaagaaagcctttataaaaaggttccaagtaaatataaaggtgttaagttcattattgtgactatgttaatggtttcatgggattatatgaaactcaagatttatcacatgctacagcttaaatatgcatagcttactgaatgtcatttataactcatcacagctttaaaatatacttcagactggcagcagtggctcacacctgtattcccaccactctgggaggctgaggcaggcatatcacctgaggtcaggagtccaagatcagcctggccaacatggcaaaactccgtctctactaaaaatacaaaacttggccgggcatggtggcacatgcttccagtcccacctacatgggaggctgagcc

SEQ ID NO: 369492 - DNA, 4884 bp, Homo sapiens
ggccgagacttccggggtctctagtagcggctgtgtatcggcgatgcgggtgtttccccagtttgtggcccctgagtgctgggtgggaccgcggtgactgaacctagaaggtggagaggaatcgtcctcggtgcccagaggcggctctgcagccccgtgacggcgaccactgctcccgggccgtgcttccccaagtagtccgatggcagcggctgtgccgaggcgcccaactcagcagggcactgtgacctttgaagatgtggctgtgaacttttcccaggaggagtggtgtcttcttagtgaggctcagaggtgcttgtaccgtgatgtgatgctagagaacctggctctcatatcctcgctgggttgttggtgtggatcaaaagatgaggaggcaccttgtaagcagagaatttctgtacaaagagagtctcagagcaggactcctagggcaggtgtttctcctaagaaggctcacccctgtgaaatgtgtggcctcatcttggaggatgtttttcactttgctgaccaccaggaaactcatcacaagcagaagctgaacaggagtggagcatgtggaaaaaacttggatgacactgcataccttcatcagcaccagaagcagcatattggagagaaattctacagaaagagtgtcagagaagcatcgtttgtaaagaaacgtaagctcagggtgtcacaggagccatttgtcttccgcgagtttgggaaggacgttctgcccagttcaggattgtgccaagaagaagctgctgtagagaagacagacagtgaaactatgcatggcccaccctttcaggagggaaaaactaattacagttgtggaaaacgcacaaaagccttcagcaccaaacactcagttattccacaccagaaacttttcactagagatggatgttatgtgtgcagtgattgtggaaaatcctttagcagatatgtcagcttcagtaatcatcagcgagatcacactgcaaaaggaccttatgattgtggagagtgtgggaaatcttatagtcgaaagagcagccttattcaacatcagcgagtccacactggacagacagcttatccctgtgaggagtgcgggaaatcttttagtcagaagggcagccttattagccatcagcttgttcacactggagaagggccttatgagtgtagagaatgtgggaaatcttttggtcaaaagggtaacctcattcaacatcagcaaggtcacactggagagagagcttatcactgtggggaatgtgggaaatcttttcgtcagaagttctgctttattaaccatcagcgtgttcacactggagaaaggccttacaagtgtggagaatgtgggaaatcttttggtcaaaagggcaacctcgttcaccatcagcgaggtcatactggagaaaggccctatgagtgcaaggaatgtgggaaatcatttaggtacagatcccacctcactgaacaccagagacttcacactggggaaagaccttacaattgtagggaatgtgggaaattatttaacaggaagtatcatcttctggttcatgagagagttcacactggagaaaggccatatgcgtgtgaggtatgtgggaaattatttggcaataagcacagcgtgactatacatcagaggattcacactggagaaaggccgtatgaatgcagtgaatgtgggaaatcatttctttccagctctgcgcttcatgttcataaaagagttcattctggacaaaagccttataagtgcagtgaatgtggaaaatccttttctgaatgttccagtctcattaaacacaggagaattcacactggagaaaggccttatgaatgcaccaaatgtggaaaaacatttcagcgaagctctaccctccttcatcatcagagttcacacaggagaaaggccttatgagtacacaccaccacgcccagctaatttttgtgtttttagtggagatggggttttaccatgttggccaggctggtctcaaactcctgacctcaagtgatccacccaccttgactcccaaagtgctgaaattacaggcatgagcctctgcacctggccttcattcttttcgtattgcttagaatatgacatgctgaaccaggcatggtggctcatgcttgtaaacctgatgctttgggaggacaaggtggttcattggaggccaggagttggagatcagcctgggcaacatggccagacctcctctctacaaaaagaaaaaagaatgacatgcttcttgtttttgtctgttataaatgaaactgctatatttgaatgcagttgttcatgtaggtatgtttcactatggtaatatggtggtgtgcagtgcctgagtcacgtgatagattaaagtacaactcttttttgagacagagtctcactctgtcacccaggcgggagttaggtggcatgatttcggctcactgcaacctctgcctcccaagttcaactgattcttctgcctcagcctcccgagtagcagggattaccggtgtgcaccaccatgcctggataacttttttttttatttctattagcaatggggtttcaccatgctggccaggcttgttatgaactgacctcaagtgatctgcctgcctcagcttctcaggtgtgacctactgtgcttggcctaatgtacaactttttaagcaatgccaaactatgacttaagaatgaaattattgctcatttgtatatctatctaccatcagtgtccaagaatttctgttctatcttaccaagagggagtatggttagtatttgaaattgtttattattttaataagtggttataacttttgagtcagtggtttatgttttgcattttttttgttttgagacaaagtctcgctctgtctcccaggctagagtaccgtggcacaatctcagctcattgcaacctctgcttcctgggctcaagcactctgcccacctcagcctccagagtagctggaaatacagtgccacccagatagcctcacaaaactttgacccagccactgttagtgtcgccaccgcccataaaggagctgagcccagcaggggcactgcctggggccctgtagccaaaaggctacagcaggagctgatgaccctcatgatgcctggtgacaaaagaatttctgcctaccctgaaagccttatcaaatggacaccatccatgaagcagctggcacagtgtatgaagatctgaggtataagctcttgctggagttcctcaatgactacccacctttacgatgcacccacagtgaagttcctcacaccctgctaccaccctaacgtggacacccagggtaacatatgcctggacatcctgaaggagaagtggtctgccccgtatgatatcaggaccatcctgctctctatccagtgcctgctaggacaactcaacattgatagccctttgaacacacatgctaccaagctctgggaaaaccccatagctttaagaagtacctgcaagggtcaggcgcagtggctcacacctgtaatcccagcactttgggaggccgaggtgggtggatggatcacctgacgtagagagtccaaggcctgacaaacatggagaaatgtcatccctatttaaaaaaataaaaaaattagccaagtgtggtggcgcatgcctgtaatcccagctactcgggaggctgaggcaggagaatcacttgaacctgggaggtggaggttgcagtgagccgagatctcgctattgcactccagcctgggcaacaagagtgaaactctgcctcaaaaaaaaataaaataaaataaaaataaaaataaggaagtacctgcaagaaagctactcaaagtaggtcaccagccaggagctctgacccaggctgcccagcctatccttgtgttgtctttttaattttcccttagatggtctgccctttccgtgatttctgtgtagaactctgtatcttgagctgtggtactatttttcttttgtcttttaatttaaatcttgttgggagctcttgtgatgaatattaaatacatacattttgggctgggtgtggtgcctctagcctataatcccagcactttgggaggccgaggcaggcgaatcgtgaggtcaggagatcgagaccatcctgcctaacacggtgaaacctcgtctctactaaaaatacaaaaaaattagccgggcgtggtggcgggtgcctatagtcccagctgctcgggaggctgaggcaggagaatggcatgaacccgggaggtggagcttgcagtgagctgagattgcaccactgcactccaggctgggcacagagcaagactccatctcaaaaaaaaaaaaaaaaaaaagacaaaaagaaaacattttggtcattaaaaaacaaaaaaaaaatgatacgagagagcacccagggattataagaggaaacactttattacatcactcatctaacattccagaaaatggaaagtactctactgtacagcaaagtaaatcattggttgtctggagaacagaaagaaagcctttataaaaaggttccaagtaaatataaaggtgttaagttcattattgtgactatgttaatggtttcatgggattatatgaaactcaagatttatcacatgctacagcttaaatatgcatagcttactgaatgtcatttataactcatcacagctttaaaatatacttcagactggcagcagtggctcacacctgtattcccaccactctgggaggctgaggcaggcatatcacctgaggtcaggagtccaagatcagcctggccaacatggcaaaactccgtctctactaaaaatacaaaacttggccgggcatggtggcacatgcttccagtcccacctacatgggaggctgagcc

SEQ ID NO: 369493 - DNA, 7738 bp, Homo sapiens
  misc_feature (3268)..(3268): n is a, c, g, or t
cgcctcagcctcccaaagtgctgggattacaggtgtgagccaccatgcccagccagcagccccatcttcaacttgaagccaacattgtgttcctgcaaatatttctatagattaattcctcaatttgtgagacgtacttgtgggtgggctgtgccttcccgccggaggtactttgcacttgaccagcattttcttgctttcaggttgttggtgtggatcaaaagatgaggaggcaccttgtaagcagagaatttctgtacaaagagagtctcagagcaggactcctagggcaggtgtttctcctaagaaggctcacccctgtgaaatgtgtggcctcatcttggaggatgtttttcactttgctgaccaccaggaaactcatcacaagcagaagctgaacaggagtggagcatgtggaaaaaacttggatgacactgcataccttcatcagcaccagaagcagcatattggagagaaattctacagaaagagtgtcagagaagcatcgtttgtaaagaaacgtaagctcagggtgtcacaggagccatttgtcttccgcgagtttgggaaggacgttctgcccagttcaggattgtgccaagaagaagctgctgtagagaagacagacagtgaaactatgcatggcccaccctttcaggagggaaaaactaattacagttgtggaaaacgcacaaaagccttcagcaccaaacactcagttattccacaccagaaacttttcactagagatggatgttatgtgtgcagtgattgtggaaaatcctttagcagatatgtcagcttcagtaatcatcagcgagatcacactgcaaaaggaccttatgattgtggagagtgtgggaaatcttatagtcgaaagagcagccttattcaacatcagcgagtccacactggacagacagcttatccctgtgaggagtgcgggaaatcttttagtcagaagggcagccttattagccatcagcttgttcacactggagaagggccttatgagtgtagagaatgtgggaaatcttttggtcaaaagggtaacctcattcaacatcagcaaggtcacactggagagagagcttatcactgtggggaatgtgggaaatcttttcgtcagaagttctgctttattaaccatcagcgtgttcacactggagaaaggccttacaagtgtggagaatgtgggaaatcttttggtcaaaagggcaacctcgttcaccatcagcgaggtcatactggagaaaggccctatgagtgcaaggaatgtgggaaatcatttaggtacagatcccacctcactgaacaccagagacttcacactggggaaagaccttacaattgtagggaatgtgggaaattatttaacaggaagtatcatcttctggttcatgagagagttcacactggagaaaggccatatgcgtgtgaggtatgtgggaaattatttggcaataagcacagcgtgactatacatcagaggattcacactggagaaaggccgtatgaatgcagtgaatgtgggaaatcatttctttccagctctgcgcttcatgttcataaaagagttcattctggacaaaagccttataagtgcagtgaatgtggaaaatccttttctgaatgttccagtctcattaaacacaggagaattcacactggagaaaggccttatgaatgcaccaaatgtggaaaaacatttcagcgaagctctaccctccttcatcatcagagttcacacaggagaaaggccttatgagtacacaccaccacgcccagctaatttttgtgtttttagtggagatggggttttaccatgttggccaggctggtctcaaactcctgacctcaagtgatccacccaccttgactcccaaagtgctgaaattacaggcatgagcctctgcacctggccttcattcttttcgtattgcttagaatatgacatgctgaaccaggcatggtggctcatgcttgtaaacctgatgctttgggaggacaaggtggttcattggaggccaggagttggagatcagcctgggcaacatggccagacctcctctctacaaaaagaaaaaagaatgacatgcttcttgtttttgtctgttataaatgaaactgctatatttgaatgcagttgttcatgtaggtatgtttcactatggtaatatggtggtgtgcagtgcctgagtcacgtgatagattaaagtacaactcttttttgagacagagtctcactctgtcacccaggcgggagttaggtggcatgatttcggctcactgcaacctctgcctcccaagttcaactgattcttctgcctcagcctcccgagtagcagggattaccggtgtgcaccaccatgcctggataacttttttttttatttctattagcaatggggtttcaccatgctggccaggcttgttatgaactgacctcaagtgatctgcctgcctcagcttctcaggtgtgacctactgtgcttggcctaatgtacaactttttaagcaatgccaaactatgacttaagaatgaaattattgctcatttgtatatctatctaccatcagtgtccaagaatttctgttctatcttaccaagagggagtatggttagtatttgaaattgtttattattttaataagtggttataacttttgagtcagtggtttatgttttgcattttttttgttttgagacaaagtctcgctctgtctcccaggctagagtaccgtggcacaatctcagctcattgcaacctctgcttcctgggctcaagcactctgcccacctcagcctccagagtagctggaaatacaggtatgcaccaccacaactggataacttttgtattttctgtagagagggttttacctttttgcccagtctgatcgcgaactcctgggctcaggcgatccacttgcctaggctccaaaagtgcttggtctacaggggtgaggcaccctgcctggcctcacctgtaggcttgttttttaaaatgaattttatctatttcccatttcattaatatatttaaaaataatgaaataacaaagacgtatgttggacttcattcattcttcagtgatgtcactttgctgcaaggaatatttggttttcttttttttttttttttccagatggagtctagctctgtctcctaagctacagtgaagtggcatgatctcggcccactgcaacctccacctcctgtgttcaagcgattctgcctcagcctcctgagtagctgggactacnggcatgtgccattatacctggctaattttatttatttattttagtagagatggggtttcaccatgttacccaggctgctctctaccttctgagctcaagtgatccacctgcctcggcctcccaaagtgctgggattacaggtgtcagccactgtacctggctgaatacttggttttcagtaccacaagaactatgagctggttatccacttcatgtggaatcataagcgtcccaaagtgacaatacatatagattgccaggcagtgaaacagttaagatgccaccatagctttcttttcaacatctttctaagattaccttactatttcttttgttccaagtttgtacttcctcacagttctcacatatggaaaggatacacactttgtagaaacaagaactttatgttatccaagttctaggatagccatgagctccaattatctcagagctctgagtcctctactcaatacccattgagatttatgtgttctgaggcttttgtcttctagctacttacttcattctccatgggtaacgtcattcatccacattaactaatttcctcactccaagctcttttctagagataatctccagtccctgtgcagaaactgtcattgcactttctgctgaaatggcagtttcttctcagcaaggtgagattatggaatccagaatcttttttcaggggtcacatgcccatttccccacttgcatgaatgtcgacactgcagccacagttttggccgtaaatgtgaatttggcaagtaaccactgttcccagggaaatgtcccaatcagaagaagattatctgggacactgatactgacagggagatgggacattctgagggacccggaggcagggtgccacctcctcaacttccctgagggctgcctagaatctgtttcctctcactctgaattattcttcctcttatggctgaccaaaaacatggaacctcacaaagtccactgtaacagctttatatttgtgaagtgaagaacatgaagacagtttcaagcaaagttattgagtggacactttgtgttttttttgagaagtctcactctttcacccaggctggagtgcagtggcacgatctcggctcactgcaactccacctcccgggttcacgccattctcttgcctcagcctcctgagtagctgggaccacaagcgcccaccacgtcagcttaatttttttgttttgtttcttgagacagagtcttgctctcttgcccaggttggagtgccgtgtcgcaatctcagctcactgcaacttctacctcctggattcaagcacttctccttgcctcagccacctctttagctgggattacaggtgcgtgccaccacacccagctaattaccttgtattacagcatgttatataagcacatacaggcacatacatgaaatagtgatacttcattctcagtaatatcttcatccttctcactggaaagatctttgatgatttttaatcaacataggagtttcaatgatatctagaagtttaaaagggctcgttcaaacaaattatgaccacacacactgaagagtatgtttgtctcttgtggtgtaaatttttttttattacaccaaattatgttcacacaaaacctttgtaatcagggggaattaaagagccttcctggaaaatggaggttgcaatcagccgagatggtgccatcgcactctagcctggggaatagagtgagatcctgcctcaaaaaaaacaaaaaaattctttattttctccataaactacagtttatataagcaaaagtttcagtactaagcaattttagtctctgcagtctcttgtcttgaattaatacaacttttgttaattctcttatgaagttaatcttcctgcttgtatgtgaattaaatatatgtcaaactttttttgtacaaaagattcatacctctttcctgtttgaaattattttactgtgtttcatcaatctaatgtttatttttattacaccagtaatttcctcattgtgttgaatcttacagtggcttataaatctacatgtacctagaaatgtttagccagtccatgtatatttgatgtggcacattttttcctttgaatcacatactctaagagaagtaacttcctcttgctaacctctactttccctaagtgttgaattaatcctctttagatgattataattctcttttcaatagctagaaagaatctataaggaactttcctggctgggtgtggtggctcatgcctgtaatcccagcacttcaggaggccgaggtgggtggatcacgaggtcaggagttccagaccagcctgaccaacatggttaaaccatgtctttactaaaaatgcaaaaattagcacctgtaatcccagctactcaggaggctgaggcatagaattgcttgaacctggcaggcagaggtggtgagccgagatcacggcactgcactccagcctgggtgacaagagcaagactccgtctcaaaataaataaataaaaataaaaaataaacatgatgatcacagatgcagtcacattttctgagttcttgtctctctgccagtgccacccagatagcctcacaaaactttgacccagccactgttagtgtcgccaccgcccataaaggagctgagcccagcaggggcactgcctggggccctgtagccaaaaggctacagcaggagctgatgaccctcatgatgcctggtgacaaaagaatttctgcctaccctgaaagccttatcaaatggacaccatccatgaagcagctggcacagtgtatgaagatctgaggtataagctcttgctggagttcctcaatgactacccacctttacgatgcacccacagtgaagttcctcacaccctgctaccaccctaacgtggacacccagggtaacatatgcctggacatcctgaaggagaagtggtctgccccgtatgatatcaggaccatcctgctctctatccagtgcctgctaggacaactcaacattgatagccctttgaacacacatgctaccaagctctgggaaaaccccatagctttaagaagtacctgcaagggtcaggcgcagtggctcacacctgtaatcccagcactttgggaggccgaggtgggtggatggatcacctgacgtagagagtccaaggcctgacaaacatggagaaatgtcatccctatttaaaaaaataaaaaaattagccaagtgtggtggcgcatgcctgtaatcccagctactcgggaggctgaggcaggagaatcacttgaacctgggaggtggaggttgcagtgagccgagatctcgctattgcactccagcctgggcaacaagagtgaaactctgcctcaaaaaaaaataaaataaaataaaaataaaaataaggaagtacctgcaagaaagctactcaaagtaggtcaccagccaggagctctgacccaggctgcccagcctatccttgtgttgtctttttaattttcccttagatggtctgccctttccgtgatttctgtgtagaactctgtatcttgagctgtggtactatttttcttttgtcttttaatttaaatcttgttgggagctcttgtgatgaatattaaatacatacattttgggctgggtgtggtgcctctagcctataatcccagcactttgggaggccgaggcaggcgaatcgtgaggtcaggagatcgagaccatcctgcctaacacggtgaaacctcgtctctactaaaaatacaaaaaaattagccgggcgtggtggcgggtgcctatagtcccagctgctcgggaggctgaggcaggagaatggcatgaacccgggaggtggagcttgcagtgagctgagattgcaccactgcactccaggctgggcacagagcaagactccatctcaaaaaaaaaaaaaaaaaaaagacaaaaagaaaacattttggtcattaaaaaacaaaaaaaaaatgatacgagagagcacccagggattataagaggaaacactttattacatcactcatctaacattccagaaaatggaaagtactctactgtacagcaaagtaaatcattggttgtctggagaacagaaagaaagcctttataaaaaggttccaagtaaatataaaggtgttaagttcattattgtgactatgttaatggtttcatgggattatatgaaactcaagatttatcacatgctacagcttaaatatgcatagcttactgaatgtcatttataactcatcacagctttaaaatatacttcagactggcagcagtggctcacacctgtattcccaccactctgggaggctgaggcaggcatatcacctgaggtcaggagtccaagatcagcctggccaacatggcaaaactccgtctctactaaaaatacaaaacttggccgggcatggtggcacatgcttccagtcccacctacatgggaggctgagcc

SEQ ID NO: 369494 - DNA, 6120 bp, Homo sapiens
  misc_feature (975)..(975): n is a, c, g, or t
ggcacgaggattgaagtgtttagttctatcatgttttcagcctcccgagtagcagggattaccggtgtgcaccaccatgcctggataacttttttttttatttctattagcaatggggtttcaccatgctggccaggcttgttatgaactgacctcaagtgatctgcctgcctcagcttctcaggtgtgacctactgtgcttggcctaatgtacaactttttaagcaatgccaaactatgacttaagaatgaaattattgctcatttgtatatctatctaccatcagtgtccaagaatttctgttctatcttaccaagagggagtatggttagtatttgaaattgtttattattttaataagtggttataacttttgagtcagtggtttatgttttgcattttttttgttttgagacaaagtctcgctctgtctcccaggctagagtaccgtggcacaatctcagctcattgcaacctctgcttcctgggctcaagcactctgcccacctcagcctccagagtagctggaaatacaggtatgcaccaccacaactggataacttttgtattttctgtagagagggttttacctttttgcccagtctgatcgcgaactcctgggctcaggcgatccacttgcctaggctccaaaagtgcttggtctacaggggtgaggcaccctgcctggcctcacctgtaggcttgttttttaaaatgaattttatctatttcccatttcattaatatatttaaaaataatgaaataacaaagacgtatgttggacttcattcattcttcagtgatgtcactttgctgcaaggaatatttggttttcttttttttttttttttccagatggagtctagctctgtctcctaagctacagtgaagtggcatgatctcggcccactgcaacctccacctcctgtgttcaagcgattctgcctcagcctcctgagtagctgggactacnggcatgtgccattatacctggctaattttatttatttattttagtagagatggggtttcaccatgttacccaggctgctctctaccttctgagctcaagtgatccacctgcctcggcctcccaaagtgctgggattacaggtgtcagccactgtacctggctgaatacttggttttcagtaccacaagaactatgagctggttatccacttcatgtggaatcataagcgtcccaaagtgacaatacatatagattgccaggcagtgaaacagttaagatgccaccatagctttcttttcaacatctttctaagattaccttactatttcttttgttccaagtttgtacttcctcacagttctcacatatggaaaggatacacactttgtagaaacaagaactttatgttatccaagttctaggatagccatgagctccaattatctcagagctctgagtcctctactcaatacccattgagatttatgtgttctgaggcttttgtcttctagctacttacttcattctccatgggtaacgtcattcatccacattaactaatttcctcactccaagctcttttctagagataatctccagtccctgtgcagaaactgtcattgcactttctgctgaaatggcagtttcttctcagcaaggtgagattatggaatccagaatcttttttcaggggtcacatgcccatttccccacttgcatgaatgtcgacactgcagccacagttttggccgtaaatgtgaatttggcaagtaaccactgttcccagggaaatgtcccaatcagaagaagattatctgggacactgatactgacagggagatgggacattctgagggacccggaggcagggtgccacctcctcaacttccctgagggctgcctagaatctgtttcctctcactctgaattattcttcctcttatggctgaccaaaaacatggaacctcacaaagtccactgtaacagctttatatttgtgaagtgaagaacatgaagacagtttcaagcaaagttattgagtggacactttgtgttttttttgagaagtctcactctttcacccaggctggagtgcagtggcacgatctcggctcactgcaactccacctcccgggttcacgccattctcttgcctcagcctcctgagtagctgggaccacaagcgcccaccacgtcagcttaatttttttgttttgtttcttgagacagagtcttgctctcttgcccaggttggagtgccgtgtcgcaatctcagctcactgcaacttctacctcctggattcaagcacttctccttgcctcagccacctctttagctgggattacaggtgcgtgccaccacacccagctaatttttgtatttttagcagagaccaggtttcaccatgttggtcaggctggtctcaaactcctgacctcgtgatccacccacctcggcctcccaaagtgctggaattacaggcgtgagccactgcacctggcctgtattcttttctttagtagagacggggttttactgtatttgccaggatggtctcgatctccagacctcgtgatccgcccgccttagcctcccaaagtgctgggattataggcgtgagccaacacgccctggccacttcttgtctttgcaacattttttagatatgtatttgtgttttttggggagcttaatttgctaatggaatctctgttattttcctaacatgcttggtggatacaagagttaagacttcctgtcccgtttagtgtaacaaaagaaagttaagaaatgtggataaaagattgtaagttagaaatggcaagataatcagctatatgaagaatcttggccaggtgtggtggctgaggcctcctaaagtgctgggattacaggcatctgccaccgcactcggcttatccctagaaatcctatgatagcatgatgtataggcacctaaaggcatggcacttgagaaatgtgaataagattgtaagttacaaatagcaaggtacagtcagatgttaacagtctcagcccctaaatgtcaccttgtattacagcatgttatataagcacatacaggcacatacatgaaatagtgatacttcattctcagtaatatcttcatccttctcactggaaagatctttgatgatttttaatcaacataggagtttcaatgatatctagaagtttaaaagggctcgttcaaacaaattatgaccacacacactgaagagtatgtttgtctcttgtggtgtaaatttttttttattacaccaaattatgttcacacaaaacctttgtaatcagggggaattaaagagccttcctggaaaatggaggttgcaatcagccgagatggtgccatcgcactctagcctggggaatagagtgagatcctgcctcaaaaaaaacaaaaaaattctttattttctccataaactacagtttatataagcaaaagtttcagtactaagcaattttagtctctgcagtctcttgtcttgaattaatacaacttttgttaattctcttatgaagttaatcttcctgcttgtatgtgaattaaatatatgtcaaactttttttgtacaaaagattcatacctctttcctgtttgaaattattttactgtgtttcatcaatctaatgtttatttttattacaccagtaatttcctcattgtgttgaatcttacagtggcttataaatctacatgtacctagaaatgtttagccagtccatgtatatttgatgtggcacattttttcctttgaatcacatactctaagagaagtaacttcctcttgctaacctctactttccctaagtgttgaattaatcctctttagatgattataattctcttttcaatagctagaaagaatctataaggaactttcctggctgggtgtggtggctcatgcctgtaatcccagcacttcaggaggccgaggtgggtggatcacgaggtcaggagttccagaccagcctgaccaacatggttaaaccatgtctttactaaaaatgcaaaaattagcacctgtaatcccagctactcaggaggctgaggcatagaattgcttgaacctggcaggcagaggtggtgagccgagatcacggcactgcactccagcctgggtgacaagagcaagactccgtctcaaaataaataaataaaaataaaaaataaacatgatgatcacagatgcagtcacattttctgagttcttgtctctctgccagtgccacccagatagcctcacaaaactttgacccagccactgttagtgtcgccaccgcccataaaggagctgagcccagcaggggcactgcctggggccctgtagccaaaaggctacagcaggagctgatgaccctcatgatgcctggtgacaaaagaatttctgcctaccctgaaagccttatcaaatggacaccatccatgaagcagctggcacagtgtatgaagatctgaggtataagctcttgctggagttcctcaatgactacccacctttacgatgcacccacagtgaagttcctcacaccctgctaccaccctaacgtggacacccagggtaacatatgcctggacatcctgaaggagaagtggtctgccccgtatgatatcaggaccatcctgctctctatccagtgcctgctaggacaactcaacattgatagccctttgaacacacatgctaccaagctctgggaaaaccccatagctttaagaagtacctgcaagggtcaggcgcagtggctcacacctgtaatcccagcactttgggaggccgaggtgggtggatggatcacctgacgtagagagtccaaggcctgacaaacatggagaaatgtcatccctatttaaaaaaataaaaaaattagccaagtgtggtggcgcatgcctgtaatcccagctactcgggaggctgaggcaggagaatcacttgaacctgggaggtggaggttgcagtgagccgagatctcgctattgcactccagcctgggcaacaagagtgaaactctgcctcaaaaaaaaataaaataaaataaaaataaaaataaggaagtacctgcaagaaagctactcaaagtaggtcaccagccaggagctctgacccaggctgcccagcctatccttgtgttgtctttttaattttcccttagatggtctgccctttccgtgatttctgtgtagaactctgtatcttgagctgtggtactatttttcttttgtcttttaatttaaatcttgttgggagctcttgtgatgaatattaaatacatacattttgggctgggtgtggtgcctctagcctataatcccagcactttgggaggccgaggcaggcgaatcgtgaggtcaggagatcgagaccatcctgcctaacacggtgaaacctcgtctctactaaaaatacaaaaaaattagccgggcgtggtggcgggtgcctatagtcccagctgctcgggaggctgaggcaggagaatggcatgaacccgggaggtggagcttgcagtgagctgagattgcaccactgcactccaggctgggcacagagcaagactccatctcaaaaaaaaaaaaaaaaaaaagacaaaaagaaaacattttggtcattaaaaaacaaaaaaaaaatgatacgagagagcacccagggattataagaggaaacactttattacatcactcatctaacattccagaaaatggaaagtactctactgtacagcaaagtaaatcattggttgtctggagaacagaaagaaagcctttataaaaaggttccaagtaaatataaaggtgttaagttcattattgtgactatgttaatggtttcatgggattatatgaaactcaagatttatcacatgctacagcttaaatatgcatagcttactgaatgtcatttataactcatcacagctttaaaatatacttcagactggcagcagtggctcacacctgtattcccaccactctgggaggctgaggcaggcatatcacctgaggtcaggagtccaagatcagcctggccaacatggcaaaactccgtctctactaaaaatacaaaacttggccgggcatggtggcacatgcttccagtcccacctacatgggaggctgagcc

SEQ ID NO: 369495 - DNA, 8218 bp, Homo sapiens
  misc_feature (4024)..(4024): n is a, c, g, or t
acgtatggtgcagtacattgattgaagtaacatgagagagaaggggtgggtgtagcaaaaacattctcaaggccaagtcatcagcccttacccttaggagggggcagtgattaagaggtggtatgagagcctcgtttctcatttctataagtgctggtaaaggacctgaccccacttccttacctactgcctgcccaggtaactgatgcctacagcatcacaggaattgccaaaatgcagaaaacaaatcctaaattgctctaattccataacacaaaggctggtttttggcttgaaataatcaggcacatatatcatgttctgtcacccagggtggagtgcagtggtgtgatctcggctcactacaaaccccgcctcctgggttcacgccattctccggcctcagcctcccgagtagctgggactacaggtgcccaccaccatgcccggctaattttttgtatttttagtagagacagggtttcaccatgttaaccagcatagtctctatcccctgactgcaagatctgcccgaatcagtgtcccaaagtgctgggattacaggcgtgagccaccgcacccagcccagaagggagtggacctttttatgtcaggacctcagcatggatacctatttgtccacctacttcttgttgctgatggcatttgaccagcaggcccatgaagagacaaaggcaccagtggatgtggtttcaactccgtgttggggaccttgggaggaggatgggcaagggtgggcgtgtgggagaggtgggttgtggtacctcagcagaggggctgcttgtggcttcatctgtcactatcatagcagggcactgtgacctttgaagatgtggctgtgaacttttcccaggaggagtggtgtcttcttagtgaggctcagaggtgcttgtaccgtgatgtgatgctagagaacctggctctcatatcctcgctgggttgttggtgtggatcaaaagatgaggaggcaccttgtaagcagagaatttctgtacaaagagagtctcagagcaggactcctagggcaggtgtttctcctaagaaggctcacccctgtgaaatgtgtggcctcatcttggaggatgtttttcactttgctgaccaccaggaaactcatcacaagcagaagctgaacaggagtggagcatgtggaaaaaacttggatgacactgcataccttcatcagcaccagaagcagcatattggagagaaattctacagaaagagtgtcagagaagcatcgtttgtaaagaaacgtaagctcagggtgtcacaggagccatttgtcttccgcgagtttgggaaggacgttctgcccagttcaggattgtgccaagaagaagctgctgtagagaagacagacagtgaaactatgcatggcccaccctttcaggagggaaaaactaattacagttgtggaaaacgcacaaaagccttcagcaccaaacactcagttattccacaccagaaacttttcactagagatggatgttatgtgtgcagtgattgtggaaaatcctttagcagatatgtcagcttcagtaatcatcagcgagatcacactgcaaaaggaccttatgattgtggagagtgtgggaaatcttatagtcgaaagagcagccttattcaacatcagcgagtccacactggacagacagcttatccctgtgaggagtgcgggaaatcttttagtcagaagggcagccttattagccatcagcttgttcacactggagaagggccttatgagtgtagagaatgtgggaaatcttttggtcaaaagggtaacctcattcaacatcagcaaggtcacactggagagagagcttatcactgtggggaatgtgggaaatcttttcgtcagaagttctgctttattaaccatcagcgtgttcacactggagaaaggccttacaagtgtggagaatgtgggaaatcttttggtcaaaagggcaacctcgttcaccatcagcgaggtcatactggagaaaggccctatgagtgcaaggaatgtgggaaatcatttaggtacagatcccacctcactgaacaccagagacttcacactggggaaagaccttacaattgtagggaatgtgggaaattatttaacaggaagtatcatcttctggttcatgagagagttcacactggagaaaggccatatgcgtgtgaggtatgtgggaaattatttggcaataagcacagcgtgactatacatcagaggattcacactggagaaaggccgtatgaatgcagtgaatgtgggaaatcatttctttccagctctgcgcttcatgttcataaaagagttcattctggacaaaagccttataagtgcagtgaatgtggaaaatccttttctgaatgttccagtctcattaaacacaggagaattcacactggagaaaggccttatgaatgcaccaaatgtggaaaaacatttcagcgaagctctaccctccttcatcatcagagttcacacaggagaaaggccttatgagtacacaccaccacgcccagctaatttttgtgtttttagtggagatggggttttaccatgttggccaggctggtctcaaactcctgacctcaagtgatccacccaccttgactcccaaagtgctgaaattacaggcatgagcctctgcacctggccttcattcttttcgtattgcttagaatatgacatgctgaaccaggcatggtggctcatgcttgtaaacctgatgctttgggaggacaaggtggttcattggaggccaggagttggagatcagcctgggcaacatggccagacctcctctctacaaaaagaaaaaagaatgacatgcttcttgtttttgtctgttataaatgaaactgctatatttgaatgcagttgttcatgtaggtatgtttcactatggtaatatggtggtgtgcagtgcctgagtcacgtgatagattaaagtacaactcttttttgagacagagtctcactctgtcacccaggcgggagttaggtggcatgatttcggctcactgcaacctctgcctcccaagttcaactgattcttctgcctcagcctcccgagtagcagggattaccggtgtgcaccaccatgcctggataacttttttttttatttctattagcaatggggtttcaccatgctggccaggcttgttatgaactgacctcaagtgatctgcctgcctcagcttctcaggtgtgacctactgtgcttggcctaatgtacaactttttaagcaatgccaaactatgacttaagaatgaaattattgctcatttgtatatctatctaccatcagtgtccaagaatttctgttctatcttaccaagagggagtatggttagtatttgaaattgtttattattttaataagtggttataacttttgagtcagtggtttatgttttgcattttttttgttttgagacaaagtctcgctctgtctcccaggctagagtaccgtggcacaatctcagctcattgcaacctctgcttcctgggctcaagcactctgcccacctcagcctccagagtagctggaaatacaggtatgcaccaccacaactggataacttttgtattttctgtagagagggttttacctttttgcccagtctgatcgcgaactcctgggctcaggcgatccacttgcctaggctccaaaagtgcttggtctacaggggtgaggcaccctgcctggcctcacctgtaggcttgttttttaaaatgaattttatctatttcccatttcattaatatatttaaaaataatgaaataacaaagacgtatgttggacttcattcattcttcagtgatgtcactttgctgcaaggaatatttggttttcttttttttttttttttccagatggagtctagctctgtctcctaagctacagtgaagtggcatgatctcggcccactgcaacctccacctcctgtgttcaagcgattctgcctcagcctcctgagtagctgggactacnggcatgtgccattatacctggctaattttatttatttattttagtagagatggggtttcaccatgttacccaggctgctctctaccttctgagctcaagtgatccacctgcctcggcctcccaaagtgctgggattacaggtgtcagccactgtacctggctgaatacttggttttcagtaccacaagaactatgagctggttatccacttcatgtggaatcataagcgtcccaaagtgacaatacatatagattgccaggcagtgaaacagttaagatgccaccatagctttcttttcaacatctttctaagattaccttactatttcttttgttccaagtttgtacttcctcacagttctcacatatggaaaggatacacactttgtagaaacaagaactttatgttatccaagttctaggatagccatgagctccaattatctcagagctctgagtcctctactcaatacccattgagatttatgtgttctgaggcttttgtcttctagctacttacttcattctccatgggtaacgtcattcatccacattaactaatttcctcactccaagctcttttctagagataatctccagtccctgtgcagaaactgtcattgcactttctgctgaaatggcagtttcttctcagcaaggtgagattatggaatccagaatcttttttcaggggtcacatgcccatttccccacttgcatgaatgtcgacactgcagccacagttttggccgtaaatgtgaatttggcaagtaaccactgttcccagggaaatgtcccaatcagaagaagattatctgggacactgatactgacagggagatgggacattctgagggacccggaggcagggtgccacctcctcaacttccctgagggctgcctagaatctgtttcctctcactctgaattattcttcctcttatggctgaccaaaaacatggaacctcacaaagtccactgtaacagctttatatttgtgaagtgaagaacatgaagacagtttcaagcaaagttattgagtggacactttgtgttttttttgagaagtctcactctttcacccaggctggagtgcagtggcacgatctcggctcactgcaactccacctcccgggttcacgccattctcttgcctcagcctcctgagtagctgggaccacaagcgcccaccacgtcagcttaatttttttgttttgtttcttgagacagagtcttgctctcttgcccaggttggagtgccgtgtcgcaatctcagctcactgcaacttctacctcctggattcaagcacttctccttgcctcagccacctctttagctgggattacaggtgcgtgccaccacacccagctaattaccttgtattacagcatgttatataagcacatacaggcacatacatgaaatagtgatacttcattctcagtaatatcttcatccttctcactggaaagatctttgatgatttttaatcaacataggagtttcaatgatatctagaagtttaaaagggctcgttcaaacaaattatgaccacacacactgaagagtatgtttgtctcttgtggtgtaaatttttttttattacaccaaattatgttcacacaaaacctttgtaatcagggggaattaaagagccttcctggaaaatggaggttgcaatcagccgagatggtgccatcgcactctagcctggggaatagagtgagatcctgcctcaaaaaaaacaaaaaaattctttattttctccataaactacagtttatataagcaaaagtttcagtactaagcaattttagtctctgcagtctcttgtcttgaattaatacaacttttgttaattctcttatgaagttaatcttcctgcttgtatgtgaattaaatatatgtcaaactttttttgtacaaaagattcatacctctttcctgtttgaaattattttactgtgtttcatcaatctaatgtttatttttattacaccagtaatttcctcattgtgttgaatcttacagtggcttataaatctacatgtacctagaaatgtttagccagtccatgtatatttgatgtggcacattttttcctttgaatcacatactctaagagaagtaacttcctcttgctaacctctactttccctaagtgttgaattaatcctctttagatgattataattctcttttcaatagctagaaagaatctataaggaactttcctggctgggtgtggtggctcatgcctgtaatcccagcacttcaggaggccgaggtgggtggatcacgaggtcaggagttccagaccagcctgaccaacatggttaaaccatgtctttactaaaaatgcaaaaattagcacctgtaatcccagctactcaggaggctgaggcatagaattgcttgaacctggcaggcagaggtggtgagccgagatcacggcactgcactccagcctgggtgacaagagcaagactccgtctcaaaataaataaataaaaataaaaaataaacatgatgatcacagatgcagtcacattttctgagttcttgtctctctgccagtgccacccagatagcctcacaaaactttgacccagccactgttagtgtcgccaccgcccataaaggagctgagcccagcaggggcactgcctggggccctgtagccaaaaggctacagcaggagctgatgaccctcatgatgcctggtgacaaaagaatttctgcctaccctgaaagccttatcaaatggacaccatccatgaagcagctggcacagtgtatgaagatctgaggtataagctcttgctggagttcctcaatgactacccacctttacgatgcacccacagtgaagttcctcacaccctgctaccaccctaacgtggacacccagggtaacatatgcctggacatcctgaaggagaagtggtctgccccgtatgatatcaggaccatcctgctctctatccagtgcctgctaggacaactcaacattgatagccctttgaacacacatgctaccaagctctgggaaaaccccatagctttaagaagtacctgcaagggtcaggcgcagtggctcacacctgtaatcccagcactttgggaggccgaggccagcagatcacaaggtcaggagttcgagaccagcctggccaacatggtgaaaccccatctctactaaaaatacaaaaattagctgggtgtggtggcatgtgcctgtagtcccagctactcaggaggctgaggcaggagaatcgtttgaacctgggaggcagaggttgccgtgagccaagattatgccactgcactccagcctgggcaacagggtgaggctctgcctcaaaaaaaaagaaaaaaaaagaaaaaaaagacatgagttgcagttacattattctgtctcctccactgcctataaataaagtaattctataaaattataatttcacctgatagcattacaatctgtgatgttatcctacagaattctggatatcagggcatgtgtctgcattgcaagagctgggcaacagacttccctcagccgtaccaagtacaatgcaatatacctcgtaaaagaattttgtcttgttcaaaaaatgccagaaattgtcacaaaaaatgccctgtatccagctgacctatgaacccacaaattttagtatccgtgctacagataaagaccacaaagccctgaaggtcttctctggaggcctctggcagctatgcaaagcagtccacaagtggagaaagctacattctgcattcatactgttccatgagccacaaagtttagctatgccaacaaaagctgtgacccccttcatagtaacaggacctacttatttctgaaccacccatacagtgacaacaaccctcaagattgaagaaggctgaaacaataaggccttcataatagcacaaaccggagaaatgggaggcaagctgttcttaggatcatgacttggagggtagaaaatttgtcaagattgatgtgatacccacaagatctctgaaagacatagtccgtcttttcaagtcaacgtaagaggcctctgggataaaaatgggtaacgtccatggcatgacttatcagacagaaaaaaatgacaaaggaagaagtgctgaagctactcaacaaatccttctgtgactcgatcagaaattaaaagtta

SEQ ID NO: 369496 - DNA, 8410 bp, Homo sapiens
  misc_feature (3940)..(3940): n is a, c, g, or t
acgtatggtgcagtacattgattgaagtaacatgagagagaaggggtgggtgtagcaaaaacattctcaaggccaagtcatcagcccttacccttaggagggggcagtgattaagaggtggtatgagagcctcgtttctcatttctataagtgctggtaaaggacctgaccccacttccttacctactgcctgcccaggtaactgatgcctacagcatcacaggaattgccaaaatgcagaaaacaaatcctaaattgctctaattccataacacaaaggctggtttttggcttgaaataatcaggcacatatatcatgttctgtcacccagggtggagtgcagtggtgtgatctcggctcactacaaaccccgcctcctgggttcacgccattctccggcctcagcctcccgagtagctgggactacaggtgcccaccaccatgcccggctaattttttgtatttttagtagagacagggtttcaccatgttaaccagcatagtctctatcccctgactgcaagatctgcccgaatcagtgtcccaaagtgctgggattacaggcgtgagccaccgcacccagcccagaagggagtggacctttttatgtcaggacctcagcatggatacctatttgtccacctacttcttgttgctgatggcatttgaccagcaggcccatgaagagacaaaggcaccagtggatgtggtttcaactccgtgttggggaccttgggaggaggatgggcaagggtgggcgtgtgggagaggtgggttgtggtacctcagcagaggggctgcttgtggcttcatctgtcactatcatagcagggcactgtgacctttgaagatgtggctgtgaacttttcccaggaggagtggtgtcttcttagtgaggctcagaggtgcttgtaccgtgatgtgatgctagagaacctggctctcatatcctcgctgggttgttggtgtggatcaaaagatgaggaggcaccttgtaagcagagaatttctgtacaaagagagtctcagagcaggactcctagggcaggtgtttctcctaagaaggctcacccctgtgaaatgtgtggcctcatcttggaggatgtttttcactttgctgaccaccaggaaactcatcacaagcagaagctgaacaggagtggagcatgtggaaaaaacttggatgacactgcataccttcatcagcaccagaagcagcatattggagagaaattctacagaaagagtgtcagagaagcatcgtttgtaaagaaacgtaagctcagggtgtcacaggagccatttgtcttccgcgagtttgggaaggacgttctgcccagttcaggattgtgccaagaagaagctgctgtagagaagacagacagtgaaactatgcatggcccaccctttcaggagggaaaaactaattacagttgtggaaaacgcacaaaagccttcagcaccaaacactcagttattccacaccagaaacttttcactagagatggatgttatgtgtgcagtgattgtggaaaatcctttagcagatatgtcagcttcagtaatcatcagcgagatcacactgcaaaaggaccttatgattgtggagagtgtgggaaatcttttagtcagaagggcagccttattagccatcagcttgttcacactggagaagggccttatgagtgtagagaatgtgggaaatcttttggtcaaaagggtaacctcattcaacatcagcaaggtcacactggagagagagcttatcactgtggggaatgtgggaaatcttttcgtcagaagttctgctttattaaccatcagcgtgttcacactggagaaaggccttacaagtgtggagaatgtgggaaatcttttggtcaaaagggcaacctcgttcaccatcagcgaggtcatactggagaaaggccctatgagtgcaaggaatgtgggaaatcatttaggtacagatcccacctcactgaacaccagagacttcacactggggaaagaccttacaattgtagggaatgtgggaaattatttaacaggaagtatcatcttctggttcatgagagagttcacactggagaaaggccatatgcgtgtgaggtatgtgggaaattatttggcaataagcacagcgtgactatacatcagaggattcacactggagaaaggccgtatgaatgcagtgaatgtgggaaatcatttctttccagctctgcgcttcatgttcataaaagagttcattctggacaaaagccttataagtgcagtgaatgtggaaaatccttttctgaatgttccagtctcattaaacacaggagaattcacactggagaaaggccttatgaatgcaccaaatgtggaaaaacatttcagcgaagctctaccctccttcatcatcagagttcacacaggagaaaggccttatgagtacacaccaccacgcccagctaatttttgtgtttttagtggagatggggttttaccatgttggccaggctggtctcaaactcctgacctcaagtgatccacccaccttgactcccaaagtgctgaaattacaggcatgagcctctgcacctggccttcattcttttcgtattgcttagaatatgacatgctgaaccaggcatggtggctcatgcttgtaaacctgatgctttgggaggacaaggtggttcattggaggccaggagttggagatcagcctgggcaacatggccagacctcctctctacaaaaagaaaaaagaatgacatgcttcttgtttttgtctgttataaatgaaactgctatatttgaatgcagttgttcatgtaggtatgtttcactatggtaatatggtggtgtgcagtgcctgagtcacgtgatagattaaagtacaactcttttttgagacagagtctcactctgtcacccaggcgggagttaggtggcatgatttcggctcactgcaacctctgcctcccaagttcaactgattcttctgcctcagcctcccgagtagcagggattaccggtgtgcaccaccatgcctggataacttttttttttatttctattagcaatggggtttcaccatgctggccaggcttgttatgaactgacctcaagtgatctgcctgcctcagcttctcaggtgtgacctactgtgcttggcctaatgtacaactttttaagcaatgccaaactatgacttaagaatgaaattattgctcatttgtatatctatctaccatcagtgtccaagaatttctgttctatcttaccaagagggagtatggttagtatttgaaattgtttattattttaataagtggttataacttttgagtcagtggtttatgttttgcattttttttgttttgagacaaagtctcgctctgtctcccaggctagagtaccgtggcacaatctcagctcattgcaacctctgcttcctgggctcaagcactctgcccacctcagcctccagagtagctggaaatacaggtatgcaccaccacaactggataacttttgtattttctgtagagagggttttacctttttgcccagtctgatcgcgaactcctgggctcaggcgatccacttgcctaggctccaaaagtgcttggtctacaggggtgaggcaccctgcctggcctcacctgtaggcttgttttttaaaatgaattttatctatttcccatttcattaatatatttaaaaataatgaaataacaaagacgtatgttggacttcattcattcttcagtgatgtcactttgctgcaaggaatatttggttttcttttttttttttttttccagatggagtctagctctgtctcctaagctacagtgaagtggcatgatctcggcccactgcaacctccacctcctgtgttcaagcgattctgcctcagcctcctgagtagctgggactacnggcatgtgccattatacctggctaattttatttatttattttagtagagatggggtttcaccatgttacccaggctgctctctaccttctgagctcaagtgatccacctgcctcggcctcccaaagtgctgggattacaggtgtcagccactgtacctggctgaatacttggttttcagtaccacaagaactatgagctggttatccacttcatgtggaatcataagcgtcccaaagtgacaatacatatagattgccaggcagtgaaacagttaagatgccaccatagctttcttttcaacatctttctaagattaccttactatttcttttgttccaagtttgtacttcctcacagttctcacatatggaaaggatacacactttgtagaaacaagaactttatgttatccaagttctaggatagccatgagctccaattatctcagagctctgagtcctctactcaatacccattgagatttatgtgttctgaggcttttgtcttctagctacttacttcattctccatgggtaacgtcattcatccacattaactaatttcctcactccaagctcttttctagagataatctccagtccctgtgcagaaactgtcattgcactttctgctgaaatggcagtttcttctcagcaaggtgagattatggaatccagaatcttttttcaggggtcacatgcccatttccccacttgcatgaatgtcgacactgcagccacagttttggccgtaaatgtgaatttggcaagtaaccactgttcccagggaaatgtcccaatcagaagaagattatctgggacactgatactgacagggagatgggacattctgagggacccggaggcagggtgccacctcctcaacttccctgagggctgcctagaatctgtttcctctcactctgaattattcttcctcttatggctgaccaaaaacatggaacctcacaaagtccactgtaacagctttatatttgtgaagtgaagaacatgaagacagtttcaagcaaagttattgagtggacactttgtgttttttttgagaagtctcactctttcacccaggctggagtgcagtggcacgatctcggctcactgcaactccacctcccgggttcacgccattctcttgcctcagcctcctgagtagctgggaccacaagcgcccaccacgtcagcttaatttttttgttttgtttcttgagacagagtcttgctctcttgcccaggttggagtgccgtgtcgcaatctcagctcactgcaacttctacctcctggattcaagcacttctccttgcctcagccacctctttagctgggattacaggtgcgtgccaccacacccagctaattaccttgtattacagcatgttatataagcacatacaggcacatacatgaaatagtgatacttcattctcagtaatatcttcatccttctcactggaaagatctttgatgatttttaatcaacataggagtttcaatgatatctagaagtttaaaagggctcgttcaaacaaattatgaccacacacactgaagagtatgtttgtctcttgtggtgtaaatttttttttattacaccaaattatgttcacacaaaacctttgtaatcagggggaattaaagagccttcctggaaaatggaggttgcaatcagccgagatggtgccatcgcactctagcctggggaatagagtgagatcctgcctcaaaaaaaacaaaaaaattctttattttctccataaactacagtttatataagcaaaagtttcagtactaagcaattttagtctctgcagtctcttgtcttgaattaatacaacttttgttaattctcttatgaagttaatcttcctgcttgtatgtgaattaaatatatgtcaaactttttttgtacaaaagattcatacctctttcctgtttgaaattattttactgtgtttcatcaatctaatgtttatttttattacaccagtaatttcctcattgtgttgaatcttacagtggcttataaatctacatgtacctagaaatgtttagccagtccatgtatatttgatgtggcacattttttcctttgaatcacatactctaagagaagtaacttcctcttgctaacctctactttccctaagtgttgaattaatcctctttagatgattataattctcttttcaatagctagaaagaatctataaggaactttcctggctgggtgtggtggctcatgcctgtaatcccagcacttcaggaggccgaggtgggtggatcacgaggtcaggagttccagaccagcctgaccaacatggttaaaccatgtctttactaaaaatgcaaaaattagcacctgtaatcccagctactcaggaggctgaggcatagaattgcttgaacctggcaggcagaggtggtgagccgagatcacggcactgcactccagcctgggtgacaagagcaagactccgtctcaaaataaataaataaaaataaaaaataaacatgatgatcacagatgcagtcacattttctgagttcttgtctctctgccagtgccacccagatagcctcacaaaactttgacccagccactgttagtgtcgccaccgcccataaaggagctgagcccagcaggggcactgcctggggccctgtagccaaaaggctacagcaggagctgatgaccctcatgatgcctggtgacaaaagaatttctgcctaccctgaaagccttatcaaatggacaccatccatgaagcagctggcacagtgtatgaagatctgaggtataagctcttgctggagttcctcaatgactacccacctttacgatgcacccacagtgaagttcctcacaccctgctaccaccctaacgtggacacccagggtaacatatgcctggacatcctgaaggagaagtggtctgccccgtatgatatcaggaccatcctgctctctatccagtgcctgctaggacaactcaacattgatagccctttgaacacacatgctaccaagctctgggaaaaccccatagctttaagaagtacctgcaagggtcaggcgcagtggctcacacctgtaatcccagcactttgggaggccgaggtgggtggatggatcacctgacgtagagagtccaaggcctgacaaacatggagaaatgtcatccctatttaaaaaaataaaaaaattagccaagtgtggtggcgcatgcctgtaatcccagctactcgggaggctgaggcaggagaatcacttgaacctgggaggtggaggttgcagtgagccgagatctcgctattgcactccagcctgggcaacaagagtgaaactctgcctcaaaaaaaaataaaataaaataaaaataaaaataaggaagtacctgcaagaaagctactcaaagtaggtcaccagccaggagctctgacccaggctgcccagcctatccttgtgttgtctttttaattttcccttagatggtctgccctttccgtgatttctgtgtagaactctgtatcttgagctgtggtactatttttcttttgtcttttaatttaaatcttgttgggagctcttgtgatgaatattaaatacatacattttgggctgggtgtggtgcctctagcctataatcccagcactttgggaggccgaggcaggcgaatcgtgaggtcaggagatcgagaccatcctgcctaacacggtgaaacctcgtctctactaaaaatacaaaaaaattagccgggcgtggtggcgggtgcctatagtcccagctgctcgggaggctgaggcaggagaatggcatgaacccgggaggtggagcttgcagtgagctgagattgcaccactgcactccaggctgggcacagagcaagactccatctcaaaaaaaaaaaaaaaaaaaagacaaaaagaaaacattttggtcattaaaaaacaaaaaaaaaatgatacgagagagcacccagggattataagaggaaacactttattacatcactcatctaacattccagaaaatggaaagtactctactgtacagcaaagtaaatcattggttgtctggagaacagaaagaaagcctttataaaaaggttccaagtaaatataaaggtgttaagttcattattgtgactatgttaatggtttcatgggattatatgaaactcaagatttatcacatgctacagcttaaatatgcatagcttactgaatgtcatttataactcatcacagctttaaaatatacttcagactggcagcagtggctcacacctgtattcccaccactctgggaggctgaggcaggcatatcacctgaggtcaggagtccaagatcagcctggccaacatggcaaaactccgtctctactaaaaatacaaaacttggccgggcatggtggcacatgcttccagtcccacctacatgggaggctgagcc

SEQ ID NO: 369497 - DNA, 9441 bp, Homo sapiens
  misc_feature (4024)..(4024): n is a, c, g, or t
  misc_feature (6122)..(6122): n is a, c, g, or t
acgtatggtgcagtacattgattgaagtaacatgagagagaaggggtgggtgtagcaaaaacattctcaaggccaagtcatcagcccttacccttaggagggggcagtgattaagaggtggtatgagagcctcgtttctcatttctataagtgctggtaaaggacctgaccccacttccttacctactgcctgcccaggtaactgatgcctacagcatcacaggaattgccaaaatgcagaaaacaaatcctaaattgctctaattccataacacaaaggctggtttttggcttgaaataatcaggcacatatatcatgttctgtcacccagggtggagtgcagtggtgtgatctcggctcactacaaaccccgcctcctgggttcacgccattctccggcctcagcctcccgagtagctgggactacaggtgcccaccaccatgcccggctaattttttgtatttttagtagagacagggtttcaccatgttaaccagcatagtctctatcccctgactgcaagatctgcccgaatcagtgtcccaaagtgctgggattacaggcgtgagccaccgcacccagcccagaagggagtggacctttttatgtcaggacctcagcatggatacctatttgtccacctacttcttgttgctgatggcatttgaccagcaggcccatgaagagacaaaggcaccagtggatgtggtttcaactccgtgttggggaccttgggaggaggatgggcaagggtgggcgtgtgggagaggtgggttgtggtacctcagcagaggggctgcttgtggcttcatctgtcactatcatagcagggcactgtgacctttgaagatgtggctgtgaacttttcccaggaggagtggtgtcttcttagtgaggctcagaggtgcttgtaccgtgatgtgatgctagagaacctggctctcatatcctcgctgggttgttggtgtggatcaaaagatgaggaggcaccttgtaagcagagaatttctgtacaaagagagtctcagagcaggactcctagggcaggtgtttctcctaagaaggctcacccctgtgaaatgtgtggcctcatcttggaggatgtttttcactttgctgaccaccaggaaactcatcacaagcagaagctgaacaggagtggagcatgtggaaaaaacttggatgacactgcataccttcatcagcaccagaagcagcatattggagagaaattctacagaaagagtgtcagagaagcatcgtttgtaaagaaacgtaagctcagggtgtcacaggagccatttgtcttccgcgagtttgggaaggacgttctgcccagttcaggattgtgccaagaagaagctgctgtagagaagacagacagtgaaactatgcatggcccaccctttcaggagggaaaaactaattacagttgtggaaaacgcacaaaagccttcagcaccaaacactcagttattccacaccagaaacttttcactagagatggatgttatgtgtgcagtgattgtggaaaatcctttagcagatatgtcagcttcagtaatcatcagcgagatcacactgcaaaaggaccttatgattgtggagagtgtgggaaatcttatagtcgaaagagcagccttattcaacatcagcgagtccacactggacagacagcttatccctgtgaggagtgcgggaaatcttttagtcagaagggcagccttattagccatcagcttgttcacactggagaagggccttatgagtgtagagaatgtgggaaatcttttggtcaaaagggtaacctcattcaacatcagcaaggtcacactggagagagagcttatcactgtggggaatgtgggaaatcttttcgtcagaagttctgctttattaaccatcagcgtgttcacactggagaaaggccttacaagtgtggagaatgtgggaaatcttttggtcaaaagggcaacctcgttcaccatcagcgaggtcatactggagaaaggccctatgagtgcaaggaatgtgggaaatcatttaggtacagatcccacctcactgaacaccagagacttcacactggggaaagaccttacaattgtagggaatgtgggaaattatttaacaggaagtatcatcttctggttcatgagagagttcacactggagaaaggccatatgcgtgtgaggtatgtgggaaattatttggcaataagcacagcgtgactatacatcagaggattcacactggagaaaggccgtatgaatgcagtgaatgtgggaaatcatttctttccagctctgcgcttcatgttcataaaagagttcattctggacaaaagccttataagtgcagtgaatgtggaaaatccttttctgaatgttccagtctcattaaacacaggagaattcacactggagaaaggccttatgaatgcaccaaatgtggaaaaacatttcagcgaagctctaccctccttcatcatcagagttcacacaggagaaaggccttatgagtacacaccaccacgcccagctaatttttgtgtttttagtggagatggggttttaccatgttggccaggctggtctcaaactcctgacctcaagtgatccacccaccttgactcccaaagtgctgaaattacaggcatgagcctctgcacctggccttcattcttttcgtattgcttagaatatgacatgctgaaccaggcatggtggctcatgcttgtaaacctgatgctttgggaggacaaggtggttcattggaggccaggagttggagatcagcctgggcaacatggccagacctcctctctacaaaaagaaaaaagaatgacatgcttcttgtttttgtctgttataaatgaaactgctatatttgaatgcagttgttcatgtaggtatgtttcactatggtaatatggtggtgtgcagtgcctgagtcacgtgatagattaaagtacaactcttttttgagacagagtctcactctgtcacccaggcgggagttaggtggcatgatttcggctcactgcaacctctgcctcccaagttcaactgattcttctgcctcagcctcccgagtagcagggattaccggtgtgcaccaccatgcctggataacttttttttttatttctattagcaatggggtttcaccatgctggccaggcttgttatgaactgacctcaagtgatctgcctgcctcagcttctcaggtgtgacctactgtgcttggcctaatgtacaactttttaagcaatgccaaactatgacttaagaatgaaattattgctcatttgtatatctatctaccatcagtgtccaagaatttctgttctatcttaccaagagggagtatggttagtatttgaaattgtttattattttaataagtggttataacttttgagtcagtggtttatgttttgcattttttttgttttgagacaaagtctcgctctgtctcccaggctagagtaccgtggcacaatctcagctcattgcaacctctgcttcctgggctcaagcactctgcccacctcagcctccagagtagctggaaatacaggtatgcaccaccacaactggataacttttgtattttctgtagagagggttttacctttttgcccagtctgatcgcgaactcctgggctcaggcgatccacttgcctaggctccaaaagtgcttggtctacaggggtgaggcaccctgcctggcctcacctgtaggcttgttttttaaaatgaattttatctatttcccatttcattaatatatttaaaaataatgaaataacaaagacgtatgttggacttcattcattcttcagtgatgtcactttgctgcaaggaatatttggttttcttttttttttttttttccagatggagtctagctctgtctcctaagctacagtgaagtggcatgatctcggcccactgcaacctccacctcctgtgttcaagcgattctgcctcagcctcctgagtagctgggactacnggcatgtgccattatacctggctaattttatttatttattttagtagagatggggtttcaccatgttacccaggctgctctctaccttctgagctcaagtgatccacctgcctcggcctcccaaagtgctgggattacaggtgtcagccactgtacctggctgaatacttggttttcagtaccacaagaactatgagctggttatccacttcatgtggaatcataagcgtcccaaagtgacaatacatatagattgccaggcagtgaaacagttaagatgccaccatagctttcttttcaacatctttctaagattaccttactatttcttttgttccaagtttgtacttcctcacagttctcacatatggaaaggatacacactttgtagaaacaagaactttatgttatccaagttctaggatagccatgagctccaattatctcagagctctgagtcctctactcaatacccattgagatttatgtgttctgaggcttttgtcttctagctacttacttcattctccatgggtaacgtcattcatccacattaactaatttcctcactccaagctcttttctagagataatctccagtccctgtgcagaaactgtcattgcactttctgctgaaatggcagtttcttctcagcaaggtgagattatggaatccagaatcttttttcaggggtcacatgcccatttccccacttgcatgaatgtcgacactgcagccacagttttggccgtaaatgtgaatttggcaagtaaccactgttcccagggaaatgtcccaatcagaagaagattatctgggacactgatactgacagggagatgggacattctgagggacccggaggcagggtgccacctcctcaacttccctgagggctgcctagaatctgtttcctctcactctgaattattcttcctcttatggctgaccaaaaacatggaacctcacaaagtccactgtaacagctttatatttgtgaagtgaagaacatgaagacagtttcaagcaaagttattgagtggacactttgtgttttttttgagaagtctcactctttcacccaggctggagtgcagtggcacgatctcggctcactgcaactccacctcccgggttcacgccattctcttgcctcagcctcctgagtagctgggaccacaagcgcccaccacgtcagcttaatttttttgttttgtttcttgagacagagtcttgctctcttgcccaggttggagtgccgtgtcgcaatctcagctcactgcaacttctacctcctggattcaagcacttctccttgcctcagccacctctttagctgggattacaggtgcgtgccaccacacccagctaatttttgtatttttagcagagaccaggtttcaccatgttggtcaggctggtctcaaactcctgacctcgtgatccacccacctcggcctcccaaagtgctggaattacaggcgtgagccactgcacctggcctgtattcttttctttagtagagacggggttttactgtatttgccaggatggtctcgatctccagacctcgtgatccgcccgccttagcctcccaaagtgctgggattataggcgtgagccaacacgccctggccacttcttgtctttgcaacattttttagatatgtatttgtgttttttggggagcttaatttgctaatggaatctctgttattttcctaacatgcttggtggatacaagagttaagacttcctgtcccgtttagtgtaacaaaagaaagttaagaaatgtggataaaagattgtaagttagaaatggcaagataatcagctatatgaagaatcttggccaggtgtggtggctgaggcctgtaatcccaccactttgggaggctgaggtgggcggatcacaaggtcaggagttcaagaccaccctggacaatattgtgaattcctgtctctactaaaaatacaaaaattagtcgggcatggtggcgggtgcctgtagtcccagagtagctgggcctataggttccctccaccacgcccagctaatttttgtatttttagtagagatgggctttcactacgttngccaggctggtctcaaactcctgacctcatgatccacccccctcggcctcctaaagtgctgggattacaggcatctgccaccgcactcggcttatccctagaaatcctatgatagcatgatgtataggcacctaaaggcatggcacttgagaaatgtgaataagattgtaagttacaaatagcaaggtacagtcagatgttaacagtctcagcccctaaatgtcaccttgtattacagcatgttatataagcacatacaggcacatacatgaaatagtgatacttcattctcagtaatatcttcatccttctcactggaaagatctttgatgatttttaatcaacataggagtttcaatgatatctagaagtttaaaagggctcgttcaaacaaattatgaccacacacactgaagagtatgtttgtctcttgtggtgtaaatttttttttattacaccaaattatgttcacacaaaacctttgtaatcagggggaattaaagagccttcctggaaaatggaggttgcaatcagccgagatggtgccatcgcactctagcctggggaatagagtgagatcctgcctcaaaaaaaacaaaaaaattctttattttctccataaactacagtttatataagcaaaagtttcagtactaagcaattttagtctctgcagtctcttgtcttgaattaatacaacttttgttaattctcttatgaagttaatcttcctgcttgtatgtgaattaaatatatgtcaaactttttttgtacaaaagattcatacctctttcctgtttgaaattattttactgtgtttcatcaatctaatgtttatttttattacaccagtaatttcctcattgtgttgaatcttacagtggcttataaatctacatgtacctagaaatgtttagccagtccatgtatatttgatgtggcacattttttcctttgaatcacatactctaagagaagtaacttcctcttgctaacctctactttccctaagtgttgaattaatcctctttagatgattataattctcttttcaatagctagaaagaatctataaggaactttcctggctgggtgtggtggctcatgcctgtaatcccagcacttcaggaggccgaggtgggtggatcacgaggtcaggagttccagaccagcctgaccaacatggttaaaccatgtctttactaaaaatgcaaaaattagcacctgtaatcccagctactcaggaggctgaggcatagaattgcttgaacctggcaggcagaggtggtgagccgagatcacggcactgcactccagcctgggtgacaagagcaagactccgtctcaaaataaataaataaaaataaaaaataaacatgatgatcacagatgcagtcacattttctgagttcttgtctctctgccagtgccacccagatagcctcacaaaactttgacccagccactgttagtgtcgccaccgcccataaaggagctgagcccagcaggggcactgcctggggccctgtagccaaaaggctacagcaggagctgatgaccctcatgatgcctggtgacaaaagaatttctgcctaccctgaaagccttatcaaatggacaccatccatgaagcagctggcacagtgtatgaagatctgaggtataagctcttgctggagttcctcaatgactacccacctttacgatgcacccacagtgaagttcctcacaccctgctaccaccctaacgtggacacccagggtaacatatgcctggacatcctgaaggagaagtggtctgccccgtatgatatcaggaccatcctgctctctatccagtgcctgctaggacaactcaacattgatagccctttgaacacacatgctaccaagctctgggaaaaccccatagctttaagaagtacctgcaagggtcaggcgcagtggctcacacctgtaatcccagcactttgggaggccgaggtgggtggatggatcacctgacgtagagagtccaaggcctgacaaacatggagaaatgtcatccctatttaaaaaaataaaaaaattagccaagtgtggtggcgcatgcctgtaatcccagctactcgggaggctgaggcaggagaatcacttgaacctgggaggtggaggttgcagtgagccgagatctcgctattgcactccagcctgggcaacaagagtgaaactctgcctcaaaaaaaaataaaataaaataaaaataaaaataaggaagtacctgcaagaaagctactcaaagtaggtcaccagccaggagctctgacccaggctgcccagcctatccttgtgttgtctttttaattttcccttagatggtctgccctttccgtgatttctgtgtagaactctgtatcttgagctgtggtactatttttcttttgtcttttaatttaaatcttgttgggagctcttgtgatgaatattaaatacatacattttgggctgggtgtggtgcctctagcctataatcccagcactttgggaggccgaggcaggcgaatcgtgaggtcaggagatcgagaccatcctgcctaacacggtgaaacctcgtctctactaaaaatacaaaaaaattagccgggcgtggtggcgggtgcctatagtcccagctgctcgggaggctgaggcaggagaatggcatgaacccgggaggtggagcttgcagtgagctgagattgcaccactgcactccaggctgggcacagagcaagactccatctcaaaaaaaaaaaaaaaaaaaagacaaaaagaaaacattttggtcattaaaaaacaaaaaaaaaatgatacgagagagcacccagggattataagaggaaacactttattacatcactcatctaacattccagaaaatggaaagtactctactgtacagcaaagtaaatcattggttgtctggagaacagaaagaaagcctttataaaaaggttccaagtaaatataaaggtgttaagttcattattgtgactatgttaatggtttcatgggattatatgaaactcaagatttatcacatgctacagcttaaatatgcatagcttactgaatgtcatttataactcatcacagctttaaaatatacttcagactggcagcagtggctcacacctgtattcccaccactctgggaggctgaggcaggcatatcacctgaggtcaggagtccaagatcagcctggccaacatggcaaaactccgtctctactaaaaatacaaaacttggccgggcatggtggcacatgcttccagtcccacctacatgggaggctgagcc

SEQ ID NO: 369498 - DNA, 6709 bp, Homo sapiens
  misc_feature (2239)..(2239): n is a, c, g, or t
acttcgacggagactctccagtgtgctcattcaacatcagcaaggtcacactggagagagagcttatcactgtggggaatgtgggaaatcttttcgtcagaagttctgctttattaaccatcagcgtgttcacactggagaaaggccttacaagtgtggagaatgtgggaaatcttttggtcaaaagggcaacctcgttcaccatcagcgaggtcatactggagaaaggccctatgagtgcaaggaatgtgggaaatcatttaggtacagatcccacctcactgaacaccagagacttcacactggggaaagaccttacaattgtagggaatgtgggaaattatttaacaggaagtatcatcttctggttcatgagagagttcacactggagaaaggccatatgcgtgtgaggtatgtgggaaattatttggcaataagcacagcgtgactatacatcagaggattcacactggagaaaggccgtatgaatgcagtgaatgtgggaaatcatttctttccagctctgcgcttcatgttcataaaagagttcattctggacaaaagccttataagtgcagtgaatgtggaaaatccttttctgaatgttccagtctcattaaacacaggagaattcacactggagaaaggccttatgaatgcaccaaatgtggaaaaacatttcagcgaagctctaccctccttcatcatcagagttcacacaggagaaaggccttatgagtacacaccaccacgcccagctaatttttgtgtttttagtggagatggggttttaccatgttggccaggctggtctcaaactcctgacctcaagtgatccacccaccttgactcccaaagtgctgaaattacaggcatgagcctctgcacctggccttcattcttttcgtattgcttagaatatgacatgctgaaccaggcatggtggctcatgcttgtaaacctgatgctttgggaggacaaggtggttcattggaggccaggagttggagatcagcctgggcaacatggccagacctcctctctacaaaaagaaaaaagaatgacatgcttcttgtttttgtctgttataaatgaaactgctatatttgaatgcagttgttcatgtaggtatgtttcactatggtaatatggtggtgtgcagtgcctgagtcacgtgatagattaaagtacaactcttttttgagacagagtctcactctgtcacccaggcgggagttaggtggcatgatttcggctcactgcaacctctgcctcccaagttcaactgattcttctgcctcagcctcccgagtagcagggattaccggtgtgcaccaccatgcctggataacttttttttttatttctattagcaatggggtttcaccatgctggccaggcttgttatgaactgacctcaagtgatctgcctgcctcagcttctcaggtgtgacctactgtgcttggcctaatgtacaactttttaagcaatgccaaactatgacttaagaatgaaattattgctcatttgtatatctatctaccatcagtgtccaagaatttctgttctatcttaccaagagggagtatggttagtatttgaaattgtttattattttaataagtggttataacttttgagtcagtggtttatgttttgcattttttttgttttgagacaaagtctcgctctgtctcccaggctagagtaccgtggcacaatctcagctcattgcaacctctgcttcctgggctcaagcactctgcccacctcagcctccagagtagctggaaatacaggtatgcaccaccacaactggataacttttgtattttctgtagagagggttttacctttttgcccagtctgatcgcgaactcctgggctcaggcgatccacttgcctaggctccaaaagtgcttggtctacaggggtgaggcaccctgcctggcctcacctgtaggcttgttttttaaaatgaattttatctatttcccatttcattaatatatttaaaaataatgaaataacaaagacgtatgttggacttcattcattcttcagtgatgtcactttgctgcaaggaatatttggttttcttttttttttttttttccagatggagtctagctctgtctcctaagctacagtgaagtggcatgatctcggcccactgcaacctccacctcctgtgttcaagcgattctgcctcagcctcctgagtagctgggactacnggcatgtgccattatacctggctaattttatttatttattttagtagagatggggtttcaccatgttacccaggctgctctctaccttctgagctcaagtgatccacctgcctcggcctcccaaagtgctgggattacaggtgtcagccactgtacctggctgaatacttggttttcagtaccacaagaactatgagctggttatccacttcatgtggaatcataagcgtcccaaagtgacaatacatatagattgccaggcagtgaaacagttaagatgccaccatagctttcttttcaacatctttctaagattaccttactatttcttttgttccaagtttgtacttcctcacagttctcacatatggaaaggatacacactttgtagaaacaagaactttatgttatccaagttctaggatagccatgagctccaattatctcagagctctgagtcctctactcaatacccattgagatttatgtgttctgaggcttttgtcttctagctacttacttcattctccatgggtaacgtcattcatccacattaactaatttcctcactccaagctcttttctagagataatctccagtccctgtgcagaaactgtcattgcactttctgctgaaatggcagtttcttctcagcaaggtgagattatggaatccagaatcttttttcaggggtcacatgcccatttccccacttgcatgaatgtcgacactgcagccacagttttggccgtaaatgtgaatttggcaagtaaccactgttcccagggaaatgtcccaatcagaagaagattatctgggacactgatactgacagggagatgggacattctgagggacccggaggcagggtgccacctcctcaacttccctgagggctgcctagaatctgtttcctctcactctgaattattcttcctcttatggctgaccaaaaacatggaacctcacaaagtccactgtaacagctttatatttgtgaagtgaagaacatgaagacagtttcaagcaaagttattgagtggacactttgtgttttttttgagaagtctcactctttcacccaggctggagtgcagtggcacgatctcggctcactgcaactccacctcccgggttcacgccattctcttgcctcagcctcctgagtagctgggaccacaagcgcccaccacgtcagcttaatttttttgttttgtttcttgagacagagtcttgctctcttgcccaggttggagtgccgtgtcgcaatctcagctcactgcaacttctacctcctggattcaagcacttctccttgcctcagccacctctttagctgggattacaggtgcgtgccaccacacccagctaattaccttgtattacagcatgttatataagcacatacaggcacatacatgaaatagtgatacttcattctcagtaatatcttcatccttctcactggaaagatctttgatgatttttaatcaacataggagtttcaatgatatctagaagtttaaaagggctcgttcaaacaaattatgaccacacacactgaagagtatgtttgtctcttgtggtgtaaatttttttttattacaccaaattatgttcacacaaaacctttgtaatcagggggaattaaagagccttcctggaaaatggaggttgcaatcagccgagatggtgccatcgcactctagcctggggaatagagtgagatcctgcctcaaaaaaaacaaaaaaattctttattttctccataaactacagtttatataagcaaaagtttcagtactaagcaattttagtctctgcagtctcttgtcttgaattaatacaacttttgttaattctcttatgaagttaatcttcctgcttgtatgtgaattaaatatatgtcaaactttttttgtacaaaagattcatacctctttcctgtttgaaattattttactgtgtttcatcaatctaatgtttatttttattacaccagtaatttcctcattgtgttgaatcttacagtggcttataaatctacatgtacctagaaatgtttagccagtccatgtatatttgatgtggcacattttttcctttgaatcacatactctaagagaagtaacttcctcttgctaacctctactttccctaagtgttgaattaatcctctttagatgattataattctcttttcaatagctagaaagaatctataaggaactttcctggctgggtgtggtggctcatgcctgtaatcccagcacttcaggaggccgaggtgggtggatcacgaggtcaggagttccagaccagcctgaccaacatggttaaaccatgtctttactaaaaatgcaaaaattagcacctgtaatcccagctactcaggaggctgaggcatagaattgcttgaacctggcaggcagaggtggtgagccgagatcacggcactgcactccagcctgggtgacaagagcaagactccgtctcaaaataaataaataaaaataaaaaataaacatgatgatcacagatgcagtcacattttctgagttcttgtctctctgccagtgccacccagatagcctcacaaaactttgacccagccactgttagtgtcgccaccgcccataaaggagctgagcccagcaggggcactgcctggggccctgtagccaaaaggctacagcaggagctgatgaccctcatgatgcctggtgacaaaagaatttctgcctaccctgaaagccttatcaaatggacaccatccatgaagcagctggcacagtgtatgaagatctgaggtataagctcttgctggagttcctcaatgactacccacctttacgatgcacccacagtgaagttcctcacaccctgctaccaccctaacgtggacacccagggtaacatatgcctggacatcctgaaggagaagtggtctgccccgtatgatatcaggaccatcctgctctctatccagtgcctgctaggacaactcaacattgatagccctttgaacacacatgctaccaagctctgggaaaaccccatagctttaagaagtacctgcaagggtcaggcgcagtggctcacacctgtaatcccagcactttgggaggccgaggtgggtggatggatcacctgacgtagagagtccaaggcctgacaaacatggagaaatgtcatccctatttaaaaaaataaaaaaattagccaagtgtggtggcgcatgcctgtaatcccagctactcgggaggctgaggcaggagaatcacttgaacctgggaggtggaggttgcagtgagccgagatctcgctattgcactccagcctgggcaacaagagtgaaactctgcctcaaaaaaaaataaaataaaataaaaataaaaataaggaagtacctgcaagaaagctactcaaagtaggtcaccagccaggagctctgacccaggctgcccagcctatccttgtgttgtctttttaattttcccttagatggtctgccctttccgtgatttctgtgtagaactctgtatcttgagctgtggtactatttttcttttgtcttttaatttaaatcttgttgggagctcttgtgatgaatattaaatacatacattttgggctgggtgtggtgcctctagcctataatcccagcactttgggaggccgaggcaggcgaatcgtgaggtcaggagatcgagaccatcctgcctaacacggtgaaacctcgtctctactaaaaatacaaaaaaattagccgggcgtggtggcgggtgcctatagtcccagctgctcgggaggctgaggcaggagaatggcatgaacccgggaggtggagcttgcagtgagctgagattgcaccactgcactccaggctgggcacagagcaagactccatctcaaaaaaaaaaaaaaaaaaaagacaaaaagaaaacattttggtcattaaaaaacaaaaaaaaaatgatacgagagagcacccagggattataagaggaaacactttattacatcactcatctaacattccagaaaatggaaagtactctactgtacagcaaagtaaatcattggttgtctggagaacagaaagaaagcctttataaaaaggttccaagtaaatataaaggtgttaagttcattattgtgactatgttaatggtttcatgggattatatgaaactcaagatttatcacatgctacagcttaaatatgcatagcttactgaatgtcatttataactcatcacagctttaaaatatacttcagactggcagcagtggctcacacctgtattcccaccactctgggaggctgaggcaggcatatcacctgaggtcaggagtccaagatcagcctggccaacatggcaaaactccgtctctactaaaaatacaaaacttggccgggcatggtggcacatgcttccagtcccacctacatgggaggctgagcc

SEQ ID NO: 369499 - DNA, 5909 bp, Homo sapiens
  misc_feature (61)..(61): n is a, c, g, or t
  misc_feature (87)..(87): n is a, c, g, or t
  misc_feature (1439)..(1439): n is a, c, g, or t
catttaggcctggagactgttaacatctgactgtaccctgctatttgtaacttaccatctnattcacatttctcaagtgccatgccnttaggtgcctatacatcatgctatcataggatttctagggataagccgagtgcggtggcagatgcctgcaatcccagcactttaggaggccgaggggggcggaccatgaggccaggagttggagatcagcctgggcaacatggccagacctcctctctacaaaaagaaaaaagaatgacatgcttcttgtttttgtctgttataaatgaaactgctatatttgaatgcagttgttcatgtaggtatgtttcactatggtaatatggtggtgtgcagtgcctgagtcacgtgatagattaaagtacaactcttttttgagacagagtctcactctgtcacccaggcgggagttaggtggcatgatttcggctcactgcaacctctgcctcccaagttcaactgattcttctgcctcagcctcccgagtagcagggattaccggtgtgcaccaccatgcctggataacttttttttttatttctattagcaatggggtttcaccatgctggccaggcttgttatgaactgacctcaagtgatctgcctgcctcagcttctcaggtgtgacctactgtgcttggcctaatgtacaactttttaagcaatgccaaactatgacttaagaatgaaattattgctcatttgtatatctatctaccatcagtgtccaagaatttctgttctatcttaccaagagggagtatggttagtatttgaaattgtttattattttaataagtggttataacttttgagtcagtggtttatgttttgcattttttttgttttgagacaaagtctcgctctgtctcccaggctagagtaccgtggcacaatctcagctcattgcaacctctgcttcctgggctcaagcactctgcccacctcagcctccagagtagctggaaatacaggtatgcaccaccacaactggataacttttgtattttctgtagagagggttttacctttttgcccagtctgatcgcgaactcctgggctcaggcgatccacttgcctaggctccaaaagtgcttggtctacaggggtgaggcaccctgcctggcctcacctgtaggcttgttttttaaaatgaattttatctatttcccatttcattaatatatttaaaaataatgaaataacaaagacgtatgttggacttcattcattcttcagtgatgtcactttgctgcaaggaatatttggttttcttttttttttttttttccagatggagtctagctctgtctcctaagctacagtgaagtggcatgatctcggcccactgcaacctccacctcctgtgttcaagcgattctgcctcagcctcctgagtagctgggactacnggcatgtgccattatacctggctaattttatttatttattttagtagagatggggtttcaccatgttacccaggctgctctctaccttctgagctcaagtgatccacctgcctcggcctcccaaagtgctgggattacaggtgtcagccactgtacctggctgaatacttggttttcagtaccacaagaactatgagctggttatccacttcatgtggaatcataagcgtcccaaagtgacaatacatatagattgccaggcagtgaaacagttaagatgccaccatagctttcttttcaacatctttctaagattaccttactatttcttttgttccaagtttgtacttcctcacagttctcacatatggaaaggatacacactttgtagaaacaagaactttatgttatccaagttctaggatagccatgagctccaattatctcagagctctgagtcctctactcaatacccattgagatttatgtgttctgaggcttttgtcttctagctacttacttcattctccatgggtaacgtcattcatccacattaactaatttcctcactccaagctcttttctagagataatctccagtccctgtgcagaaactgtcattgcactttctgctgaaatggcagtttcttctcagcaaggtgagattatggaatccagaatcttttttcaggggtcacatgcccatttccccacttgcatgaatgtcgacactgcagccacagttttggccgtaaatgtgaatttggcaagtaaccactgttcccagggaaatgtcccaatcagaagaagattatctgggacactgatactgacagggagatgggacattctgagggacccggaggcagggtgccacctcctcaacttccctgagggctgcctagaatctgtttcctctcactctgaattattcttcctcttatggctgaccaaaaacatggaacctcacaaagtccactgtaacagctttatatttgtgaagtgaagaacatgaagacagtttcaagcaaagttattgagtggacactttgtgttttttttgagaagtctcactctttcacccaggctggagtgcagtggcacgatctcggctcactgcaactccacctcccgggttcacgccattctcttgcctcagcctcctgagtagctgggaccacaagcgcccaccacgtcagcttaatttttttgttttgtttcttgagacagagtcttgctctcttgcccaggttggagtgccgtgtcgcaatctcagctcactgcaacttctacctcctggattcaagcacttctccttgcctcagccacctctttagctgggattacaggtgcgtgccaccacacccagctaattaccttgtattacagcatgttatataagcacatacaggcacatacatgaaatagtgatacttcattctcagtaatatcttcatccttctcactggaaagatctttgatgatttttaatcaacataggagtttcaatgatatctagaagtttaaaagggctcgttcaaacaaattatgaccacacacactgaagagtatgtttgtctcttgtggtgtaaatttttttttattacaccaaattatgttcacacaaaacctttgtaatcagggggaattaaagagccttcctggaaaatggaggttgcaatcagccgagatggtgccatcgcactctagcctggggaatagagtgagatcctgcctcaaaaaaaacaaaaaaattctttattttctccataaactacagtttatataagcaaaagtttcagtactaagcaattttagtctctgcagtctcttgtcttgaattaatacaacttttgttaattctcttatgaagttaatcttcctgcttgtatgtgaattaaatatatgtcaaactttttttgtacaaaagattcatacctctttcctgtttgaaattattttactgtgtttcatcaatctaatgtttatttttattacaccagtaatttcctcattgtgttgaatcttacagtggcttataaatctacatgtacctagaaatgtttagccagtccatgtatatttgatgtggcacattttttcctttgaatcacatactctaagagaagtaacttcctcttgctaacctctactttccctaagtgttgaattaatcctctttagatgattataattctcttttcaatagctagaaagaatctataaggaactttcctggctgggtgtggtggctcatgcctgtaatcccagcacttcaggaggccgaggtgggtggatcacgaggtcaggagttccagaccagcctgaccaacatggttaaaccatgtctttactaaaaatgcaaaaattagcacctgtaatcccagctactcaggaggctgaggcatagaattgcttgaacctggcaggcagaggtggtgagccgagatcacggcactgcactccagcctgggtgacaagagcaagactccgtctcaaaataaataaataaaaataaaaaataaacatgatgatcacagatgcagtcacattttctgagttcttgtctctctgccagtgccacccagatagcctcacaaaactttgacccagccactgttagtgtcgccaccgcccataaaggagctgagcccagcaggggcactgcctggggccctgtagccaaaaggctacagcaggagctgatgaccctcatgatgcctggtgacaaaagaatttctgcctaccctgaaagccttatcaaatggacaccatccatgaagcagctggcacagtgtatgaagatctgaggtataagctcttgctggagttcctcaatgactacccacctttacgatgcacccacagtgaagttcctcacaccctgctaccaccctaacgtggacacccagggtaacatatgcctggacatcctgaaggagaagtggtctgccccgtatgatatcaggaccatcctgctctctatccagtgcctgctaggacaactcaacattgatagccctttgaacacacatgctaccaagctctgggaaaaccccatagctttaagaagtacctgcaagggtcaggcgcagtggctcacacctgtaatcccagcactttgggaggccgaggtgggtggatggatcacctgacgtagagagtccaaggcctgacaaacatggagaaatgtcatccctatttaaaaaaataaaaaaattagccaagtgtggtggcgcatgcctgtaatcccagctactcgggaggctgaggcaggagaatcacttgaacctgggaggtggaggttgcagtgagccgagatctcgctattgcactccagcctgggcaacaagagtgaaactctgcctcaaaaaaaaataaaataaaataaaaataaaaataaggaagtacctgcaagaaagctactcaaagtaggtcaccagccaggagctctgacccaggctgcccagcctatccttgtgttgtctttttaattttcccttagatggtctgccctttccgtgatttctgtgtagaactctgtatcttgagctgtggtactatttttcttttgtcttttaatttaaatcttgttgggagctcttgtgatgaatattaaatacatacattttgggctgggtgtggtgcctctagcctataatcccagcactttgggaggccgaggcaggcgaatcgtgaggtcaggagatcgagaccatcctgcctaacacggtgaaacctcgtctctactaaaaatacaaaaaaattagccgggcgtggtggcgggtgcctatagtcccagctgctcgggaggctgaggcaggagaatggcatgaacccgggaggtggagcttgcagtgagctgagattgcaccactgcactccaggctgggcacagagcaagactccatctcaaaaaaaaaaaaaaaaaaaagacaaaaagaaaacattttggtcattaaaaaacaaaaaaaaaatgatacgagagagcacccagggattataagaggaaacactttattacatcactcatctaacattccagaaaatggaaagtactctactgtacagcaaagtaaatcattggttgtctggagaacagaaagaaagcctttataaaaaggttccaagtaaatataaaggtgttaagttcattattgtgactatgttaatggtttcatgggattatatgaaactcaagatttatcacatgctacagcttaaatatgcatagcttactgaatgtcatttataactcatcacagctttaaaatatacttcagactggcagcagtggctcacacctgtattcccaccactctgggaggctgaggcaggcatatcacctgaggtcaggagtccaagatcagcctggccaacatggcaaaactccgtctctactaaaaatacaaaacttggccgggcatggtggcacatgcttccagtcccacctacatgggaggctgagcc

SEQ ID NO: 369500 - DNA, 8585 bp, Homo sapiens
  misc_feature (4024)..(4024): n is a, c, g, or t
  misc_feature (5266)..(5266): n is a, c, g, or t
acgtatggtgcagtacattgattgaagtaacatgagagagaaggggtgggtgtagcaaaaacattctcaaggccaagtcatcagcccttacccttaggagggggcagtgattaagaggtggtatgagagcctcgtttctcatttctataagtgctggtaaaggacctgaccccacttccttacctactgcctgcccaggtaactgatgcctacagcatcacaggaattgccaaaatgcagaaaacaaatcctaaattgctctaattccataacacaaaggctggtttttggcttgaaataatcaggcacatatatcatgttctgtcacccagggtggagtgcagtggtgtgatctcggctcactacaaaccccgcctcctgggttcacgccattctccggcctcagcctcccgagtagctgggactacaggtgcccaccaccatgcccggctaattttttgtatttttagtagagacagggtttcaccatgttaaccagcatagtctctatcccctgactgcaagatctgcccgaatcagtgtcccaaagtgctgggattacaggcgtgagccaccgcacccagcccagaagggagtggacctttttatgtcaggacctcagcatggatacctatttgtccacctacttcttgttgctgatggcatttgaccagcaggcccatgaagagacaaaggcaccagtggatgtggtttcaactccgtgttggggaccttgggaggaggatgggcaagggtgggcgtgtgggagaggtgggttgtggtacctcagcagaggggctgcttgtggcttcatctgtcactatcatagcagggcactgtgacctttgaagatgtggctgtgaacttttcccaggaggagtggtgtcttcttagtgaggctcagaggtgcttgtaccgtgatgtgatgctagagaacctggctctcatatcctcgctgggttgttggtgtggatcaaaagatgaggaggcaccttgtaagcagagaatttctgtacaaagagagtctcagagcaggactcctagggcaggtgtttctcctaagaaggctcacccctgtgaaatgtgtggcctcatcttggaggatgtttttcactttgctgaccaccaggaaactcatcacaagcagaagctgaacaggagtggagcatgtggaaaaaacttggatgacactgcataccttcatcagcaccagaagcagcatattggagagaaattctacagaaagagtgtcagagaagcatcgtttgtaaagaaacgtaagctcagggtgtcacaggagccatttgtcttccgcgagtttgggaaggacgttctgcccagttcaggattgtgccaagaagaagctgctgtagagaagacagacagtgaaactatgcatggcccaccctttcaggagggaaaaactaattacagttgtggaaaacgcacaaaagccttcagcaccaaacactcagttattccacaccagaaacttttcactagagatggatgttatgtgtgcagtgattgtggaaaatcctttagcagatatgtcagcttcagtaatcatcagcgagatcacactgcaaaaggaccttatgattgtggagagtgtgggaaatcttatagtcgaaagagcagccttattcaacatcagcgagtccacactggacagacagcttatccctgtgaggagtgcgggaaatcttttagtcagaagggcagccttattagccatcagcttgttcacactggagaagggccttatgagtgtagagaatgtgggaaatcttttggtcaaaagggtaacctcattcaacatcagcaaggtcacactggagagagagcttatcactgtggggaatgtgggaaatcttttcgtcagaagttctgctttattaaccatcagcgtgttcacactggagaaaggccttacaagtgtggagaatgtgggaaatcttttggtcaaaagggcaacctcgttcaccatcagcgaggtcatactggagaaaggccctatgagtgcaaggaatgtgggaaatcatttaggtacagatcccacctcactgaacaccagagacttcacactggggaaagaccttacaattgtagggaatgtgggaaattatttaacaggaagtatcatcttctggttcatgagagagttcacactggagaaaggccatatgcgtgtgaggtatgtgggaaattatttggcaataagcacagcgtgactatacatcagaggattcacactggagaaaggccgtatgaatgcagtgaatgtgggaaatcatttctttccagctctgcgcttcatgttcataaaagagttcattctggacaaaagccttataagtgcagtgaatgtggaaaatccttttctgaatgttccagtctcattaaacacaggagaattcacactggagaaaggccttatgaatgcaccaaatgtggaaaaacatttcagcgaagctctaccctccttcatcatcagagttcacacaggagaaaggccttatgagtacacaccaccacgcccagctaatttttgtgtttttagtggagatggggttttaccatgttggccaggctggtctcaaactcctgacctcaagtgatccacccaccttgactcccaaagtgctgaaattacaggcatgagcctctgcacctggccttcattcttttcgtattgcttagaatatgacatgctgaaccaggcatggtggctcatgcttgtaaacctgatgctttgggaggacaaggtggttcattggaggccaggagttggagatcagcctgggcaacatggccagacctcctctctacaaaaagaaaaaagaatgacatgcttcttgtttttgtctgttataaatgaaactgctatatttgaatgcagttgttcatgtaggtatgtttcactatggtaatatggtggtgtgcagtgcctgagtcacgtgatagattaaagtacaactcttttttgagacagagtctcactctgtcacccaggcgggagttaggtggcatgatttcggctcactgcaacctctgcctcccaagttcaactgattcttctgcctcagcctcccgagtagcagggattaccggtgtgcaccaccatgcctggataacttttttttttatttctattagcaatggggtttcaccatgctggccaggcttgttatgaactgacctcaagtgatctgcctgcctcagcttctcaggtgtgacctactgtgcttggcctaatgtacaactttttaagcaatgccaaactatgacttaagaatgaaattattgctcatttgtatatctatctaccatcagtgtccaagaatttctgttctatcttaccaagagggagtatggttagtatttgaaattgtttattattttaataagtggttataacttttgagtcagtggtttatgttttgcattttttttgttttgagacaaagtctcgctctgtctcccaggctagagtaccgtggcacaatctcagctcattgcaacctctgcttcctgggctcaagcactctgcccacctcagcctccagagtagctggaaatacaggtatgcaccaccacaactggataacttttgtattttctgtagagagggttttacctttttgcccagtctgatcgcgaactcctgggctcaggcgatccacttgcctaggctccaaaagtgcttggtctacaggggtgaggcaccctgcctggcctcacctgtaggcttgttttttaaaatgaattttatctatttcccatttcattaatatatttaaaaataatgaaataacaaagacgtatgttggacttcattcattcttcagtgatgtcactttgctgcaaggaatatttggttttcttttttttttttttttccagatggagtctagctctgtctcctaagctacagtgaagtggcatgatctcggcccactgcaacctccacctcctgtgttcaagcgattctgcctcagcctcctgagtagctgggactacnggcatgtgccattatacctggctaattttatttatttattttagtagagatggggtttcaccatgttacccaggctgctctctaccttctgagctcaagtgatccacctgcctcggcctcccaaagtgctgggattacaggtgtcagccactgtacctggctgaatacttggttttcagtaccacaagaactatgagctggttatccacttcatgtggaatcataagcgtcccaaagtgacaatacatatagattgccaggcagtgaaacagttaagatgccaccatagctttcttttcaacatctttctaagattaccttactatttcttttgttccaagtttgtacttcctcacagttctcacatatggaaaggatacacactttgtagaaacaagaactttatgttatccaagttctaggatagccatgagctccaattatctcagagctctgagtcctctactcaatacccattgagatttatgtgttctgaggcttttgtcttctagctacttacttcattctccatgggtaacgtcattcatccacattaactaatttcctcactccaagctcttttctagagataatctccagtccctgtgcagaaactgtcattgcactttctgctgaaatggcagtttcttctcagcaaggtgagattatggaatccagaatcttttttcaggggtcacatgcccatttccccacttgcatgaatgtcgacactgcagccacagttttggccgtaaatgtgaatttggcaagtaaccactgttcccagggaaatgtcccaatcagaagaagattatctgggacactgatactgacagggagatgggacattctgagggacccggaggcagggtgccacctcctcaacttccctgagggctgcctagaatctgtttcctctcactctgaattattcttcctcttatggctgaccaaaaacatggaacctcacaaagtccactgtaacagctttatatttgtgaagtgaagaacatgaagacagtttcaagcaaagttattgagtggacactttgtgttttttttgagaagtctcactctttcacccaggctggagtgcagtggcacgatctcggctcactgcaactccacctcgttcaagtgattctcttgcctcagcctcccgagtagctgggcctataggttccctccaccacgcccagctaatttttgtatttttagtagagatgggctttcactacgttngccaggctggtctcaaactcctgacctcatgatccacccccctcggcctcctaaagtgctgggattacaggcatctgccaccgcactcggcttatccctagaaatcctatgatagcatgatgtataggcacctaaaggcatggcacttgagaaatgtgaataagattgtaagttacaaatagcaaggtacagtcagatgttaacagtctcagcccctaaatgtcaccttgtattacagcatgttatataagcacatacaggcacatacatgaaatagtgatacttcattctcagtaatatcttcatccttctcactggaaagatctttgatgatttttaatcaacataggagtttcaatgatatctagaagtttaaaagggctcgttcaaacaaattatgaccacacacactgaagagtatgtttgtctcttgtggtgtaaatttttttttattacaccaaattatgttcacacaaaacctttgtaatcagggggaattaaagagccttcctggaaaatggaggttgcaatcagccgagatggtgccatcgcactctagcctggggaatagagtgagatcctgcctcaaaaaaaacaaaaaaattctttattttctccataaactacagtttatataagcaaaagtttcagtactaagcaattttagtctctgcagtctcttgtcttgaattaatacaacttttgttaattctcttatgaagttaatcttcctgcttgtatgtgaattaaatatatgtcaaactttttttgtacaaaagattcatacctctttcctgtttgaaattattttactgtgtttcatcaatctaatgtttatttttattacaccagtaatttcctcattgtgttgaatcttacagtggcttataaatctacatgtacctagaaatgtttagccagtccatgtatatttgatgtggcacattttttcctttgaatcacatactctaagagaagtaacttcctcttgctaacctctactttccctaagtgttgaattaatcctctttagatgattataattctcttttcaatagctagaaagaatctataaggaactttcctggctgggtgtggtggctcatgcctgtaatcccagcacttcaggaggccgaggtgggtggatcacgaggtcaggagttccagaccagcctgaccaacatggttaaaccatgtctttactaaaaatgcaaaaattagcacctgtaatcccagctactcaggaggctgaggcatagaattgcttgaacctggcaggcagaggtggtgagccgagatcacggcactgcactccagcctgggtgacaagagcaagactccgtctcaaaataaataaataaaaataaaaaataaacatgatgatcacagatgcagtcacattttctgagttcttgtctctctgccagtgccacccagatagcctcacaaaactttgacccagccactgttagtgtcgccaccgcccataaaggagctgagcccagcaggggcactgcctggggccctgtagccaaaaggctacagcaggagctgatgaccctcatgatgcctggtgacaaaagaatttctgcctaccctgaaagccttatcaaatggacaccatccatgaagcagctggcacagtgtatgaagatctgaggtataagctcttgctggagttcctcaatgactacccacctttacgatgcacccacagtgaagttcctcacaccctgctaccaccctaacgtggacacccagggtaacatatgcctggacatcctgaaggagaagtggtctgccccgtatgatatcaggaccatcctgctctctatccagtgcctgctaggacaactcaacattgatagccctttgaacacacatgctaccaagctctgggaaaaccccatagctttaagaagtacctgcaagggtcaggcgcagtggctcacacctgtaatcccagcactttgggaggccgaggtgggtggatggatcacctgacgtagagagtccaaggcctgacaaacatggagaaatgtcatccctatttaaaaaaataaaaaaattagccaagtgtggtggcgcatgcctgtaatcccagctactcgggaggctgaggcaggagaatcacttgaacctgggaggtggaggttgcagtgagccgagatctcgctattgcactccagcctgggcaacaagagtgaaactctgcctcaaaaaaaaataaaataaaataaaaataaaaataaggaagtacctgcaagaaagctactcaaagtaggtcaccagccaggagctctgacccaggctgcccagcctatccttgtgttgtctttttaattttcccttagatggtctgccctttccgtgatttctgtgtagaactctgtatcttgagctgtggtactatttttcttttgtcttttaatttaaatcttgttgggagctcttgtgatgaatattaaatacatacattttgggctgggtgtggtgcctctagcctataatcccagcactttgggaggccgaggcaggcgaatcgtgaggtcaggagatcgagaccatcctgcctaacacggtgaaacctcgtctctactaaaaatacaaaaaaattagccgggcgtggtggcgggtgcctatagtcccagctgctcgggaggctgaggcaggagaatggcatgaacccgggaggtggagcttgcagtgagctgagattgcaccactgcactccaggctgggcacagagcaagactccatctcaaaaaaaaaaaaaaaaaaaagacaaaaagaaaacattttggtcattaaaaaacaaaaaaaaaatgatacgagagagcacccagggattataagaggaaacactttattacatcactcatctaacattccagaaaatggaaagtactctactgtacagcaaagtaaatcattggttgtctggagaacagaaagaaagcctttataaaaaggttccaagtaaatataaaggtgttaagttcattattgtgactatgttaatggtttcatgggattatatgaaactcaagatttatcacatgctacagcttaaatatgcatagcttactgaatgtcatttataactcatcacagctttaaaatatacttcagactggcagcagtggctcacacctgtattcccaccactctgggaggctgaggcaggcatatcacctgaggtcaggagtccaagatcagcctggccaacatggcaaaactccgtctctactaaaaatacaaaacttggccgggcatggtggcacatgcttccagtcccacctacatgggaggctgagcc

SEQ ID NO: 369501 - DNA, 8554 bp, Homo sapiens
  misc_feature (4024)..(4024): n is a, c, g, or t
  misc_feature (5235)..(5235): n is a, c, g, or t
acgtatggtgcagtacattgattgaagtaacatgagagagaaggggtgggtgtagcaaaaacattctcaaggccaagtcatcagcccttacccttaggagggggcagtgattaagaggtggtatgagagcctcgtttctcatttctataagtgctggtaaaggacctgaccccacttccttacctactgcctgcccaggtaactgatgcctacagcatcacaggaattgccaaaatgcagaaaacaaatcctaaattgctctaattccataacacaaaggctggtttttggcttgaaataatcaggcacatatatcatgttctgtcacccagggtggagtgcagtggtgtgatctcggctcactacaaaccccgcctcctgggttcacgccattctccggcctcagcctcccgagtagctgggactacaggtgcccaccaccatgcccggctaattttttgtatttttagtagagacagggtttcaccatgttaaccagcatagtctctatcccctgactgcaagatctgcccgaatcagtgtcccaaagtgctgggattacaggcgtgagccaccgcacccagcccagaagggagtggacctttttatgtcaggacctcagcatggatacctatttgtccacctacttcttgttgctgatggcatttgaccagcaggcccatgaagagacaaaggcaccagtggatgtggtttcaactccgtgttggggaccttgggaggaggatgggcaagggtgggcgtgtgggagaggtgggttgtggtacctcagcagaggggctgcttgtggcttcatctgtcactatcatagcagggcactgtgacctttgaagatgtggctgtgaacttttcccaggaggagtggtgtcttcttagtgaggctcagaggtgcttgtaccgtgatgtgatgctagagaacctggctctcatatcctcgctgggttgttggtgtggatcaaaagatgaggaggcaccttgtaagcagagaatttctgtacaaagagagtctcagagcaggactcctagggcaggtgtttctcctaagaaggctcacccctgtgaaatgtgtggcctcatcttggaggatgtttttcactttgctgaccaccaggaaactcatcacaagcagaagctgaacaggagtggagcatgtggaaaaaacttggatgacactgcataccttcatcagcaccagaagcagcatattggagagaaattctacagaaagagtgtcagagaagcatcgtttgtaaagaaacgtaagctcagggtgtcacaggagccatttgtcttccgcgagtttgggaaggacgttctgcccagttcaggattgtgccaagaagaagctgctgtagagaagacagacagtgaaactatgcatggcccaccctttcaggagggaaaaactaattacagttgtggaaaacgcacaaaagccttcagcaccaaacactcagttattccacaccagaaacttttcactagagatggatgttatgtgtgcagtgattgtggaaaatcctttagcagatatgtcagcttcagtaatcatcagcgagatcacactgcaaaaggaccttatgattgtggagagtgtgggaaatcttatagtcgaaagagcagccttattcaacatcagcgagtccacactggacagacagcttatccctgtgaggagtgcgggaaatcttttagtcagaagggcagccttattagccatcagcttgttcacactggagaagggccttatgagtgtagagaatgtgggaaatcttttggtcaaaagggtaacctcattcaacatcagcaaggtcacactggagagagagcttatcactgtggggaatgtgggaaatcttttcgtcagaagttctgctttattaaccatcagcgtgttcacactggagaaaggccttacaagtgtggagaatgtgggaaatcttttggtcaaaagggcaacctcgttcaccatcagcgaggtcatactggagaaaggccctatgagtgcaaggaatgtgggaaatcatttaggtacagatcccacctcactgaacaccagagacttcacactggggaaagaccttacaattgtagggaatgtgggaaattatttaacaggaagtatcatcttctggttcatgagagagttcacactggagaaaggccatatgcgtgtgaggtatgtgggaaattatttggcaataagcacagcgtgactatacatcagaggattcacactggagaaaggccgtatgaatgcagtgaatgtgggaaatcatttctttccagctctgcgcttcatgttcataaaagagttcattctggacaaaagccttataagtgcagtgaatgtggaaaatccttttctgaatgttccagtctcattaaacacaggagaattcacactggagaaaggccttatgaatgcaccaaatgtggaaaaacatttcagcgaagctctaccctccttcatcatcagagttcacacaggagaaaggccttatgagtacacaccaccacgcccagctaatttttgtgtttttagtggagatggggttttaccatgttggccaggctggtctcaaactcctgacctcaagtgatccacccaccttgactcccaaagtgctgaaattacaggcatgagcctctgcacctggccttcattcttttcgtattgcttagaatatgacatgctgaaccaggcatggtggctcatgcttgtaaacctgatgctttgggaggacaaggtggttcattggaggccaggagttggagatcagcctgggcaacatggccagacctcctctctacaaaaagaaaaaagaatgacatgcttcttgtttttgtctgttataaatgaaactgctatatttgaatgcagttgttcatgtaggtatgtttcactatggtaatatggtggtgtgcagtgcctgagtcacgtgatagattaaagtacaactcttttttgagacagagtctcactctgtcacccaggcgggagttaggtggcatgatttcggctcactgcaacctctgcctcccaagttcaactgattcttctgcctcagcctcccgagtagcagggattaccggtgtgcaccaccatgcctggataacttttttttttatttctattagcaatggggtttcaccatgctggccaggcttgttatgaactgacctcaagtgatctgcctgcctcagcttctcaggtgtgacctactgtgcttggcctaatgtacaactttttaagcaatgccaaactatgacttaagaatgaaattattgctcatttgtatatctatctaccatcagtgtccaagaatttctgttctatcttaccaagagggagtatggttagtatttgaaattgtttattattttaataagtggttataacttttgagtcagtggtttatgttttgcattttttttgttttgagacaaagtctcgctctgtctcccaggctagagtaccgtggcacaatctcagctcattgcaacctctgcttcctgggctcaagcactctgcccacctcagcctccagagtagctggaaatacaggtatgcaccaccacaactggataacttttgtattttctgtagagagggttttacctttttgcccagtctgatcgcgaactcctgggctcaggcgatccacttgcctaggctccaaaagtgcttggtctacaggggtgaggcaccctgcctggcctcacctgtaggcttgttttttaaaatgaattttatctatttcccatttcattaatatatttaaaaataatgaaataacaaagacgtatgttggacttcattcattcttcagtgatgtcactttgctgcaaggaatatttggttttcttttttttttttttttccagatggagtctagctctgtctcctaagctacagtgaagtggcatgatctcggcccactgcaacctccacctcctgtgttcaagcgattctgcctcagcctcctgagtagctgggactacnggcatgtgccattatacctggctaattttatttatttattttagtagagatggggtttcaccatgttacccaggctgctctctaccttctgagctcaagtgatccacctgcctcggcctcccaaagtgctgggattacaggtgtcagccactgtacctggctgaatacttggttttcagtaccacaagaactatgagctggttatccacttcatgtggaatcataagcgtcccaaagtgacaatacatatagattgccaggcagtgaaacagttaagatgccaccatagctttcttttcaacatctttctaagattaccttactatttcttttgttccaagtttgtacttcctcacagttctcacatatggaaaggatacacactttgtagaaacaagaactttatgttatccaagttctaggatagccatgagctccaattatctcagagctctgagtcctctactcaatacccattgagatttatgtgttctgaggcttttgtcttctagctacttacttcattctccatgggtaacgtcattcatccacattaactaatttcctcactccaagctcttttctagagataatctccagtccctgtgcagaaactgtcattgcactttctgctgaaatggcagtttcttctcagcaaggtgagattatggaatccagaatcttttttcaggggtcacatgcccatttccccacttgcatgaatgtcgacactgcagccacagttttggccgtaaatgtgaatttggcaagtaaccactgttcccagggaaatgtcccaatcagaagaagattatctgggacactgatactgacagggagatgggacattctgagggacccggaggcagggtgccacctcctcaacttccctgagggctgcctagaatctgtttcctctcactctgaattattcttcctcttatggctgaccaaaaacatggaacctcacaaagtccactgtaacagctttatatttgtgaagtgaagaacatgaagacagtttcaagcaaagttattgagtggacactttgtgttttttttgagaagtctcactctttcacccaggctggagtgcagtggcacgatctcggctcactgcaactccacctcagtagctgggcctataggttccctccaccacgcccagctaatttttgtatttttagtagagatgggctttcactacgttngccaggctggtctcaaactcctgacctcatgatccacccccctcggcctcctaaagtgctgggattacaggcatctgccaccgcactcggcttatccctagaaatcctatgatagcatgatgtataggcacctaaaggcatggcacttgagaaatgtgaataagattgtaagttacaaatagcaaggtacagtcagatgttaacagtctcagcccctaaatgtcaccttgtattacagcatgttatataagcacatacaggcacatacatgaaatagtgatacttcattctcagtaatatcttcatccttctcactggaaagatctttgatgatttttaatcaacataggagtttcaatgatatctagaagtttaaaagggctcgttcaaacaaattatgaccacacacactgaagagtatgtttgtctcttgtggtgtaaatttttttttattacaccaaattatgttcacacaaaacctttgtaatcagggggaattaaagagccttcctggaaaatggaggttgcaatcagccgagatggtgccatcgcactctagcctggggaatagagtgagatcctgcctcaaaaaaaacaaaaaaattctttattttctccataaactacagtttatataagcaaaagtttcagtactaagcaattttagtctctgcagtctcttgtcttgaattaatacaacttttgttaattctcttatgaagttaatcttcctgcttgtatgtgaattaaatatatgtcaaactttttttgtacaaaagattcatacctctttcctgtttgaaattattttactgtgtttcatcaatctaatgtttatttttattacaccagtaatttcctcattgtgttgaatcttacagtggcttataaatctacatgtacctagaaatgtttagccagtccatgtatatttgatgtggcacattttttcctttgaatcacatactctaagagaagtaacttcctcttgctaacctctactttccctaagtgttgaattaatcctctttagatgattataattctcttttcaatagctagaaagaatctataaggaactttcctggctgggtgtggtggctcatgcctgtaatcccagcacttcaggaggccgaggtgggtggatcacgaggtcaggagttccagaccagcctgaccaacatggttaaaccatgtctttactaaaaatgcaaaaattagcacctgtaatcccagctactcaggaggctgaggcatagaattgcttgaacctggcaggcagaggtggtgagccgagatcacggcactgcactccagcctgggtgacaagagcaagactccgtctcaaaataaataaataaaaataaaaaataaacatgatgatcacagatgcagtcacattttctgagttcttgtctctctgccagtgccacccagatagcctcacaaaactttgacccagccactgttagtgtcgccaccgcccataaaggagctgagcccagcaggggcactgcctggggccctgtagccaaaaggctacagcaggagctgatgaccctcatgatgcctggtgacaaaagaatttctgcctaccctgaaagccttatcaaatggacaccatccatgaagcagctggcacagtgtatgaagatctgaggtataagctcttgctggagttcctcaatgactacccacctttacgatgcacccacagtgaagttcctcacaccctgctaccaccctaacgtggacacccagggtaacatatgcctggacatcctgaaggagaagtggtctgccccgtatgatatcaggaccatcctgctctctatccagtgcctgctaggacaactcaacattgatagccctttgaacacacatgctaccaagctctgggaaaaccccatagctttaagaagtacctgcaagggtcaggcgcagtggctcacacctgtaatcccagcactttgggaggccgaggtgggtggatggatcacctgacgtagagagtccaaggcctgacaaacatggagaaatgtcatccctatttaaaaaaataaaaaaattagccaagtgtggtggcgcatgcctgtaatcccagctactcgggaggctgaggcaggagaatcacttgaacctgggaggtggaggttgcagtgagccgagatctcgctattgcactccagcctgggcaacaagagtgaaactctgcctcaaaaaaaaataaaataaaataaaaataaaaataaggaagtacctgcaagaaagctactcaaagtaggtcaccagccaggagctctgacccaggctgcccagcctatccttgtgttgtctttttaattttcccttagatggtctgccctttccgtgatttctgtgtagaactctgtatcttgagctgtggtactatttttcttttgtcttttaatttaaatcttgttgggagctcttgtgatgaatattaaatacatacattttgggctgggtgtggtgcctctagcctataatcccagcactttgggaggccgaggcaggcgaatcgtgaggtcaggagatcgagaccatcctgcctaacacggtgaaacctcgtctctactaaaaatacaaaaaaattagccgggcgtggtggcgggtgcctatagtcccagctgctcgggaggctgaggcaggagaatggcatgaacccgggaggtggagcttgcagtgagctgagattgcaccactgcactccaggctgggcacagagcaagactccatctcaaaaaaaaaaaaaaaaaaaagacaaaaagaaaacattttggtcattaaaaaacaaaaaaaaaatgatacgagagagcacccagggattataagaggaaacactttattacatcactcatctaacattccagaaaatggaaagtactctactgtacagcaaagtaaatcattggttgtctggagaacagaaagaaagcctttataaaaaggttccaagtaaatataaaggtgttaagttcattattgtgactatgttaatggtttcatgggattatatgaaactcaagatttatcacatgctacagcttaaatatgcatagcttactgaatgtcatttataactcatcacagctttaaaatatacttcagactggcagcagtggctcacacctgtattcccaccactctgggaggctgaggcaggcatatcacctgaggtcaggagtccaagatcagcctggccaacatggcaaaactccgtctctactaaaaatacaaaacttggccgggcatggtggcacatgcttccagtcccacctacatgggaggctgagcc

SEQ ID NO: 369502 - DNA, 6082 bp, Homo sapiens
  misc_feature (4024)..(4024): n is a, c, g, or t
acgtatggtgcagtacattgattgaagtaacatgagagagaaggggtgggtgtagcaaaaacattctcaaggccaagtcatcagcccttacccttaggagggggcagtgattaagaggtggtatgagagcctcgtttctcatttctataagtgctggtaaaggacctgaccccacttccttacctactgcctgcccaggtaactgatgcctacagcatcacaggaattgccaaaatgcagaaaacaaatcctaaattgctctaattccataacacaaaggctggtttttggcttgaaataatcaggcacatatatcatgttctgtcacccagggtggagtgcagtggtgtgatctcggctcactacaaaccccgcctcctgggttcacgccattctccggcctcagcctcccgagtagctgggactacaggtgcccaccaccatgcccggctaattttttgtatttttagtagagacagggtttcaccatgttaaccagcatagtctctatcccctgactgcaagatctgcccgaatcagtgtcccaaagtgctgggattacaggcgtgagccaccgcacccagcccagaagggagtggacctttttatgtcaggacctcagcatggatacctatttgtccacctacttcttgttgctgatggcatttgaccagcaggcccatgaagagacaaaggcaccagtggatgtggtttcaactccgtgttggggaccttgggaggaggatgggcaagggtgggcgtgtgggagaggtgggttgtggtacctcagcagaggggctgcttgtggcttcatctgtcactatcatagcagggcactgtgacctttgaagatgtggctgtgaacttttcccaggaggagtggtgtcttcttagtgaggctcagaggtgcttgtaccgtgatgtgatgctagagaacctggctctcatatcctcgctgggttgttggtgtggatcaaaagatgaggaggcaccttgtaagcagagaatttctgtacaaagagagtctcagagcaggactcctagggcaggtgtttctcctaagaaggctcacccctgtgaaatgtgtggcctcatcttggaggatgtttttcactttgctgaccaccaggaaactcatcacaagcagaagctgaacaggagtggagcatgtggaaaaaacttggatgacactgcataccttcatcagcaccagaagcagcatattggagagaaattctacagaaagagtgtcagagaagcatcgtttgtaaagaaacgtaagctcagggtgtcacaggagccatttgtcttccgcgagtttgggaaggacgttctgcccagttcaggattgtgccaagaagaagctgctgtagagaagacagacagtgaaactatgcatggcccaccctttcaggagggaaaaactaattacagttgtggaaaacgcacaaaagccttcagcaccaaacactcagttattccacaccagaaacttttcactagagatggatgttatgtgtgcagtgattgtggaaaatcctttagcagatatgtcagcttcagtaatcatcagcgagatcacactgcaaaaggaccttatgattgtggagagtgtgggaaatcttatagtcgaaagagcagccttattcaacatcagcgagtccacactggacagacagcttatccctgtgaggagtgcgggaaatcttttagtcagaagggcagccttattagccatcagcttgttcacactggagaagggccttatgagtgtagagaatgtgggaaatcttttggtcaaaagggtaacctcattcaacatcagcaaggtcacactggagagagagcttatcactgtggggaatgtgggaaatcttttcgtcagaagttctgctttattaaccatcagcgtgttcacactggagaaaggccttacaagtgtggagaatgtgggaaatcttttggtcaaaagggcaacctcgttcaccatcagcgaggtcatactggagaaaggccctatgagtgcaaggaatgtgggaaatcatttaggtacagatcccacctcactgaacaccagagacttcacactggggaaagaccttacaattgtagggaatgtgggaaattatttaacaggaagtatcatcttctggttcatgagagagttcacactggagaaaggccatatgcgtgtgaggtatgtgggaaattatttggcaataagcacagcgtgactatacatcagaggattcacactggagaaaggccgtatgaatgcagtgaatgtgggaaatcatttctttccagctctgcgcttcatgttcataaaagagttcattctggacaaaagccttataagtgcagtgaatgtggaaaatccttttctgaatgttccagtctcattaaacacaggagaattcacactggagaaaggccttatgaatgcaccaaatgtggaaaaacatttcagcgaagctctaccctccttcatcatcagagttcacacaggagaaaggccttatgagtacacaccaccacgcccagctaatttttgtgtttttagtggagatggggttttaccatgttggccaggctggtctcaaactcctgacctcaagtgatccacccaccttgactcccaaagtgctgaaattacaggcatgagcctctgcacctggccttcattcttttcgtattgcttagaatatgacatgctgaaccaggcatggtggctcatgcttgtaaacctgatgctttgggaggacaaggtggttcattggaggccaggagttggagatcagcctgggcaacatggccagacctcctctctacaaaaagaaaaaagaatgacatgcttcttgtttttgtctgttataaatgaaactgctatatttgaatgcagttgttcatgtaggtatgtttcactatggtaatatggtggtgtgcagtgcctgagtcacgtgatagattaaagtacaactcttttttgagacagagtctcactctgtcacccaggcgggagttaggtggcatgatttcggctcactgcaacctctgcctcccaagttcaactgattcttctgcctcagcctcccgagtagcagggattaccggtgtgcaccaccatgcctggataacttttttttttatttctattagcaatggggtttcaccatgctggccaggcttgttatgaactgacctcaagtgatctgcctgcctcagcttctcaggtgtgacctactgtgcttggcctaatgtacaactttttaagcaatgccaaactatgacttaagaatgaaattattgctcatttgtatatctatctaccatcagtgtccaagaatttctgttctatcttaccaagagggagtatggttagtatttgaaattgtttattattttaataagtggttataacttttgagtcagtggtttatgttttgcattttttttgttttgagacaaagtctcgctctgtctcccaggctagagtaccgtggcacaatctcagctcattgcaacctctgcttcctgggctcaagcactctgcccacctcagcctccagagtagctggaaatacaggtatgcaccaccacaactggataacttttgtattttctgtagagagggttttacctttttgcccagtctgatcgcgaactcctgggctcaggcgatccacttgcctaggctccaaaagtgcttggtctacaggggtgaggcaccctgcctggcctcacctgtaggcttgttttttaaaatgaattttatctatttcccatttcattaatatatttaaaaataatgaaataacaaagacgtatgttggacttcattcattcttcagtgatgtcactttgctgcaaggaatatttggttttcttttttttttttttttccagatggagtctagctctgtctcctaagctacagtgaagtggcatgatctcggcccactgcaacctccacctcctgtgttcaagcgattctgcctcagcctcctgagtagctgggactacnggcatgtgccattatacctggctaattttatttatttattttagtagagatggggtttcaccatgttacccaggctgctctctaccttctgagctcaagtgatccacctgcctcggcctcccaaagtgctgggattacaggtgtcagccactgtacctggctgaatacttggttttcagtaccacaagaactatgagctggttatccacttcatgtggaatcataagcgtcccaaagtgacaatacatatagattgccaggcagtgaaacagttaagatgccaccatagctttcttttcaacatctttctaagattaccttactatttcttttgttccaagtttgtacttcctcacagttctcacatatggaaaggatacacactttgtagaaacaagaactttatgttatccaagttctaggatagccatgagctccaattatctcagagctctgagtcctctactcaatacccattgagatttatgtgttctgaggcttttgtcttctagctacttacttcattctccatgggtaacgtcattcatccacattaactaatttcctcactccaagctcttttctagagataatctccagtccctgtgcagaaactgtcattgcactttctgctgaaatggcagtttcttctcagcaaggtgagattatggaatccagaatcttttttcaggggtcacatgcccatttccccacttgcatgaatgtcgacactgcagccacagttttggccgtaaatgtgaatttggcaagtaaccactgttcccagggaaatgtcccaatcagaagaagattatctgggacactgatactgacagggagatgggacattctgagggacccggaggcagggtgccacctcctcaacttccctgagggctgcctagaatctgtttcctctcactctgaattattcttcctcttatggctgaccaaaaacatggaacctcacaaagtccactgtaacagctttatatttgtgaagtgaagaacatgaagacagtttcaagcaaagttattgagtggacactttgtgttttttttgagaagtctcactctttcacccaggctggagtgcagtggcacgatctcggctcactgcaactccacctcccgggttcacgccattctcttgcctcagcctcctgagtagctgggaccacaagcgcccaccacgtcagcttaatttttttgttttgtttcttgagacagagtcttgctctcttgcccaggttggagtgccgtgtcgcaatctcagctcactgcaacttctacctcctggattcaagcacttctccttgcctcagccacctctttagctgggattacaggtgcgtgccaccacacccagctaattaccttgtattacagcatgttatataagcacatacaggcacatacatgaaatagtgatacttcattctcagtaatatcttcatccttctcactggaaagatctttgatgatttttaatcaacataggagtttcaatgatatctagaagtttaaaagggctcgttcaaacaaattatgaccacacacactgaagagtatgtttgtctcttgtggtgtaaatttttttttattacaccaaattatgttcacacaaaacctttgtaatcagggggaattaaagagccttcctggaaaatggaggttgcaatcagccgagatggtgccatcgcactctagcctggggaatagagtgagatcctgcctcaaaaaaaacaaaaaaattctttattttctccataaactacagtttatataagcaaaagtttcagtactaagcaattttagtctctgcagtctcttgtcttgaattaatacaacttttgttaattctcttatgaagttaatcttcctgcttgtatgtgaattaaatatatgtcaaactttttttgtacaaaagattcatacctctttcctgtttgaaattattttactgtgtttcatcaatctaatgtttatttttattacaccagtaatttcctcattgtgttgaatcttacagtggcttataaatctacatgtacctag

SEQ ID NO: 369503 - DNA, 5749 bp, Homo sapiens
  misc_feature (2430)..(2430): n is a, c, g, or t
gattctcctgcctcagcctcctgagtagctgggattacaggcatgtaccaccacactcggctaatttttctatttttagtaaagtcggggtttcaccatgttggccaggctagtctcaaactcctgacctcaggagattcgctggcctctgcctccccaagtgctgggattataggcacgagccaccatgccttgcagacagctagattttctaatgtggatgataggagcatgaaagaggaatcgggcatgagcccaaggtttttgatcttagcagctgtaaccatgcacactgcttcagctgagatgacgttggtattgacataatattcactgtggatatccagagggttgttttggccatatgaagaatcagagaccaataagtggtggcatcaaatcgataactagacatactggatggggtatctgggagggtgttgatactggagacatccaatatatgaaagctaatgagtgaactatgattagttatgggtccatttaggaggacatgcttcagattatggtggtaaatcttttcagggggcagaaaggtgtgattacaggctgaggactggatctcttacttacgtcctcaattgatgttattgggcttcctaaacacctgagagggtgtgagtgaccatcataacaggacatttaatacagtagagtttggaaggggacatagacatccaaagagataatagagaagagatagatgcatgcagaagcacaggagtaattcagggaagatgacacttaggcctgagttggtgccaaagttgtaacttttttgttttttttttttcagatggagtttcgctcttgttgcccaaagctacttacttcattctccatgggtaacgtcattcatccacattaactaatttcctcactccaagctcttttctagagataatctccagtccctgtgcagaaactgtcattgcactttctgctgaaatggcagtttcttctcagcaaggtgagattatggaatccagaatcttttttcaggggtcacatgcccatttccccacttgcatgaatgtcgacactgcagccacagttttggccgtaaatgtgaatttggcaagtaaccactgttcccagggaaatgtcccaatcagaagaagattatctgggacactgatactgacagggagatgggacattctgagggacccggaggcagggtgccacctcctcaacttccctgagggctgcctagaatctgtttcctctcactctgaattattcttcctcttatggctgaccaaaaacatggaacctcacaaagtccactgtaacagctttatatttgtgaagtgaagaacatgaagacagtttcaagcaaagttattgagtggacactttgtgttttttttgagaagtctcactctttcacccaggctggagtgcagtggcacgatctcggctcactgcaactccacctcccgggttcacgccattctcttgcctcagcctcctgagtagctgggaccacaagcgcccaccacgtcagcttaatttttttgttttgtttcttgagacagagtcttgctctcttgcccaggttggagtgccgtgtcgcaatctcagctcactgcaacttctacctcctggattcaagcacttctccttgcctcagccacctctttagctgggattacaggtgcgtgccaccacacccagctaatttttgtatttttagcagagaccaggtttcaccatgttggtcaggctggtctcaaactcctgacctcgtgatccacccacctcggcctcccaaagtgctggaattacaggcgtgagccactgcacctggcctgtattcttttctttagtagagacggggttttactgtatttgccaggatggtctcgatctccagacctcgtgatccgcccgccttagcctcccaaagtgctgggattataggcgtgagccaacacgccctggccacttcttgtctttgcaacattttttagatatgtatttgtgttttttggggagcttaatttgctaatggaatctctgttattttcctaacatgcttggtggatacaagagttaagacttcctgtcccgtttagtgtaacaaaagaaagttaagaaatgtggataaaagattgtaagttagaaatggcaagataatcagctatatgaagaatcttggccaggtgtggtggctgaggcctgtaatcccaccactttgggaggctgaggtgggcggatcacaaggtcaggagttcaagaccaccctggacaatattgtgaattcctgtctctactaaaaatacaaaaattagtcgggcatggtggcgggtgcctgtagtcccagagtagctgggcctataggttccctccaccacgcccagctaatttttgtatttttagtagagatgggctttcactacgttngccaggctggtctcaaactcctgacctcatgatccacccccctcggcctcctaaagtgctgggattacaggcatctgccaccgcactcggcttatccctagaaatcctatgatagcatgatgtataggcacctaaaggcatggcacttgagaaatgtgaataagattgtaagttacaaatagcaaggtacagtcagatgttaacagtctcagcccctaaatgtcaccttgtattacagcatgttatataagcacatacaggcacatacatgaaatagtgatacttcattctcagtaatatcttcatccttctcactggaaagatctttgatgatttttaatcaacataggagtttcaatgatatctagaagtttaaaagggctcgttcaaacaaattatgaccacacacactgaagagtatgtttgtctcttgtggtgtaaatttttttttattacaccaaattatgttcacacaaaacctttgtaatcagggggaattaaagagccttcctggaaaatggaggttgcaatcagccgagatggtgccatcgcactctagcctggggaatagagtgagatcctgcctcaaaaaaaacaaaaaaattctttattttctccataaactacagtttatataagcaaaagtttcagtactaagcaattttagtctctgcagtctcttgtcttgaattaatacaacttttgttaattctcttatgaagttaatcttcctgcttgtatgtgaattaaatatatgtcaaactttttttgtacaaaagattcatacctctttcctgtttgaaattattttactgtgtttcatcaatctaatgtttatttttattacaccagtaatttcctcattgtgttgaatcttacagtggcttataaatctacatgtacctagaaatgtttagccagtccatgtatatttgatgtggcacattttttcctttgaatcacatactctaagagaagtaacttcctcttgctaacctctactttccctaagtgttgaattaatcctctttagatgattataattctcttttcaatagctagaaagaatctataaggaactttcctggctgggtgtggtggctcatgcctgtaatcccagcacttcaggaggccgaggtgggtggatcacgaggtcaggagttccagaccagcctgaccaacatggttaaaccatgtctttactaaaaatgcaaaaattagcacctgtaatcccagctactcaggaggctgaggcatagaattgcttgaacctggcaggcagaggtggtgagccgagatcacggcactgcactccagcctgggtgacaagagcaagactccgtctcaaaataaataaataaaaataaaaaataaacatgatgatcacagatgcagtcacattttctgagttcttgtctctctgccagtgccacccagatagcctcacaaaactttgacccagccactgttagtgtcgccaccgcccataaaggagctgagcccagcaggggcactgcctggggccctgtagccaaaaggctacagcaggagctgatgaccctcatgatgcctggtgacaaaagaatttctgcctaccctgaaagccttatcaaatggacaccatccatgaagcagctggcacagtgtatgaagatctgaggtataagctcttgctggagttcctcaatgactacccacctttacgatgcacccacagtgaagttcctcacaccctgctaccaccctaacgtggacacccagggtaacatatgcctggacatcctgaaggagaagtggtctgccccgtatgatatcaggaccatcctgctctctatccagtgcctgctaggacaactcaacattgatagccctttgaacacacatgctaccaagctctgggaaaaccccatagctttaagaagtacctgcaagggtcaggcgcagtggctcacacctgtaatcccagcactttgggaggccgaggtgggtggatggatcacctgacgtagagagtccaaggcctgacaaacatggagaaatgtcatccctatttaaaaaaataaaaaaattagccaagtgtggtggcgcatgcctgtaatcccagctactcgggaggctgaggcaggagaatcacttgaacctgggaggtggaggttgcagtgagccgagatctcgctattgcactccagcctgggcaacaagagtgaaactctgcctcaaaaaaaaataaaataaaataaaaataaaaataaggaagtacctgcaagaaagctactcaaagtaggtcaccagccaggagctctgacccaggctgcccagcctatccttgtgttgtctttttaattttcccttagatggtctgccctttccgtgatttctgtgtagaactctgtatcttgagctgtggtactatttttcttttgtcttttaatttaaatcttgttgggagctcttgtgatgaatattaaatacatacattttgggctgggtgtggtgcctctagcctataatcccagcactttgggaggccgaggcaggcgaatcgtgaggtcaggagatcgagaccatcctgcctaacacggtgaaacctcgtctctactaaaaatacaaaaaaattagccgggcgtggtggcgggtgcctatagtcccagctgctcgggaggctgaggcaggagaatggcatgaacccgggaggtggagcttgcagtgagctgagattgcaccactgcactccaggctgggcacagagcaagactccatctcaaaaaaaaaaaaaaaaaaaagacaaaaagaaaacattttggtcattaaaaaacaaaaaaaaaatgatacgagagagcacccagggattataagaggaaacactttattacatcactcatctaacattccagaaaatggaaagtactctactgtacagcaaagtaaatcattggttgtctggagaacagaaagaaagcctttataaaaaggttccaagtaaatataaaggtgttaagttcattattgtgactatgttaatggtttcatgggattatatgaaactcaagatttatcacatgctacagcttaaatatgcatagcttactgaatgtcatttataactcatcacagctttaaaatatacttcagactggcagcagtggctcacacctgtattcccaccactctgggaggctgaggcaggcatatcacctgaggtcaggagtccaagatcagcctggccaacatggcaaaactccgtctctactaaaaatacaaaacttggccgggcatggtggcacatgcttccagtcccacctacatgggaggctgagcc

SEQ ID NO: 369504 - DNA, 3990 bp, Homo sapiens
  misc_feature (558)..(558): n is a, c, g, or t
gcactccttggtaatcatataggtggtagagatgacactttgtgctgagacacgcaggttagattatcgtccaaggtcacctggctccgcggaacacaaaagcgtacagggaggcctgagcttaccagatcctatcagggacacagtcctgtaaagtcagcctcttccctcaggcctttatggctgtagaagcatttaaggaacgcatacaagaaagtggagggtggggccgggtgcggtggctcacatctgtaatcccagcactttgggagtccaaggtgggtggatcacaaagtcaggagtttgagaccagcctggccaatatggtgaaaccccgtctctactaaaaatacaaaaattagcacctgtaatcacagctactcaggaggctgaggcaggagaattacttgaacctgggaggcagaggttgcagtgagccgaaatcatgccacctaactcccgcctgggtgacagagtgagactctgtctcaaaaaagagttgtactttaatctatcacgtgactcaggcactgcacaccaccatattaccatagtganacatacctacatgaacaactgcattcaaatatagcagtttcatttataacagacaaaaacaagaagcatgtcattcttttttctttttgtagagaggaggtctggccatgttgcccaggctggtctcaaactcctgacctcatgatccacccccctcggcctcctaaagtgctgggattacaggcatctgccaccgcactcggcttatccctagaaatcctatgatagcatgatgtataggcacctaaaggcatggcacttgagaaatgtgaataagattgtaagttacaaatagcaaggtacagtcagatgttaacagtctcagcccctaaatgtcaccttgtattacagcatgttatataagcacatacaggcacatacatgaaatagtgatacttcattctcagtaatatcttcatccttctcactggaaagatctttgatgatttttaatcaacataggagtttcaatgatatctagaagtttaaaagggctcgttcaaacaaattatgaccacacacactgaagagtatgtttgtctcttgtggtgtaaatttttttttattacaccaaattatgttcacacaaaacctttgtaatcagggggaattaaagagccttcctggaaaatggaggttgcaatcagccgagatggtgccatcgcactctagcctggggaatagagtgagatcctgcctcaaaaaaaacaaaaaaattctttattttctccataaactacagtttatataagcaaaagtttcagtactaagcaattttagtctctgcagtctcttgtcttgaattaatacaacttttgttaattctcttatgaagttaatcttcctgcttgtatgtgaattaaatatatgtcaaactttttttgtacaaaagattcatacctctttcctgtttgaaattattttactgtgtttcatcaatctaatgtttatttttattacaccagtaatttcctcattgtgttgaatcttacagtggcttataaatctacatgtacctagaaatgtttagccagtccatgtatatttgatgtggcacattttttcctttgaatcacatactctaagagaagtaacttcctcttgctaacctctactttccctaagtgttgaattaatcctctttagatgattataattctcttttcaatagctagaaagaatctataaggaactttcctggctgggtgtggtggctcatgcctgtaatcccagcacttcaggaggccgaggtgggtggatcacgaggtcaggagttccagaccagcctgaccaacatggttaaaccatgtctttactaaaaatgcaaaaattagcacctgtaatcccagctactcaggaggctgaggcatagaattgcttgaacctggcaggcagaggtggtgagccgagatcacggcactgcactccagcctgggtgacaagagcaagactccgtctcaaaataaataaataaaaataaaaaataaacatgatgatcacagatgcagtcacattttctgagttcttgtctctctgccagtgccacccagatagcctcacaaaactttgacccagccactgttagtgtcgccaccgcccataaaggagctgagcccagcaggggcactgcctggggccctgtagccaaaaggctacagcaggagctgatgaccctcatgatgcctggtgacaaaagaatttctgcctaccctgaaagccttatcaaatggacaccatccatgaagcagctggcacagtgtatgaagatctgaggtataagctcttgctggagttcctcaatgactacccacctttacgatgcacccacagtgaagttcctcacaccctgctaccaccctaacgtggacacccagggtaacatatgcctggacatcctgaaggagaagtggtctgccccgtatgatatcaggaccatcctgctctctatccagtgcctgctaggacaactcaacattgatagccctttgaacacacatgctaccaagctctgggaaaaccccatagctttaagaagtacctgcaagggtcaggcgcagtggctcacacctgtaatcccagcactttgggaggccgaggtgggtggatggatcacctgacgtagagagtccaaggcctgacaaacatggagaaatgtcatccctatttaaaaaaataaaaaaattagccaagtgtggtggcgcatgcctgtaatcccagctactcgggaggctgaggcaggagaatcacttgaacctgggaggtggaggttgcagtgagccgagatctcgctattgcactccagcctgggcaacaagagtgaaactctgcctcaaaaaaaaataaaataaaataaaaataaaaataaggaagtacctgcaagaaagctactcaaagtaggtcaccagccaggagctctgacccaggctgcccagcctatccttgtgttgtctttttaattttcccttagatggtctgccctttccgtgatttctgtgtagaactctgtatcttgagctgtggtactatttttcttttgtcttttaatttaaatcttgttgggagctcttgtgatgaatattaaatacatacattttgggctgggtgtggtgcctctagcctataatcccagcactttgggaggccgaggcaggcgaatcgtgaggtcaggagatcgagaccatcctgcctaacacggtgaaacctcgtctctactaaaaatacaaaaaaattagccgggcgtggtggcgggtgcctatagtcccagctgctcgggaggctgaggcaggagaatggcatgaacccgggaggtggagcttgcagtgagctgagattgcaccactgcactccaggctgggcacagagcaagactccatctcaaaaaaaaaaaaaaaaaaaagacaaaaagaaaacattttggtcattaaaaaacaaaaaaaaaatgatacgagagagcacccagggattataagaggaaacactttattacatcactcatctaacattccagaaaatggaaagtactctactgtacagcaaagtaaatcattggttgtctggagaacagaaagaaagcctttataaaaaggttccaagtaaatataaaggtgttaagttcattattgtgactatgttaatggtttcatgggattatatgaaactcaagatttatcacatgctacagcttaaatatgcatagcttactgaatgtcatttataactcatcacagctttaaaatatacttcagactggcagcagtggctcacacctgtattcccaccactctgggaggctgaggcaggcatatcacctgaggtcaggagtccaagatcagcctggccaacatggcaaaactccgtctctactaaaaatacaaaacttggccgggcatggtggcacatgcttccagtcccacctacatgggaggctgagcc

SEQ ID NO: 369505 - DNA, 5061 bp, Homo sapiens
acgtatggtgcagtacattgattgaagtaacatgagagagaaggggtgggtgtagcaaaaacattctcaaggccaagtcatcagcccttacccttaggagggggcagtgattaagaggtggtatgagagcctcgtttctcatttctataagtgctggtaaaggacctgaccccacttccttacctactgcctgcccaggtaactgatgcctacagcatcacaggaattgccaaaatgcagaaaacaaatcctaaattgctctaattccataacacaaaggctggtttttggcttgaaataatcaggcacatatatcatgttctgtcacccagggtggagtgcagtggtgtgatctcggctcactacaaaccccgcctcctgggttcacgccattctccggcctcagcctcccgagtagctgggactacaggtgcccaccaccatgcccggctaattttttgtatttttagtagagacagggtttcaccatgttaaccagcatagtctctatcccctgactgcaagatctgcccgaatcagtgtcccaaagtgctgggattacaggcgtgagccaccgcacccagcccagaagggagtggacctttttatgtcaggacctcagcatggatacctatttgtccacctacttcttgttgctgatggcatttgaccagcaggcccatgaagagacaaaggcaccagtggatgtggtttcaactccgtgttggggaccttgggaggaggatgggcaagggtgggcgtgtgggagaggtgggttgtggtacctcagcagaggggctgcttgtggcttcatctgtcactatcatagcagggcactgtgacctttgaagatgtggctgtgaacttttcccaggaggagtggtgtcttcttagtgaggctcagaggtgcttgtaccgtgatgtgatgctagagaacctggctctcatatcctcgctgggttgttggtgtggatcaaaagatgaggaggcaccttgtaagcagagaatttctgtacaaagagagtctcagagcaggactcctagggcaggtgtttctcctaagaaggctcacccctgtgaaatgtgtggcctcatcttggaggatgtttttcactttgctgaccaccaggaaactcatcacaagcagaagctgaacaggagtggagcatgtggaaaaaacttggatgacactgcataccttcatcagcaccagaagcagcatattggagagaaattctacagaaagagtgtcagagaagcatcgtttgtaaagaaacgtaagctcagggtgtcacaggagccatttgtcttccgcgagtttgggaaggacgttctgcccagttcaggattgtgccaagaagaagctgctgtagagaagacagacagtgaaactatgcatggcccaccctttcaggagggaaaaactaattacagttgtggaaaacgcacaaaagccttcagcaccaaacactcagttattccacaccagaaacttttcactagagatggatgttatgtgtgcagtgattgtggaaaatcctttagcagatatgtcagcttcagtaatcatcagcgagatcacactgcaaaaggaccttatgattgtggagagtgtgggaaatcttatagtcgaaagagcagccttattcaacatcagcgagtccacactggacagacagcttatccctgtgaggagtgcgggaaatcttttagtcagaagggcagccttattagccatcagcttgttcacactggagaagggccttatgagtgtagagaatgtgggaaatcttttggtcaaaagggtaacctcattcaacatcagcaaggtcacactggagagagagcttatcactgtggggaatgtgggaaatcttttcgtcagaagttctgctttattaaccatcagcgtgttcacactggagaaaggccttacaagtgtggagaatgtgggaaatcttttggtcaaaagggcaacctcgttcaccatcagcgaggtcatactggagaaaggccctatgagtgcaaggaatgtgggaaatcatttaggtacagatcccacctcactgaacaccagagacttcacactggggaaagaccttacaattgtagggaatgtgggaaattatttaacaggaagtatcatcttctggttcatgagagagttcacactggagaaaggccatatgcgtgtgaggtatgtgggaaattatttggcaataagcacagcgtgactatacatcagaggattcacactggagaaaggccgtatgaatgcagtgaatgtgggaaatcatttctttccagctctgcgcttcatgttcataaaagagttcattctggacaaaagccttataagtgcagtgaatgtggaaaatccttttctgaatgttccagtctcattaaacacaggagaattcacactggagaaaggccttatgaatgcaccaaatgtggaaaaacatttcagcgaagctctaccctccttcatcatcagagttcacacaggagaaaggccttatgagtacacaccaccacgcccagctaatttttgtgtttttagtggagatggggttttaccatgttggccaggctggtctcaaactcctgacctcaagtgatccacccaccttgactcccaaagtgctgaaattacaggcatgagcctctgcacctggccttcattcttttcgtattgcttagaatatgacatgctgaaccaggcatggtggctcatgcttgtaaacctgatgctttgggaggacaaggtggttcattggaggccaggagttggagatcagcctgggcaacatggccagacctcctctctacaaaaagaaaaaagaatgacatgcttcttgtttttgtctgttataaatgaaactgctatatttgaatgcagttgttcatgtaggtatgtttcactatggtaatatggtggtgtgcagtgcctgagtcacgtgatagattaaagtacaactcttttttgagacagagtctcactctgtcacccaggcgggagttaggtggtgagccgagatcacggcactgcactccagcctgggtgacaagagcaagactccgtctcaaaataaataaataaaaataaaaaataaacatgatgatcacagatgcagtcacattttctgagttcttgtctctctgccagtgccacccagatagcctcacaaaactttgacccagccactgttagtgtcgccaccgcccataaaggagctgagcccagcaggggcactgcctggggccctgtagccaaaaggctacagcaggagctgatgaccctcatgatgcctggtgacaaaagaatttctgcctaccctgaaagccttatcaaatggacaccatccatgaagcagctggcacagtgtatgaagatctgaggtataagctcttgctggagttcctcaatgactacccacctttacgatgcacccacagtgaagttcctcacaccctgctaccaccctaacgtggacacccagggtaacatatgcctggacatcctgaaggagaagtggtctgccccgtatgatatcaggaccatcctgctctctatccagtgcctgctaggacaactcaacattgatagccctttgaacacacatgctaccaagctctgggaaaaccccatagctttaagaagtacctgcaagggtcaggcgcagtggctcacacctgtaatcccagcactttgggaggccgaggtgggtggatggatcacctgacgtagagagtccaaggcctgacaaacatggagaaatgtcatccctatttaaaaaaataaaaaaattagccaagtgtggtggcgcatgcctgtaatcccagctactcgggaggctgaggcaggagaatcacttgaacctgggaggtggaggttgcagtgagccgagatctcgctattgcactccagcctgggcaacaagagtgaaactctgcctcaaaaaaaaataaaataaaataaaaataaaaataaggaagtacctgcaagaaagctactcaaagtaggtcaccagccaggagctctgacccaggctgcccagcctatccttgtgttgtctttttaattttcccttagatggtctgccctttccgtgatttctgtgtagaactctgtatcttgagctgtggtactatttttcttttgtcttttaatttaaatcttgttgggagctcttgtgatgaatattaaatacatacattttgggctgggtgtggtgcctctagcctataatcccagcactttgggaggccgaggcaggcgaatcgtgaggtcaggagatcgagaccatcctgcctaacacggtgaaacctcgtctctactaaaaatacaaaaaaattagccgggcgtggtggcgggtgcctatagtcccagctgctcgggaggctgaggcaggagaatggcatgaacccgggaggtggagcttgcagtgagctgagattgcaccactgcactccaggctgggcacagagcaagactccatctcaaaaaaaaaaaaaaaaaaaagacaaaaagaaaacattttggtcattaaaaaacaaaaaaaaaatgatacgagagagcacccagggattataagaggaaacactttattacatcactcatctaacattccagaaaatggaaagtactctactgtacagcaaagtaaatcattggttgtctggagaacagaaagaaagcctttataaaaaggttccaagtaaatataaaggtgttaagttcattattgtgactatgttaatggtttcatgggattatatgaaactcaagatttatcacatgctacagcttaaatatgcatagcttactgaatgtcatttataactcatcacagctttaaaatatacttcagactggcagcagtggctcacacctgtattcccaccactctgggaggctgaggcaggcatatcacctgaggtcaggagtccaagatcagcctggccaacatggcaaaactccgtctctactaaaaatacaaaacttggccgggcatggtggcacatgcttccagtcccacctacatgggaggctgagcc

SEQ ID NO: 369506 - DNA, 3171 bp, Homo sapiens
  misc_feature (4)..(4): n is a, c, g, or t
tacnactactaaattcgcggccgcgtcgaaatagcaaggtacagtcagatgttaacagtctcagcccctaaatgtcaccttgtattacagcatgttatataagcacatacaggcacatacatgaaatagtgatacttcattctcagtaatatcttcatccttctcactggaaagatctttgatgatttttaatcaacataggagtttcaatgatatctagaagtttaaaagggctcgttcaaacaaattatgaccacacacactgaagagtatgtttgtctcttgtggtgtaaatttttttttattacaccaaattatgttcacacaaaacctttgtaatcagggggaattaaagagccttcctggaaaatggaggttgcaatcagccgagatggtgccatcgcactctagcctggggaatagagtgagatcctgcctcaaaaaaaacaaaaaaattctttattttctccataaactacagtttatataagcaaaagtttcagtactaagcaattttagtctctgcagtctcttgtcttgaattaatacaacttttgttaattctcttatgaagttaatcttcctgcttgtatgtgaattaaatatatgtcaaactttttttgtacaaaagattcatacctctttcctgtttgaaattattttactgtgtttcatcaatctaatgtttatttttattacaccagtaatttcctcattgtgttgaatcttacagtggcttataaatctacatgtacctagaaatgtttagccagtccatgtatatttgatgtggcacattttttcctttgaatcacatactctaagagaagtaacttcctcttgctaacctctactttccctaagtgttgaattaatcctctttagatgattataattctcttttcaatagctagaaagaatctataaggaactttcctggctgggtgtggtggctcatgcctgtaatcccagcacttcaggaggccgaggtgggtggatcacgaggtcaggagttccagaccagcctgaccaacatggttaaaccatgtctttactaaaaatgcaaaaattagcacctgtaatcccagctactcaggaggctgaggcatagaattgcttgaacctggcaggcagaggtggtgagccgagatcacggcactgcactccagcctgggtgacaagagcaagactccgtctcaaaataaataaataaaaataaaaaataaacatgatgatcacagatgcagtcacattttctgagttcttgtctctctgccagtgccacccagatagcctcacaaaactttgacccagccactgttagtgtcgccaccgcccataaaggagctgagcccagcaggggcactgcctggggccctgtagccaaaaggctacagcaggagctgatgaccctcatgatgcctggtgacaaaagaatttctgcctaccctgaaagccttatcaaatggacaccatccatgaagcagctggcacagtgtatgaagatctgaggtataagctcttgctggagttcctcaatgactacccacctttacgatgcacccacagtgaagttcctcacaccctgctaccaccctaacgtggacacccagggtaacatatgcctggacatcctgaaggagaagtggtctgccccgtatgatatcaggaccatcctgctctctatccagtgcctgctaggacaactcaacattgatagccctttgaacacacatgctaccaagctctgggaaaaccccatagctttaagaagtacctgcaagggtcaggcgcagtggctcacacctgtaatcccagcactttgggaggccgaggtgggtggatggatcacctgacgtagagagtccaaggcctgacaaacatggagaaatgtcatccctatttaaaaaaataaaaaaattagccaagtgtggtggcgcatgcctgtaatcccagctactcgggaggctgaggcaggagaatcacttgaacctgggaggtggaggttgcagtgagccgagatctcgctattgcactccagcctgggcaacaagagtgaaactctgcctcaaaaaaaaataaaataaaataaaaataaaaataaggaagtacctgcaagaaagctactcaaagtaggtcaccagccaggagctctgacccaggctgcccagcctatccttgtgttgtctttttaattttcccttagatggtctgccctttccgtgatttctgtgtagaactctgtatcttgagctgtggtactatttttcttttgtcttttaatttaaatcttgttgggagctcttgtgatgaatattaaatacatacattttgggctgggtgtggtgcctctagcctataatcccagcactttgggaggccgaggcaggcgaatcgtgaggtcaggagatcgagaccatcctgcctaacacggtgaaacctcgtctctactaaaaatacaaaaaaattagccgggcgtggtggcgggtgcctatagtcccagctgctcgggaggctgaggcaggagaatggcatgaacccgggaggtggagcttgcagtgagctgagattgcaccactgcactccaggctgggcacagagcaagactccatctcaaaaaaaaaaaaaaaaaaaagacaaaaagaaaacattttggtcattaaaaaacaaaaaaaaaatgatacgagagagcacccagggattataagaggaaacactttattacatcactcatctaacattccagaaaatggaaagtactctactgtacagcaaagtaaatcattggttgtctggagaacagaaagaaagcctttataaaaaggttccaagtaaatataaaggtgttaagttcattattgtgactatgttaatggtttcatgggattatatgaaactcaagatttatcacatgctacagcttaaatatgcatagcttactgaatgtcatttataactcatcacagctttaaaatatacttcagactggcagcagtggctcacacctgtattcccaccactctgggaggctgaggcaggcatatcacctgaggtcaggagtccaagatcagcctggccaacatggcaaaactccgtctctactaaaaatacaaaacttggccgggcatggtggcacatgcttccagtcccacctacatgggaggctgagcc

SEQ ID NO: 369507 - DNA, 3819 bp, Homo sapiens
acgtatggtgcagtacattgattgaagtaacatgagagagaaggggtgggtgtagcaaaaacattctcaaggccaagtcatcagcccttacccttaggagggggcagtgattaagaggtggtatgagagcctcgtttctcatttctataagtgctggtaaaggacctgaccccacttccttacctactgcctgcccaggtaactgatgcctacagcatcacaggaattgccaaaatgcagaaaacaaatcctaaattgctctaattccataacacaaaggctggtttttggcttgaaataatcaggcacatatatcatgttctgtcacccagggtggagtgcagtggtgtgatctcggctcactacaaaccccgcctcctgggttcacgccattctccggcctcagcctcccgagtagctgggactacaggtgcccaccaccatgcccggctaattttttgtatttttagtagagacagggtttcaccatgttaaccagcatagtctctatcccctgactgcaagatctgcccgaatcagtgtcccaaagtgctgggattacaggcgtgagccaccgcacccagcccagaagggagtggacctttttatgtcaggacctcagcatggatacctatttgtccacctacttcttgttgctgatggcatttgaccagcaggcccatgaagagacaaaggcaccagtggatgtggtttcaactccgtgttggggaccttgggaggaggatgggcaagggtgggcgtgtgggagaggtgggttgtggtacctcagcagaggggctgcttgtggcttcatctgtcactatcatagcagggcactgtgacctttgaagatgtggctgtgaacttttcccaggaggagtggtgtcttcttagtgaggctcagaggtgcttgtaccgtgatgtgatgctagagaacctggctctcatatcctcgctgggttgttggtgtggatcaaaagatgaggaggcaccttgtaagcagagaatttctgtacaaagagagtctcagagcaggactcctagggcaggtgtttctcctaagaaggctcacccctgtgaaatgtgtggcctcatcttggaggatgtttttcactttgctgaccaccaggaaactcatcacaagcagaagctgaacaggagtggagcatgtggaaaaaacttggatgacactgcataccttcatcagcaccagaagcagcatattggagagaaattctacagaaagagtgtcagagaagcatcgtttgtaaagaaacgtaagctcagggtgtcacaggagccatttgtcttccgcgagtttgggaaggacgttctgcccagttcaggattgtgccaagaagaagctgctgtagagaagacagacagtgaaactatgcatggcccaccctttcaggagggaaaaactaattacagttgtggaaaacgcacaaaagccttcagcaccaaacactcagttattccacaccagaaacttttcactagagatggatgttatgtgtgcagtgattgtggaaaatcctttagcagatatgtcagcttcagtaatcatcagcgagatcacactgcaaaaggaccttatgattgtggagagtgtgggaaatcttatagtcgaaagagcagccttattcaacatcagcgagtccacactggacagacagcttatccctgtgaggagtgcgggaaatcttttagtcagaagggcagccttattagccatcagcttgttcacactggagaagggccttatgagtgtagagaatgtgggaaatcttttggtcaaaagggtaacctcattcaacatcagcaaggtcacactggagagagagcttatcactgtggggaatgtgggaaatcttttcgtcagaagttctgctttattaaccatcagcgtgttcacactggagaaaggccttacaagtgtggagaatgtgggaaatcttttggtcaaaagggcaacctcgttcaccatcagcgaggtcatactggagaaaggccctatgagtgcaaggaatgtgggaaatcatttaggtacagatcccacctcactgaacaccagagacttcacactggggaaagaccttacaattgtagggaatgtgggaaattatttaacaggaagtatcatcttctggttcatgagagagttcacactggagaaaggccatatgcgtgtgaggtatgtgggaaattatttggcaataagcacagcgtgactatacatcagaggattcacactggagaaaggccgtatgaatgcagtgaatgtgggaaatcatttctttccagctctgcgcttcatgttcataaaagagttcattctggacaaaagccttataagtgcagtgaatgtggaaaatccttttctgaatgttccagtctcattaaacacaggagaattcacactggagaaaggccttatgaatgcaccaaatgtggaaaaacatttcagcgaagctctaccctccttcatcatcagagttcacacaggagaaaggccttatgagtacacaccaccacgcccagctaatttttgtgtttttagtggagatggggttttaccatgttggccaggctggtctcaaactcctgacctcaagtgatccacccaccttgactcccaaagtgctgaaattacaggcatgagcctctgcacctggccttcattcttttcgtattgcttagaatatgacatgctgaaccaggcatggtggctcatgcttgtaaacctgatgctttgggaggacaaggtggttcattggaggccaggagttggagatcagcctgggcaacatggccagacctcctctctacaaaaagaaaaaagaatgacatgcttcttgtttttgtctgttataaatgaaactgctatatttgaatgcagttgttcatgtaggtatgtttcactatggtaatatggtggtgtgcagtgcctgagtcacgtgatagattaaagtacaactcttttttgagacagagtctcactctgtcacccaggcgggagttaggtggtgagccgagatcacggcactgcactccagcctgggtgacaagagcaagactccgtctcaaaataaataaataaaaataaaaaataaacatgatgatcacagatgcagtcacattttctgagttcttgtctctctgccagtgccacccagatagcctcacaaaactttgacccagccactgttagtgtcgccaccgcccataaaggagctgagcccagcaggggcactgcctggggccctgtagccaaaaggctacagcaggagctgatgaccctcatgatgcctggtgacaaaagaatttctgcctaccctgaaagccttatcaaatggacaccatccatgaagcagctggcacagtgtatgaagatctgaggtataagctcttgctggagttcctcaatgactacccacctttacgatgcacccacagtgaagttcctcacaccctgctaccaccctaacgtggacacccagggtaacatatgcctggacatcctgaaggagaagtggtctgccccgtatgatatcaggaccatcctgctctctatccagtgcctgctaggacaactcaacattgatagccctttgaacacacatgctaccaagctctgggaaaaccccatagctttaagaagtacctgcaagggtcaggcgcagtggctcacacctgtaatcccagcactttgggaggccgaggtgggtggatggatcacctgacgtagagagtccaaggcctgacaaacatggagaaatgtcatccctatttaaaaaaataaaaaaattagccaag

SEQ ID NO: 369508 - DNA, 5135 bp, Homo sapiens
  misc_feature (4024)..(4024): n is a, c, g, or t
acgtatggtgcagtacattgattgaagtaacatgagagagaaggggtgggtgtagcaaaaacattctcaaggccaagtcatcagcccttacccttaggagggggcagtgattaagaggtggtatgagagcctcgtttctcatttctataagtgctggtaaaggacctgaccccacttccttacctactgcctgcccaggtaactgatgcctacagcatcacaggaattgccaaaatgcagaaaacaaatcctaaattgctctaattccataacacaaaggctggtttttggcttgaaataatcaggcacatatatcatgttctgtcacccagggtggagtgcagtggtgtgatctcggctcactacaaaccccgcctcctgggttcacgccattctccggcctcagcctcccgagtagctgggactacaggtgcccaccaccatgcccggctaattttttgtatttttagtagagacagggtttcaccatgttaaccagcatagtctctatcccctgactgcaagatctgcccgaatcagtgtcccaaagtgctgggattacaggcgtgagccaccgcacccagcccagaagggagtggacctttttatgtcaggacctcagcatggatacctatttgtccacctacttcttgttgctgatggcatttgaccagcaggcccatgaagagacaaaggcaccagtggatgtggtttcaactccgtgttggggaccttgggaggaggatgggcaagggtgggcgtgtgggagaggtgggttgtggtacctcagcagaggggctgcttgtggcttcatctgtcactatcatagcagggcactgtgacctttgaagatgtggctgtgaacttttcccaggaggagtggtgtcttcttagtgaggctcagaggtgcttgtaccgtgatgtgatgctagagaacctggctctcatatcctcgctgggttgttggtgtggatcaaaagatgaggaggcaccttgtaagcagagaatttctgtacaaagagagtctcagagcaggactcctagggcaggtgtttctcctaagaaggctcacccctgtgaaatgtgtggcctcatcttggaggatgtttttcactttgctgaccaccaggaaactcatcacaagcagaagctgaacaggagtggagcatgtggaaaaaacttggatgacactgcataccttcatcagcaccagaagcagcatattggagagaaattctacagaaagagtgtcagagaagcatcgtttgtaaagaaacgtaagctcagggtgtcacaggagccatttgtcttccgcgagtttgggaaggacgttctgcccagttcaggattgtgccaagaagaagctgctgtagagaagacagacagtgaaactatgcatggcccaccctttcaggagggaaaaactaattacagttgtggaaaacgcacaaaagccttcagcaccaaacactcagttattccacaccagaaacttttcactagagatggatgttatgtgtgcagtgattgtggaaaatcctttagcagatatgtcagcttcagtaatcatcagcgagatcacactgcaaaaggaccttatgattgtggagagtgtgggaaatcttatagtcgaaagagcagccttattcaacatcagcgagtccacactggacagacagcttatccctgtgaggagtgcgggaaatcttttagtcagaagggcagccttattagccatcagcttgttcacactggagaagggccttatgagtgtagagaatgtgggaaatcttttggtcaaaagggtaacctcattcaacatcagcaaggtcacactggagagagagcttatcactgtggggaatgtgggaaatcttttcgtcagaagttctgctttattaaccatcagcgtgttcacactggagaaaggccttacaagtgtggagaatgtgggaaatcttttggtcaaaagggcaacctcgttcaccatcagcgaggtcatactggagaaaggccctatgagtgcaaggaatgtgggaaatcatttaggtacagatcccacctcactgaacaccagagacttcacactggggaaagaccttacaattgtagggaatgtgggaaattatttaacaggaagtatcatcttctggttcatgagagagttcacactggagaaaggccatatgcgtgtgaggtatgtgggaaattatttggcaataagcacagcgtgactatacatcagaggattcacactggagaaaggccgtatgaatgcagtgaatgtgggaaatcatttctttccagctctgcgcttcatgttcataaaagagttcattctggacaaaagccttataagtgcagtgaatgtggaaaatccttttctgaatgttccagtctcattaaacacaggagaattcacactggagaaaggccttatgaatgcaccaaatgtggaaaaacatttcagcgaagctctaccctccttcatcatcagagttcacacaggagaaaggccttatgagtacacaccaccacgcccagctaatttttgtgtttttagtggagatggggttttaccatgttggccaggctggtctcaaactcctgacctcaagtgatccacccaccttgactcccaaagtgctgaaattacaggcatgagcctctgcacctggccttcattcttttcgtattgcttagaatatgacatgctgaaccaggcatggtggctcatgcttgtaaacctgatgctttgggaggacaaggtggttcattggaggccaggagttggagatcagcctgggcaacatggccagacctcctctctacaaaaagaaaaaagaatgacatgcttcttgtttttgtctgttataaatgaaactgctatatttgaatgcagttgttcatgtaggtatgtttcactatggtaatatggtggtgtgcagtgcctgagtcacgtgatagattaaagtacaactcttttttgagacagagtctcactctgtcacccaggcgggagttaggtggcatgatttcggctcactgcaacctctgcctcccaagttcaactgattcttctgcctcagcctcccgagtagcagggattaccggtgtgcaccaccatgcctggataacttttttttttatttctattagcaatggggtttcaccatgctggccaggcttgttatgaactgacctcaagtgatctgcctgcctcagcttctcaggtgtgacctactgtgcttggcctaatgtacaactttttaagcaatgccaaactatgacttaagaatgaaattattgctcatttgtatatctatctaccatcagtgtccaagaatttctgttctatcttaccaagagggagtatggttagtatttgaaattgtttattattttaataagtggttataacttttgagtcagtggtttatgttttgcattttttttgttttgagacaaagtctcgctctgtctcccaggctagagtaccgtggcacaatctcagctcattgcaacctctgcttcctgggctcaagcactctgcccacctcagcctccagagtagctggaaatacaggtatgcaccaccacaactggataacttttgtattttctgtagagagggttttacctttttgcccagtctgatcgcgaactcctgggctcaggcgatccacttgcctaggctccaaaagtgcttggtctacaggggtgaggcaccctgcctggcctcacctgtaggcttgttttttaaaatgaattttatctatttcccatttcattaatatatttaaaaataatgaaataacaaagacgtatgttggacttcattcattcttcagtgatgtcactttgctgcaaggaatatttggttttcttttttttttttttttccagatggagtctagctctgtctcctaagctacagtgaagtggcatgatctcggcccactgcaacctccacctcctgtgttcaagcgattctgcctcagcctcctgagtagctgggactacnggcatgtgccattatacctggctaattttatttatttattttagtagagatggggtttcaccatgttacccaggctgctctctaccttctgagctcaagtgatccacctgcctcggcctcccaaagtgctgggattacaggtgtcagccactgtacctggctgaatacttggttttcagtaccacaagaactatgagctggttatccacttcatgtggaatcataagcgtcccaaagtgacaatacatatagattgccaggcagtgaaacagttaagatgccaccatagctttcttttcaacatctttctaagattaccttactatttcttttgttccaagtttgtacttcctcacagttctcacatatggaaaggatacacactttgtagaaacaagaactttatgttatccaagttctaggatagccatgagctccaattatctcagagctctgagtcctctactcaatacccattgagatttatgtgttctgaggcttttgtcttctagctacttacttcattctccatgggtaacgtcattcatccacattaactaatttcctcactccaagctcttttctagagataatctccagtccctgtgcagaaactgtcattgcactttctgctgaaatggcagtttcttctcagcaaggtgagattatggaatccagaatcttttttcaggggtcacatgcccatttccccacttgcatgaatgtcgacactgcagccacagttttggccgtaaatgtgaatttggcaagtaaccactgttcccagggaaatgtcccaatcagaagaagattatctgggacactgatactgacagggagatgggacattctgagggacccggaggcagggtgccacctcctcaacttccctgagggctgcctagaatctgtttcctctcactctgaattattcttcctcttatggctgaccaaaaacatggaacctcacaaagtccactgtaacagctttatatttgtgaagtgaagaacatgaagacagtttcaagcaaagttattgagtggacactttgtgttttttttgagaagtctcacttccaacctggtgacagagagacacatcatctcaaaa

SEQ ID NO: 369509 - DNA, 3655 bp, Homo sapiens
gattctcctgcctcagcctcctgagtagctgggattacaggcatgtaccaccacactcggctaatttttctatttttagtaaagtcggggtttcaccatgttggccaggctagtctcaaactcctgacctcaggagattcgctggcctctgcctccccaagtgctgggattataggcacgagccaccatgccttgcagacagctagattttctaatgtggatgataggagcatgaaagaggaatcgggcatgagcccaaggtttttgatcttagcagctgtaaccatgcacactgcttcagctgagatgacgttggtattgacataatattcactgtggatatccagagggttgttttggccatatgaagaatcagagaccaataagtggtggcatcaaatcgataactagacatactggatggggtatctgggagggtgttgatactggagacatccaatatatgaaagctaatgagtgaactatgattagttatgggtccatttaggaggacatgcttcagattatggtggtaaatcttttcagggggcagaaaggtgtgattacaggctgaggactggatctcttacttacgtcctcaattgatgttattgggcttcctaaacacctgagagggtgtgagtgaccatcataacaggacatttaatacagtagagtttggaaggggacatagacatccaaagagataatagagaagagatagatgcatgcagaagcacaggagtaattcagggaagatgacacttaggcctgagttggtgccaaagttgtaacttttttgttttttttttttcagatggagtttcgctcttgttgcccaagctggagtgcaatggtgccatctcggctcactgcaacctccacctcctgggttcaagcaattctcctgcctcagcctcccaagtagctagtattacaggcacctgccaccacagcaggctaatttttgtattttcggtagagacagggtttcaccatgctgaccaggctagtcttgaactcctgaccgggtgatctgcctgcctcggcctcaaagtgctggaattgcaggcgtgagccactgtgcctggccagttgtaactatttatcactgtctggactcataaacattttgagatgactttgggagtgcctggggagtttcattcagcctggtgcatatgggcagtgaaaaatatgctcatctgtgatagtagatgtggtttggttcacaaatccaggggctgggctttaaacggcattaggtggacagaggagggttgctacagctgaggtctcagctggtgcagcacaaaagtgaaatagggccatggctatctgaagccatatgtggttctgtgtggctatggagtcattccaggagacgttcacaggatgatttgggattaccactgctattgtaaaccatggaaattctgtgttaatattggatgctatttgtatttgtcaagcatagtctggatgcttatccacattttggtataaggccagaattgaaggcccaatatgatgtgtcactttgacatcttgtgaaagtgggacaaccttaaaaggtgtgagtacaaatctcattcccactctgctctcttgaataatgtatcctagcctaacagcccgttttatcaaggtgataaggcagggttccaggttgttatattttgtggtgggtttcaattccatccctaccagcagagttatggaaacaaaccattgcatattcccaagggaatcatgggccgttataccctcttcatcttgtgaaataattttatttgtaggcgctgggtgtggtggctcacccctataatctcctcactttcagaggccaaggctggtggatcacttgagaccagaaattcaagaccagcctggccaacatggtgaaaccccgtctctacttaaagatacaaaaaattagctgggtatggtggcgggcacctgtagtcccagctacttgggaggctgaggcagaagaatggtgtgaacccaggaggcagagcttgcagtgagccgagatcgtgccactgcactccatccagcctgggcaacagagcaagactccgtctcaaaataaataataataataattaaaaaaatgcagttcaaaagaaaaatatagatttaccattatttttggaaaacaggtttggcaactctatactgactacaccaattcttctcatgccctaagtgggaaaactagcctccacggtagcaaatattgatgtggcactaaggccatttccacctgattaagtggctggctggtcacaaaggccacatcactgaactgagatctcccttctccctatcatcttcctcctgttaatgcaggaatgaccttgaggagaacagcccagaatgagtacaggaattcacaaaacctttagattatttcctctgacaatggcctcaacaatacaatattcatcattatggaagtcctgataattcctgtatctgcatattcatcatatacgtagtgactggatcattgtggatgcccttttaaaagacatgcattacgctgcacgtggtggctcacctgtaatcccaggactttgggaggctgaggccagcagatcacaaggtcaggagttcgagaccagcctggccaacatggtgaaaccccatctctactaaaaatacaaaaattagctgggtgtggtggcatgtgcctgtagtcccagctactcaggaggctgaggcaggagaatcgtttgaacctgggaggcagaggttgccgtgagccaagattatgccactgcactccagcctgggcaacagggtgaggctctgcctcaaaaaaaaagaaaaaaaaagaaaaaaaagacatgagttgcagttacattattctgtctcctccactgcctataaataaagtaattctataaaattataatttcacctgatagcattacaatctgtgatgttatcctacagaattctggatatcagggcatgtgtctgcattgcaagagctgggcaacagacttccctcagccgtaccaagtacaatgcaatatacctcgtaaaagaattttgtcttgttcaaaaaatgccagaaattgtcacaaaaaatgccctgtatccagctgacctatgaacccacaaattttagtatccgtgctacagataaagaccacaaagccctgaaggtcttctctggaggcctctggcagctatgcaaagcagtccacaagtggagaaagctacattctgcattcatactgttccatgagccacaaagtttagctatgccaacaaaagctgtgacccccttcatagtaacaggacctacttatttctgaaccacccatacagtgacaacaaccctcaagattgaagaaggctgaaacaataaggccttcataatagcacaaaccggagaaatgggaggcaagctgttcttaggatcatgacttggagggtagaaaatttgtcaagattgatgtgatacccacaagatctctgaaagacatagtccgtcttttcaagtcaacgtaagaggcctctgggataaaaatgggtaacgtccatggcatgacttatcagacagaaaaaaatgacaaaggaagaagtgctgaagctactcaacaaatccttctgtgactcgatcagaaattaaaagtta

SEQ ID NO: 369510 - DNA, 2563 bp, Homo sapiens
gtatttttagtagagacggggtttcaccatcttggccaggctggtcttgaactcctgacctcatgatccacccaatgtttatttttattacaccagtaatttcctcattgtgttgaatcttacagtggcttataaatctacatgtacctagaaatgtttagccagtccatgtatatttgatgtggcacattttttcctttgaatcacatactctaagagaagtaacttcctcttgctaacctctactttccctaagtgttgaattaatcctctttagatgattataattctcttttcaatagctagaaagaatctataaggaactttcctggctgggtgtggtggctcatgcctgtaatcccagcacttcaggaggccgaggtgggtggatcacgaggtcaggagttccagaccagcctgaccaacatggttaaaccatgtctttactaaaaatgcaaaaattagcacctgtaatcccagctactcaggaggctgaggcatagaattgcttgaacctggcaggcagaggtggtgagccgagatcacggcactgcactccagcctgggtgacaagagcaagactccgtctcaaaataaataaataaaaataaaaaataaacatgatgatcacagatgcagtcacattttctgagttcttgtctctctgccagtgccacccagatagcctcacaaaactttgacccagccactgttagtgtcgccaccgcccataaaggagctgagcccagcaggggcactgcctggggccctgtagccaaaaggctacagcaggagctgatgaccctcatgatgcctggtgacaaaagaatttctgcctaccctgaaagccttatcaaatggacaccatccatgaagcagctggcacagtgtatgaagatctgaggtataagctcttgctggagttcctcaatgactacccacctttacgatgcacccacagtgaagttcctcacaccctgctaccaccctaacgtggacacccagggtaacatatgcctggacatcctgaaggagaagtggtctgccccgtatgatatcaggaccatcctgctctctatccagtgcctgctaggacaactcaacattgatagccctttgaacacacatgctaccaagctctgggaaaaccccatagctttaagaagtacctgcaagggtcaggcgcagtggctcacacctgtaatcccagcactttgggaggccgaggtgggtggatggatcacctgacgtagagagtccaaggcctgacaaacatggagaaatgtcatccctatttaaaaaaataaaaaaattagccaagtgtggtggcgcatgcctgtaatcccagctactcgggaggctgaggcaggagaatcacttgaacctgggaggtggaggttgcagtgagccgagatctcgctattgcactccagcctgggcaacaagagtgaaactctgcctcaaaaaaaaataaaataaaataaaaataaaaataaggaagtacctgcaagaaagctactcaaagtaggtcaccagccaggagctctgacccaggctgcccagcctatccttgtgttgtctttttaattttcccttagatggtctgccctttccgtgatttctgtgtagaactctgtatcttgagctgtggtactatttttcttttgtcttttaatttaaatcttgttgggagctcttgtgatgaatattaaatacatacattttgggctgggtgtggtgcctctagcctataatcccagcactttgggaggccgaggcaggcgaatcgtgaggtcaggagatcgagaccatcctgcctaacacggtgaaacctcgtctctactaaaaatacaaaaaaattagccgggcgtggtggcgggtgcctatagtcccagctgctcgggaggctgaggcaggagaatggcatgaacccgggaggtggagcttgcagtgagctgagattgcaccactgcactccaggctgggcacagagcaagactccatctcaaaaaaaaaaaaaaaaaaaagacaaaaagaaaacattttggtcattaaaaaacaaaaaaaaaatgatacgagagagcacccagggattataagaggaaacactttattacatcactcatctaacattccagaaaatggaaagtactctactgtacagcaaagtaaatcattggttgtctggagaacagaaagaaagcctttataaaaaggttccaagtaaatataaaggtgttaagttcattattgtgactatgttaatggtttcatgggattatatgaaactcaagatttatcacatgctacagcttaaatatgcatagcttactgaatgtcatttataactcatcacagctttaaaatatacttcagactggcagcagtggctcacacctgtattcccaccactctgggaggctgaggcaggcatatcacctgaggtcaggagtccaagatcagcctggccaacatggcaaaactccgtctctactaaaaatacaaaacttggccgggcatggtggcacatgcttccagtcccacctacatgggaggctgagcc

SEQ ID NO: 369511 - DNA, 2952 bp, Homo sapiens
agtgcttcccccaagtaagtcccgatggacctggctcccccgagacgcccctactcaggagcaacttggcgaggttcagactcttggagccagaagctacatgacccctaaacgatggagtttcgctcttgttgcccaagctggagtgcaatggtgccatctcggctcactgcaacctccacctcctgggttcaagcaattctcctgcctcagcctcccaagtagctagtattacaggcacctgccaccacagcaggctaatttttgtattttcggtagagacagggtttcaccatgctgaccaggctagtcttgaactcctgaccgggtgatctgcctgcctcggcctcaaagtgctggaattgcaggcgtgagccactgtgcctggccagttgtaactatttatcactgtctggactcataaacattttgagatgactttgggagtgcctggggagtttcattcagcctggtgcatatgggcagtgaaaaatatgctcatctgtgatagtagatgtggtttggttcacaaatccaggggctgggctttaaacggcattaggtggacagaggagggttgctacagctgaggtctcagctggtgcagcacaaaagtgaaatagggccatggctatctgaagccatatgtggttctgtgtggctatggagtcattccaggagacgttcacaggatgatttgggattaccactgctattgtaaaccatggaaattctgtgttaatattggatgctatttgtatttgtcaagcatagtctggatgcttatccacattttggtataaggccagaattgaaggcccaatatgatgtgtcactttgacatcttgtgaaagtgggacaaccttaaaaggtgtgagtacaaatctcattcccactctgctctcttgaataatgtatcctagcctaacagcccgttttatcaaggtgataaggcagggttccaggttgttatattttgtggtgggtttcaattccatccctaccagcagagttatggaaacaaaccattgcatattcccaagggaatcatgggccgttataccctcttcatcttgtgaaataattttatttgtaggcgctgggtgtggtggctcacccctataatctcctcactttcagaggccaaggctggtggatcacttgagaccagaaattcaagaccagcctggccaacatggtgaaaccccgtctctacttaaagatacaaaaaattagctgggtatggtggcgggcacctgtagtcccagctacttgggaggctgaggcagaagaatggtgtgaacccaggaggcagagcttgcagtgagccgagatcgtgccactgcactccatccagcctgggcaacagagcaagactccgtctcaaaataaataataataataattaaaaaaatgcagttcaaaagaaaaatatagatttaccattatttttggaaaacaggtttggcaactctatactgactacaccaattcttctcatgccctaagtgggaaaactagcctccacggtagcaaatattgatgtggcactaaggccatttccacctgattaagtggctggctggtcacaaaggccacatcactgaactgagatctcccttctccctatcatcttcctcctgttaatgcaggaatgaccttgaggagaacagcccagaatgagtacaggaattcacaaaacctttagattatttcctctgacaatggcctcaacaatacaatattcatcattatggaagtcctgataattcctgtatctgcatattcatcatatacgtagtgactggatcattgtggatgcccttttaaaagacatgcattacgctgcacgtggtggctcacctgtaatcccaggactttgggaggctgaggccagcagatcacaaggtcaggagttcgagaccagcctggccaacatggtgaaaccccatctctactaaaaatacaaaaattagctgggtgtggtggcatgtgcctgtagtcccagctactcaggaggctgaggcaggagaatcgtttgaacctgggaggcagaggttgccgtgagccaagattatgccactgcactccagcctgggcaacagggtgaggctctgcctcaaaaaaaaagaaaaaaaaagaaaaaaaagacatgagttgcagttacattattctgtctcctccactgcctataaataaagtaattctataaaattataatttcacctgatagcattacaatctgtgatgttatcctacagaattctggatatcagggcatgtgtctgcattgcaagagctgggcaacagacttccctcagccgtaccaagtacaatgcaatatacctcgtaaaagaattttgtcttgttcaaaaaatgccagaaattgtcacaaaaaatgccctgtatccagctgacctatgaacccacaaattttagtatccgtgctacagataaagaccacaaagccctgaaggtcttctctggaggcctctggcagctatgcaaagcagtccacaagtggagaaagctacattctgcattcatactgttccatgagccacaaagtttagctatgccaacaaaagctgtgacccccttcatagtaacaggacctacttatttctgaaccacccatacagtgacaacaaccctcaagattgaagaaggctgaaacaataaggccttcataatagcacaaaccggagaaatgggaggcaagctgttcttaggatcatgacttggagggtagaaaatttgtcaagattgatgtgatacccacaagatctctgaaagacatagtccgtcttttcaagtcaacgtaagaggcctctgggataaaaatgggtaacgtccatggcatgacttatcagacagaaaaaaatgacaaaggaagaagtgctgaagctactcaacaaatccttctgtgactcgatcagaaattaaaagtta

SEQ ID NO: 369512 - DNA, 2656 bp, Homo sapiens
ggtaccctagtgtaggccggacgcagtggctatgttaatggtttcatgggattatgtgaaactcaagatttatcacatgctacagcttaaatatgcatagcttactgaatgtcatttataactcataaacattttgagatgactttgggagtgcctggggagtttcattcagcctggtgcatatgggcagtgaaaaatatgctcatctgtgatagtagatgtggtttggttcacaaatccaggggctgggctttaaacggcattaggtggacagaggagggttgctacagctgaggtctcagctggtgcagcacaaaagtgaaatagggccatggctatctgaagccatatgtggttctgtgtggctatggagtcattccaggagacgttcacaggatgatttgggattaccactgctattgtaaaccatggaaattctgtgttaatattggatgctatttgtatttgtcaagcatagtctggatgcttatccacattttggtataaggccagaattgaaggcccaatatgatgtgtcactttgacatcttgtgaaagtgggacaaccttaaaaggtgtgagtacaaatctcattcccactctgctctcttgaataatgtatcctagcctaacagcccgttttatcaaggtgataaggcagggttccaggttgttatattttgtggtgggtttcaattccatccctaccagcagagttatggaaacaaaccattgcatattcccaagggaatcatgggccgttataccctcttcatcttgtgaaataattttatttgtaggcgctgggtgtggtggctcacccctataatctcctcactttcagaggccaaggctggtggatcacttgagaccagaaattcaagaccagcctggccaacatggtgaaaccccgtctctacttaaagatacaaaaaattagctgggtatggtggcgggcacctgtagtcccagctacttgggaggctgaggcagaagaatggtgtgaacccaggaggcagagcttgcagtgagccgagatcgtgccactgcactccatccagcctgggcaacagagcaagactccgtctcaaaataaataataataataattaaaaaaatgcagttcaaaagaaaaatatagatttaccattatttttggaaaacaggtttggcaactctatactgactacaccaattcttctcatgccctaagtgggaaaactagcctccacggtagcaaatattgatgtggcactaaggccatttccacctgattaagtggctggctggtcacaaaggccacatcactgaactgagatctcccttctccctatcatcttcctcctgttaatgcaggaatgaccttgaggagaacagcccagaatgagtacaggaattcacaaaacctttagattatttcctctgacaatggcctcaacaatacaatattcatcattatggaagtcctgataattcctgtatctgcatattcatcatatacgtagtgactggatcattgtggatgcccttttaaaagacatgcattacgctgcacgtggtggctcacctgtaatcccaggactttgggaggctgaggccagcagatcacaaggtcaggagttcgagaccagcctggccaacatggtgaaaccccatctctactaaaaatacaaaaattagctgggtgtggtggcatgtgcctgtagtcccagctactcaggaggctgaggcaggagaatcgtttgaacctgggaggcagaggttgccgtgagccaagattatgccactgcactccagcctgggcaacagggtgaggctctgcctcaaaaaaaaagaaaaaaaaagaaaaaaaagacatgagttgcagttacattattctgtctcctccactgcctataaataaagtaattctataaaattataatttcacctgatagcattacaatctgtgatgttatcctacagaattctggatatcagggcatgtgtctgcattgcaagagctgggcaacagacttccctcagccgtaccaagtacaatgcaatatacctcgtaaaagaattttgtcttgttcaaaaaatgccagaaattgtcacaaaaaatgccctgtatccagctgacctatgaacccacaaattttagtatccgtgctacagataaagaccacaaagccctgaaggtcttctctggaggcctctggcagctatgcaaagcagtccacaagtggagaaagctacattctgcattcatactgttccatgagccacaaagtttagctatgccaacaaaagctgtgacccccttcatagtaacaggacctacttatttctgaaccacccatacagtgacaacaaccctcaagattgaagaaggctgaaacaataaggccttcataatagcacaaaccggagaaatgggaggcaagctgttcttaggatcatgacttggagggtagaaaatttgtcaagattgatgtgatacccacaagatctctgaaagacatagtccgtcttttcaagtcaacgtaagaggcctctgggataaaaatgggtaacgtccatggcatgacttatcagacagaaaaaaatgacaaaggaagaagtgctgaagctactcaacaaatccttctgtgactcgatcagaaattaaaagtta

SEQ ID NO: 369513 - DNA, 2052 bp, Homo sapiens
gattctcctgcctcagcctcctgagtagctgggattacaggcatgtaccaccacactcggctaatttttctatttttagtaaagtcggggtttcaccatgttggccaggctagtctcaaactcctgacctcaggagattcgctggcctctgcctccccaagtgctgggattataggcacgagccaccatgccttgcagacagctagattttctaatgtggatgataggagcatgaaagaggaatcgggcatgagcccaaggtttttgatcttagcagctgtaaccatgcacactgcttcagctgagatgacgttggtattgacataatattcactgtggatatccagagggttgttttggccatatgaagaatcagagaccaataagtggtggcatcaaatcgataactagacatactggatggggtatctgggagggtgttgatactggagacatccaatatatgaaagctaatgagtgaactatgattagttatgggtccatttaggaggacatgcttcagattatggtggtaaatcttttcagggggcagaaaggtgtgattacaggctgaggactggatctcttacttacgtcctcaattgatgttattgggcttcctaaacacctgagagggtgtgagtgaccatcataacaggacatttaatacagtagagtttggaaggggacatagacatccaaagagataatagagaagagatagatgcatgcagaagcacaggagtaattcagggaagatgacacttaggcctgagttggtgccaaagttgtaacttttttgttttttttttttcagatggagtttcgctcttgttgcccaagctggagtgcaatggtgccatctcggctcactgcaacctccacctcctgggttcaagcaattctcctgcctcagcctcccaagtagctagtattacaggcacctgccaccacagcaggctaatttttgtattttcggtagagacagggtttcaccatgctgaccaggctagtcttgaactcctgaccgggtgatctgcctgcctcggcctcaaagtgctggaattgcaggcgtgagccactgtgcctggccagttgtaactatttatcactgtctggactcataaacattttgagatgactttgggagtgcctggggagtttcattcagcctggtgcatatgggcagtgaaaaatatgctcatctgtgatagtagatgtggtttggttcacaaatccaggggctgggctttaaacggcattaggtggacagaggagggttgctacagctgaggtctcagctggtgcagcacaaaagtgaaatagggccatggctatctgaagccatatgtggttctgtgtggctatggagtcattccaggagacgttcacaggatgatttgggattaccactgctattgtaaaccatggaaattctgtgttaatattggatgctatttgtatttgtcaagcatagtctggatgcttatccacattttggtataaggccagaattgaaggcccaatatgatgtgtcactttgacatcttgtgaaagtgggacaaccttaaaaggtgtgagtacaaatctcattcccactctgctctcttgaataatgtatcctagcctaacagcccgttttatcaaggtgataaggcagggttccaggttgttatattttgtggtgggtttcaattccatccctaccagcagagttatggaaacaaaccattgcatattcccaagggaatcatgggccgttataccctcttcatcttgtgaaataattttatttgtaggcgctgggtgtggtggctcacccctataatctcctcactttcagaggccaaggctggtggatcacttgagaccagaaattcaagaccagcctggccaacatggtgaaaccccgtctctactaaaaaaaaaaaatacaggccaggcatggtggctcaagcctggaatcccagcactttgggatgctgaggtgggtggatcaggaagtatggagatcgagaccatcctggctaacacagtgaaaccccgtctcta

SEQ ID NO: 369514 - DNA, 1495 bp, Homo sapiens
gaatggatgaccaggcactagttgaaggcagcgtgtgtctcaaggatgaggatgacccactgttcctgttcctgaggtggtcaacttctggcacagtgtatgaagatctgaggtataagctcttgctggagttcctcaatgactacccacctttacgatgcacccacagtgaagttcctcacaccctgctaccaccctaacgtggacacccagggtaacatatgcctggacatcctgaaggagaagtggtctgccccgtatgatatcaggaccatcctgctctctatccagtgcctgctaggacaactcaacattgatagccctttgaacacacatgctaccaagctctgggaaaaccccatagctttaagaagtacctgcaagggtcaggcgcagtggctcacacctgtaatcccagcactttgggaggccgaggccagcagatcacaaggtcaggagttcgagaccagcctggccaacatggtgaaaccccatctctactaaaaatacaaaaattagctgggtgtggtggcatgtgcctgtagtcccagctactcaggaggctgaggcaggagaatcgtttgaacctgggaggcagaggttgccgtgagccaagattatgccactgcactccagcctgggcaacagggtgaggctctgcctcaaaaaaaaagaaaaaaaaagaaaaaaaagacatgagttgcagttacattattctgtctcctccactgcctataaataaagtaattctataaaattataatttcacctgatagcattacaatctgtgatgttatcctacagaattctggatatcagggcatgtgtctgcattgcaagagctgggcaacagacttccctcagccgtaccaagtacaatgcaatatacctcgtaaaagaattttgtcttgttcaaaaaatgccagaaattgtcacaaaaaatgccctgtatccagctgacctatgaacccacaaattttagtatccgtgctacagataaagaccacaaagccctgaaggtcttctctggaggcctctggcagctatgcaaagcagtccacaagtggagaaagctacattctgcattcatactgttccatgagccacaaagtttagctatgccaacaaaagctgtgacccccttcatagtaacaggacctacttatttctgaaccacccatacagtgacaacaaccctcaagattgaagaaggctgaaacaataaggccttcataatagcacaaaccggagaaatgggaggcaagctgttcttaggatcatgacttggagggtagaaaatttgtcaagattgatgtgatacccacaagatctctgaaagacatagtccgtcttttcaagtcaacgtaagaggcctctgggataaaaatgggtaacgtccatggcatgacttatcagacagaaaaaaatgacaaaggaagaagtgctgaagctactcaacaaatccttctgtgactcgatcagaaattaaaagtta

SEQ ID NO: 369515 - DNA, 951 bp, Homo sapiens
tttttttggtttggttttgtttgagatggagtctcactccagcctggcagcagagggagactccatctcaaacaaacaaacaaacaaaaaaagatactttaagttgtttaaaggccagagagaggccagtggtgtgtggcagtcagctggggatggacatggaatgtacctggaagtctaaagaatgaggtgcgttcagagagggtatctctgctgtgctgaaggtgccacattgggcttcccatgacctcggccatactagggaaagtgcctgtcaggagtgggtggactttatgtcacagccactgcacagatacctatttgttcaactaactattgttggtggctgtaccccatgaccagtgggcctagtttctcctatgtttgaggaccttgagaggaggatgtgcgagagtagatgtgtgggagagatggattgtgatacctcagcataggggtggtttgtggtttcatctgtcaacatcataacagggcacagtgacttttgaagacgtggctgtgaaatttacccaggaggaatggaatctccttagtgaggctcagagatgcctgtaccgtgatgtgactctggagaacctggcacttatgtcctccctgggtaagttgctcacactcaccctgtgacttgagctagtctctgttttcccctgtctttccccattggcaagactttctcatgtcaggagcatggacacagcttcctgcttcagttctatgggtaggttcttggttgtaggactgaggtgtacatactgccctactcctttcttggagcagccccagcacctgctttactgcaggctcccagggagggattcccagtcagaagcccaccttgttagtcctgtggatgtttgggtgtccttgtccagatttcaggttcctgtgtacccacagtctacttcctttctctagctgctattttcttat

SEQ ID NO: 369516 - DNA, 3642 bp, Homo sapiens
ggccgagacttccggggtctctagtagcggctgtgtatcggcgatgcgggtgtttccccagtttgtggcccctgagtgctgggtgggaccgcggtgactgaacctagaaggtggagaggaatcgtcctcggtgcccagaggcggctctgcagccccgtgacggcgaccactgctcccgggccgtgcttccccaagtagtccgatggcagcggctgtgccgaggcgcccaactcagcagggcactgtgacctttgaagatgtggctgtgaacttttcccaggaggagtggtgtcttcttagtgaggctcagaggtgcttgtaccgtgatgtgatgctagagaacctggctctcatatcctcgctgggttgttggtgtggatcaaaagatgaggaggcaccttgtaagcagagaatttctgtacaaagagagtctcagagcaggactcctagggcaggtgtttctcctaagaaggctcacccctgtgaaatgtgtggcctcatcttggaggatgtttttcactttgctgaccaccaggaaactcatcacaagcagaagctgaacaggagtggagcatgtggaaaaaacttggatgacactgcataccttcatcagcaccagaagcagcatattggagagaaattctacagaaagagtgtcagagaagcatcgtttgtaaagaaacgtaagctcagggtgtcacaggagccatttgtcttccgcgagtttgggaaggacgttctgcccagttcaggattgtgccaagaagaagctgctgtagagaagacagacagtgaaactatgcatggcccaccctttcaggagggaaaaactaattacagttgtggaaaacgcacaaaagccttcagcaccaaacactcagttattccacaccagaaacttttcactagagatggatgttatgtgtgcagtgattgtggaaaatcctttagcagatatgtcagcttcagtaatcatcagcgagatcacactgcaaaaggaccttatgattgtggagagtgtgggaaatcttatagtcgaaagagcagccttattcaacatcagcgagtccacactggacagacagcttatccctgtgaggagtgcgggaaatcttttagtcagaagggcagccttattagccatcagcttgttcacactggagaagggccttatgagtgtagagaatgtgggaaatcttttggtcaaaagggtaacctcattcaacatcagcaaggtcacactggagagagagcttatcactgtggggaatgtgggaaatcttttcgtcagaagttctgctttattaaccatcagcgtgttcacactggagaaaggccttacaagtgtggagaatgtgggaaatcttttggtcaaaagggcaacctcgttcaccatcagcgaggtcatactggagaaaggccctatgagtgcaaggaatgtgggaaatcatttaggtacagatcccacctcactgaacaccagagacttcacactggggaaagaccttacaattgtagggaatgtgggaaattatttaacaggaagtatcatcttctggttcatgagagagttcacactggagaaaggccatatgcgtgtgaggtatgtgggaaattatttggcaataagcacagcgtgactatacatcagaggattcacactggagaaaggccgtatgaatgcagtgaatgtgggaaatcatttctttccagctctgcgcttcatgttcataaaagagttcattctggacaaaagccttataagtgcagtgaatgtggaaaatccttttctgaatgttccagtctcattaaacacaggagaattcacactggagaaaggccttatgaatgcaccaaatgtggaaaaacatttcagcgaagctctaccctccttcatcatcagagttcacacaggagaaaggccttatgagtacacaccaccacgcccagctaatttttgtgtttttagtggagatggggttttaccatgttggccaggctggtctcaaactcctgacctcaagtgatccacccaccttgactcccaaagtgctgaaattacaggcatgagcctctgcacctggccttcattcttttcgtattgcttagaatatgacatgctgaaccaggcatggtggctcatgcttgtaaacctgatgctttgggaggacaaggtggttcattggaggccaggagttggagatcagcctgggcaacatggccagacctcctctctacaaaaagaaaaaagaatgacatgcttcttgtttttgtctgttataaatgaaactgctatatttgaatgcagttgttcatgtaggtatgtttcactatggtaatatggtggtgtgcagtgcctgagtcacgtgatagattaaagtacaactcttttttgagacagagtctcactctgtcacccaggcgggagttaggtggcatgatttcggctcactgcaacctctgcctcccaagttcaactgattcttctgcctcagcctcccgagtagcagggattaccggtgtgcaccaccatgcctggataacttttttttttatttctattagcaatggggtttcaccatgctggccaggcttgttatgaactgacctcaagtgatctgcctgcctcagcttctcaggtgtgacctactgtgcttggcctaatgtacaactttttaagcaatgccaaactatgacttaagaatgaaattattgctcatttgtatatctatctaccatcagtgtccaagaatttctgttctatcttaccaagagggagtatggttagtatttgaaattgtttattattttaataagtggttataacttttgagtcagtggtttatgttttgcattttttttgttttgagacaaagtctcgctctgtctcccaggctagagtaccgtggcacaatctcagctcattgcaacctctgcttcctgggctcaagcactctgcccacctcagcctccagagtagctggaaatacagtgccacccagatagcctcacaaaactttgacccagccactgttagtgtcgccaccgcccataaaggagctgagcccagcaggggcactgcctggggccctgtagccaaaaggctacagcaggagctgatgaccctcatgatgcctggtgacaaaagaatttctgcctaccctgaaagccttatcaaatggacaccatccatgaagcagctggcacagtgtatgaagatctgaggtataagctcttgctggagttcctcaatgactacccacctttacgatgcacccacagtgaagttcctcacaccctgctaccaccctaacgtggacacccagggtaacatatgcctggacatcctgaaggagaagtggtctgccccgtatgatatcaggaccatcctgctctctatccagtgcctgctaggacaactcaacattgatagccctttgaacacacatgctaccaagctctgggaaaaccccatagctttaagaagtacctgcaagggtcaggcgcagtggctcacacctgtaatcccagcactttgggaggccgaggtgggtggatggatcacctgacgtagagagtccaaggcctgacaaacatggagaaatgtcatccctatttaaaaaaataaaaaaattagccaag

SEQ ID NO: 369517 - DNA, 6173 bp, Homo sapiens
  misc_feature (4024)..(4024): n is a, c, g, or t
  misc_feature (5266)..(5266): n is a, c, g, or t
acgtatggtgcagtacattgattgaagtaacatgagagagaaggggtgggtgtagcaaaaacattctcaaggccaagtcatcagcccttacccttaggagggggcagtgattaagaggtggtatgagagcctcgtttctcatttctataagtgctggtaaaggacctgaccccacttccttacctactgcctgcccaggtaactgatgcctacagcatcacaggaattgccaaaatgcagaaaacaaatcctaaattgctctaattccataacacaaaggctggtttttggcttgaaataatcaggcacatatatcatgttctgtcacccagggtggagtgcagtggtgtgatctcggctcactacaaaccccgcctcctgggttcacgccattctccggcctcagcctcccgagtagctgggactacaggtgcccaccaccatgcccggctaattttttgtatttttagtagagacagggtttcaccatgttaaccagcatagtctctatcccctgactgcaagatctgcccgaatcagtgtcccaaagtgctgggattacaggcgtgagccaccgcacccagcccagaagggagtggacctttttatgtcaggacctcagcatggatacctatttgtccacctacttcttgttgctgatggcatttgaccagcaggcccatgaagagacaaaggcaccagtggatgtggtttcaactccgtgttggggaccttgggaggaggatgggcaagggtgggcgtgtgggagaggtgggttgtggtacctcagcagaggggctgcttgtggcttcatctgtcactatcatagcagggcactgtgacctttgaagatgtggctgtgaacttttcccaggaggagtggtgtcttcttagtgaggctcagaggtgcttgtaccgtgatgtgatgctagagaacctggctctcatatcctcgctgggttgttggtgtggatcaaaagatgaggaggcaccttgtaagcagagaatttctgtacaaagagagtctcagagcaggactcctagggcaggtgtttctcctaagaaggctcacccctgtgaaatgtgtggcctcatcttggaggatgtttttcactttgctgaccaccaggaaactcatcacaagcagaagctgaacaggagtggagcatgtggaaaaaacttggatgacactgcataccttcatcagcaccagaagcagcatattggagagaaattctacagaaagagtgtcagagaagcatcgtttgtaaagaaacgtaagctcagggtgtcacaggagccatttgtcttccgcgagtttgggaaggacgttctgcccagttcaggattgtgccaagaagaagctgctgtagagaagacagacagtgaaactatgcatggcccaccctttcaggagggaaaaactaattacagttgtggaaaacgcacaaaagccttcagcaccaaacactcagttattccacaccagaaacttttcactagagatggatgttatgtgtgcagtgattgtggaaaatcctttagcagatatgtcagcttcagtaatcatcagcgagatcacactgcaaaaggaccttatgattgtggagagtgtgggaaatcttatagtcgaaagagcagccttattcaacatcagcgagtccacactggacagacagcttatccctgtgaggagtgcgggaaatcttttagtcagaagggcagccttattagccatcagcttgttcacactggagaagggccttatgagtgtagagaatgtgggaaatcttttggtcaaaagggtaacctcattcaacatcagcaaggtcacactggagagagagcttatcactgtggggaatgtgggaaatcttttcgtcagaagttctgctttattaaccatcagcgtgttcacactggagaaaggccttacaagtgtggagaatgtgggaaatcttttggtcaaaagggcaacctcgttcaccatcagcgaggtcatactggagaaaggccctatgagtgcaaggaatgtgggaaatcatttaggtacagatcccacctcactgaacaccagagacttcacactggggaaagaccttacaattgtagggaatgtgggaaattatttaacaggaagtatcatcttctggttcatgagagagttcacactggagaaaggccatatgcgtgtgaggtatgtgggaaattatttggcaataagcacagcgtgactatacatcagaggattcacactggagaaaggccgtatgaatgcagtgaatgtgggaaatcatttctttccagctctgcgcttcatgttcataaaagagttcattctggacaaaagccttataagtgcagtgaatgtggaaaatccttttctgaatgttccagtctcattaaacacaggagaattcacactggagaaaggccttatgaatgcaccaaatgtggaaaaacatttcagcgaagctctaccctccttcatcatcagagttcacacaggagaaaggccttatgagtacacaccaccacgcccagctaatttttgtgtttttagtggagatggggttttaccatgttggccaggctggtctcaaactcctgacctcaagtgatccacccaccttgactcccaaagtgctgaaattacaggcatgagcctctgcacctggccttcattcttttcgtattgcttagaatatgacatgctgaaccaggcatggtggctcatgcttgtaaacctgatgctttgggaggacaaggtggttcattggaggccaggagttggagatcagcctgggcaacatggccagacctcctctctacaaaaagaaaaaagaatgacatgcttcttgtttttgtctgttataaatgaaactgctatatttgaatgcagttgttcatgtaggtatgtttcactatggtaatatggtggtgtgcagtgcctgagtcacgtgatagattaaagtacaactcttttttgagacagagtctcactctgtcacccaggcgggagttaggtggcatgatttcggctcactgcaacctctgcctcccaagttcaactgattcttctgcctcagcctcccgagtagcagggattaccggtgtgcaccaccatgcctggataacttttttttttatttctattagcaatggggtttcaccatgctggccaggcttgttatgaactgacctcaagtgatctgcctgcctcagcttctcaggtgtgacctactgtgcttggcctaatgtacaactttttaagcaatgccaaactatgacttaagaatgaaattattgctcatttgtatatctatctaccatcagtgtccaagaatttctgttctatcttaccaagagggagtatggttagtatttgaaattgtttattattttaataagtggttataacttttgagtcagtggtttatgttttgcattttttttgttttgagacaaagtctcgctctgtctcccaggctagagtaccgtggcacaatctcagctcattgcaacctctgcttcctgggctcaagcactctgcccacctcagcctccagagtagctggaaatacaggtatgcaccaccacaactggataacttttgtattttctgtagagagggttttacctttttgcccagtctgatcgcgaactcctgggctcaggcgatccacttgcctaggctccaaaagtgcttggtctacaggggtgaggcaccctgcctggcctcacctgtaggcttgttttttaaaatgaattttatctatttcccatttcattaatatatttaaaaataatgaaataacaaagacgtatgttggacttcattcattcttcagtgatgtcactttgctgcaaggaatatttggttttcttttttttttttttttccagatggagtctagctctgtctcctaagctacagtgaagtggcatgatctcggcccactgcaacctccacctcctgtgttcaagcgattctgcctcagcctcctgagtagctgggactacnggcatgtgccattatacctggctaattttatttatttattttagtagagatggggtttcaccatgttacccaggctgctctctaccttctgagctcaagtgatccacctgcctcggcctcccaaagtgctgggattacaggtgtcagccactgtacctggctgaatacttggttttcagtaccacaagaactatgagctggttatccacttcatgtggaatcataagcgtcccaaagtgacaatacatatagattgccaggcagtgaaacagttaagatgccaccatagctttcttttcaacatctttctaagattaccttactatttcttttgttccaagtttgtacttcctcacagttctcacatatggaaaggatacacactttgtagaaacaagaactttatgttatccaagttctaggatagccatgagctccaattatctcagagctctgagtcctctactcaatacccattgagatttatgtgttctgaggcttttgtcttctagctacttacttcattctccatgggtaacgtcattcatccacattaactaatttcctcactccaagctcttttctagagataatctccagtccctgtgcagaaactgtcattgcactttctgctgaaatggcagtttcttctcagcaaggtgagattatggaatccagaatcttttttcaggggtcacatgcccatttccccacttgcatgaatgtcgacactgcagccacagttttggccgtaaatgtgaatttggcaagtaaccactgttcccagggaaatgtcccaatcagaagaagattatctgggacactgatactgacagggagatgggacattctgagggacccggaggcagggtgccacctcctcaacttccctgagggctgcctagaatctgtttcctctcactctgaattattcttcctcttatggctgaccaaaaacatggaacctcacaaagtccactgtaacagctttatatttgtgaagtgaagaacatgaagacagtttcaagcaaagttattgagtggacactttgtgttttttttgagaagtctcactctttcacccaggctggagtgcagtggcacgatctcggctcactgcaactccacctcgttcaagtgattctcttgcctcagcctcccgagtagctgggcctataggttccctccaccacgcccagctaatttttgtatttttagtagagatgggctttcactacgttngccaggctggtctcaaactcctgacctcatgatccacccccctcggcctcctaaagtgctgggattacaggcatctgccaccgcactcggcttatccctagaaatcctatgatagcatgatgtataggcacctaaaggcatggcacttgagaaatgtgaataagattgtaagttacaaatagcaaggtacagtcagatgttaacagtctcagcccctaaatgtcaccttgtattacagcatgttatataagcacatacaggcacatacatgaaatagtgatacttcattctcagtaatatcttcatccttctcactggaaagatctttgatgatttttaatcaacataggagtttcaatgatatctagaagtttaaaagggctcgttcaaacaaattatgaccacacacactgaagagtatgtttgtctcttgtggtgtaaatttttttttattacaccaaattatgttcacacaaaacctttgtaatcagggggaattaaagagccttcctggaaaatggaggttgcaatcagccgagatggtgccatcgcactctagcctggggaatagagtgagatcctgcctcaaaaaaaacaaaaaaattctttattttctccataaactacagtttatataagcaaaagtttcagtactaagcaattttagtctctgcagtctcttgtcttgaattaatacaacttttgttaattctcttatgaagttaatcttcctgcttgtatgtgaattaaatatatgtcaaactttttttgtacaaaagattcatacctctttcctgtttgaaattattttactgtgtttcatcaatctaatgtttatttttattacaccagtaatttcctcattgtgttgaatcttacagtggcttataaatctacatgtacctag

SEQ ID NO: 369518 - DNA, 6158 bp, Homo sapiens
  misc_feature (4024)..(4024): n is a, c, g, or t
acgtatggtgcagtacattgattgaagtaacatgagagagaaggggtgggtgtagcaaaaacattctcaaggccaagtcatcagcccttacccttaggagggggcagtgattaagaggtggtatgagagcctcgtttctcatttctataagtgctggtaaaggacctgaccccacttccttacctactgcctgcccaggtaactgatgcctacagcatcacaggaattgccaaaatgcagaaaacaaatcctaaattgctctaattccataacacaaaggctggtttttggcttgaaataatcaggcacatatatcatgttctgtcacccagggtggagtgcagtggtgtgatctcggctcactacaaaccccgcctcctgggttcacgccattctccggcctcagcctcccgagtagctgggactacaggtgcccaccaccatgcccggctaattttttgtatttttagtagagacagggtttcaccatgttaaccagcatagtctctatcccctgactgcaagatctgcccgaatcagtgtcccaaagtgctgggattacaggcgtgagccaccgcacccagcccagaagggagtggacctttttatgtcaggacctcagcatggatacctatttgtccacctacttcttgttgctgatggcatttgaccagcaggcccatgaagagacaaaggcaccagtggatgtggtttcaactccgtgttggggaccttgggaggaggatgggcaagggtgggcgtgtgggagaggtgggttgtggtacctcagcagaggggctgcttgtggcttcatctgtcactatcatagcagggcactgtgacctttgaagatgtggctgtgaacttttcccaggaggagtggtgtcttcttagtgaggctcagaggtgcttgtaccgtgatgtgatgctagagaacctggctctcatatcctcgctgggttgttggtgtggatcaaaagatgaggaggcaccttgtaagcagagaatttctgtacaaagagagtctcagagcaggactcctagggcaggtgtttctcctaagaaggctcacccctgtgaaatgtgtggcctcatcttggaggatgtttttcactttgctgaccaccaggaaactcatcacaagcagaagctgaacaggagtggagcatgtggaaaaaacttggatgacactgcataccttcatcagcaccagaagcagcatattggagagaaattctacagaaagagtgtcagagaagcatcgtttgtaaagaaacgtaagctcagggtgtcacaggagccatttgtcttccgcgagtttgggaaggacgttctgcccagttcaggattgtgccaagaagaagctgctgtagagaagacagacagtgaaactatgcatggcccaccctttcaggagggaaaaactaattacagttgtggaaaacgcacaaaagccttcagcaccaaacactcagttattccacaccagaaacttttcactagagatggatgttatgtgtgcagtgattgtggaaaatcctttagcagatatgtcagcttcagtaatcatcagcgagatcacactgcaaaaggaccttatgattgtggagagtgtgggaaatcttatagtcgaaagagcagccttattcaacatcagcgagtccacactggacagacagcttatccctgtgaggagtgcgggaaatcttttagtcagaagggcagccttattagccatcagcttgttcacactggagaagggccttatgagtgtagagaatgtgggaaatcttttggtcaaaagggtaacctcattcaacatcagcaaggtcacactggagagagagcttatcactgtggggaatgtgggaaatcttttcgtcagaagttctgctttattaaccatcagcgtgttcacactggagaaaggccttacaagtgtggagaatgtgggaaatcttttggtcaaaagggcaacctcgttcaccatcagcgaggtcatactggagaaaggccctatgagtgcaaggaatgtgggaaatcatttaggtacagatcccacctcactgaacaccagagacttcacactggggaaagaccttacaattgtagggaatgtgggaaattatttaacaggaagtatcatcttctggttcatgagagagttcacactggagaaaggccatatgcgtgtgaggtatgtgggaaattatttggcaataagcacagcgtgactatacatcagaggattcacactggagaaaggccgtatgaatgcagtgaatgtgggaaatcatttctttccagctctgcgcttcatgttcataaaagagttcattctggacaaaagccttataagtgcagtgaatgtggaaaatccttttctgaatgttccagtctcattaaacacaggagaattcacactggagaaaggccttatgaatgcaccaaatgtggaaaaacatttcagcgaagctctaccctccttcatcatcagagttcacacaggagaaaggccttatgagtacacaccaccacgcccagctaatttttgtgtttttagtggagatggggttttaccatgttggccaggctggtctcaaactcctgacctcaagtgatccacccaccttgactcccaaagtgctgaaattacaggcatgagcctctgcacctggccttcattcttttcgtattgcttagaatatgacatgctgaaccaggcatggtggctcatgcttgtaaacctgatgctttgggaggacaaggtggttcattggaggccaggagttggagatcagcctgggcaacatggccagacctcctctctacaaaaagaaaaaagaatgacatgcttcttgtttttgtctgttataaatgaaactgctatatttgaatgcagttgttcatgtaggtatgtttcactatggtaatatggtggtgtgcagtgcctgagtcacgtgatagattaaagtacaactcttttttgagacagagtctcactctgtcacccaggcgggagttaggtggcatgatttcggctcactgcaacctctgcctcccaagttcaactgattcttctgcctcagcctcccgagtagcagggattaccggtgtgcaccaccatgcctggataacttttttttttatttctattagcaatggggtttcaccatgctggccaggcttgttatgaactgacctcaagtgatctgcctgcctcagcttctcaggtgtgacctactgtgcttggcctaatgtacaactttttaagcaatgccaaactatgacttaagaatgaaattattgctcatttgtatatctatctaccatcagtgtccaagaatttctgttctatcttaccaagagggagtatggttagtatttgaaattgtttattattttaataagtggttataacttttgagtcagtggtttatgttttgcattttttttgttttgagacaaagtctcgctctgtctcccaggctagagtaccgtggcacaatctcagctcattgcaacctctgcttcctgggctcaagcactctgcccacctcagcctccagagtagctggaaatacaggtatgcaccaccacaactggataacttttgtattttctgtagagagggttttacctttttgcccagtctgatcgcgaactcctgggctcaggcgatccacttgcctaggctccaaaagtgcttggtctacaggggtgaggcaccctgcctggcctcacctgtaggcttgttttttaaaatgaattttatctatttcccatttcattaatatatttaaaaataatgaaataacaaagacgtatgttggacttcattcattcttcagtgatgtcactttgctgcaaggaatatttggttttcttttttttttttttttccagatggagtctagctctgtctcctaagctacagtgaagtggcatgatctcggcccactgcaacctccacctcctgtgttcaagcgattctgcctcagcctcctgagtagctgggactacnggcatgtgccattatacctggctaattttatttatttattttagtagagatggggtttcaccatgttacccaggctgctctctaccttctgagctcaagtgatccacctgcctcggcctcccaaagtgctgggattacaggtgtcagccactgtacctggctgaatacttggttttcagtaccacaagaactatgagctggttatccacttcatgtggaatcataagcgtcccaaagtgacaatacatatagattgccaggcagtgaaacagttaagatgccaccatagctttcttttcaacatctttctaagattaccttactatttcttttgttccaagtttgtacttcctcacagttctcacatatggaaaggatacacactttgtagaaacaagaactttatgttatccaagttctaggatagccatgagctccaattatctcagagctctgagtcctctactcaatacccattgagatttatgtgttctgaggcttttgtcttctagctacttacttcattctccatgggtaacgtcattcatccacattaactaatttcctcactccaagctcttttctagagataatctccagtccctgtgcagaaactgtcattgcactttctgctgaaatggcagtttcttctcagcaaggtgagattatggaatccagaatcttttttcaggggtcacatgcccatttccccacttgcatgaatgtcgacactgcagccacagttttggccgtaaatgtgaatttggcaagtaaccactgttcccagggaaatgtcccaatcagaagaagattatctgggacactgatactgacagggagatgggacattctgagggacccggaggcagggtgccacctcctcaacttccctgagggctgcctagaatctgtttcctctcactctgaattattcttcctcttatggctgaccaaaaacatggaacctcacaaagtccactgtaacagctttatatttgtgaagtgaagaacatgaagacagtttcaagcaaagttattgagtggacactttgtgttttttttgagaagtctcactctttcacccaggctggagtgcagtggcacgatctcggctcactgcaactccacctcccgggttcacgccattctcttgcctcagcctcctgagtagctgggaccacaagcgcccaccacgtcagcttaatttttttgttttgtttcttgagacagagtcttgctctcttgcccaggttggagtgccgtgtcgcaatctcagctcactgcaacttctacctcctggattcaagcacttctccttgcctcagccacctctttagctgggattacaggtgcgtgccaccacacccagctaatttttgtatttttagcagagaccaggtttcaccatgttggtcaggctggtctcaaactcctgacctcgtgatccacccacctcggcctcccaaagtgctggaattacaggcgtgagccactgcacctggcctgtattcttttctttagtagagacggggttttactgtatttgccaggatggtctcgatctccagacctcgtgatccgcccgccttagcctcccaaagtgctgggattataggcgtgagccaacacgccctggccacttcttgtctttgcaacattttttagatatgtatttgtgttttttggggagcttaatttgctaatggaatctctgttattttcctaacatgcttggtggatacaagagttaagacttcctgtcccgtttagtgtaacaaaagaaagttaagaaatgtggataaaagattgtaagttagaaatggcaagataatcagctatatgaagaatcttggccaggtgtggtggctgaggcctgtaatcccaccactttgggaggctgaggtgggcggatcacaaggtcaggagttcaagaccaccctggacaatattgtgaattcctgtctctactaaaaatacaaaaattagtcgggcatggtggcgggtgcctgtagtcccagctactcgggaggctgaggccagagaatcggttgaacctgggaggtggaaggtgcactgagccaatatcacaccagtgcactccaacctggtgacagagagacacatcatctcaaaa

SEQ ID NO: 369519 - DNA, 2608 bp, Homo sapiens
acgtatggtgcagtacattgattgaagtaacatgagagagaaggggtgggtgtagcaaaaacattctcaaggccaagtcatcagcccttacccttaggagggggcagtgattaagaggtggtatgagagcctcgtttctcatttctataagtgctggtaaaggacctgaccccacttccttacctactgcctgcccaggtaactgatgcctacagcatcacaggaattgccaaaatgcagaaaacaaatcctaaattgctctaattccataacacaaaggctggtttttggcttgaaataatcaggcacatatatcatgttctgtcacccagggtggagtgcagtggtgtgatctcggctcactacaaaccccgcctcctgggttcacgccattctccggcctcagcctcccgagtagctgggactacaggtgcccaccaccatgcccggctaattttttgtatttttagtagagacagggtttcaccatgttaaccagcatagtctctatcccctgactgcaagatctgcccgaatcagtgtcccaaagtgctgggattacaggcgtgagccaccgcacccagcccagaagggagtggacctttttatgtcaggacctcagcatggatacctatttgtccacctacttcttgttgctgatggcatttgaccagcaggcccatgaagagacaaaggcaccagtggatgtggtttcaactccgtgttggggaccttgggaggaggatgggcaagggtgggcgtgtgggagaggtgggttgtggtacctcagcagaggggctgcttgtggcttcatctgtcactatcatagcagggcactgtgacctttgaagatgtggctgtgaacttttcccaggaggagtggtgtcttcttagtgaggctcagaggtgcttgtaccgtgatgtgatgctagagaacctggctctcatatcctcgctgggttgttggtgtggatcaaaagatgaggaggcaccttgtaagcagagaatttctgtacaaagagagtctcagagcaggactcctagggcaggtgtttctcctaagaaggctcacccctgtgaaatgtgtggcctcatcttggaggatgtttttcactttgctgaccaccaggaaactcatcacaagcagaagctgaacaggagtggagcatgtggaaaaaacttggatgacactgcataccttcatcagcaccagaagcagcatattggagagaaattctacagaaagagtgtcagagaagcatcgtttgtaaagaaacgtaagctcagggtgtcacaggagccatttgtcttccgcgagtttgggaaggacgttctgcccagttcaggattgtgccaagaagaagctgctgtagagaagacagacagtgaaactatgcatggcccaccctttcaggagggaaaaactaattacagttgtggaaaacgcacaaaagccttcagcaccaaacactcagttattccacaccagaaacttttcactagagatggatgttatgtgtgcagtgattgtggaaaatcctttagcagatatgtcagcttcagtaatcatcagcgagatcacactgcaaaaggaccttatgattgtggagagtgtgggaaatcttatagtcgaaagagcagccttattcaacatcagcgagtccacactggacagacagcttatccctgtgaggagtgcgggaaatcttttagtcagaagggcagccttattagccatcagcttgttcacactggagaagggccttatgagtgtagagaatgtgggaaatcttttggtcaaaagggtaacctcattcaacatcagcaaggtcacactggagagagagcttatcactgtggggaatgtgggaaatcttttcgtcagaagttctgctttattaaccatcagcgtgttcacactggagaaaggccttacaagtgtggagaatgtgggaaatcttttggtcaaaagggcaacctcgttcaccatcagcgaggtcatactggagaaaggccctatgagtgcaaggaatgtgggaaatcatttaggtacagatcccacctcactgaacaccagagacttcacactggggaaagaccttacaattgtagggaatgtgggaaattatttaacaggaagtatcatcttctggttcatgagagagttcacactggagaaaggccatatgcgtgtgaggtatgtgggaaattatttggcaataagcacagcgtgactatacatcagaggattcacactggagaaaggccgtatgaatgcagtgaatgtgggaaatcatttctttccagctctgcgcttcatgttcataaaagagttcattctggacaaaagccttataagtgcagtgaatgtggaaaatccttttctgaatgttccagtctcattaaacacaggagaattcacactggagaaaggccttatgaatgcaccaaatgtggaaaaacatttcagcgaagctctaccctccttcatcatcagagttcacacaggagaaaggccttatgagtgcagtgaatatgggaaatcgtttgctgaagcatcccgtctcgttaaacacaggagagttcatactggagaaaggccttatga

SEQ ID NO: 369520 - DNA, 1894 bp, Homo sapiens
  misc_feature (1813)..(1813): n is a, c, g, or t
  misc_feature (1890)..(1892): n is a, c, g, or t
acgtatggtgcagtacattgattgaagtaacatgagagagaaggggtgggtgtagcaaaaacattctcaaggccaagtcatcagcccttacccttaggagggggcagtgattaagaggtggtatgagagcctcgtttctcatttctataagtgctggtaaaggacctgaccccacttccttacctactgcctgcccaggtaactgatgcctacagcatcacaggaattgccaaaatgcagaaaacaaatcctaaattgctctaattccataacacaaaggctggtttttggcttgaaataatcaggcacatatatcatgttctgtcacccagggtggagtgcagtggtgtgatctcggctcactacaaaccccgcctcctgggttcacgccattctccggcctcagcctcccgagtagctgggactacaggtgcccaccaccatgcccggctaattttttgtatttttagtagagacagggtttcaccatgttaaccagcatagtctctatcccctgactgcaagatctgcccgaatcagtgtcccaaagtgctgggattacaggcgtgagccaccgcacccagcccagaagggagtggacctttttatgtcaggacctcagcatggatacctatttgtccacctacttcttgttgctgatggcatttgaccagcaggcccatgaagagacaaaggcaccagtggatgtggtttcaactccgtgttggggaccttgggaggaggatgggcaagggtgggcgtgtgggagaggtgggttgtggtacctcagcagaggggctgcttgtggcttcatctgtcactatcatagcagggcactgtgacctttgaagatgtggctgtgaacttttcccaggaggagtggtgtcttcttagtgaggctcagaggtgcttgtaccgtgatgtgatgctagagaacctggctctcatatcctcgctgggttgttggtgtggatcaaaagatgaggaggcaccttgtaagcagagaatttctgtacaaagagagtctcagagcaggactcctagggcaggtgtttctcctaagaaggctcacccctgtgaaatgtgtggcctcatcttggaggatgtttttcactttgctgaccaccaggaaactcatcacaagcagaagctgaacaggagtggagcatgtggaaaaaacttggatgacactgcataccttcatcagcaccagaagcagcatattggagagaaattctacagaaagagtgtcagagaagcatcgtttgtaaagaaacgtaagctcagggtgtcacaggagccatttgtcttccgcgagtttgggaaggacgttctgcccagttcaggattgtgccaagaagaagctgctgtagagaagacagacagtgaaactatgcatggcccaccctttcaggagggaaaaactaattacagttgtggaaaacgcacaaaagccttcagcaccaaacactcagttattccacaccagaaacttttcactagagatggatgttatgtgtgcagtgattgtggaaaatcctttagcagatatgtcagcttcagtaatcatcagcgagatcacactgcaaaaggaccttatgattgtggagagtgtgggaaatcttatagtcgaaagagcagccttattcaacatcagcgagtccacactggacagacagcttatccctgtgaggagtgcgggaaatcttttagtcagaagggcagccttattagccatccagtgtggccatgctggtgtagaatgaggttacccttgtgactaaaacatttcccacattccccacacttaaanggtctttctgtagtgtgaactcgctgatgattcctaaggtgtcctttttcattaaaagatttcccacagtcaaaaannnaa

SEQ ID NO: 369521 - DNA, 1244 bp, Homo sapiens
  misc_feature (1131)..(1131): n is a, c, g, or t
  misc_feature (1135)..(1135): n is a, c, g, or t
  misc_feature (1138)..(1139): n is a, c, g, or t
  misc_feature (1147)..(1147): n is a, c, g, or t
  misc_feature (1152)..(1153): n is a, c, g, or t
  misc_feature (1159)..(1160): n is a, c, g, or t
  misc_feature (1171)..(1171): n is a, c, g, or t
  misc_feature (1173)..(1173): n is a, c, g, or t
  misc_feature (1175)..(1176): n is a, c, g, or t
  misc_feature (1179)..(1180): n is a, c, g, or t
  misc_feature (1187)..(1187): n is a, c, g, or t
  misc_feature (1200)..(1200): n is a, c, g, or t
gggagttgaacggaaactacaactcccgagaggctgtgcggccaaagacacacgagaactacggaggcgagagactcgctcagccaactgccgctctcgtaaggctcgggctgcccttgcgctgccgatccgagacgttgctgcattcaggcattcgccgacgacagaccagcgcggggcggggttaggcggagggggcctgattcggattcgcggcagcgtcaggctcgcgggttctcgcgcggagaaggggtgcgagcggcggcggcggcggaggctgccatggacgacgaggaggagacgtaccggctctggaaaatccgcaagaccatcatgcagctgtgccacgaccgtggctatctggtgacccaggacgagcttgaccagaccctggaggagttcaaagcccaatttggggacaagccgagtgaggggcggccgcggcgcacggacctcaccgtgctggtggcccacaacgatgaccccaccgaccagatgtttgtgttctttccagaggagcccaaggtgggcatcaagaccatcaaggtgtactgccagcgcatgcaggaggagaacatcacacgggctctcatcgtggtgcagcagggcatgacaccctccgccaagcagtccctggtcgacatggcccccaagtacatcctggagcagtttctgcagcaggagctgctcatcaacatcacggagcacgagctagtccctgagcacgtcgtcatgaccaaggaggaggtgacagagctgctggcccgatataagctccgagagaaccagctgcccaggatccaggcgggggaccctgtggcgcgctactttgggataaagcgtgggcaggtggtgaagatcatccggcccagtgagacggctggcaggtacatcacctaccggctggtgcagtagctaccgcctgacagcccctagaggcggacacacagcgacccccatccctgcaggacaaacgcccctgccctgccagaatccggcccccacagctctcacggctgctgctcctctggactccccaaggcaggtggcctccacccacgttctcccgtcctggggtgaggcttcctgtggcccagcccgccccattcacctgtggatttgtgcgagagnttcnagnnaggcccgnggagnnccgggnntgtgccggttncnannccnnggccttnggggtgggcggtnccccgttctggggggtcccgttcccggcggggggcccggcgtta

SEQ ID NO: 369522 - DNA, 1007 bp, Homo sapiens
  misc_feature (22)..(22): n is a, c, g, or t
  misc_feature (24)..(25): n is a, c, g, or t
  misc_feature (923)..(923): n is a, c, g, or t
  misc_feature (951)..(951): n is a, c, g, or t
  misc_feature (973)..(973): n is a, c, g, or t
  misc_feature (976)..(977): n is a, c, g, or t
  misc_feature (980)..(980): n is a, c, g, or t
accacccccacccccgacaaancnntacggctaggtacgaggcctgagcggcggcggcggcggaggctgccatggacgacgaggaggagacgtaccggctctggaaaatccgcaagaccatcatgcagctgtgccacgaccgtggctatctggtgacccaggacgagcttgaccagaccctggaggagttcaaagcccaatttggggacaagccgagtgaggggcggccgcggcgcacggacctcaccgtgctggtggcccacaacgatgaccccaccgaccagatgtttgtgttctttccagaggagcccaaggtgggcatcaagaccatcaaggtgtactgccagcgcatgcaggaggagaacatcacacgggctctcatcgtggtgcagcagggcatgacaccctccgccaagcagtccctggtcgacatggcccccaagtacatcctggagcagtttctgcagcaggagctgctcatcaacatcacggagcacgagctagtccctgagcacgtcgtcatgaccaaggaggaggtgacagagctgctggcccgatataagctccgagagaaccagctgcccaggatccaggcgggggaccctgtggcgcgctactttgggataaagcgtgggcaggtggtgaagatcatccggcccagtgagacggctggcaggtacatcacctaccggctggtgcagtagctaccgcctgacagcccctagaggcggacacacagcgacccccatccctgcaggacaaacgcccctgccctgccagaatccggcccccacagctctcacggctgctgctcctctggactccccaaggcaggtggcctccacccacgttctcccgtcctggggtgaggcttcctgtggcccagcccgccccattcacctgtggatttgtgcgagaagctngagggacaggcccgaggaggctctgggnagtgtgcgggttaccagaccgnggnnccntgggttgggtcggtgcccttttcggcc

SEQ ID NO: 369523 - DNA, 864 bp, Homo sapiens
  misc_feature (22)..(22): n is a, c, g, or t
  misc_feature (24)..(25): n is a, c, g, or t
  misc_feature (735)..(735): n is a, c, g, or t
accacccccacccccgacaaancnntacggctaggtacgaggcctgagcggcggcggcggcggaggctgccatggacgacgaggaggagacgtaccggctctggaaaatccgcaagaccatcatgcagctgtgccacgaccgtggctatctggtgacccaggacgagcttgaccagaccctggaggagttcaaagcccaatttggggacaagccgagtgaggggcggccgcggcgcacggacctcaccgtgctggtggcccacaacgatgaccccaccgaccagatgtttgtgttctttccagaggagcccaaggtgggcatcaagaccatcaaggtgtactgccagcgcatgcaggaggagaacatcacacgggctctcatcgtggtgcagcagggcatgacaccctccgccaagcagtccctggtcgacatggcccccaagtacatcctggagcagtttctgcagcaggagctgctcatcaacatcacggagcacgagctagtccctgagcacgtcgtcatgaccaaggaggaggtgacagagctgctggcccgatataagctccgagagaaccagctgcccaggatccaggcgggggaccctgtggcgcgctactttgggataaagcgtgggcaggtggtgaagatcatccggcccagtgagacggctggcaggtacatcacctaccggctggtgcagtagctaccgcctgacagccctagaggcggacccngggacccatcctgggaaaggcctgcctgcagatcggcccaggtctcccggtgtgcttggtcccaggaggggctcacccgtttcccctgggggggccttgggcccccgcaaccttgggtggggggagcca

SEQ ID NO: 369524 - DNA, 350 bp, Homo sapiens
cccccaatcactcagtgagttaactagaacctgtcaattttgccttgtaaacttctttcaaataaaaaccacatccatatttccatccttgttcaaatgcacccttagttcaaatgtgtattatctcttgactggactattaaactaggcttctaacttttcctcgtgccgaattcggcacgagccggcctcggctctttactccattcacagccgtgcacgcgctcaagccaccagggtgcgagatgccagctctggagttctcggttgttgtaggaggttgggtgttttcaaatggtaaagatgttttgagcaaataaatttgcttgatacagaaaccaggccgacta

SEQ ID NO: 369525 - DNA, 3992 bp, Homo sapiens
gggagttgaacggaaactacaactcccgagaggctgtgcggccaaagacacacgagaactacggaggcgagagactcgctcagccaactgccgctctcgtaaggctcgggctgcccttgcgctgccgatccgagacgttgctgcattcaggcattcgccgacgacagaccagcgcggggcggggttaggcggagggggcctgattcggattcgcggcagcgtcaggctcgcgggttctcgcgcggagaaggggtgcgagcggcggcggcggcggaggctgccatggacgacgaggaggagacgtaccggctctggaaaatccgcaagaccatcatgcagctgtgccacgaccgtggctatctggtgacccaggacgagcttgaccagaccctggaggagttcaaagcccaatttggggacaagccgagtgaggggcggccgcggcgcacggacctcaccgtgctggtggcccacaacgatgaccccaccgaccagatgtttgtgttctttccagaggagcccaaggtgggcatcaagaccatcaaggtgtactgccagcgcatgcaggaggagaacatcacacgggctctcatcgtggtgcagcagggcatgacaccctccgccaagcagtccctggtcgacatggcccccaagtacatcctggagcagtttctgcagcaggagctgctcatcaacatcacggagcacgagctagtccctgagcacgtcgtcatgaccaaggaggaggtgacagagctgctggcccgatataagctccgagagaaccagctgcccaggatccaggcgggggaccctgtggcgcgctactttgggataaagcgtgggcaggtggtgaagatcatccggcccagtgagacggctggcaggtacatcacctaccggctggtgcagtagctaccgcctgacagcccctagaggcggacacacagcgacccccatccctgcaggacaaacgcccctgccctgccagaatccggcccccacagctctcacggctgctgctcctctggactccccaaggcaggtggcctccacccacgttctcccgtcctggggtgaggcttcctgtggcccagcccgccccattcacctgtggatttgtgcgagatgcagcctcagaaggaacaaggcccccagagggaggtcacctgggggcagctggtgccgggtcttcacccagaccacgctgggtcccctctgttgggggtttggggtccgggtctcccaccagccactgcttcctcctgggccctcggccttccacccctcgtcttccctccctcgggggccctgatgcgtggcggcccccgcccggcctcggctctttactccattcacagccgtgcacgcgctcaagccaccagggtgcgagatgccagctctggagttctcggttgttgtaggaggttgggtgttttcaaatggtaaagatgttttgagcaaataaatttgcttgatacagaaaccaggccgactaacaaggtttccagcaggtggccttgcctcaccccaagcacacgaggtcagcctggcaggtgtgccctcctcgcgctggcttcaggggtcagtgtctccccaggccctcgccctgccctcccacttcgtgctcctgggtaaggcgtgagcgtgtctgtctcttcccttcccgtgagggtgtggagttgttctctggcttgtgcagctgtggtttgcggccagttcctcttacagacgtttgggatctggctctacttccccgtttgcttactgtctgatttcagaaggcctcgcctgcccaagtttaacctagccacgtggttctctcacagtagctttattaagatgtaattcaccctcgggcggtcggtggtctgtaacgcgcccactgttctgtgcagcagggtccccagatccccaggccgcggactgtgtgtgtgatggggacagtgcttccccttctctccaaatgtacttttttcaaaattgtcttggccaaagcaagccagacccaaagggacaaacactgatgtcactcctaggaggtcactagagtcgtcagagactggaagtaggatgggggttcccgggactggggagttgggtggggatgggggttcccagggctggggaggagggaggggacagagtgtgtcatgtgcacagttttagtttgggaagatgagaaaattctggaggtggccgggcgcggtggctcacgcctgtaatcccagcactttgggaggccgaggtgggcggatcacctgaggtcgggagttcgagaccagcctgaccaacatggcaaaatcccatcactgcaaaaaatacaaaaattacctgggcgtggtggtgcatgcctgtaatcccagctacttgggagctaaggcaggagaatcacttgaacccaggaagtggaggatcgcttgagctcaggagttaaaagaccagcccgggcaacacagagaaaccccccacctctacaaaaaactttaagattacctgggcacagtggctcacacctgtaatcccaacactttgggaggctgaggcgggaggatcatttgagcccaggaggccgaggctgcagtgagctacgattgtgctcctgtactccagcctgggccacagggtcacaccctgtctcaaaaaaaaaaaaaaatgcagttccacaggcgcttgggccacgttcccagtgcttggtggccatgtggggctgacgtgcgaaaccttagagccgggggatacgtccgtcatcgagaacgttttcctggactgccctgggctgcaggtggacgtgacgaggtcattcgatgcctgaccgtctgcacagcctgtggtgaagaccacccgggctcccacctcgcggggccccgtggcggggggttcccttcctcacacatccctcccctagggggaggcccagggccacgccacggggctctctctgtcccctccctggccccttcttctaagcttgcagctgccacagaaaatcttctaagcttgcagctgccacagaaaacacccgattaaaaactttttatttcagcaaaataaacgtgcctgtgaaagaaccacacggtggcttccgagagaccccactgtgtacctgagccccaggtggccacacctggtgttctggaaaagggagtccagggccagtattcaggccctgctgtactgcaccctggaaactgcaccaaaccccagctccgcccccatccacggctcccagaatggtttctggagtccctgcaacagacctgtgaggagagggcagggcagggcctgcctcctgcgtccccgtgatgacctgggggatgcactgggcagggacagcttcctccatccacacagccctgtgggcaccaacaaggccactgtgacttcacacgacagcagtgttccccagctcagctgagccggggtgcaggggacagcacagggcacagtcctgtgccgcaaggccctcgtgctcctggaagcctctgggaggaggcgcccgctggtgggacgtcgaagtccaggcgctctcggcagcgaccccaggacggcgcacctaagctatgccgtggtgcaggggacgtgctggagggacaggagcaggcaagagagaagccacctgtggtcccagccccaccccagctcacacgaattccggctgcctttccctgcaggagcccagcgtcatccgcccgccacggagcctcatggggggcagtggggcctgcagcacgttgttggactggttggtgttgaatcctgagagctgctgggccgggccgtcctcgtccccgtccccgtcctcccgggctgtggcctccagctgctcctcactgccgctgtggctgccagaagccacctctaggctggcctcgctctgctgctgctccaggaagctgaggtggcccagggcactggcctccgatgaggacagcagctcggaggcctcctctaggtccgagtccgaatcgttggacacaactcgggattct

SEQ ID NO: 369526 - DNA, 1287 bp, Homo sapiens
  misc_feature (22)..(22): n is a, c, g, or t
  misc_feature (24)..(25): n is a, c, g, or t
accacccccacccccgacaaancnntacggctaggtacgaggcctgagcggcggcggcggcggaggctgccatggacgacgaggaggagacgtaccggctctggaaaatccgcaagaccatcatgcagctgtgccacgaccgtggctatctggtgacccaggacgagcttgaccagaccctggaggagttcaaagcccaatttggggacaagccgagtgaggggcggccgcggcgcacggacctcaccgtgctggtggcccacaacgatgaccccaccgaccagatgtttgtgttctttccagaggagcccaaggtgggcatcaagaccatcaaggtgtactgccagcgcatgcaggaggagaacatcacacgggctctcatcgtggtgcagcagggcatgacaccctccgccaagcagtccctggtcgacatggcccccaagtacatcctggagcagtttctgcagcaggagctgctcatcaacatcacggagcacgagctagtccctgagcacgtcgtcatgaccaaggaggaggtgacagagctgctggcccgatataagctccgagagaaccagctgcccaggatccaggcgggggaccctgtggcgcgctactttgggataaagcgtgggcaggtggtgaagatcatccggcccagtgagacggctggcaggtacatcacctaccggctggtgcagtagctaccgcctgacagcccctagaggcggacacacagcgacccccatccctgcaggacaaacgcccctgccctgccagaatccggcccccacagctctcacggctgctgctcctctggactccccaaggcaggtggcctccacccacgttctcccgtcctggggtgaggcttcctgtggcccagcccgccccattcacctgtggatttgtgcgagatgcagcctcagaaggaacaaggcccccagagggaggtcacctgggggcagctggtgccgggtcttcacccagaccacgctgggtcccctctgttgggggtttggggtccgggtctcccaccagccactgcttcctcctgggccctcggccttccacccctcgtcttccctccctcgggggccctgatgcgtggcggcccccgcccggcctcggctctttactccattcacagccgtgcacgcgctcaagccaccagggtgcgagatgccagctctggagttctcggttgttgtaggaggttgggtgttttcaaatggtaaagatgttttgagcaaataaatttgcttgatacagaaaccaggccgacta

SEQ ID NO: 369527 - DNA, 1298 bp, Homo sapiens
  misc_feature (1)..(2): n is a, c, g, or t
  misc_feature (9)..(9): n is a, c, g, or t
  misc_feature (11)..(11): n is a, c, g, or t
  misc_feature (21)..(21): n is a, c, g, or t
  misc_feature (23)..(23): n is a, c, g, or t
  misc_feature (38)..(38): n is a, c, g, or t
nngtcaccngnggtgccgccngnctagaactagtgganccccggcctgcaggaattgagcggcggcggcggcggaggctgccatggacgacgaggaggagacgtaccggctctggaaaatccgcaagaccatcatgcagctgtgccacgaccgtggctatctggtgacccaggacgagcttgaccagaccctggaggagttcaaagcccaatttggggacaagccgagtgaggggcggccgcggcgcacggacctcaccgtgctggtggcccacaacgatgaccccaccgaccagatgtttgtgttctttccagaggagcccaaggtgggcatcaagaccatcaaggtgtactgccagcgcatgcaggaggagaacatcacacgggctctcatcgtggtgcagcagggcatgacaccctccgccaagcagtccctggtcgacatggcccccaagtacatcctggagcagtttctgcagcaggagctgctcatcaacatcacggagcacgagctagtccctgagcacgtcgtcatgaccaaggaggaggtgacagagctgctggcccgatataagctccgagagaaccagctgcccaggatccaggcgggggaccctgtggcgcgctactttgggataaagcgtgggcaggtggtgaagatcatccggcccagtgagacggctggcaggtacatcacctaccggctggtgcagtagctaccgcctgacagcccctagaggcggacacacagcgacccccatccctgcaggacaaacgcccctgccctgccagaatccggcccccacagctctcacggctgctgctcctctggactccccaaggcaggtggcctccacccacgttctcccgtcctggggtgaggcttcctgtggcccagcccgccccattcacctgtggatttgtgcgagatgcagcctcagaaggaacaaggcccccagagggaggtcacctgggggcagctggtgccgggtcttcacccagaccacgctgggtcccctctgttgggggtttggggtccgggtctcccaccagccactgcttcctcctgggccctcggccttccacccctcgtcttccctccctcgggggccctgatgcgtggcggcccccgcccggcctcggctctttactccattcacagccgtgcacgcgctcaagccaccagggtgcgagatgccagctctggagttctcggttgttgtaggaggttgggtgttttcaaatggtaaagatgttttgagcaaataaatttgcttgatacagaaaccaggccgacta

SEQ ID NO: 369528 - DNA, 3940 bp, Homo sapiens
gggagttgaacggaaactacaactcccgagaggctgtgcggccaaagacacacgagaactacggaggcgagagactcgctcagccaactgccgctctcgtaaggctcgggctgcccttgcgctgccgatccgagacgttgctgcattcaggcattcgccgacgacagaccagcgcggggcggggttaggcggagggggcctgattcggattcgcggcagcgtcaggctcgcgggttctcgcgcggagaaggggtgcgagcggcggcggcggcggaggctgccatggacgacgaggaggagacgtaccggctctggaaaatccgcaagaccatcatgcagctgtgccacgaccgtggctatctggtgacccaggacgagcttgaccagaccctggaggagttcaaagcccaatttggggacaagccgagtgaggggcggccgcggcgcacggacctcaccgtgctggtggcccacaacgatgaccccaccgaccagatgtttgtgttctttccagaggagcccaaggtgggcatcaagaccatcaaggtgtactgccagcgcatgcaggaggagaacatcacacgggctctcatcgtggtgcagcagggcatgacaccctccgccaagcagtccctggtcgacatggcccccaagtacatcctggagcagtttctgcagcaggagctgctcatcaacatcacggagcacgagctagtccctgagcacgtcgtcatgaccaaggaggaggtgacagagctgctggcccgatataagctccgagagaaccagctgcccaggatccaggcgggggaccctgtggcgcgctactttgggataaagcgtgggcaggtggtgaagatcatccggcccagtgagacggctggcaggtacatcacctaccggctggtgcagtagctaccgcctgacagcccctagaggcggacacacagcgacccccatccctgcaggacaaacgcccctgccctgccagaatccggcccccacagctctcacggctgctgctcctctggactccccaaggcaggtggcctccacccacgttctcccgtcctggggtgaggcttcctgtggcccagcccgccccattcacctgtggatttgtgcgagatgcagcctcagaaggaacaaggcccccagagggaggtcacctgggggcagctggtgccgggtcttcacccagaccacgctgggtcccctctgttgggggtttggggtccgggtctcccaccagccactgcttcctcctgggccctcggccttccacccctcgtcttccctccctcgggggccctgatgcgtggcggcccccgcccggcctcggctctttactccattcacagccgtgcacgcgctcaagccaccagggtgcgagatgccagctctggagttctcggttgttgtaggaggttgggtgttttcaaatggtaaagatgttttgagcaaataaatttgcttgatacagaaaccaggccgactaacaaggtttccagcaggtggccttgcctcaccccaagcacacgaggtcagcctggcaggtgtgccctcctcgcgctggcttcaggggtcagtgtctccccaggccctcgccctgccctcccacttcgtgctcctgggtaaggcgtgagcgtgtctgtctcttcccttcccgtgagggtgtggagttgttctctggcttgtgcagctgtggtttgcggccagttcctcttacagacgtttgggatctggctctacttccccgtttgcttactgtctgatttcagaaggcctcgcctgcccaagtttaacctagccacgtggttctctcacagtagctttattaagatgtaattcaccctcgggcggtcggtggtctgtaacgcgcccactgttctgtgcagcagggtccccagatccccaggccgcggactgtgtgtgtgatggggacagtgcttccccttctctccaaatgtacttttttcaaaattgtcttggccaaagcaagccagacccaaagggacaaacactgatgtcactcctaggaggtcactagagtcgtcagagactggaagtaggatgggggttcccgggactggggagttgggtggggatgggggttcccagggctggggaggagggaggggacagagtgtgtcatgtgcacagttttagtttgggaagatgagaaaattctggaggtggccgggcgcggtggctcacgcctgtaatcccagcactttgggaggccgaggtgggcggatcacctgaggtcgggagttcgagaccagcctgaccaacatggcaaaatcccatcactgcaaaaaatacaaaaattacctgggcgtggtggtgcatgcctgtaatcccagctacttgggagctaaggcaggagaatcacttgaacccaggaagtggaggatcgcttgagctcaggagttaaaagaccagcccgggcaacacagagaaaccccccacctctacaaaaaactttaagattacctgggcacagtggctcacacctgtaatcccaacactttgggaggctgaggcgggaggatcatttgagcccaggaggccgaggctgcagtgagctacgattgtgctcctgtactccagcctgggccacagggtcacaccctgtctcaaaaaaaaaaaaaaatgcagttccacaggcgcttgggccacgttcccagtgcttggtggccatgtggggctgacgtgcgaaaccttagagccgggggatacgtccgtcatcgagaacgttttcctggactgccctgggctgcaggtggacgtgacgaggtcattcgatgcctgaccgtctgcacagcctgtggtgaagaccacccgggctcccacctcgcggggccccgtggcggggggttcccttcctcacacatccctcccctagggggaggcccagggccacgccacggggctctctctgtcccctccctggccccttcttctaagcttgcagctgccacagaaaatcttctaagcttgcagctgccacagaaaacacccgattaaaaactttttatttcagcaaaataaacgtgcctgtgaaagaaccacacggtggcttccgagagaccccactgtgtacctgagccccaggtggccacacctggtgttctggaaaagggagtccagggccagtattcaggccctgctgtactgcaccctggaaactgcaccaaaccccagctccgcccccatccacggctcccagaatggtttctggagtccctgcaacagacctgtgaggagagggcaggggacagcttcctccatccacacagccctgtgggcaccaacaaggccactgtgacttcacacgacagcagtgttccccagctcagctgagccggggtgcaggggacagcacagggcacagtcctgtgccgcaaggccctcgtgctcctggaagcctctgggaggaggcgcccgctggtgggacgtcgaagtccaggcgctctcggcagcgaccccaggacggcgcacctaagctatgccgtggtgcaggggacgtgctggagggacaggagcaggcaagagagaagccacctgtggtcccagccccaccccagctcacacgaattccggctgcctttccctgcaggagcccagcgtcatccgcccgccacggagcctcatggggggcagtggggcctgcagcacgttgttggactggttggtgttgaatcctgagagctgctgggccgggccgtcctcgtccccgtccccgtcctcccgggctgtggcctccagctgctcctcactgccgctgtggctgccagaagccacctctaggctggcctcgctctgctgctgctccaggaagctgaggtggcccagggcactggcctccgatgaggacagcagctcggaggcctcctctaggtccgagtccgaatcgttggacacaactcgggattct

SEQ ID NO: 369529 - DNA, 1348 bp, Homo sapiens
  misc_feature (1317)..(1317): n is a, c, g, or t
gggagttgaacggaaactacaactcccgagaggctgtgcggccaaagacacacgagaactacggaggcgagagactcgctcagccaactgccgctctcgtaaggctcgggctgcccttgcgctgccgatccgagacgttgctgcattcaggcattcgccgacgacagaccagcgcggggcggggttaggcggagggggcctgattcggattcgcggcagcgtcaggctcgcgggttctcgcgcggagaaggggtgcgagcggcggcggcggcggaggctgccatggacgacgaggaggagacgtaccggctctggaaaatccgcaagaccatcatgcagctgtgccacgaccgtggctatctggtgacccaggacgagcttgaccagaccctggaggagttcaaagcccaatttggggacaagccgagtgaggggcggccgcggcgcacggacctcaccgtgctggtggcccacaacgatgaccccaccgaccagatgtttgtgttctttccagaggagcccaaggtgggcatcaagaccatcaaggtgtactgccagcgcatgcaggaggagaacatcacacgggctctcatcgtggtgcagcagggcatgacaccctccgccaagcagtccctggtcgacatggcccccaagtacatcctggagcagtttctgcagcaggagctgctcatcaacatcacggagcacgagctagtccctgagcacgtcgtcatgaccaaggaggaggtgacagagctgctggcccgatataagctccgagagaaccagctgcccaggatccaggcgggggaccctgtggcgcgctactttgggataaagcgtgggcaggtggtgaagatcatccggcccagtgagacggctggcaggtacatcacctaccggctggtgcagtagctaccgcctgacagcccctagaggcggacacacagcgacccccatccctgcaggacaaacgcccctgccctgccagaatccggcccccacagctctcacggctgctgctcctctggactccccaaggcaggtggcctccacccacgttctcccgtcctggggtgaggcttcctgtggcccagcccgccccattcacctgtggatttgtgcgagatgcagcctcagaaggaacaaggcccccagagggaggtcacctgggggcagctggtgccgggtcttcacccagaccacgctgggtcccctctgttgggggtttggggtccgggtctcccaccagccactgcttcctcctgggccctcggccttccacccctcgtcttccctccctcgggggccagctgnaggggagtcgtataactaccgcagagcagtt

SEQ ID NO: 369530 - DNA, 1218 bp, Homo sapiens
  misc_feature (1134)..(1134): n is a, c, g, or t
  misc_feature (1162)..(1162): n is a, c, g, or t
  misc_feature (1184)..(1184): n is a, c, g, or t
  misc_feature (1187)..(1188): n is a, c, g, or t
  misc_feature (1191)..(1191): n is a, c, g, or t
gggagttgaacggaaactacaactcccgagaggctgtgcggccaaagacacacgagaactacggaggcgagagactcgctcagccaactgccgctctcgtaaggctcgggctgcccttgcgctgccgatccgagacgttgctgcattcaggcattcgccgacgacagaccagcgcggggcggggttaggcggagggggcctgattcggattcgcggcagcgtcaggctcgcgggttctcgcgcggagaaggggtgcgagcggcggcggcggcggaggctgccatggacgacgaggaggagacgtaccggctctggaaaatccgcaagaccatcatgcagctgtgccacgaccgtggctatctggtgacccaggacgagcttgaccagaccctggaggagttcaaagcccaatttggggacaagccgagtgaggggcggccgcggcgcacggacctcaccgtgctggtggcccacaacgatgaccccaccgaccagatgtttgtgttctttccagaggagcccaaggtgggcatcaagaccatcaaggtgtactgccagcgcatgcaggaggagaacatcacacgggctctcatcgtggtgcagcagggcatgacaccctccgccaagcagtccctggtcgacatggcccccaagtacatcctggagcagtttctgcagcaggagctgctcatcaacatcacggagcacgagctagtccctgagcacgtcgtcatgaccaaggaggaggtgacagagctgctggcccgatataagctccgagagaaccagctgcccaggatccaggcgggggaccctgtggcgcgctactttgggataaagcgtgggcaggtggtgaagatcatccggcccagtgagacggctggcaggtacatcacctaccggctggtgcagtagctaccgcctgacagcccctagaggcggacacacagcgacccccatccctgcaggacaaacgcccctgccctgccagaatccggcccccacagctctcacggctgctgctcctctggactccccaaggcaggtggcctccacccacgttctcccgtcctggggtgaggcttcctgtggcccagcccgccccattcacctgtggatttgtgcgagaagctngagggacaggcccgaggaggctctgggnagtgtgcgggttaccagaccgnggnnccntgggttgggtcggtgcccttttcggcc

SEQ ID NO: 369531 - DNA, 1246 bp, Homo sapiens
aggtacggattgcgagcgtgcgggtaggcagagagctgcgaggaggagacgtaccggctctggaaaatccgcaagaccatcatgcagctgtgccacgaccgtggctatctggtgacccaggacgagcttgaccagaccctggaggagttcaaagcccaatttggggacaagccgagtgaggggcggccgcggcgcacggacctcaccgtgctggtggcccacaacgatgaccccaccgaccagatgtttgtgttctttccagaggagcccaaggtgggcatcaagaccatcaaggtgtactgccagcgcatgcaggaggagaacatcacacgggctctcatcgtggtgcagcagggcatgacaccctccgccaagcagtccctggtcgacatggcccccaagtacatcctggagcagtttctgcagcaggagctgctcatcaacatcacggagcacgagctagtccctgagcacgtcgtcatgaccaaggaggaggtgacagagctgctggcccgatataagctccgagagaaccagctgcccaggatccaggcgggggaccctgtggcgcgctactttgggataaagcgtgggcaggtggtgaagatcatccggcccagtgagacggctggcaggtacatcacctaccggctggtgcagtagctaccgcctgacagcccctagaggcggacacacagcgacccccatccctgcaggacaaacgcccctgccctgccagaatccggcccccacagctctcacggctgctgctcctctggactccccaaggcaggtggcctccacccacgttctcccgtcctggggtgaggcttcctgtggcccagcccgccccattcacctgtggatttgtgcgagatgcagcctcagaaggaacaaggcccccagagggaggtcacctgggggcagctggtgccgggtcttcacccagaccacgctgggtcccctctgttgggggtttggggtccgggtctcccaccagccactgcttcctcctgggccctcggccttccacccctcgtcttccctccctcgggggccctgatgcgtggcggcccccgcccggcctcggctctttactccattcacagccgtgcacgcgctcaagccaccagggtgcgagatgccagctctggagttctcggttgttgtaggaggttgggtgttttcaaatggtaaagatgttttgagcaaataaatttgcttgatacagaaaccaggccgacta

SEQ ID NO: 369532 - DNA, 1043 bp, Homo sapiens
gaattcactagtgattgtgagctgagatcgcaccgaccagatgtttgtgttctttccagaggagcccaaggtgggcatcaagaccatcaaggtgtactgccagcgcatgcaggaggagaacatcacacgggctctcatcgtggtgcagcagggcatgacaccctccgccaagcagtccctggtcgacatggcccccaagtacatcctggagcagtttctgcagcaggagctgctcatcaacatcacggagcacgagctagtccctgagcacgtcgtcatgaccaaggaggaggtgacagagctgctggcccgatataagctccgagagaaccagctgcccaggatccaggcgggggaccctgtggcgcgctactttgggataaagcgtgggcaggtggtgaagatcatccggcccagtgagacggctggcaggtacatcacctaccggctggtgcagtagctaccgcctgacagcccctagaggcggacacacagcgacccccatccctgcaggacaaacgcccctgccctgccagaatccggcccccacagctctcacggctgctgctcctctggactccccaaggcaggtggcctccacccacgttctcccgtcctggggtgaggcttcctgtggcccagcccgccccattcacctgtggatttgtgcgagatgcagcctcagaaggaacaaggcccccagagggaggtcacctgggggcagctggtgccgggtcttcacccagaccacgctgggtcccctctgttgggggtttggggtccgggtctcccaccagccactgcttcctcctgggccctcggccttccacccctcgtcttccctccctcgggggccctgatgcgtggcggcccccgcccggcctcggctctttactccattcacagccgtgcacgcgctcaagccaccagggtgcgagatgccagctctggagttctcggttgttgtaggaggttgggtgttttcaaatggtaaagatgttttgagcaaataaatttgcttgatacagaaaccaggccgacta

SEQ ID NO: 369533 - DNA, 1075 bp, Homo sapiens
  misc_feature (946)..(946): n is a, c, g, or t
gggagttgaacggaaactacaactcccgagaggctgtgcggccaaagacacacgagaactacggaggcgagagactcgctcagccaactgccgctctcgtaaggctcgggctgcccttgcgctgccgatccgagacgttgctgcattcaggcattcgccgacgacagaccagcgcggggcggggttaggcggagggggcctgattcggattcgcggcagcgtcaggctcgcgggttctcgcgcggagaaggggtgcgagcggcggcggcggcggaggctgccatggacgacgaggaggagacgtaccggctctggaaaatccgcaagaccatcatgcagctgtgccacgaccgtggctatctggtgacccaggacgagcttgaccagaccctggaggagttcaaagcccaatttggggacaagccgagtgaggggcggccgcggcgcacggacctcaccgtgctggtggcccacaacgatgaccccaccgaccagatgtttgtgttctttccagaggagcccaaggtgggcatcaagaccatcaaggtgtactgccagcgcatgcaggaggagaacatcacacgggctctcatcgtggtgcagcagggcatgacaccctccgccaagcagtccctggtcgacatggcccccaagtacatcctggagcagtttctgcagcaggagctgctcatcaacatcacggagcacgagctagtccctgagcacgtcgtcatgaccaaggaggaggtgacagagctgctggcccgatataagctccgagagaaccagctgcccaggatccaggcgggggaccctgtggcgcgctactttgggataaagcgtgggcaggtggtgaagatcatccggcccagtgagacggctggcaggtacatcacctaccggctggtgcagtagctaccgcctgacagccctagaggcggacccngggacccatcctgggaaaggcctgcctgcagatcggcccaggtctcccggtgtgcttggtcccaggaggggctcacccgtttcccctgggggggccttgggcccccgcaaccttgggtggggggagcca

SEQ ID NO: 369534 - DNA, 611 bp, Homo sapiens
  misc_feature (22)..(22): n is a, c, g, or t
  misc_feature (24)..(25): n is a, c, g, or t
accacccccacccccgacaaancnntacggctaggtacgaggcctgagcggcggcggcggcggaggctgccatggacgacgaggaggagacgtaccggctctggaaaatccgcaagaccatcatgcaggtgagccgcgcctggtatctggtgacgcaggtggcctccacccacgttctcccgtcctggggtgaggcttcctgtggcccagcccgccccattcacctgtggatttgtgcgagatgcagcctcagaaggaacaaggcccccagagggaggtcacctgggggcagctggtgccgggtcttcacccagaccacgctgggtcccctctgttgggggtttggggtccgggtctcccaccagccactgcttcctcctgggccctcggccttccacccctcgtcttccctccctcgggggccctgatgcgtggcggcccccgcccggcctcggctctttactccattcacagccgtgcacgcgctcaagccaccagggtgcgagatgccagctctggagttctcggttgttgtaggaggttgggtgttttcaaatggtaaagatgttttgagcaaataaatttgcttgatacagaaaccaggccgacta

SEQ ID NO: 369535 - DNA, 679 bp, Homo sapiens
gggagttgaacggaaactacaactcccgagaggctgtgcggccaaagacacacgagaactacggaggcgagagactcgctcagccaactgccgctctcgtaaggctcgggctgcccttgcgctgccgatccgagacgttgctgcattcaggcattcgccgacgacagaccagcgcggggcggggttaggcggagggggcctgattcggattcgcggcagcgtcaggctcgcgggttctcgcgcggagaaggggtgcgagcggcggcggcggcggaggctgccatggacgacgaggaggagacgtaccggctctggaaaatccgcaagaccatcatgcagctgtgccacgaccgtggctatctggtgacccaggacgagcttgaccagaccctggaggagttcaaagcccaatttggggacaagccgagtgaggggcggccgcggcgcacggacctcaccgtgctggtggcccacaacgatgaccccaccgaccagatgtttgtgttctttccagaggagcccaaggtgggcatcaagaccatcaaggtgtactgccagcgcatgcaggaggagaacatcacacgggctctcatcgtggtgcagcaggaattctcgcgggagcagcaggaattctcgcgggagcagcaggaattctcgcgggagcaggaattctcgcggg

SEQ ID NO: 369536 - DNA, 749 bp, Homo sapiens
gggagttgaacggaaactacaactcccgagaggctgtgcggccaaagacacacgagaactacggaggcgagagactcgctcagccaactgccgctctcgtaaggctcgggctgcccttgcgctgccgatccgagacgttgctgcattcaggcattcgccgacgacagaccagcgcggggcggggttaggcggagggggcctgattcggattcgcggcagcgtcaggctcgcgggttctcgcgcggagaaggggtgcgagcggcggcggcggcggaggctgccatggacgacgaggaggagacgtaccggctctggaaaatccgcaagaccatcatgcagctgtgccacgaccgtggctatctggtgacccaggacgagcttgaccagaccctggaggagttcaaagcccaatttggggacaagccgagtgaggggcggccgcggcgcacggacctcaccgtgctggtggcccacaacgatgaccccaccgaccagatgtttgtgttctttccaggtgagcagcgggtcccgggggagttccggtgaagccaccagagcacctgccgaggagccggtcgctagcacccacccccactcgcctggtgcccagcatttgtctctctgcccagtctgggaggaaaactcccctccccttccttgctgtgggtgatgccgttgatctctgacccctctcatgctcagcttctttctagtttccctctcagtccccttctctcttcctgccaacg

SEQ ID NO: 369537 - DNA, 507 bp, Homo sapiens
gccacacagagcagcacccctgtatggggaagaggtcgccctgccagctctgagggccgcccctggaagcgtgtgatggatggaaacacatccgagtttccacggccacttcactgctggatgaggctctcgatgagcagagaggctggggaggggcgggctgttgaaggctcctgggctggcggtggggttttctgattcacgacgtgggtgtgttgttggggcacacgagtaagccccaggtagcttgaggcaggaaatggggttggggttgtctgggcccctccgggccgtgccttagagccgctctcttccagtccctggtcgacatggcccccaagtacatcctggagcagtttctgcagcaggagctgctcatcaacatcacggagcacgaggtgggcgcgcgccgcggaatcccgcctgcgtggggccggcagagatgcagcgtttgtgggtggccaggaagatgtgggatctggggcccagggcaggtgttcctattag

SEQ ID NO: 369538 - DNA, 1230 bp, Homo sapiens
  misc_feature (930)..(930): n is a, c, g, or t
  misc_feature (944)..(945): n is a, c, g, or t
gggagttgaacggaaactacaactcccgagaggctgtgcggccaaagacacacgagaactacggaggcgagagactcgctcagccaactgccgctctcgtaaggctcgggctgcccttgcgctgccgatccgagacgttgctgcattcaggcattcgccgacgacagaccagcgcggggcggggttaggcggagggggcctgattcggattcgcggcagcgtcaggctcgcgggttctcgcgcggagaaggggtgcgagcggcggcggcggcggaggctgccatggacgacgaggaggagacgtaccggctctggaaaatccgcaagaccatcatgcagctgtgccacgaccgtggctatctggtgacccaggacgagcttgaccagaccctggaggagttcaaagcccaatttggggacaagccgagtgaggggcggccgcggcgcacggacctcaccgtgctggtggcccacaacgatgaccccaccgaccagatgtttgtgttctttccagaggagcccaaggtgggcatcaagaccatcaaggtgtactgccagcgcatgcaggaggagaacatcacacgggctctcatcgtggtgcagcagggcatgacaccctccgccaagcagtccctggtcgacatggcccccaagtacatcctggagcagtttctgcagcaggagctgctcatcaacatcacggagcacgagctagtccctgagcacgtcgtcatgaccaaggaggaggtgacagagctgctggcccgatataagctccgagagaaccagctgcccaggatccaggcgggggaccctgtggcgcgctactttgggataaagcgtgggcaggtggtgaagatcatccggcccagtgagacggctggcaggtacatcacctaccggctggtgcagtagctaccgcctgacagncctagagcggacannggacccatcctgtcggacaaagccctaactgccaaatcggcccaagacataaaggaggagtccttggagcccaaggaggtgcatcacccagaataccgagcatgggagaagcgcacaagagccaaccggccatagcgtatgattcggcgaaaaacacagacaaccgaggaagagaacccatatagcgctgttacaaacaaggggctacactgccaagactgtagttaggagaggggacccagacgagggtaaataacaagagtacgatgcacagagacgcgaact

SEQ ID NO: 369539 - DNA, 1498 bp, Homo sapiens
gggagttgaacggaaactacaactcccgagaggctgtgcggccaaagacacacgagaactacggaggcgagagactcgctcagccaactgccgctctcgtaaggctcgggctgcccttgcgctgccgatccgagacgttgctgcattcaggcattcgccgacgacagaccagcgcggggcggggttaggcggagggggcctgattcggattcgcggcagcgtcaggctcgcgggttctcgcgcggagaaggggtgcgagcggcggcggcggcggaggctgccatggacgacgaggaggagacgtaccggctctggaaaatccgcaagaccatcatgcagctgtgccacgaccgtggctatctggtgacccaggacgagcttgaccagaccctggaggagttcaaagcccaatttggggacaagccgagtgaggggcggccgcggcgcacggacctcaccgtgctggtggcccacaacgatgaccccaccgaccagatgtttgtgttctttccagaggagcccaaggtgggcatcaagaccatcaaggtgtactgccagcgcatgcaggaggagaacatcacacgggctctcatcgtggtgcagcagggcatgacaccctccgccaagcagtccctggtcgacatggcccccaagtacatcctggagcagtttctgcagcaggagctgctcatcaacatcacggagcacgagctagtccctgagcacgtcgtcatgaccaaggaggaggtgacagagctgctggcccgatataagctccgagagaaccagctgcccaggatccaggcgggggaccctgtggcgcgctactttgggataaagcgtgggcaggtggtgaagatcatccggcccagtgagacggctggcaggtacatcacctaccggctggtgcagtagctaccgcctgacagcccctagaggcggacacacagcgacccccatccctgcaggacaaacgcccctgccctgccagaatccggcccccacagctctcacggctgctgctcctctggactccccaaggcaggtggcctccacccacgttctcccgtcctggggtgaggcttcctgtggcccagcccgccccattcacctgtggatttgtgcgagatgcagcctcagaaggaacaaggcccccagagggaggtcacctgggggcagctggtgccgggtcttcacccagaccacgctgggtcccctctgttgggggtttggggtccgggtctcccaccagccactgcttcctcctgggccctcggccttccacccctcgtcttccctccctcgggggccctgatgcgtggcggcccccgcccggcctcggctctttactccattcacagccgtgcacgcgctcaagccaccagggtgcgagatgccagctctggagttctcggttgttgtaggaggttgggtgttttcaaatggtaaagatgttttgagcaaataaatttgcttgatacagaaaccaggccgacta

SEQ ID NO: 369540 - DNA, 2965 bp, Homo sapiens
gggagttgaacggaaactacaactcccgagaggctgtgcggccaaagacacacgagaactacggaggcgagagactcgctcagccaactgccgctctcgtaaggctcgggctgcccttgcgctgccgatccgagacgttgctgcattcaggcattcgccgacgacagaccagcgcggggcggggttaggcggagggggcctgattcggattcgcggcagcgtcaggctcgcgggttctcgcgcggagaaggggtgcgagcggcggcggcggcggaggctgccatggacgacgaggaggagacgtaccggctctggaaaatccgcaagaccatcatgcagctgtgccacgaccgtggctatctggtgacccaggacgagcttgaccagaccctggaggagttcaaagcccaatttggggacaagccgagtgaggggcggccgcggcgcacggacctcaccgtgctggtggcccacaacgatgaccccaccgaccagatgtttgtgttctttccagaggagcccaaggtgggcatcaagaccatcaaggtgtactgccagcgcatgcaggaggagaacatcacacgggctctcatcgtggtgcagcagggcatgacaccctccgccaagcagtccctggtcgacatggcccccaagtacatcctggagcagtttctgcagcaggagctgctcatcaacatcacggagcacgagctagtccctgagcacgtcgtcatgaccaaggaggaggtgacagagctgctggcccgatataagctccgagagaaccagctgcccaggatccaggcgggggaccctgtggcgcgctactttgggataaagcgtgggcaggtggtgaagatcatccggcccagtgagacggctggcaggtacatcacctaccggctggtgcagtagctaccgcctgacagcccctagaggcggacacacagcgacccccatccctgcaggacaaacgcccctgccctgccagaatccggcccccacagctctcacggctgctgctcctctggactccccaaggcaggtggcctccacccacgttctcccgtcctggggtgaggcttcctgtggcccagcccgccccattcacctgtggatttgtgcgagatgcagcctcagaaggaacaaggcccccagagggaggtcacctgggggcagctggtgccgggtcttcacccagaccacgctgggtcccctctgttgggggtttggggtccgggtctcccaccagccactgcttcctcctgggccctcggccttccacccctcgtcttccctccctcgggggccctgatgcgtggcggcccccgcccggcctcggctctttactccattcacagccgtgcacgcgctcaagccaccagggtgcgagatgccagctctggagttctcggttgttgtaggaggttgggtgttttcaaatggtaaagatgttttgagcaaataaatttgcttgatacagaaaccaggccgactaacaaggtttccagcaggtggccttgcctcaccccaagcacacgaggtcagcctggcaggtgtgccctcctcgcgctggcttcaggggtcagtgtctccccaggccctcgccctgccctcccacttcgtgctcctggttccacaggcgcttgggccacgttcccagtgcttggtggccatgtggggctgacgtgcgaaaccttagagccgggggatacgtccgtcatcgagaacgttttcctggactgccctgggctgcaggtggacgtgacgaggtcattcgatgcctgaccgtctgcacagcctgtggtgaagaccacccgggctcccacctcgcggggccccgtggcggggggttcccttcctcacacatccctcccctagggggaggcccagggccacgccacggggctctctctgtcccctccctggccccttcttctaagcttgcagctgccacagaaaatcttctaagcttgcagctgccacagaaaacacccgattaaaaactttttatttcagcaaaataaacgtgcctgtgaaagaaccacacggtggcttccgagagaccccactgtgtacctgagccccaggtggccacacctggtgttctggaaaagggagtccagggccagtattcaggccctgctgtactgcaccctggaaactgcaccaaaccccagctccgcccccatccacggctcccagaatggtttctggagtccctgcaacagacctgtgaggagagggcagggcagggcctgcctcctgcgtccccgtgatgacctgggggatgcactgggcagggacagcttcctccatccacacagccctgtgggcaccaacaaggccactgtgacttcacacgacagcagtgttccccagctcagctgagccggggtgcaggggacagcacagggcacagtcctgtgccgcaaggccctcgtgctcctggaagcctctgggaggaggcgcccgctggtgggacgtcgaagtccaggcgctctcggcagcgaccccaggacggcgcacctaagctatgccgtggtgcaggggacgtgctggagggacaggagcaggcaagagagaagccacctgtggtcccagccccaccccagctcacacgaattccggctgcctttccctgcaggagcccagcgtcatccgcccgccacggagcctcatggggggcagtggggcctgcagcacgttgttggactggttggtgttgaatcctgagagctgctgggccgggccgtcctcgtccccgtccccgtcctcccgggctgtggcctccagctgctcctcactgccgctgtggctgccagaagccacctctaggctggcctcgctctgctgctgctccaggaagctgaggtggcccagggcactggcctccgatgaggacagcagctcggaggcctcctctaggtccgagtccgaatcgttggacacaactcgggattct

SEQ ID NO: 369541 - DNA, 1402 bp, Homo sapiens
gggagttgaacggaaactacaactcccgagaggctgtgcggccaaagacacacgagaactacggaggcgagagactcgctcagccaactgccgctctcgtaaggctcgggctgcccttgcgctgccgatccgagacgttgctgcattcaggcattcgccgacgacagaccagcgcggggcggggttaggcggagggggcctgattcggattcgcggcagcgtcaggctcgcgggttctcgcgcggagaaggggtgcgagcggcggcggcggcggaggctgccatggacgacgaggaggagacgtaccggctctggaaaatccgcaagaccatcatgcagctgtgccacgaccgtggctatctggtgacccaggacgagcttgaccagaccctggaggagttcaaagcccaatttggggacaagccgagtgaggggcggccgcggcgcacggacctcaccgtgctggtggcccacaacgatgaccccaccgaccagatgtttgtgttctttccagaggagcccaaggtgggcatcaagaccatcaaggtgtactgccagcgcatgcaggaggagaacatcacacgggctctcatcgtggtgcagcagggcatgacaccctccgccaagcagtccctggtcgacatggcccccaagtacatcctggagcagtttctgcagcaggagctgctcatcaacatcacggagcacgagctagtccctgagcacgtcgtcatgaccaaggaggaggtgacagagctgctggcccgatataagctccgagagaaccagctgcccaggatccaggcgggggaccctgtggcgcgctactttgggataaagcgtgggcaggtggtgaagatcatccggcccagtgagacggctggcaggtacatcacctaccggctggtgcagtagctaccgcctgacagcccctagaggcggacacacagcgacccccatccctgcaggacaaacgcccctgccctgccagaatccggcccccacagctctcacggctgctgctcctctggactccccaaggcaggtggcctccacccacgttctcccgtcctggggtgaggcttcctgtggcccagcccgccccattcacctgtggatttgtgcgagatgcagcctcagaaggaacaaggcccccagagggaggtcacctgggccctcggccttccacccctcgtcttccctccctcgggggccctgatgcgtggcggcccccgcccggcctcggctctttactccattcacagccgtgcacgcgctcaagccaccagggtgcgagatgccagctctggagttctcggttgttgtaggaggttgggtgttttcaaatggtaaagatgttttgagcaaataaatttgcttgatacagaaaccaggccgacta

SEQ ID NO: 369542 - DNA, 1112 bp, Homo sapiens
  misc_feature (22)..(22): n is a, c, g, or t
  misc_feature (24)..(25): n is a, c, g, or t
accacccccacccccgacaaancnntacggctaggtacgaggcctgagcggcggcggcggcggaggctgccatggacgacgaggaggagacgtaccggctctggaaaatccgcaagaccatcatgcagaggagcccaaggtgggcatcaagaccatcaaggtgtactgccagcgcatgcaggaggagaacatcacacgggctctcatcgtggtgcagcagggcatgacaccctccgccaagcagtccctggtcgacatggcccccaagtacatcctggagcagtttctgcagcaggagctgctcatcaacatcacggagcacgagctagtccctgagcacgtcgtcatgaccaaggaggaggtgacagagctgctggcccgatataagctccgagagaaccagctgcccaggatccaggcgggggaccctgtggcgcgctactttgggataaagcgtgggcaggtggtgaagatcatccggcccagtgagacggctggcaggtacatcacctaccggctggtgcagtagctaccgcctgacagcccctagaggcggacacacagcgacccccatccctgcaggacaaacgcccctgccctgccagaatccggcccccacagctctcacggctgctgctcctctggactccccaaggcaggtggcctccacccacgttctcccgtcctggggtgaggcttcctgtggcccagcccgccccattcacctgtggatttgtgcgagatgcagcctcagaaggaacaaggcccccagagggaggtcacctgggggcagctggtgccgggtcttcacccagaccacgctgggtcccctctgttgggggtttggggtccgggtctcccaccagccactgcttcctcctgggccctcggccttccacccctcgtcttccctccctcgggggccctgatgcgtggcggcccccgcccggcctcggctctttactccattcacagccgtgcacgcgctcaagccaccagggtgcgagatgccagctctggagttctcggttgttgtaggaggttgggtgttttcaaatggtaaagatgttttgagcaaataaatttgcttgatacagaaaccaggccgacta

SEQ ID NO: 369543 - DNA, 1417 bp, Homo sapiens
gggagttgaacggaaactacaactcccgagaggctgtgcggccaaagacacacgagaactacggaggcgagagactcgctcagccaactgccgctctcgtaaggctcgggctgcccttgcgctgccgatccgagacgttgctgcattcaggcattcgccgacgacagaccagcgcggggcggggttaggcggagggggcctgattcggattcgcggcagcgtcaggctcgcgggttctcgcgcggagaaggggtgcgagcggcggcggcggcggaggctgccatggacgacgaggaggagacgtaccggctctggaaaatccgcaagaccatcatgcagctgtgccacgaccgtggctatctggtgacccaggacgagcttgaccagaccctggaggagttcaaagcccaatttggggacaagccgagtgaggggcggccgcggcgcacggacctcaccgtgctggtggcccacaacgatgaccccaccgaccagatgtttgtgttctttccagaggagcccaaggtgggcatcaagaccatcaaggtgtactgccagcgcatgcaggaggagaacatcacacgggctctcatcgtggtgcagcagggcatgacaccctccgccaagcagctagtccctgagcacgtcgtcatgaccaaggaggaggtgacagagctgctggcccgatataagctccgagagaaccagctgcccaggatccaggcgggggaccctgtggcgcgctactttgggataaagcgtgggcaggtggtgaagatcatccggcccagtgagacggctggcaggtacatcacctaccggctggtgcagtagctaccgcctgacagcccctagaggcggacacacagcgacccccatccctgcaggacaaacgcccctgccctgccagaatccggcccccacagctctcacggctgctgctcctctggactccccaaggcaggtggcctccacccacgttctcccgtcctggggtgaggcttcctgtggcccagcccgccccattcacctgtggatttgtgcgagatgcagcctcagaaggaacaaggcccccagagggaggtcacctgggggcagctggtgccgggtcttcacccagaccacgctgggtcccctctgttgggggtttggggtccgggtctcccaccagccactgcttcctcctgggccctcggccttccacccctcgtcttccctccctcgggggccctgatgcgtggcggcccccgcccggcctcggctctttactccattcacagccgtgcacgcgctcaagccaccagggtgcgagatgccagctctggagttctcggttgttgtaggaggttgggtgttttcaaatggtaaagatgttttgagcaaataaatttgcttgatacagaaaccaggccgacta

SEQ ID NO: 369544 - DNA, 3815 bp, Homo sapiens
gggagttgaacggaaactacaactcccgagaggctgtgcggccaaagacacacgagaactacggaggcgagagactcgctcagccaactgccgctctcgtaaggctcgggctgcccttgcgctgccgatccgagacgttgctgcattcaggcattcgccgacgacagaccagcgcggggcggggttaggcggagggggcctgattcggattcgcggcagcgtcaggctcgcgggttctcgcgcggagaaggggtgcgagcggcggcggcggcggaggctgccatggacgacgaggaggagacgtaccggctctggaaaatccgcaagaccatcatgcagctgtgccacgaccgtggctatctggtgacccaggacgagcttgaccagaccctggaggagttcaaagcccaatttggggacaagccgagtgaggggcggccgcggcgcacggacctcaccgtgctggtggcccacaacgatgaccccaccgaccagatgtttgtgttctttccagaggagcccaaggtgggcatcaagaccatcaaggtgtactgccagcgcatgcaggaggagaacatcacacgggctctcatcgtggtgcagcagggcatgacaccctccgccaagcagctagtccctgagcacgtcgtcatgaccaaggaggaggtgacagagctgctggcccgatataagctccgagagaaccagctgcccaggatccaggcgggggaccctgtggcgcgctactttgggataaagcgtgggcaggtggtgaagatcatccggcccagtgagacggctggcaggtacatcacctaccggctggtgcagtagctaccgcctgacagcccctagaggcggacacacagcgacccccatccctgcaggacaaacgcccctgccctgccagaatccggcccccacagctctcacggctgctgctcctctggactccccaaggcaggtggcctccacccacgttctcccgtcctggggtgaggcttcctgtggcccagcccgccccattcacctgtggatttgtgcgagatgcagcctcagaaggaacaaggcccccagagggaggtcacctgggccctcggccttccacccctcgtcttccctccctcgggggccctgatgcgtggcggcccccgcccggcctcggctctttactccattcacagccgtgcacgcgctcaagccaccagggtgcgagatgccagctctggagttctcggttgttgtaggaggttgggtgttttcaaatggtaaagatgttttgagcaaataaatttgcttgatacagaaaccaggccgactaacaaggtttccagcaggtggccttgcctcaccccaagcacacgaggtcagcctggcaggtgtgccctcctcgcgctggcttcaggggtcagtgtctccccaggccctcgccctgccctcccacttcgtgctcctgggtaaggcgtgagcgtgtctgtctcttcccttcccgtgagggtgtggagttgttctctggcttgtgcagctgtggtttgcggccagttcctcttacagacgtttgggatctggctctacttccccgtttgcttactgtctgatttcagaaggcctcgcctgcccaagtttaacctagccacgtggttctctcacagtagctttattaagatgtaattcaccctcgggcggtcggtggtctgtaacgcgcccactgttctgtgcagcagggtccccagatccccaggccgcggactgtgtgtgtgatggggacagtgcttccccttctctccaaatgtacttttttcaaaattgtcttggccaaagcaagccagacccaaagggacaaacactgatgtcactcctaggaggtcactagagtcgtcagagactggaagtaggatgggggttcccgggactggggagttgggtggggatgggggttcccagggctggggaggagggaggggacagagtgtgtcatgtgcacagttttagtttgggaagatgagaaaattctggaggtggccgggcgcggtggctcacgcctgtaatcccagcactttgggaggccgaggtgggcggatcacctgaggtcgggagttcgagaccagcctgaccaacatggcaaaatcccatcactgcaaaaaatacaaaaattacctgggcgtggtggtgcatgcctgtaatcccagctacttgggagctaaggcaggagaatcacttgaacccaggaagtggaggatcgcttgagctcaggagttaaaagaccagcccgggcaacacagagaaaccccccacctctacaaaaaactttaagattacctgggcacagtggctcacacctgtaatcccaacactttgggaggctgaggcgggaggatcatttgagcccaggaggccgaggctgcagtgagctacgattgtgctcctgtactccagcctgggccacagggtcacaccctgtctcaaaaaaaaaaaaaaatgcagttccacaggcgcttgggccacgttcccagtgcttggtggccatgtggggctgacgtgcgaaaccttagagccgggggatacgtccgtcatcgagaacgttttcctggactgccctgggctgcaggtggacgtgacgaggtcattcgatgcctgaccgtctgcacagcctgtggtgaagaccacccgggctcccacctcgcggggccccgtggcggggggttcccttcctcacacatccctcccctagggggaggcccagggccacgccacggggctctctctgtcccctccctggccccttcttctaagcttgcagctgccacagaaaatcttctaagcttgcagctgccacagaaaacacccgattaaaaactttttatttcagcaaaataaacgtgcctgtgaaagaaccacacggtggcttccgagagaccccactgtgtacctgagccccaggtggccacacctggtgttctggaaaagggagtccagggccagtattcaggccctgctgtactgcaccctggaaactgcaccaaaccccagctccgcccccatccacggctcccagaatggtttctggagtccctgcaacagacctgtgaggagagggcagggcagggcctgcctcctgcgtccccgtgatgacctgggggatgcactgggcagggacagcttcctccatccacacagccctgtgggcaccaacaaggccactgtgacttcacacgacagcagtgttccccagctcagctgagccggggtgcaggggacagcacagggcacagtcctgtgccgcaaggccctcgtgctcctggaagcctctgggaggaggcgcccgctggtgggacgtcgaagtccaggcgctctcggcagcgaccccaggacggcgcacctaagctatgccgtggtgcaggggacgtgctggagggacaggagcaggcaagagagaagccacctgtggtcccagccccaccccagctcacacgaattccggctgcctttccctgcaggagcccagcgtcatccgcccgccacggagcctcatggggggcagtggggcctgcagcacgttgttggactggttggtgttgaatcctgagagctgctgggccgggccgtcctcgtccccgtccccgtcctcccgggctgtggcctccagctgctcctcactgccgctgtggctgccagaagccacctctaggctggcctcgctctgctgctgctccaggaagctgaggtggcccagggcactggcctccgatgaggacagcagctcggaggcctcctctaggtccgagtccgaatcgttggacacaactcgggattct

SEQ ID NO: 369545 - DNA, 1124 bp, Homo sapiens
gggagttgaacggaaactacaactcccgagaggctgtgcggccaaagacacacgagaactacggaggcgagagactcgctcagccaactgccgctctcgtaaggctcgggctgcccttgcgctgccgatccgagacgttgctgcattcaggcattcgccgacgacagaccagcgcggggcggggttaggcggagggggcctgattcggattcgcggcagcgtcaggctcgcgggttctcgcgcggagaaggggtgcgagcggcggcggcggcggaggctgccatggacgacgaggaggagacgtaccggctctggaaaatccgcaagaccatcatgcagctgtgccacgaccgtggctatctggtgacccaggacgagcttgaccagaccctggaggagttcaaagcccaatttggggacaagccgagtgaggggcggccgcggcgcacggacctcaccgtgctggtggcccacaacgatgaccccaccgaccagatgtttgtgttctttccagaggagcccaaggtgggcatcaagaccatcaaggtgtactgccagcgcatgcaggaggagaacatcacacgggctctcatcgtggtgcagcagggcatgacaccctccgccaagcagtccctggtcgacatggcccccaagtacatcctggagcagtttctgcagcaggagctgctcatcaacatcacggagcacgagctagtccctgagcacgtcgtcatgaccaaggaggaggtgacagagctgctggcccgatataagctccgagagaaccagctgcccaggatccaggcgggggaccctgtggcgcgctactttgggataaagcgtgggcaggtggtgaaaatccatccggacaagtgagaaagggtggcaggtacatcacatacggtggtgcaggtaggtaccgcatgaccatgccctagaggtggacacacaagtgaaccacatccatgtaggacgaaagccctgtctgctagatacgggaccaaagttctcacgatgtggtctttggaatccaaggagtggctcaccacgtttcaggactgggtaggctcttgtggccaggcagcctacattgattggggcagaggtaaaggacagcccaagag

SEQ ID NO: 369546 - DNA, 1096 bp, Homo sapiens
tcactcacagatctgctccactggtgcaaactgtgttaattggtggttctggtctcacagacttcagatgagcgcagacctcacgtgagtgtcacagttcttaaagaatgtgtgtccagagtgatcagggctgagacaatggagtgcagggggtgggggactcctgactcagcaaggaaggtcctggagggctttctggagtggggagctatctgagctgagacttggagggatgagaagcaggagaggactcctcctcccttaggccgtctctcttcaccgtgtaacaagctgtcatggcatgcttgctcggctctgggtgcccttttgctgaacaatactggggatccagcacggaccagatgagctctggtccctgccctcatccagttgcagtctagagaattagagaattatggagagtgtggcaggtgccctgaagggaagcaacaggatacaagaaaaaatgatggggccaggcacggtggctcacgcctgtaaccccagcaatttggcaggccgaagtgggtggattgcttgagcccaggagttcgagaccagcctgggcaatgtggtgagacccccgtctctacaaaaatgttttaaaaattggttgggcgtggtggcgcatgcctgtatactcagctactagggtggccgacgtgggcttgagcccaggaggtcaaggctgcagtgagctgtgattgtgccactgcactccagcctgggcaacggagagagactctgtctcaaaaataagataaactgaaattaaaaaataggctgggctggccgggcgtggtggctcacgcctgtaatctcagcactttgggaggccgaggcgggtggatcacgaggtcaggagatcgagaccatcttggctaacacggtgaaaccccatctctcctaaaaatacaaaaaattagccaggcgtggtggcgggcgcctgtagtcccagctactcaggaggctgaggcaggagaatggcgtgaacccgggaggcagagtttgcagtgagccgagatcgtgccactgcactccagcctgggcgacagagcgagactctgtctcagaaaaaaaaaaaaaaaaaaaaaaa

SEQ ID NO: 369547 - DNA, 769 bp, Homo sapiens
ccacttcttccacccccgggagtccaggcctccctgtccccacagtccctgagccacaagcctccaccccagctggtcccccacccaggctgcccagtttaacattcctagtcataggaccttgacttctgagaggcctgattgtcatctgtaaataaggggtaggactaaagcactcctcctggaggactgagagatgggctggaccggagcacttgagtctgggatatgtgaccatgctacctttgtctccctgtcctgttccttcccccagccccaaatccagggttttccaaagtgtggttcaagaaccacctgcatctgaatctagaggtactggatacaaccccacgtctgggccgttacccaggacattctacatgagaacgtgggggtggggccctggctgcacctgaactgtcacctggagtcagggtggaaggtggaagaactgggtcttatttccttctccccttgttctttagggtctgtccttctgcagactccgttaccccaccctaaccatcctgcacacccttggagccctctgggccaatgccctgtcccgcaaagggcttctcaggcatctcacctctatgggagggcatttttggcccccagaaccttacacggtgtttatgtggggaagcccctgggaagcagacagtcctagggtgaagctgagaggcagagagaaggggagacagacagagggaaacaccggtgtttccctttgtctaggctggagtgcagtgccacaatcatagct

SEQ ID NO: 369548 - DNA, 942 bp, Homo sapiens
ctgggactacaggtgcgcactatcatacctggctaatttttttttttgagatggagtctcgctctgtcgcccaggctggagtgcagtggcgcgatctcggctcactgcaacctctgcctcccgggttcacgccattcttctgtctcagcctccccagcagctgggactacaggcgcccagcaccacgcccagctaatttttttgtatttttagtagagacgggatttcaccgtgttagtcaggatagtctcgatctcctgacctcgtgatctgcccgcctcggcctcccaaagtgctggaattaaaggcgtgagccaccacacccggccaatttttgtatttttggtagagatggggtttcaccatgttggccaggctggtctcaaacacctgaccttgtgatccgcccacctcggcctcccgaagtgctgggattacaggcatgagccaccgcgcccggccattctttgagttttcatcaaccagtggatacagaagtgtgctgcccattttgcagattagagaattgaggctagtaaataagtcgggacttagttgatgcccttgctctttgagttctgggctctggaggctttggattcaaagccctgctgcaccatttactcatcatgtgactttgggaaggtgaccattctctgagccttacttctcctcctctgcaaaatgggattccagttcctaccttgcaggaccgctgttgtagaatcatacatggagattgctcagtcctgggccaacttggcctacgaggagataccagtaaacgaccttatccgcgggcagggactgctcttggcttctgtctcattctctctggtccagaggaggtgttccataaatattctcagaatgagtgaatggctgaagggagtgaacggaacagtcagtggattaaaaattcattagctcatccattcacaa

SEQ ID NO: 369549 - DNA, 343 bp, Homo sapiens
tttttttttacttcagacatgggacggtctctgtagttacagtggggcattaagtaagggtgtgtgtgttgctggggatctgagaagtcgatctttgagctgagcgctggtgaaggagaaacaagccatggaaggaaaggtgccaagtggtcaggcgagagcctccagggcaaaggccttgggcaggtgggaatcctgatttgttctcaactacgcgaggcagaggctcggaaccgggacctagaggcacacgtccggcagttgcaggagcggatggagttgctgcaggcagagggagccacagacaggtgagtccctcatgtgtccccttccccggaggacc

SEQ ID NO: 369550 - DNA, 6513 bp, Homo sapiens
cggctgcgggcggcagtccggcagtggcggggcccggggggcgcccaagatggcggcgggcggcgcggagggcggctcgggccccggcgccgccatgggggactgcgcggagattaagtcgcaattccgcacgcgcgagggtttctacaagctactcccgggcgacggcgccgctcgcaggtcgggtccggcttccgcccagactccggtgccgcctcagccaccgcagcccccgcccggccctgcctccgcctccggtcccggcgctgcaggccccgcgtcgtccccgccgcccgcaggccccggacccgggcccgccctgcccgccgtgcgcctcagcctcgtgcgcctcggggagccggacagcgccggggccggggagccgcccgccacgcccgcggggctgggctcggggggagaccgcgtctgcttcaacttgggccgtgagctctatttctacccaggctgctgtcgtcgtgggagccaacggtccattgacctcaacaagccaattgacaagcggatctacaagggcacccagcccacctgccacgatttcaaccagttcactgctgccaccgagaccatctcgctgctggtgggcttctcagcgggtcaagtgcagtacctggatctcatcaaaaaggacaccagcaagctgttcaatgaggagcggttgatcgacaagaccaaggtgacatatctgaagtggctgcctgagtcggagagcctgttcctggcatcacacgccagtggccacctgtacctgtacaacgtcagccacccctgcgcctcggccccgccccagtacagcctgctgaagcagggcgagggcttctctgtctatgctgccaagagcaaggcaccccgcaacccgctggccaagtgggcggtgggtgaggggcccctcaacgagttcgccttctcgcccgatggccggcacctggcctgtgtgagccaggatggctgcctgcgcgtcttccacttcgactccatgctcctgcgtgggctcatgaagagctactttgggggcctgctgtgtgtgtgctggagccctgacggccgctacgtggtgacgggtggcgaagatgacctggtcaccgtgtggtccttcaccgagggccgcgtggtggctcgaggccatggccacaagtcctgggtcaacgctgtggcctttgacccctacaccacaagggcagaggaggcggcgacagcagccggtgctgatggggagcggagcggcgaagaggaggaggaggagcccgaggctgcgggcacaggctcggccgggggcgccccgctctctccactgcccaaggctggctccattacttaccgctttggctcggcgggccaggacacgcagttctgcctgtgggacctcactgaagacgtgctctacccgcacccgcccctggcccgcacccgcaccctccctggcacacctggcaccacgccaccggccgccagcagctcgaggggtggcgagcctggcccaggccccctgcctcgctcgctgtcccgctccaacagtctcccgcacccagctggcgggggcaaggcgggcggcccgggtgtggcggcagagcctggcacaccattcagcattggccgcttcgccacgctcacactgcaggagcggcgggaccggggggcagagaaggagcacaagcgctaccacagcctgggcaacatcagccggggtggcagtggcggcagtggcagtggtggggagaagcccagcggccctgttccccgcagccgcctggaccccgccaaggtgctgggcactgcgctgtgcccgcgcatccacgaggtgcccctgctggagccccttgtgtgcaagaagatcgcccaggagcggctcacagtcctcctgttcctggaggactgcatcatcactgcctgccaggagggcctcatctgcacctgggcccggccgggcaaggcgggcatctcctcccaaccaggcaactccccgagtggcacagtggtgtgaagccatggatatcgggcccccccaaccccatgcccccagcctcctagccataaccctccctgctgacctcacagatcaacgtattaacaagactaaccatgatggatggactgctccagtccccccacctgcacaaaatttgggggccccccagactggcccggacacgggcgatgtaatagcccttgtggcctcagccttgtcccccacccactgccaagtacaatgacctcttcctctgaaacatcagtgttaccctcatccctgtccccagcatgtgactggtcactcctggggagagactccccgcccctgccacaagagccccaggtctgcagtgtgcccctcagttgagtgggcagggccgggggtggtccagccctcgcccggcccccaccccagctgcccttgctattgtctgtgcttttgaagagtgttaaattatggaagcccctcaggttcctccctgtcccgcaggacctcttatttatactaaagttccctgttttctcagcgggtctgtccccttcggaggagatgatgtagaggacctgtgtgtgtactctgtggttctaggcagtccgctttccccagaggaggagtgcaggcctgctcccagcccagcgcctcccaccccttttcatagcaggaaaagccggagcccagggagggaacggacctgcgagtcacacaactggtgacccacaccagcggctggagcaggaccctcttggggagaagagcatcctgcccgcagccagggcccctcatcaaagtcctcggtgttttttaaattatcagaactgcccaggaccacgtttcccaggccctgcccagctgggactcctcggtccttgcctcctagtttctcaggcctggccctctcaaggcccaggcaccccaggccggttggaggccccgacttccactctggagaaccgtccaccctggaaagaagagctcagattcctcttggctctcggagccgcagggagtgtgtcttcccgcgccaccctccaccccccgaaatgtttctgtttctaatcccagcctgggcaggaatgtggctccccggccaggggccaaggagctattttggggtctcgtttgcccagggagggcttggctccaccactttcctcccccagcctttgggcagcaggtcacccctgttcaggctctgagggtgccccctcctggtcctgtcctcaccaccccttccccacctcctgggaaaaaaaaaaaaaaaaaaaaaaaagctggtataaagcagagagcctgagggctaaatttaactgtccgagtcggaatccatctctgagtcacccaagaagctgccctggcctcccgtccccttcccaggcctcaacccctttctcccacccagccccaacccccagccctcaccccctagcccccagttctggagcttgtcgggagcaagggggtggttgctactgggtcactcagcctcaattggccctgtttcagcaatgggcaggttcttcttgaaattcatcacacctgtggcttcctctgtgctctacctttttattggggtgacagtgtgacagctgagattctccatgcattccccctactctagcactgaagggttctgaagggccctggaaggagggagcttggggggctggcttgtgaggggttaaggctgggaggcgggaggggggctggaccaaggggtggggagaaggggaggaggcctcggccggccgcagagagaagtggccagagaggcccaggggacagccagggacaggcagacatgcagccagggctccagggcctggacaggggctgccaggccctgtgacaggaggaccccgagcccccggcccggggaggggccatggtgctgcctgtccaacatgtcagccgaggtgcggctgaggcggctccagcagctggtgttggacccgggcttcctggggctggagcccctgctcgaccttctcctgggcgtccaccaggagctgggcgcctccgaactggcccaggacaagtacgtggccgacttcttgcagtgggcggagcccatcgtggtgaggcttaaggaggtccgactgcagagggacgacttcgagattctgaaggtgatcggacgcggggcgttcagcgaggtagcggtagtgaagatgaagcagacgggccaggtgtatgccatgaagatcatgaacaagtgggacatgctgaagaggggcgaggtgtcgtgcttccgtgaggagagggacgtgttggtgaatggggaccggcggtggatcacgcagctgcacttcgccttccaggatgagaactacctgtacctggtcatggagtattacgtgggcggggacctgctgacactgctgagcaagtttggggagcggattccggccgagatggcgcgcttctacctggcggagattgtcatggccatagactcggtgcaccggcttggctacgtgcacagggacatcaaacccgacaacatcctgctggaccgctgtggccacatccgcctggccgacttcggctcttgcctcaagctgcgggcagatggaacggtgcggtcgctggtggctgtgggcaccccagactacctgtcccccgagatcctgcaggctgtgggcggtgggcctgggacaggcagctacgggcccgagtgtgactggtgggcgctgggtgtattcgcctatgaaatgttctatgggcagacgcccttctacgcggattccacggcggagacctatggcaagatcgtccactacaaggagcacctctctctgccgctggtggacgaaggggtccctgaggaggctcgagacttcattcagcggttgctgtgtcccccggagacacggctgggccggggtggagcaggcgacttccggacacatcccttcttctttggcctcgactgggatggtctccgggacagcgtgcccccctttacaccggatttcgaaggtgccaccgacacatgcaacttcgacttggtggaggacgggctcactgccatggtgagcgggggcggggagacactgtcggacattcgggaaggtgcgccgctaggggtccacctgccttttgtgggctactcctactcctgcatggccctcagggacagtgaggtcccaggccccacacccatggaactggaggccgagcagctgcttgagccacacgtgcaagcgcccagcctggagccctcggtgtccccacaggatgaaacagctgaagtggcagttccagcggctgtccctgcggcagaggctgaggccgaggtgacgctgcgggagctccaggaagccctggaggaggaggtgctcacccggcagagcctgagccgggagatggaggccatccgcacggacaaccagaacttcgccagtcaactacgcgaggcagaggctcggaaccgggacctagaggcacacgtccggcagttgcaggagcggatggagttgctgcaggcagagggagccacagctgtcacgggggtccccagtccccgggccacggatccaccttcccatctagatggccccccggccgtggctgtgggccagtgcccgctggtggggccaggccccatgcaccgccgccacctgctgctccctgccagggtccctaggcctggcctatcggaggcgctttccctgctcctgttcgccgttgttctgtctcgtgccgccgccctgggctgcattgggttggtggcccacgccggccaactcaccgcagtctggcgccgcccaggagccgcccgcgctccctgaaccctagaactgtcttcgactccggggccccgttggaagactgagtgcccggggcacggcacagaagccgcgcccaccgcctgccagttcacaaccgctccgagcgtgggtctccgcccagctccagtcctgtgatccgggcccgccccctagcggccggggagggaggggccgggtccgcggccggcgaacggggctcgaagggtccttgtagccgggaatgtgctgctgctgctgctgctgctgctggggggatcacagaccatttctttctttcggccaggctgaggccctgacgtggatgggcaaactgcaggcctgggaaggcagcaagccgggccgtccgtgttccatcctccacgcacccccacctatcgttggttcgcaaagtgcaaagctttcttgtgcatgacgccctgctctggggagcgtctggcgcgatctctgcctgcttactcgggaaatttgcttttgccaaacccgctttttcggggatcccgcgcccccctcctcacttgcgctgctctcggagccccagccggctccgcccgcttcggcggtttggatatttattgacctcgtcctccgactcgctgacaggctacaggacccccaacaaccccaatccacgttttggatgcactgagaccccgacattcctcggtatttattgtctgtccccacctaggacccccacccccgaccctcgcgaataaaaggccctccatctgccca

SEQ ID NO: 369551 - DNA, 5972 bp, Homo sapiens
cggctgcgggcggcagtccggcagtggcggggcccggggggcgcccaagatggcggcgggcggcgcggagggcggctcgggccccggcgccgccatgggggactgcgcggagattaagtcgcaattccgcacgcgcgagggtttctacaagctactcccgggcgacggcgccgctcgcaggtcgggtccggcttccgcccagactccggtgccgcctcagccaccgcagcccccgcccggccctgcctccgcctccggtcccggcgctgcaggccccgcgtcgtccccgccgcccgcaggccccggacccgggcccgccctgcccgccgtgcgcctcagcctcgtgcgcctcggggagccggacagcgccggggccggggagccgcccgccacgcccgcggggctgggctcggggggagaccgcgtctgcttcaacttgggccgtgagctctatttctacccaggctgctgtcgtcgtgggagccaacggtccattgacctcaacaagccaattgacaagcggatctacaagggcacccagcccacctgccacgatttcaaccagttcactgctgccaccgagaccatctcgctgctggtgggcttctcagcgggtcaagtgcagtacctggatctcatcaaaaaggacaccagcaagctgttcaatgaggagcggttgatcgacaagaccaaggtgacatatctgaagtggctgcctgagtcggagagcctgttcctggcatcacacgccagtggccacctgtacctgtacaacgtcagccacccctgcgcctcggccccgccccagtacagcctgctgaagcagggcgagggcttctctgtctatgctgccaagagcaaggcaccccgcaacccgctggccaagtgggcggtgggtgaggggcccctcaacgagttcgccttctcgcccgatggccggcacctggcctgtgtgagccaggatggctgcctgcgcgtcttccacttcgactccatgctcctgcgtgggctcatgaagagctactttgggggcctgctgtgtgtgtgctggagccctgacggccgctacgtggtgacgggtggcgaagatgacctggtcaccgtgtggtccttcaccgagggccgcgtggtggctcgaggccatggccacaagtcctgggtcaacgctgtggcctttgacccctacaccacaagggcagaggaggcggcgacagcagccggtgctgatggggagcggagcggcgaagaggaggaggaggagcccgaggctgcgggcacaggctcggccgggggcgccccgctctctccactgcccaaggctggctccattacttaccgctttggctcggcgggccaggacacgcagttctgcctgtgggacctcactgaagacgtgctctacccgcacccgcccctggcccgcacccgcaccctccctggcacacctggcaccacgccaccggccgccagcagctcgaggggtggcgagcctggcccaggccccctgcctcgctcgctgtcccgctccaacagtctcccgcacccagctggcgggggcaaggcgggcggcccgggtgtggcggcagagcctggcacaccattcagcattggccgcttcgccacgctcacactgcaggagcggcgggaccggggggcagagaaggagcacaagcgctaccacagcctgggcaacatcagccggggtggcagtggcggcagtggcagtggtggggagaagcccagcggccctgttccccgcagccgcctggaccccgccaagagccccaggtctgcagtgtgcccctcagttgagtgggcagggccgggggtggtccagccctcgcccggcccccaccccagctgcccttgctattgtctgtgcttttgaagagtgttaaattatggaagcccctcaggttcctccctgtcccgcaggacctcttatttatactaaagttccctgttttctcagcgggtctgtccccttcggaggagatgatgtagaggacctgtgtgtgtactctgtggttctaggcagtccgctttccccagaggaggagtgcaggcctgctcccagcccagcgcctcccaccccttttcatagcaggaaaagccggagcccagggagggaacggacctgcgagtcacacaactggtgacccacaccagcggctggagcaggaccctcttggggagaagagcatcctgcccgcagccagggcccctcatcaaagtcctcggtgttttttaaattatcagaactgcccaggaccacgtttcccaggccctgcccagctgggactcctcggtccttgcctcctagtttctcaggcctggccctctcaaggcccaggcaccccaggccggttggaggccccgacttccactctggagaaccgtccaccctggaaagaagagctcagattcctcttggctctcggagccgcagggagtgtgtcttcccgcgccaccctccaccccccgaaatgtttctgtttctaatcccagcctgggcaggaatgtggctccccggccaggggccaaggagctattttggggtctcgtttgcccagggagggcttggctccaccactttcctcccccagcctttgggcagcaggtcacccctgttcaggctctgagggtgccccctcctggtcctgtcctcaccaccccttccccacctcctgggaaaaaaaaaaaaaaaaaaaaaaaagctggtataaagcagagagcctgagggctaaatttaactgtccgagtcggaatccatctctgagtcacccaagaagctgccctggcctcccgtccccttcccaggcctcaacccctttctcccacccagccccaacccccagccctcaccccctagcccccagttctggagcttgtcgggagcaagggggtggttgctactgggtcactcagcctcaattggccctgtttcagcaatgggcaggttcttcttgaaattcatcacacctgtggcttcctctgtgctctacctttttattggggtgacagtgtgacagctgagattctccatgcattccccctactctagcactgaagggttctgaagggccctggaaggagggagcttggggggctggcttgtgaggggttaaggctgggaggcgggaggggggctggaccaaggggtggggagaaggggaggaggcctcggccggccgcagagagaagtggccagagaggcccaggggacagccagggacaggcagacatgcagccagggctccagggcctggacaggggctgccaggccctgtgacaggaggaccccgagcccccggcccggggaggggccatggtgctgcctgtccaacatgtcagccgaggtgcggctgaggcggctccagcagctggtgttggacccgggcttcctggggctggagcccctgctcgaccttctcctgggcgtccaccaggagctgggcgcctccgaactggcccaggacaagtacgtggccgacttcttgcagtgggcggagcccatcgtggtgaggcttaaggaggtccgactgcagagggacgacttcgagattctgaaggtgatcggacgcggggcgttcagcgaggtagcggtagtgaagatgaagcagacgggccaggtgtatgccatgaagatcatgaacaagtgggacatgctgaagaggggcgaggtgtcgtgcttccgtgaggagagggacgtgttggtgaatggggaccggcggtggatcacgcagctgcacttcgccttccaggatgagaactacctgtacctggtcatggagtattacgtgggcggggacctgctgacactgctgagcaagtttggggagcggattccggccgagatggcgcgcttctacctggcggagattgtcatggccatagactcggtgcaccggcttggctacgtgcacagggacatcaaacccgacaacatcctgctggaccgctgtggccacatccgcctggccgacttcggctcttgcctcaagctgcgggcagatggaacggtgcggtcgctggtggctgtgggcaccccagactacctgtcccccgagatcctgcaggctgtgggcggtgggcctgggacaggcagctacgggcccgagtgtgactggtgggcgctgggtgtattcgcctatgaaatgttctatgggcagacgcccttctacgcggattccacggcggagacctatggcaagatcgtccactacaaggagcacctctctctgccgctggtggacgaaggggtccctgaggaggctcgagacttcattcagcggttgctgtgtcccccggagacacggctgggccggggtggagcaggcgacttccggacacatcccttcttctttggcctcgactgggatggtctccgggacagcgtgcccccctttacaccggatttcgaaggtgccaccgacacatgcaacttcgacttggtggaggacgggctcactgccatggtgagcgggggcggggagacactgtcggacattcgggaaggtgcgccgctaggggtccacctgccttttgtgggctactcctactcctgcatggccctcagggacagtgaggtcccaggccccacacccatggaactggaggccgagcagctgcttgagccacacgtgcaagcgcccagcctggagccctcggtgtccccacaggatgaaacagctgaagtggcagttccagcggctgtccctgcggcagaggctgaggccgaggtgacgctgcgggagctccaggaagccctggaggaggaggtgctcacccggcagagcctgagccgggagatggaggccatccgcacggacaaccagaacttcgccagtcaactacgcgaggcagaggctcggaaccgggacctagaggcacacgtccggcagttgcaggagcggatggagttgctgcaggcagagggagccacagctgtcacgggggtccccagtccccgggccacggatccaccttcccatctagatggccccccggccgtggctgtgggccagtgcccgctggtggggccaggccccatgcaccgccgccacctgctgctccctgccagggtccctaggcctggcctatcggaggcgctttccctgctcctgttcgccgttgttctgtctcgtgccgccgccctgggctgcattgggttggtggcccacgccggccaactcaccgcagtctggcgccgcccaggagccgcccgcgctccctgaaccctagaactgtcttcgactccggggccccgttggaagactgagtgcccggggcacggcacagaagccgcgcccaccgcctgccagttcacaaccgctccgagcgtgggtctccgcccagctccagtcctgtgatccgggcccgccccctagcggccggggagggaggggccgggtccgcggccggcgaacggggctcgaagggtccttgtagccgggaatgtgctgctgctgctgctgctgctgctggggggatcacagaccatttctttctttcggccaggctgaggccctgacgtggatgggcaaactgcaggcctgggaaggcagcaagccgggccgtccgtgttccatcctccacgcacccccacctatcgttggttcgcaaagtgcaaagctttcttgtgcatgacgccctgctctggggagcgtctggcgcgatctctgcctgcttactcgggaaatttgcttttgccaaacccgctttttcggggatcccgcgcccccctcctcacttgcgctgctctcggagccccagccggctccgcccgcttcggcggtttggatatttattgacctcgtcctccgactcgctgacaggctacaggacccccaacaaccccaatccacgttttggatgcactgagaccccgacattcctcggtatttattgtctgtccccacctaggacccccacccccgaccctcgcgaataaaaggccctccatctgccca

SEQ ID NO: 369552 - DNA, 8655 bp, Homo sapiens
cggctgcgggcggcagtccggcagtggcggggcccggggggcgcccaagatggcggcgggcggcgcggagggcggctcgggccccggcgccgccatgggggactgcgcggagattaagtcgcaattccgcacgcgcgagggtttctacaagctactcccgggcgacggcgccgctcgcaggtcgggtccggcttccgcccagactccggtgccgcctcagccaccgcagcccccgcccggccctgcctccgcctccggtcccggcgctgcaggccccgcgtcgtccccgccgcccgcaggccccggacccgggcccgccctgcccgccgtgcgcctcagcctcgtgcgcctcggggagccggacagcgccggggccggggagccgcccgccacgcccgcggggctgggctcggggggagaccgcgtctgcttcaacttgggccgtgagctctatttctacccaggctgctgtcgtcgtgggagccaacggtccattgacctcaacaagccaattgacaagcggatctacaagggcacccagcccacctgccacgatttcaaccagttcactgctgccaccgagaccatctcgctgctggtgggcttctcagcgggtcaagtgcagtacctggatctcatcaaaaaggacaccagcaagctgttcaatgaggagcggttgatcgacaagaccaaggtgacatatctgaagtggctgcctgagtcggagagcctgttcctggcatcacacgccagtggccacctgtacctgtacaacgtcagccacccctgcgcctcggccccgccccagtacagcctgctgaagcagggcgagggcttctctgtctatgctgccaagagcaaggcaccccgcaacccgctggccaagtgggcggtgggtgaggggcccctcaacgagttcgccttctcgcccgatggccggcacctggcctgtgtgagccaggatggctgcctgcgcgtcttccacttcgactccatgctcctgcgtgggctcatgaagagctactttgggggcctgctgtgtgtgtgctggagccctgacggccgctacgtggtgacgggtggcgaagatgacctggtcaccgtgtggtccttcaccgagggccgcgtggtggctcgaggccatggccacaagtcctgggtcaacgctgtggcctttgacccctacaccacaagggcagaggaggcggcgacagcagccggtgctgatggggagcggagcggcgaagaggaggaggaggagcccgaggctgcgggcacaggctcggccgggggcgccccgctctctccactgcccaaggctggctccattacttaccgctttggctcggcgggccaggacacgcagttctgcctgtgggacctcactgaagacgtgctctacccgcacccgcccctggcccgcacccgcaccctccctggcacacctggcaccacgccaccggccgccagcagctcgaggggtggcgagcctggcccaggccccctgcctcgctcgctgtcccgctccaacagtctcccgcacccagctggcgggggcaaggcgggcggcccgggtgtggcggcagagcctggcacaccattcagcattggccgcttcgccacgctcacactgcaggagcggcgggaccggggggcagagaaggagcacaagcgctaccacagcctgggcaacatcagccggggtggcagtggcggcagtggcagtggtggggagaagcccagcggccctgttccccgcagccgcctggaccccgccaaggtgctgggcactgcgctgtgcccgcgcatccacgaggtgcccctgctggagccccttgtgtgcaagaagatcgcccaggagcggctcacagtcctcctgttcctggaggactgcatcatcactgcctgccaggagggcctcatctgcacctgggcccggccgggcaaggcgttcacagacgaggagaccgaggcccagacaggggaaggaagttggcccaggtcacccagcaagtcagtggtagagggcatctcctcccaaccaggcaactccccgagtggcacagtggtgtgaagccatggatatcgggcccccccaaccccatgcccccagcctcctagccataaccctccctgctgacctcacagatcaacgtattaacaagactaaccatgatggatggactgctccagtccccccacctgcacaaaatttgggggccccccagactggcccggacacgggcgatgtaatagcccttgtggcctcagccttgtcccccacccactgccaagtacaatgacctcttcctctgaaacatcagtgttaccctcatccctgtccccagcatgtgactggtcactcctggggagagactccccgcccctgccacaagagccccaggtctgcagtgtgcccctcagttgagtgggcagggccgggggtggtccagccctcgcccggcccccaccccagctgcccttgctattgtctgtgcttttgaagagtgttaaattatggaagcccctcaggttcctccctgtcccgcaggacctcttatttatactaaagttccctgttttctcagcgggtctgtccccttcggaggagatgatgtagaggacctgtgtgtgtactctgtggttctaggcagtccgctttccccagaggaggagtgcaggcctgctcccagcccagcgcctcccaccccttttcatagcaggaaaagccggagcccagggagggaacggacctgcgagtcacacaactggtgacccacaccagcggctggagcaggaccctcttggggagaagagcatcctgcccgcagccagggcccctcatcaaagtcctcggtgttttttaaattatcagaactgcccaggaccacgtttcccaggccctgcccagctgggactcctcggtccttgcctcctagtttctcaggcctggccctctcaaggcccaggcaccccaggccggttggaggccccgacttccactctggagaaccgtccaccctggaaagaagagctcagattcctcttggctctcggagccgcagggagtgtgtcttcccgcgccaccctccaccccccgaaatgtttctgtttctaatcccagcctgggcaggaatgtggctccccggccaggggccaaggagctattttggggtctcgtttgcccagggagggcttggctccaccactttcctcccccagcctttgggcagcaggtcacccctgttcaggctctgagggtgccccctcctggtcctgtcctcaccaccccttccccacctcctgggaaaaaaaaaaaaaaaaaaaaaaaagctggtataaagcagagagcctgagggctaaatttaactgtccgagtcggaatccatctctgagtcacccaagaagctgccctggcctcccgtccccttcccaggcctcaacccctttctcccacccagccccaacccccagccctcaccccctagcccccagttctggagcttgtcgggagcaagggggtggttgctactgggtcactcagcctcaattggccctgtttcagcaatgggcaggttcttcttgaaattcatcacacctgtggcttcctctgtgctctacctttttattggggtgacagtgtgacagctgagattctccatgcattccccctactctagcactgaagggttctgaagggccctggaaggagggagcttggggggctggcttgtgaggggttaaggctgggaggcgggaggggggctggaccaaggggtggggagaaggggaggaggcctcggccggccgcagagagaagtggccagagaggcccaggggacagccagggacaggcagacatgcagccagggctccagggcctggacaggggctgccaggccctgtgacaggaggaccccgagcccccggcccggggaggggccatggtgctgcctgtccaacatgtcagccgaggtgcggctgaggcggctccagcagctggtgttggacccgggcttcctggggctggagcccctgctcgaccttctcctgggcgtccaccaggagctgggcgcctccgaactggcccaggacaagtacgtggccgacttcttgcagtgggcggagcccatcgtggtgaggcttaaggaggtccgactgcagagggacgacttcgagattctgaaggtgatcggacgcggggcgttcagcgaggtagcggtagtgaagatgaagcagacgggccaggtgtatgccatgaagatcatgaacaagtgggacatgctgaagaggggcgaggtgtcgtgcttccgtgaggagagggacgtgttggtgaatggggaccggcggtggatcacgcagctgcacttcgccttccaggatgagaactacctgtacctggtcatggagtattacgtgggcggggacctgctgacactgctgagcaagtttggggagcggattccggccgagatggcgcgcttctacctggcggagattgtcatggccatagactcggtgcaccggcttggctacgtgcacagggacatcaaacccgacaacatcctgctggaccgctgtggccacatccgcctggccgacttcggctcttgcctcaagctgcgggcagatggaacggtgcggtcgctggtggctgtgggcaccccagactacctgtcccccgagatcctgcaggctgtgggcggtgggcctgggacaggcagctacgggcccgagtgtgactggtgggcgctgggtgtattcgcctatgaaatgttctatgggcagacgcccttctacgcggattccacggcggagacctatggcaagatcgtccactacaaggagcacctctctctgccgctggtggacgaaggggtccctgaggaggctcgagacttcattcagcggttgctgtgtcccccggagacacggctgggccggggtggagcaggcgacttccggacacatcccttcttctttggcctcgactgggatggtctccgggacagcgtgcccccctttacaccggatttcgaaggtgccaccgacacatgcaacttcgacttggtggaggacgggctcactgccatggtgagcgggggcggggagacactgtcggacattcgggaaggtgcgccgctaggggtccacctgccttttgtgggctactcctactcctgcatggccctcagggacagtgaggtcccaggccccacacccatggaactggaggccgagcagctgcttgagccacacgtgcaagcgcccagcctggagccctcggtgtccccacaggatgaaacagctgaagtggcagttccagcggctgtccctgcggcagaggctgaggccgaggtgacgctgcgggagctccaggaagccctggaggaggaggtgctcacccggcagagcctgagccgggagatggaggccatccgcacggacaaccagaacttcgccagtcaactacgcgaggcagaggctcggaaccgggacctagaggcacacgtccggcagttgcaggagcggatggagttgctgcaggcagagggagccacagctgtcacgggggtccccagtccccgggccacggatccaccttcccatctagatggccccccggccgtggctgtgggccagtgcccgctggtggggccaggccccatgcaccgccgccacctgctgctccctgccagggtccctaggcctggcctatcggaggcgctttccctgctcctgttcgccgttgttctgtctcgtgccgccgccctgggctgcattgggttggtggcccacgccggccaactcaccgcagtctggcgccgcccaggagccgcccgcgctccctgaaccctagaactgtcttcgactccggggccccgttggaagactgagtgcccggggcacggcacagaagccgcgcccaccgcctgccagttcacaaccgctccgagcgtgggtctccgcccagctccagtcctgtgatccgggcccgccccctagcggccggggagggaggggccgggtccgcggccggcgaacggggctcgaagggtccttgtagccgggaatgtgctgctgctgctgctgctgctgctggggggatcacagaccatttctttctttcggccaggctgaggccctgacgtggatgggcaaactgcaggcctgggaaggcagcaagccgggccgtccgtgttccatcctccacgcacccccacctatcgttggttcgcaaagtgcaaagctttcttgtgcatgacgccctgctctggggagcgtctggcgcgatctctgcctgcttactcgggaaatttgcttttgccaaacccgctttttcggggatcccgcgcccccctcctcacttgcgctgctctcggagccccagccggctccgcccgcttcggcggtttggatatttattgacctcgtcctccgactcgctgacaggctacaggacccccaacaaccccaatccacgttttggatgcactgagaccccgacattcctcggtatttattgtctgtccccacctaggacccccacccccgaccctcgcgaataaaaggccctccatctgcccaaagctctggactccacagtgtccgcggtttgcgttgtgggccggaggctccgcagcgggccaatccggaggcgtgtggaggcggccgaaggtctgggaggagctagcgggatgcgaagcggccgaatcagggttgggggaggaaaagccacggggcggggctttggcgtccggccaataggagggcgagcgggccacccggaggcaccgcccccgcccagctgtggcccagctgtgccaccgagcgtcgagaagagggggctgggctggcagcgcgcgcggccatcctccttccactgcgcctgcgcacgccacgcgcatccgctcctgggacgcaagctcgagaaaagttgctgcaaactttctagcccgttccccgcccctcctcccggccagacccgccccccctgcggagccgggaattccgaggggcggagcgcaggccgagatggggaatgtgggggcctgcagaggaccctggagacggaggcgtgcagaagctcagtctcggggcggaggcttcgcgcccttagtcctcctggacggcccgttaccttctgcgttgtcccgatggggaaactgaggccctgagccagaagcacacgctggggggaggcagaaagcgcggccagaggcggagggaaaacaaagggagaatcacagacagacgggagggggacggacacacacaaggggacagagacccgagtggagagctggatctcgccttcccggcgtggggcgcagggtcggccagaaagaagatcgagaagagcggggagtgggggcgaaaaggggggacaggtgggggaggaggctggggaaagcccgagggaggaagagagggagggaggaacttcccaaagttgcaaaacatggctaccttgccactgaagccagagacggccatctccgtgcctgagggaggcctcccggtggcccccagccctgctctcccagaggctcacgccctaggcaccctttctgcacagcagccaccccccgccgctgccaccacctccagcaccagcctgcccttctcccctgactcccctggcctcctgcccaacttcccggcgcccccaccagaggggctgatgttgtcacccgcggccgtgcctgtctggtcagcagggctggaactaagcgcaggaacagaggggctgctggaagcggaaaaggggctggggacacaggccccccacaccatgctgaggctgccagaccccgaccctgaggggctgctcctgggggccaccgcagggggtgaggttgacgaggggttggaagctgaggccaaggttctgacccagctccagtcggtgcctgtggaggagcccttggaactgtgacccagtgtggccccgtggcctctcccgacattggtgctgaagacgcagggacaggaatgggaggggggagccccagaaatgcggttgctgaagaccccagtcaccacatccttctgcctgggtggcctctccaagccctggtggtgctgggggttgtatccccggccacctcctgtccaggtctccatccccctttggatgggaggcctctctgttacagccctccccatgctgtgccctgccatatacgtgggggactcagggtcctgactcaggggccctgccccctccacttggtactagctgtaagcggaacaccctgccccagggccggacttccagcccccagagccctctccctgtcactccctgaaacactattaatagctctgccgatagctggtgttgtcacaactgcctggaatccgaaggtggaggacaggcagccccgcgcccctgagactggagaccctccccagtgtggcatttcctgccaggggcggggggtggggcagctgtggggagacgggggtcttccttcaccagctcccctcgactcaagcccttgtcctcattatccggcccagaccaaagattccctcatccctgggggcagccctgccgctgtgtctcctttgtatcctaaatctttatttttctaggacatgttatgcctccattttcaattaaaataaagttatcggattacaccacca

SEQ ID NO: 369553 - DNA, 8852 bp, Homo sapiens
cggctgcgggcggcagtccggcagtggcggggcccggggggcgcccaagatggcggcgggcggcgcggagggcggctcgggccccggcgccgccatgggggactgcgcggagattaagtcgcaattccgcacgcgcgagggtttctacaagctactcccgggcgacggcgccgctcgcaggtcgggtccggcttccgcccagactccggtgccgcctcagccaccgcagcccccgcccggccctgcctccgcctccggtcccggcgctgcaggccccgcgtcgtccccgccgcccgcaggccccggacccgggcccgccctgcccgccgtgcgcctcagcctcgtgcgcctcggggagccggacagcgccggggccggggagccgcccgccacgcccgcggggctgggctcggggggagaccgcgtctgcttcaacttgggccgtgagctctatttctacccaggctgctgtcgtcgtgggagccaacggtccattgacctcaacaagccaattgacaagcggatctacaagggcacccagcccacctgccacgatttcaaccagttcactgctgccaccgagaccatctcgctgctggtgggcttctcagcgggtcaagtgcagtacctggatctcatcaaaaaggacaccagcaagctgttcaatgaggagcggttgatcgacaagaccaaggtgacatatctgaagtggctgcctgagtcggagagcctgttcctggcatcacacgccagtggccacctgtacctgtacaacgtcagccacccctgcgcctcggccccgccccagtacagcctgctgaagcagggcgagggcttctctgtctatgctgccaagagcaaggcaccccgcaacccgctggccaagtgggcggtgggtgaggggcccctcaacgagttcgccttctcgcccgatggccggcacctggcctgtgtgagccaggatggctgcctgcgcgtcttccacttcgactccatgctcctgcgtgggctcatgaagagctactttgggggcctgctgtgtgtgtgctggagccctgacggccgctacgtggtgacgggtggcgaagatgacctggtcaccgtgtggtccttcaccgagggccgcgtggtggctcgaggccatggccacaagtcctgggtcaacgctgtggcctttgacccctacaccacaagggcagaggaggcggcgacagcagccggtgctgatggggagcggagcggcgaagaggaggaggaggagcccgaggctgcgggcacaggctcggccgggggcgccccgctctctccactgcccaaggctggctccattacttaccgctttggctcggcgggccaggacacgcagttctgcctgtgggacctcactgaagacgtgctctacccgcacccgcccctggcccgcacccgcaccctccctggcacacctggcaccacgccaccggccgccagcagctcgaggggtggcgagcctggcccaggccccctgcctcgctcgctgtcccgctccaacagtctcccgcacccagctggcgggggcaaggcgggcggcccgggtgtggcggcagagcctggcacaccattcagcattggccgcttcgccacgctcacactgcaggagcggcgggaccggggggcagagaaggagcacaagcgctaccacagcctgggcaacatcagccggggtggcagtggcggcagtggcagtggtggggagaagcccagcggccctgttccccgcagccgcctggaccccgccaaggtgctgggcactgcgctgtgcccgcgcatccacgaggtgcccctgctggagccccttgtgtgcaagaagatcgcccaggagcggctcacagtcctcctgttcctggaggactgcatcatcactgcctgccaggagggcctcatctgcacctgggcccggccgggcaaggcgttcacagacgaggagaccgaggcccagacaggggaaggaagttggcccaggtcacccagcaagtcagtggtagagggcatctcctcccaaccaggcaactccccgagtggcacagtggtgtgaagccatggatatcgggcccccccaaccccatgcccccagcctcctagccataaccctccctgctgacctcacagatcaacgtattaacaagactaaccatgatggatggactgctccagtccccccacctgcacaaaatttgggggccccccagactggcccggacacgggcgatgtaatagcccttgtggcctcagccttgtcccccacccactgccaagtacaatgacctcttcctctgaaacatcagtgttaccctcatccctgtccccagcatgtgactggtcactcctggggagagactccccgcccctgccacaagagccccaggtctgcagtgtgcccctcagttgagtgggcagggccgggggtggtccagccctcgcccggcccccaccccagctgcccttgctattgtctgtgcttttgaagagtgttaaattatggaagcccctcaggttcctccctgtcccgcaggacctcttatttatactaaagttccctgttttctcagcgggtctgtccccttcggaggagatgatgtagaggacctgtgtgtgtactctgtggttctaggcagtccgctttccccagaggaggagtgcaggcctgctcccagcccagcgcctcccaccccttttcatagcaggaaaagccggagcccagggagggaacggacctgcgagtcacacaactggtgacccacaccagcggctggagcaggaccctcttggggagaagagcatcctgcccgcagccagggcccctcatcaaagtcctcggtgttttttaaattatcagaactgcccaggaccacgtttcccaggccctgcccagctgggactcctcggtccttgcctcctagtttctcaggcctggccctctcaaggcccaggcaccccaggccggttggaggccccgacttccactctggagaaccgtccaccctggaaagaagagctcagattcctcttggctctcggagccgcagggagtgtgtcttcccgcgccaccctccaccccccgaaatgtttctgtttctaatcccagcctgggcaggaatgtggctccccggccaggggccaaggagctattttggggtctcgtttgcccagggagggcttggctccaccactttcctcccccagcctttgggcagcaggtcacccctgttcaggctctgagggtgccccctcctggtcctgtcctcaccaccccttccccacctcctgggaaaaaaaaaaaaaaaaaaaaaaaagctggtataaagcagagagcctgagggctaaatttaactgtccgagtcggaatccatctctgagtcacccaagaagctgccctggcctcccgtccccttcccaggcctcaacccctttctcccacccagccccaacccccagccctcaccccctagcccccagttctggagcttgtcgggagcaagggggtggttgctactgggtcactcagcctcaattggccctgtttcagcaatgggcaggttcttcttgaaattcatcacacctgtggcttcctctgtgctctacctttttattggggtgacagtgtgacagctgagattctccatgcattccccctactctagcactgaagggttctgaagggccctggaaggagggagcttggggggctggcttgtgaggggttaaggctgggaggcgggaggggggctggaccaaggggtggggagaaggggaggaggcctcggccggccgcagagagaagtggccagagaggcccaggggacagccagggacaggcagacatgcagccagggctccagggcctggacaggggctgccaggccctgtgacaggaggaccccgagcccccggcccggggaggggccatggtgctgcctgtccaacatgtcagccgaggtgcggctgaggcggctccagcagctggtgttggacccgggcttcctggggctggagcccctgctcgaccttctcctgggcgtccaccaggagctgggcgcctccgaactggcccaggacaagtacgtggccgacttcttgcagtgggcggagcccatcgtggtgaggcttaaggaggtccgactgcagagggacgacttcgagattctgaaggtgatcggacgcggggcgttcagcgaggtagcggtagtgaagatgaagcagacgggccaggtgtatgccatgaagatcatgaacaagtgggacatgctgaagaggggcgaggtgtcgtgcttccgtgaggagagggacgtgttggtgaatggggaccggcggtggatcacgcagctgcacttcgccttccaggatgagaactacctgtacctggtcatggagtattacgtgggcggggacctgctgacactgctgagcaagtttggggagcggattccggccgagatggcgcgcttctacctggcggagattgtcatggccatagactcggtgcaccggcttggctacgtgcacagggacatcaaacccgacaacatcctgctggaccgctgtggccacatccgcctggccgacttcggctcttgcctcaagctgcgggcagatggaacggtgcggtcgctggtggctgtgggcaccccagactacctgtcccccgagatcctgcaggctgtgggcggtgggcctgggacaggcagctacgggcccgagtgtgactggtgggcgctgggtgtattcgcctatgaaatgttctatgggcagacgcccttctacgcggattccacggcggagacctatggcaagatcgtccactacaaggagcacctctctctgccgctggtggacgaaggggtccctgaggaggctcgagacttcattcagcggttgctgtgtcccccggagacacggctgggccggggtggagcaggcgacttccggacacatcccttcttctttggcctcgactgggatggtctccgggacagcgtgcccccctttacaccggatttcgaaggtgccaccgacacatgcaacttcgacttggtggaggacgggctcactgccatggtgagcgggggcggggagacactgtcggacattcgggaaggtgcgccgctaggggtccacctgccttttgtgggctactcctactcctgcatggccctcagggacagtgaggtcccaggccccacacccatggaactggaggccgagcagctgcttgagccacacgtgcaagcgcccagcctggagccctcggtgtccccacaggatgaaacagctgaagtggcagttccagcggctgtccctgcggcagaggctgaggccgaggtgacgctgcgggagctccaggaagccctggaggaggaggtgctcacccggcagagcctgagccgggagatggaggccatccgcacggacaaccagaacttcgccagtcaactacgcgaggcagaggctcggaaccgggacctagaggcacacgtccggcagttgcaggagcggatggagttgctgcaggcagagggagccacagctgtcacgggggtccccagtccccgggccacggatccaccttcccatctagatggccccccggccgtggctgtgggccagtgcccgctggtggggccaggccccatgcaccgccgccacctgctgctccctgccagggtccctaggcctggcctatcggaggcgctttccctgctcctgttcgccgttgttctgtctcgtgccgccgccctgggctgcattgggttggtggcccacgccggccaactcaccgcagtctggcgccgcccaggagccgcccgcgctccctgaaccctagaactgtcttcgactccggggccccgttggaagactgagtgcccggggcacggcacagaagccgcgcccaccgcctgccagttcacaaccgctccgagcgtgggtctccgcccagctccagtcctgtgatccgggcccgccccctagcggccggggagggaggggccgggtccgcggccggcgaacggggctcgaagggtccttgtagccgggaatgtgctgctgctgctgctgctgctgctggggggatcacagaccatttctttctttcggccaggctgaggccctgacgtggatgggcaaactgcaggcctgggaaggcagcaagccgggccgtccgtgttccatcctccacgcacccccacctatcgttggttcgcaaagtgcaaagctttcttgtgcatgacgccctgctctggggagcgtctggcgcgatctctgcctgcttactcgggaaatttgcttttgccaaacccgctttttcggggatcccgcgcccccctcctcacttgcgctgctctcggagccccagccggctccgcccgcttcggcggtttggatatttattgacctcgtcctccgactcgctgacaggctacaggacccccaacaaccccaatccacgttttggatgcactgagaccccgacattcctcggtatttattgtctgtccccacctaggacccccacccccgaccctcgcgaataaaaggccctccatctgcccaaagctctggactccacagtgtccgcggtttgcgttgtgggccggaggctccgcagcgggccaatccggaggcgtgtggaggcggccgaaggtctgggaggagctagcgggatgcgaagcggccgaatcagggttgggggaggaaaagccacggggcggggctttggcgtccggccaataggagggcgagcgggccacccggaggcaccgcccccgcccagctgtggcccagctgtgccaccgagcgtcgagaagagggggctgggctggcagcgcgcgcggccatcctccttccactgcgcctgcgcacgccacgcgcatccgctcctgggacgcaagctcgagaaaagttgctgcaaactttctagcccgttccccgcccctcctcccggccagacccgccccccctgcggagccgggaattccgaggggcggagcgcaggccgagatggggaatgtgggggcctgcagaggaccctggagacggaggcgtgcagaagctcagtctcggggcggaggcttcgcgcccttagtcctcctggacggcccgttaccttctgcgttgtcccgatggggaaactgaggccctgagccagaagcacacgctggggggaggcagaaagcgcggccagaggcggagggaaaacaaagggagaatcacagacagacgggagggggacggacacacacaaggggacagagacccgagtggagagctggatctcgccttcccggcgtggggcgcagggtcggccagaaagaagatcgagaagagcggggagtgggggcgaaaaggggggacaggtgggggaggaggctggggaaagcccgagggaggaagagagggagggaggaacttcccaaagttgcaaaacatggctaccttgcctgcggagccgagcgcggggccggcggctgggggggaggcggtggcggcggcggcggcgaccgaagaggaggaggaggaagcgcgccagctcttgcagactttgcaggcggccgagggtgaggcggcggcggcggccggggccggggcgggcgcagcggctgcgggagctgagggcccgggatccccgggcgtccccgggtcgccccccgaggccgcttccgaaccgcccacgggcctccgcttctcgcccgagcaggtggcgtgcgtctgcgaggcgctgctccaggcgggccacgccggccgcttgagccgcttcctgggcgcactgcccccggccgagcgcctacgtggcagcgacccggtgttgcgcgcgcgggccctggtggccttccagcggggcgagtacgccgagctctaccggctactcgagagccgccccttccccgccgcccaccacgccttcctgcaggacctctacctgcgcgcgcgctaccatgaggccgagcgggcccgcggccgcgcgcttggcgcagtggacaagtatcgactgcgcaagaagttcccgctgcccaagaccatctgggacggcgaggagacagtctactgcttcaaggagcgctcccgcgcagcgctcaaggcctgctaccgcggcaaccgctaccccacgccggacgagaagcgccgcctggccacactcaccggcctgtcgctcacgcaggtcagcaactggttcaagaaccggcgacagcgcgaccggaccggggccggaggcggcgcgccctgcaagagcgagtctgatgggaatcccacgactgaggacgagtccagccgaagtcctgaggacctggagagaggggcggccccagtgtccgccgaggccgctgcccagggctccatattcctggcagggaccggccctcccgcgccttgcccggcttcctcctccatcctggtgaacgggagcttcctggcagccagcggctccccagcagtgctcctcaacgggggccccgtcatcatcaacggcctggccctgggcgaggcctccagcctgggcccgctgctgctcactgggggcgggggtgcccctccaccgcagcccagccctcagggggccagcgagaccaagacctctctggtcctggaccctcagacaggggaggtgcggctggaggaggctcagtcggaggcccctgagaccaaaggggcccaggtggctgctccgggaccagcccttggagaggaggtcctggggcccctggcccaagtggtgcctggccccccgacggctgccacctttcctctgcccccggggccagtgcctgctgtggctgccccacaagtggtaccgctctccccacccccggggtatccca

SEQ ID NO: 369554 - DNA, 8388 bp, Homo sapiens
cggctgcgggcggcagtccggcagtggcggggcccggggggcgcccaagatggcggcgggcggcgcggagggcggctcgggccccggcgccgccatgggggactgcgcggagattaagtcgcaattccgcacgcgcgagggtttctacaagctactcccgggcgacggcgccgctcgcaggtcgggtccggcttccgcccagactccggtgccgcctcagccaccgcagcccccgcccggccctgcctccgcctccggtcccggcgctgcaggccccgcgtcgtccccgccgcccgcaggccccggacccgggcccgccctgcccgccgtgcgcctcagcctcgtgcgcctcggggagccggacagcgccggggccggggagccgcccgccacgcccgcggggctgggctcggggggagaccgcgtctgcttcaacttgggccgtgagctctatttctacccaggctgctgtcgtcgtgggagccaacggtccattgacctcaacaagccaattgacaagcggatctacaagggcacccagcccacctgccacgatttcaaccagttcactgctgccaccgagaccatctcgctgctggtgggcttctcagcgggtcaagtgcagtacctggatctcatcaaaaaggacaccagcaagctgttcaatgaggagcggttgatcgacaagaccaaggtgacatatctgaagtggctgcctgagtcggagagcctgttcctggcatcacacgccagtggccacctgtacctgtacaacgtcagccacccctgcgcctcggccccgccccagtacagcctgctgaagcagggcgagggcttctctgtctatgctgccaagagcaaggcaccccgcaacccgctggccaagtgggcggtgggtgaggggcccctcaacgagttcgccttctcgcccgatggccggcacctggcctgtgtgagccaggatggctgcctgcgcgtcttccacttcgactccatgctcctgcgtgggctcatgaagagctactttgggggcctgctgtgtgtgtgctggagccctgacggccgctacgtggtgacgggtggcgaagatgacctggtcaccgtgtggtccttcaccgagggccgcgtggtggctcgaggccatggccacaagtcctgggtcaacgctgtggcctttgacccctacaccacaagggcagaggaggcggcgacagcagccggtgctgatggggagcggagcggcgaagaggaggaggaggagcccgaggctgcgggcacaggctcggccgggggcgccccgctctctccactgcccaaggctggctccattacttaccgctttggctcggcgggccaggacacgcagttctgcctgtgggacctcactgaagacgtgctctacccgcacccgcccctggcccgcacccgcaccctccctggcacacctggcaccacgccaccggccgccagcagctcgaggggtggcgagcctggcccaggccccctgcctcgctcgctgtcccgctccaacagtctcccgcacccagctggcgggggcaaggcgggcggcccgggtgtggcggcagagcctggcacaccattcagcattggccgcttcgccacgctcacactgcaggagcggcgggaccggggggcagagaaggagcacaagcgctaccacagcctgggcaacatcagccggggtggcagtggcggcagtggcagtggtggggagaagcccagcggccctgttccccgcagccgcctggaccccgccaaggtgctgggcactgcgctgtgcccgcgcatccacgaggtgcccctgctggagccccttgtgtgcaagaagatcgcccaggagcggctcacagtcctcctgttcctggaggactgcatcatcactgcctgccaggagggcctcatctgcacctgggcccggccgggcaaggcgttcacagacgaggagaccgaggcccagacaggggaaggaagttggcccaggtcacccagcaagtcagtggtagagggcatctcctcccaaccaggcaactccccgagtggcacagtggtgtgaagccatggatatcgggcccccccaaccccatgcccccagcctcctagccataaccctccctgctgacctcacagatcaacgtattaacaagactaaccatgatggatggactgctccagtccccccacctgcacaaaatttgggggccccccagactggcccggacacgggcgatgtaatagcccttgtggcctcagccttgtcccccacccactgccaagtacaatgacctcttcctctgaaacatcagtgttaccctcatccctgtccccagcatgtgactggtcactcctggggagagactccccgcccctgccacaagagccccaggtctgcagtgtgcccctcagttgagtgggcagggccgggggtggtccagccctcgcccggcccccaccccagctgcccttgctattgtctgtgcttttgaagagtgttaaattatggaagcccctcaggttcctccctgtcccgcaggacctcttatttatactaaagttccctgttttctcagcgggtctgtccccttcggaggagatgatgtagaggacctgtgtgtgtactctgtggttctaggcagtccgctttccccagaggaggagtgcaggcctgctcccagcccagcgcctcccaccccttttcatagcaggaaaagccggagcccagggagggaacggacctgcgagtcacacaactggtgacccacaccagcggctggagcaggaccctcttggggagaagagcatcctgcccgcagccagggcccctcatcaaagtcctcggtgttttttaaattatcagaactgcccaggaccacgtttcccaggccctgcccagctgggactcctcggtccttgcctcctagtttctcaggcctggccctctcaaggcccaggcaccccaggccggttggaggccccgacttccactctggagaaccgtccaccctggaaagaagagctcagattcctcttggctctcggagccgcagggagtgtgtcttcccgcgccaccctccaccccccgaaatgtttctgtttctaatcccagcctgggcaggaatgtggctccccggccaggggccaaggagctattttggggtctcgtttgcccagggagggcttggctccaccactttcctcccccagcctttgggcagcaggtcacccctgttcaggctctgagggtgccccctcctggtcctgtcctcaccaccccttccccacctcctgggaaaaaaaaaaaaaaaaaaaaaaaagctggtataaagcagagagcctgagggctaaatttaactgtccgagtcggaatccatctctgagtcacccaagaagctgccctggcctcccgtccccttcccaggcctcaacccctttctcccacccagccccaacccccagccctcaccccctagcccccagttctggagcttgtcgggagcaagggggtggttgctactgggtcactcagcctcaattggccctgtttcagcaatgggcaggttcttcttgaaattcatcacacctgtggcttcctctgtgctctacctttttattggggtgacagtgtgacagctgagattctccatgcattccccctactctagcactgaagggttctgaagggccctggaaggagggagcttggggggctggcttgtgaggggttaaggctgggaggcgggaggggggctggaccaaggggtggggagaaggggaggaggcctcggccggccgcagagagaagtggccagagaggcccaggggacagccagggacaggcagacatgcagccagggctccagggcctggacaggggctgccaggccctgtgacaggaggaccccgagcccccggcccggggaggggccatggtgctgcctgtccaacatgtcagccgaggtgcggctgaggcggctccagcagctggtgttggacccgggcttcctggggctggagcccctgctcgaccttctcctgggcgtccaccaggagctgggcgcctccgaactggcccaggacaagtacgtggccgacttcttgcagtgggcggagcccatcgtggtgaggcttaaggaggtccgactgcagagggacgacttcgagattctgaaggtgatcggacgcggggcgttcagcgaggtagcggtagtgaagatgaagcagacgggccaggtgtatgccatgaagatcatgaacaagtgggacatgctgaagaggggcgaggtgtcgtgcttccgtgaggagagggacgtgttggtgaatggggaccggcggtggatcacgcagctgcacttcgccttccaggatgagaactacctgtacctggtcatggagtattacgtgggcggggacctgctgacactgctgagcaagtttggggagcggattccggccgagatggcgcgcttctacctggcggagattgtcatggccatagactcggtgcaccggcttggctacgtgcacagggacatcaaacccgacaacatcctgctggaccgctgtggccacatccgcctggccgacttcggctcttgcctcaagctgcgggcagatggaacggtgcggtcgctggtggctgtgggcaccccagactacctgtcccccgagatcctgcaggctgtgggcggtgggcctgggacaggcagctacgggcccgagtgtgactggtgggcgctgggtgtattcgcctatgaaatgttctatgggcagacgcccttctacgcggattccacggcggagacctatggcaagatcgtccactacaaggagcacctctctctgccgctggtggacgaaggggtccctgaggaggctcgagacttcattcagcggttgctgtgtcccccggagacacggctgggccggggtggagcaggcgacttccggacacatcccttcttctttggcctcgactgggatggtctccgggacagcgtgcccccctttacaccggatttcgaaggtgccaccgacacatgcaacttcgacttggtggaggacgggctcactgccatggtgagcgggggcggggagacactgtcggacattcgggaaggtgcgccgctaggggtccacctgccttttgtgggctactcctactcctgcatggccctcagggacagtgaggtcccaggccccacacccatggaactggaggccgagcagctgcttgagccacacgtgcaagcgcccagcctggagccctcggtgtccccacaggatgaaacagctgaagtggcagttccagcggctgtccctgcggcagaggctgaggccgaggtgacgctgcgggagctccaggaagccctggaggaggaggtgctcacccggcagagcctgagccgggagatggaggccatccgcacggacaaccagaacttcgccagtcaactacgcgaggcagaggctcggaaccgggacctagaggcacacgtccggcagttgcaggagcggatggagttgctgcaggcagagggagccacagctgtcacgggggtccccagtccccgggccacggatccaccttcccatctagatggccccccggccgtggctgtgggccagtgcccgctggtggggccaggccccatgcaccgccgccacctgctgctccctgccagggtccctaggcctggcctatcggaggcgctttccctgctcctgttcgccgttgttctgtctcgtgccgccgccctgggctgcattgggttggtggcccacgccggccaactcaccgcagtctggcgccgcccaggagccgcccgcgctccctgaaccctagaactgtcttcgactccggggccccgttggaagactgagtgcccggggcacggcacagaagccgcgcccaccgcctgccagttcacaaccgctccgagcgtgggtctccgcccagctccagtcctgtgatccgggcccgccccctagcggccggggagggaggggccgggtccgcggccggcgaacggggctcgaagggtccttgtagccgggaatgtgctgctgctgctgctgctgctgctggggggatcacagaccatttctttctttcggccaggctgaggccctgacgtggatgggcaaactgcaggcctgggaaggcagcaagccgggccgtccgtgttccatcctccacgcacccccacctatcgttggttcgcaaagtgcaaagctttcttgtgcatgacgccctgctctggggagcgtctggcgcgatctctgcctgcttactcgggaaatttgcttttgccaaacccgctttttcggggatcccgcgcccccctcctcacttgcgctgctctcggagccccagccggctccgcccgcttcggcggtttggatatttattgacctcgtcctccgactcgctgacaggctacaggacccccaacaaccccaatccacgttttggatgcactgagaccccgacattcctcggtatttattgtctgtccccacctaggacccccacccccgaccctcgcgaataaaaggccctccatctgcccaaagctctggactccacagtgtccgcggtttgcgttgtgggccggaggctccgcagcgggccaatccggaggcgtgtggaggcggccgaaggtctgggaggagctagcgggatgcgaagcggccgaatcagggttgggggaggaaaagccacggggcggggctttggcgtccggccaataggagggcgagcgggccacccggaggcaccgcccccgcccagctgtggcccagctgtgccaccgagcgtcgagaagagggggctgggctggcagcgcgcgcggccatcctccttccactgcgcctgcgcacgccacgcgcatccgctcctgggacgcaagctcgagaaaagttgctgcaaactttctagcccgttccccgcccctcctcccggccagacccgccccccctgcggagccgggaattccgaggggcggagcgcaggccgagatggggaatgtgggggcctgcagaggaccctggagacggaggcgtgcagaagctcagtctcggggcggaggcttcgcgcccttagtcctcctggacggcccgttaccttctgcgttgtcccgatggggaaactgaggccctgagccagaagcacacgctggggggaggcagaaagcgcggccagaggcggagggaaaacaaagggagaatcacagacagacgggagggggacggacacacacaaggggacagagacccgagtggagagctggatctcgccttcccggcgtggggcgcagggtcggccagaaagaagatcgagaagagcggggagtgggggcgaaaaggggggacaggtgggggaggaggctggggaaagcccgagggaggaagagagggagggaggaacttcccaaagttgcaaaacatggctaccttgcctgcggagccgagcgcggggccggcggctgggggggaggcggtggcggcggcggcggcgaccgaagaggaggaggaggaagcgcgccagctcttgcagactttgcaggcggccgagggtgaggcggcggcggcggccggggccggggcgggcgcagcggctgcgggagctgagggcccgggatccccgggcgtccccgggtcgccccccgaggccgcttccgaaccgcccacgggcctccgcttctcgcccgagcaggtggcgtgcgtctgcgaggcgctgctccaggcgggccacgccggccgcttgagccgcttcctgggcgcactgcccccggccgagcgcctacgtggcagcgacccggtgttgcgcgcgcgggccctggtggccttccagcggggcgagtacgccgagctctaccggctactcgagagccgccccttccccgccgcccaccacgccttcctgcaggacctctacctgcgcgcgcgctaccatgaggccgagcgggcccgcggccgcgcgcttggcgcagtggacaagtatcgactgcgcaagaagttcccgctgcccaagaccatctgggacggcgaggagacagtctactgcttcaaggagcgctcccgcgcagcgctcaaggcctgctaccgcggcaaccgctaccccacgccggacgagaagcgccgcctggccacactcaccggcctgtcgctcacgcaggtcagcaactggttcaagaaccggcgacagcgcgaccggaccggggccggaggcggcgcgccctgcaagaggaaacttcctcctggccaaccctgtgtctggcagccccatcgtgacgggtgtggccctgcagcagggcaagatcatcctcaccgccaccttccccaccagcatgctcgtctcccaggtcctgc

SEQ ID NO: 369555 - DNA, 8608 bp, Homo sapiens
cggctgcgggcggcagtccggcagtggcggggcccggggggcgcccaagatggcggcgggcggcgcggagggcggctcgggccccggcgccgccatgggggactgcgcggagattaagtcgcaattccgcacgcgcgagggtttctacaagctactcccgggcgacggcgccgctcgcaggtcgggtccggcttccgcccagactccggtgccgcctcagccaccgcagcccccgcccggccctgcctccgcctccggtcccggcgctgcaggccccgcgtcgtccccgccgcccgcaggccccggacccgggcccgccctgcccgccgtgcgcctcagcctcgtgcgcctcggggagccggacagcgccggggccggggagccgcccgccacgcccgcggggctgggctcggggggagaccgcgtctgcttcaacttgggccgtgagctctatttctacccaggctgctgtcgtcgtgggagccaacggtccattgacctcaacaagccaattgacaagcggatctacaagggcacccagcccacctgccacgatttcaaccagttcactgctgccaccgagaccatctcgctgctggtgggcttctcagcgggtcaagtgcagtacctggatctcatcaaaaaggacaccagcaagctgttcaatgaggagcggttgatcgacaagaccaaggtgacatatctgaagtggctgcctgagtcggagagcctgttcctggcatcacacgccagtggccacctgtacctgtacaacgtcagccacccctgcgcctcggccccgccccagtacagcctgctgaagcagggcgagggcttctctgtctatgctgccaagagcaaggcaccccgcaacccgctggccaagtgggcggtgggtgaggggcccctcaacgagttcgccttctcgcccgatggccggcacctggcctgtgtgagccaggatggctgcctgcgcgtcttccacttcgactccatgctcctgcgtgggctcatgaagagctactttgggggcctgctgtgtgtgtgctggagccctgacggccgctacgtggtgacgggtggcgaagatgacctggtcaccgtgtggtccttcaccgagggccgcgtggtggctcgaggccatggccacaagtcctgggtcaacgctgtggcctttgacccctacaccacaagggcagaggaggcggcgacagcagccggtgctgatggggagcggagcggcgaagaggaggaggaggagcccgaggctgcgggcacaggctcggccgggggcgccccgctctctccactgcccaaggctggctccattacttaccgctttggctcggcgggccaggacacgcagttctgcctgtgggacctcactgaagacgtgctctacccgcacccgcccctggcccgcacccgcaccctccctggcacacctggcaccacgccaccggccgccagcagctcgaggggtggcgagcctggcccaggccccctgcctcgctcgctgtcccgctccaacagtctcccgcacccagctggcgggggcaaggcgggcggcccgggtgtggcggcagagcctggcacaccattcagcattggccgcttcgccacgctcacactgcaggagcggcgggaccggggggcagagaaggagcacaagcgctaccacagcctgggcaacatcagccggggtggcagtggcggcagtggcagtggtggggagaagcccagcggccctgttccccgcagccgcctggaccccgccaaggtgctgggcactgcgctgtgcccgcgcatccacgaggtgcccctgctggagccccttgtgtgcaagaagatcgcccaggagcggctcacagtcctcctgttcctggaggactgcatcatcactgcctgccaggagggcctcatctgcacctgggcccggccgggcaaggcgttcacagacgaggagaccgaggcccagacaggggaaggaagttggcccaggtcacccagcaagtcagtggtagagggcatctcctcccaaccaggcaactccccgagtggcacagtggtgtgaagccatggatatcgggcccccccaaccccatgcccccagcctcctagccataaccctccctgctgacctcacagatcaacgtattaacaagactaaccatgatggatggactgctccagtccccccacctgcacaaaatttgggggccccccagactggcccggacacgggcgatgtaatagcccttgtggcctcagccttgtcccccacccactgccaagtacaatgacctcttcctctgaaacatcagtgttaccctcatccctgtccccagcatgtgactggtcactcctggggagagactccccgcccctgccacaagagccccaggtctgcagtgtgcccctcagttgagtgggcagggccgggggtggtccagccctcgcccggcccccaccccagctgcccttgctattgtctgtgcttttgaagagtgttaaattatggaagcccctcaggttcctccctgtcccgcaggacctcttatttatactaaagttccctgttttctcagcgggtctgtccccttcggaggagatgatgtagaggacctgtgtgtgtactctgtggttctaggcagtccgctttccccagaggaggagtgcaggcctgctcccagcccagcgcctcccaccccttttcatagcaggaaaagccggagcccagggagggaacggacctgcgagtcacacaactggtgacccacaccagcggctggagcaggaccctcttggggagaagagcatcctgcccgcagccagggcccctcatcaaagtcctcggtgttttttaaattatcagaactgcccaggaccacgtttcccaggccctgcccagctgggactcctcggtccttgcctcctagtttctcaggcctggccctctcaaggcccaggcaccccaggccggttggaggccccgacttccactctggagaaccgtccaccctggaaagaagagctcagattcctcttggctctcggagccgcagggagtgtgtcttcccgcgccaccctccaccccccgaaatgtttctgtttctaatcccagcctgggcaggaatgtggctccccggccaggggccaaggagctattttggggtctcgtttgcccagggagggcttggctccaccactttcctcccccagcctttgggcagcaggtcacccctgttcaggctctgagggtgccccctcctggtcctgtcctcaccaccccttccccacctcctgggaaaaaaaaaaaaaaaaaaaaaaaagctggtataaagcagagagcctgagggctaaatttaactgtccgagtcggaatccatctctgagtcacccaagaagctgccctggcctcccgtccccttcccaggcctcaacccctttctcccacccagccccaacccccagccctcaccccctagcccccagttctggagcttgtcgggagcaagggggtggttgctactgggtcactcagcctcaattggccctgtttcagcaatgggcaggttcttcttgaaattcatcacacctgtggcttcctctgtgctctacctttttattggggtgacagtgtgacagctgagattctccatgcattccccctactctagcactgaagggttctgaagggccctggaaggagggagcttggggggctggcttgtgaggggttaaggctgggaggcgggaggggggctggaccaaggggtggggagaaggggaggaggcctcggccggccgcagagagaagtggccagagaggcccaggggacagccagggacaggcagacatgcagccagggctccagggcctggacaggggctgccaggccctgtgacaggaggaccccgagcccccggcccggggaggggccatggtgctgcctgtccaacatgtcagccgaggtgcggctgaggcggctccagcagctggtgttggacccgggcttcctggggctggagcccctgctcgaccttctcctgggcgtccaccaggagctgggcgcctccgaactggcccaggacaagtacgtggccgacttcttgcagtgggcggagcccatcgtggtgaggcttaaggaggtccgactgcagagggacgacttcgagattctgaaggtgatcggacgcggggcgttcagcgaggtagcggtagtgaagatgaagcagacgggccaggtgtatgccatgaagatcatgaacaagtgggacatgctgaagaggggcgaggtgtcgtgcttccgtgaggagagggacgtgttggtgaatggggaccggcggtggatcacgcagctgcacttcgccttccaggatgagaactacctgtacctggtcatggagtattacgtgggcggggacctgctgacactgctgagcaagtttggggagcggattccggccgagatggcgcgcttctacctggcggagattgtcatggccatagactcggtgcaccggcttggctacgtgcacagggacatcaaacccgacaacatcctgctggaccgctgtggccacatccgcctggccgacttcggctcttgcctcaagctgcgggcagatggaacggtgcggtcgctggtggctgtgggcaccccagactacctgtcccccgagatcctgcaggctgtgggcggtgggcctgggacaggcagctacgggcccgagtgtgactggtgggcgctgggtgtattcgcctatgaaatgttctatgggcagacgcccttctacgcggattccacggcggagacctatggcaagatcgtccactacaaggagcacctctctctgccgctggtggacgaaggggtccctgaggaggctcgagacttcattcagcggttgctgtgtcccccggagacacggctgggccggggtggagcaggcgacttccggacacatcccttcttctttggcctcgactgggatggtctccgggacagcgtgcccccctttacaccggatttcgaaggtgccaccgacacatgcaacttcgacttggtggaggacgggctcactgccatggtgagcgggggcggggagacactgtcggacattcgggaaggtgcgccgctaggggtccacctgccttttgtgggctactcctactcctgcatggccctcagggacagtgaggtcccaggccccacacccatggaactggaggccgagcagctgcttgagccacacgtgcaagcgcccagcctggagccctcggtgtccccacaggatgaaacagctgaagtggcagttccagcggctgtccctgcggcagaggctgaggccgaggtgacgctgcgggagctccaggaagccctggaggaggaggtgctcacccggcagagcctgagccgggagatggaggccatccgcacggacaaccagaacttcgccagtcaactacgcgaggcagaggctcggaaccgggacctagaggcacacgtccggcagttgcaggagcggatggagttgctgcaggcagagggagccacagctgtcacgggggtccccagtccccgggccacggatccaccttcccatctagatggccccccggccgtggctgtgggccagtgcccgctggtggggccaggccccatgcaccgccgccacctgctgctccctgccagggtccctaggcctggcctatcggaggcgctttccctgctcctgttcgccgttgttctgtctcgtgccgccgccctgggctgcattgggttggtggcccacgccggccaactcaccgcagtctggcgccgcccaggagccgcccgcgctccctgaaccctagaactgtcttcgactccggggccccgttggaagactgagtgcccggggcacggcacagaagccgcgcccaccgcctgccagttcacaaccgctccgagcgtgggtctccgcccagctccagtcctgtgatccgggcccgccccctagcggccggggagggaggggccgggtccgcggccggcgaacggggctcgaagggtccttgtagccgggaatgtgctgctgctgctgctgctgctgctggggggatcacagaccatttctttctttcggccaggctgaggccctgacgtggatgggcaaactgcaggcctgggaaggcagcaagccgggccgtccgtgttccatcctccacgcacccccacctatcgttggttcgcaaagtgcaaagctttcttgtgcatgacgccctgctctggggagcgtctggcgcgatctctgcctgcttactcgggaaatttgcttttgccaaacccgctttttcggggatcccgcgcccccctcctcacttgcgctgctctcggagccccagccggctccgcccgcttcggcggtttggatatttattgacctcgtcctccgactcgctgacaggctacaggacccccaacaaccccaatccacgttttggatgcactgagaccccgacattcctcggtatttattgtctgtccccacctaggacccccacccccgaccctcgcgaataaaaggccctccatctgcccaaagctctggactccacagtgtccgcggtttgcgttgtgggccggaggctccgcagcgggccaatccggaggcgtgtggaggcggccgaaggtctgggaggagctagcgggatgcgaagcggccgaatcagggttgggggaggaaaagccacggggcggggctttggcgtccggccaataggagggcgagcgggccacccggaggcaccgcccccgcccagctgtggcccagctgtgccaccgagcgtcgagaagagggggctgggctggcagcgcgcgcggccatcctccttccactgcgcctgcgcacgccacgcgcatccgctcctgggacgcaagctcgagaaaagttgctgcaaactttctagcccgttccccgcccctcctcccggccagacccgccccccctgcggagccgggaattccgaggggcggagcgcaggccgagatggggaatgtgggggcctgcagaggaccctggagacggaggcgtgcagaagctcagtctcggggcggaggcttcgcgcccttagtcctcctggacggcccgttaccttctgcgttgtcccgatggggaaactgaggccctgagccagaagcacacgctggggggaggcagaaagcgcggccagaggcggagggaaaacaaagggagaatcacagacagacgggagggggacggacacacacaaggggacagagacccgagtggagagctggatctcgccttcccggcgtggggcgcagggtcggccagaaagaagatcgagaagagcggggagtgggggcgaaaaggggggacaggtgggggaggaggctggggaaagcccgagggaggaagagagggagggaggaacttcccaaagttgcaaaacatggctaccttgccactgaagccagagacggccatctccgtgcctgagggaggcctcccggtggcccccagccctgctctcccagaggctcacgccctaggcaccctttctgcacagcagccaccccccgccgctgccaccacctccagcaccagcctgcccttctcccctgactcccctggcctcctgcccaacttcccggcgcccccaccagaggggctgatgttgtcacccgcggccgtgcctgtctggtcagcagggctggaactaagcgcaggaacagaggggctgctggaagcggaaaaggggctggggacacaggccccccacaccatgctgaggctgccagaccccgaccctgaggggctgctcctgggggccaccgcagggggtgaggttgacgaggggttggaagctgaggccaaggttctgacccagctccagtcggtgcctgtggaggagcccttggaactgtgacccagtgtggccccgtggcctctcccgacattggtgctgaagacgcagggacaggaatgggaggggggagccccagaaatgcggttgctgaagaccccagtcaccacatccttctgcctgggtggcctctccaagccctggtggtgctgggggttgtatccccggccacctcctgtccaggtctccatccccctttggatgggaggcctctctgttacagccctccccatgctgtgccctgccatatacgtgggggactcagggtcctgactcaggggccctgccccctccacttggtactagctgtaagcggaacaccctgccccagggccggacttccagcccccagagccctctccctgtcactccctgaaacactattaatagctctgccgatagctggtgttgtcacaactgcctggaatccgaaggtggaggacaggcagccccgcgcccctgagactggagaccctccccagtgtggcatttcctgccaggggcggggggtggggcagctgtggggagacgggggcctgcaccggattttaacactttgcccgggggttttcattacaatggccgggctttaacaacttatggtgtgacacccctgacatacccgactttatggggttgaggaaataccatttggcaggtggggtaataacg

SEQ ID NO: 369556 - DNA, 9274 bp, Homo sapiens
  misc_feature (6047)..(6047): n is a, c, g, or t
  misc_feature (6090)..(6090): n is a, c, g, or t
  misc_feature (6113)..(6113): n is a, c, g, or t
cggctgcgggcggcagtccggcagtggcggggcccggggggcgcccaagatggcggcgggcggcgcggagggcggctcgggccccggcgccgccatgggggactgcgcggagattaagtcgcaattccgcacgcgcgagggtttctacaagctactcccgggcgacggcgccgctcgcaggtcgggtccggcttccgcccagactccggtgccgcctcagccaccgcagcccccgcccggccctgcctccgcctccggtcccggcgctgcaggccccgcgtcgtccccgccgcccgcaggccccggacccgggcccgccctgcccgccgtgcgcctcagcctcgtgcgcctcggggagccggacagcgccggggccggggagccgcccgccacgcccgcggggctgggctcggggggagaccgcgtctgcttcaacttgggccgtgagctctatttctacccaggctgctgtcgtcgtgggagccaacggtccattgacctcaacaagccaattgacaagcggatctacaagggcacccagcccacctgccacgatttcaaccagttcactgctgccaccgagaccatctcgctgctggtgggcttctcagcgggtcaagtgcagtacctggatctcatcaaaaaggacaccagcaagctgttcaatgaggagcggttgatcgacaagaccaaggtgacatatctgaagtggctgcctgagtcggagagcctgttcctggcatcacacgccagtggccacctgtacctgtacaacgtcagccacccctgcgcctcggccccgccccagtacagcctgctgaagcagggcgagggcttctctgtctatgctgccaagagcaaggcaccccgcaacccgctggccaagtgggcggtgggtgaggggcccctcaacgagttcgccttctcgcccgatggccggcacctggcctgtgtgagccaggatggctgcctgcgcgtcttccacttcgactccatgctcctgcgtgggctcatgaagagctactttgggggcctgctgtgtgtgtgctggagccctgacggccgctacgtggtgacgggtggcgaagatgacctggtcaccgtgtggtccttcaccgagggccgcgtggtggctcgaggccatggccacaagtcctgggtcaacgctgtggcctttgacccctacaccacaagggcagaggaggcggcgacagcagccggtgctgatggggagcggagcggcgaagaggaggaggaggagcccgaggctgcgggcacaggctcggccgggggcgccccgctctctccactgcccaaggctggctccattacttaccgctttggctcggcgggccaggacacgcagttctgcctgtgggacctcactgaagacgtgctctacccgcacccgcccctggcccgcacccgcaccctccctggcacacctggcaccacgccaccggccgccagcagctcgaggggtggcgagcctggcccaggccccctgcctcgctcgctgtcccgctccaacagtctcccgcacccagctggcgggggcaaggcgggcggcccgggtgtggcggcagagcctggcacaccattcagcattggccgcttcgccacgctcacactgcaggagcggcgggaccggggggcagagaaggagcacaagcgctaccacagcctgggcaacatcagccggggtggcagtggcggcagtggcagtggtggggagaagcccagcggccctgttccccgcagccgcctggaccccgccaaggtgctgggcactgcgctgtgcccgcgcatccacgaggtgcccctgctggagccccttgtgtgcaagaagatcgcccaggagcggctcacagtcctcctgttcctggaggactgcatcatcactgcctgccaggagggcctcatctgcacctgggcccggccgggcaaggcgttcacagacgaggagaccgaggcccagacaggggaaggaagttggcccaggtcacccagcaagtcagtggtagagggcatctcctcccaaccaggcaactccccgagtggcacagtggtgtgaagccatggatatcgggcccccccaaccccatgcccccagcctcctagccataaccctccctgctgacctcacagatcaacgtattaacaagactaaccatgatggatggactgctccagtccccccacctgcacaaaatttgggggccccccagactggcccggacacgggcgatgtaatagcccttgtggcctcagccttgtcccccacccactgccaagtacaatgacctcttcctctgaaacatcagtgttaccctcatccctgtccccagcatgtgactggtcactcctggggagagactccccgcccctgccacaagagccccaggtctgcagtgtgcccctcagttgagtgggcagggccgggggtggtccagccctcgcccggcccccaccccagctgcccttgctattgtctgtgcttttgaagagtgttaaattatggaagcccctcaggttcctccctgtcccgcaggacctcttatttatactaaagttccctgttttctcagcgggtctgtccccttcggaggagatgatgtagaggacctgtgtgtgtactctgtggttctaggcagtccgctttccccagaggaggagtgcaggcctgctcccagcccagcgcctcccaccccttttcatagcaggaaaagccggagcccagggagggaacggacctgcgagtcacacaactggtgacccacaccagcggctggagcaggaccctcttggggagaagagcatcctgcccgcagccagggcccctcatcaaagtcctcggtgttttttaaattatcagaactgcccaggaccacgtttcccaggccctgcccagctgggactcctcggtccttgcctcctagtttctcaggcctggccctctcaaggcccaggcaccccaggccggttggaggccccgacttccactctggagaaccgtccaccctggaaagaagagctcagattcctcttggctctcggagccgcagggagtgtgtcttcccgcgccaccctccaccccccgaaatgtttctgtttctaatcccagcctgggcaggaatgtggctccccggccaggggccaaggagctattttggggtctcgtttgcccagggagggcttggctccaccactttcctcccccagcctttgggcagcaggtcacccctgttcaggctctgagggtgccccctcctggtcctgtcctcaccaccccttccccacctcctgggaaaaaaaaaaaaaaaaaaaaaaaagctggtataaagcagagagcctgagggctaaatttaactgtccgagtcggaatccatctctgagtcacccaagaagctgccctggcctcccgtccccttcccaggcctcaacccctttctcccacccagccccaacccccagccctcaccccctagcccccagttctggagcttgtcgggagcaagggggtggttgctactgggtcactcagcctcaattggccctgtttcagcaatgggcaggttcttcttgaaattcatcacacctgtggcttcctctgtgctctacctttttattggggtgacagtgtgacagctgagattctccatgcattccccctactctagcactgaagggttctgaagggccctggaaggagggagcttggggggctggcttgtgaggggttaaggctgggaggcgggaggggggctggaccaaggggtggggagaaggggaggaggcctcggccggccgcagagagaagtggccagagaggcccaggggacagccagggacaggcagacatgcagccagggctccagggcctggacaggggctgccaggccctgtgacaggaggaccccgagcccccggcccggggaggggccatggtgctgcctgtccaacatgtcagccgaggtgcggctgaggcggctccagcagctggtgttggacccgggcttcctggggctggagcccctgctcgaccttctcctgggcgtccaccaggagctgggcgcctccgaactggcccaggacaagtacgtggccgacttcttgcagtgggcggagcccatcgtggtgaggcttaaggaggtccgactgcagagggacgacttcgagattctgaaggtgatcggacgcggggcgttcagcgaggtagcggtagtgaagatgaagcagacgggccaggtgtatgccatgaagatcatgaacaagtgggacatgctgaagaggggcgaggtgtcgtgcttccgtgaggagagggacgtgttggtgaatggggaccggcggtggatcacgcagctgcacttcgccttccaggatgagaactacctgtacctggtcatggagtattacgtgggcggggacctgctgacactgctgagcaagtttggggagcggattccggccgagatggcgcgcttctacctggcggagattgtcatggccatagactcggtgcaccggcttggctacgtgcacagggacatcaaacccgacaacatcctgctggaccgctgtggccacatccgcctggccgacttcggctcttgcctcaagctgcgggcagatggaacggtgcggtcgctggtggctgtgggcaccccagactacctgtcccccgagatcctgcaggctgtgggcggtgggcctgggacaggcagctacgggcccgagtgtgactggtgggcgctgggtgtattcgcctatgaaatgttctatgggcagacgcccttctacgcggattccacggcggagacctatggcaagatcgtccactacaaggagcacctctctctgccgctggtggacgaaggggtccctgaggaggctcgagacttcattcagcggttgctgtgtcccccggagacacggctgggccggggtggagcaggcgacttccggacacatcccttcttctttggcctcgactgggatggtctccgggacagcgtgcccccctttacaccggatttcgaaggtgccaccgacacatgcaacttcgacttggtggaggacgggctcactgccatggtgagcgggggcggggagacactgtcggacattcgggaaggtgcgccgctaggggtccacctgccttttgtgggctactcctactcctgcatggccctcagggacagtgaggtcccaggccccacacccatggaactggaggccgagcagctgcttgagccacacgtgcaagcgcccagcctggagccctcggtgtccccacaggatgaaacagctgaagtggcagttccagcggctgtccctgcggcagaggctgaggccgaggtgacgctgcgggagctccaggaagccctggaggaggaggtgctcacccggcagagcctgagccgggagatggaggccatccgcacggacaaccagaacttcgccagtcaactacgcgaggcagaggctcggaaccgggacctagaggcacacgtccggcagttgcaggagcggatggagttgctgcaggcagagggagccacagctgtcacgggggtccccagtccccgggccacggatccaccttcccatgtaagacccctctctttcccctgcctcagacctgctgcccattctgcagatcccctccctggctcctggtctccccgtccagatatagggctcaccctacgtctttgcgactttagagggcagaagccctttattcagccccagatctccctccgttcaggcctcaccagattccctccgggatctccctagataacctccccaacctcgattcccctcgctgtctctcgccccaccgctgagggctgggctgggctccgatcgggtcacctgtcccttctctctccagctagatggccccccggccgtggctgtgggccagtgcccgctggtggggccaggccccatgcaccgccgccacctgctgctccctgccagggtacgtccggctgcccacgcccccctccgccgtcgcgccccgcgctccacccgccccntgccacccgcttagctgcgcatttgcggggctgggcccacggnaggagggcggatcttcgggcagncaatcaacacaggccgctaggaagcagccaatgacgagttcggacgggattcgaggcgtgcgagtggactaacaacagctgtaggctgttggggcgggggcggggcgcagggaagagtgcgggcccacctatgggcgtaggcggggcgagtcccaggagccaatcagaggcccatgccgggtgttgacctcgccctctccccgcaggtccctaggcctggcctatcggaggcgctttccctgctcctgttcgccgttgttctgtctcgtgccgccgccctgggctgcattgggttggtggcccacgccggccaactcaccgcagtctggcgccgcccaggagccgcccgcgctccctgaaccctagaactgtcttcgactccggggccccgttggaagactgagtgcccggggcacggcacagaagccgcgcccaccgcctgccagttcacaaccgctccgagcgtgggtctccgcccagctccagtcctgtgatccgggcccgccccctagcggccggggagggaggggccgggtccgcggccggcgaacggggctcgaagggtccttgtagccgggaatgtgctgctgctgctgctgctgctgctggggggatcacagaccatttctttctttcggccaggctgaggccctgacgtggatgggcaaactgcaggcctgggaaggcagcaagccgggccgtccgtgttccatcctccacgcacccccacctatcgttggttcgcaaagtgcaaagctttcttgtgcatgacgccctgctctggggagcgtctggcgcgatctctgcctgcttactcgggaaatttgcttttgccaaacccgctttttcggggatcccgcgcccccctcctcacttgcgctgctctcggagccccagccggctccgcccgcttcggcggtttggatatttattgacctcgtcctccgactcgctgacaggctacaggacccccaacaaccccaatccacgttttggatgcactgagaccccgacattcctcggtatttattgtctgtccccacctaggacccccacccccgaccctcgcgaataaaaggccctccatctgcccaaagctctggactccacagtgtccgcggtttgcgttgtgggccggaggctccgcagcgggccaatccggaggcgtgtggaggcggccgaaggtctgggaggagctagcgggatgcgaagcggccgaatcagggttgggggaggaaaagccacggggcggggctttggcgtccggccaataggagggcgagcgggccacccggaggcaccgcccccgcccagctgtggcccagctgtgccaccgagcgtcgagaagagggggctgggctggcagcgcgcgcggccatcctccttccactgcgcctgcgcacgccacgcgcatccgctcctgggacgcaagctcgagaaaagttgctgcaaactttctagcccgttccccgcccctcctcccggccagacccgccccccctgcggagccgggaattccgaggggcggagcgcaggccgagatggggaatgtgggggcctgcagaggaccctggagacggaggcgtgcagaagctcagtctcggggcggaggcttcgcgcccttagtcctcctggacggcccgttaccttctgcgttgtcccgatggggaaactgaggccctgagccagaagcacacgctggggggaggcagaaagcgcggccagaggcggagggaaaacaaagggagaatcacagacagacgggagggggacggacacacacaaggggacagagacccgagtggagagctggatctcgccttcccggcgtggggcgcagggtcggccagaaagaagatcgagaagagcggggagtgggggcgaaaaggggggacaggtgggggaggaggctggggaaagcccgagggaggaagagagggagggaggaacttcccaaagttgcaaaacatggctaccttgccactgaagccagagacggccatctccgtgcctgagggaggcctcccggtggcccccagccctgctctcccagaggctcacgccctaggcaccctttctgcacagcagccaccccccgccgctgccaccacctccagcaccagcctgcccttctcccctgactcccctggcctcctgcccaacttcccggcgcccccaccagaggggctgatgttgtcacccgcggccgtgcctgtctggtcagcagggctggaactaagcgcaggaacagaggggctgctggaagcggaaaaggggctggggacacaggccccccacaccatgctgaggctgccagaccccgaccctgaggggctgctcctgggggccaccgcagggggtgaggttgacgaggggttggaagctgaggccaaggttctgacccagctccagtcggtgcctgtggaggagcccttggaactgtgacccagtgtggccccgtggcctctcccgacattggtgctgaagacgcagggacaggaatgggaggggggagccccagaaatgcggttgctgaagaccccagtcaccacatccttctgcctgggtggcctctccaagccctggtggtgctgggggttgtatccccggccacctcctgtccaggtctccatccccctttggatgggaggcctctctgttacagccctccccatgctgtgccctgccatatacgtgggggactcagggtcctgactcaggggccctgccccctccacttggtactagctgtaagcggaacaccctgccccagggccggacttccagcccccagagccctctccctgtcactccctgaaacactattaatagctctgccgatagctggtgttgtcacaactgcctggaatccgaaggtggaggacaggcagccccgcgcccctgagactggagaccctccccagtgtggcatttcctgccaggggcggggggtggggcagctgtggggagacgggggtcttccttcaccagctcccctcgactcaagcccttgtcctcattatccggcccagaccaaagattccctcatccctgggggcagccctgccgctgtgtctcctttgtatcctaaatctttatttttctaggacatgttatgcctccattttcaattaaaataaagttatcggattacaccacca

SEQ ID NO: 369557 - DNA, 9333 bp, Homo sapiens
  misc_feature (6106)..(6106): n is a, c, g, or t
  misc_feature (6149)..(6149): n is a, c, g, or t
  misc_feature (6172)..(6172): n is a, c, g, or t
cggctgcgggcggcagtccggcagtggcggggcccggggggcgcccaagatggcggcgggcggcgcggagggcggctcgggccccggcgccgccatgggggactgcgcggagattaagtcgcaattccgcacgcgcgagggtttctacaagctactcccgggcgacggcgccgctcgcaggtcgggtccggcttccgcccagactccggtgccgcctcagccaccgcagcccccgcccggccctgcctccgcctccggtcccggcgctgcaggccccgcgtcgtccccgccgcccgcaggccccggacccgggcccgccctgcccgccgtgcgcctcagcctcgtgcgcctcggggagccggacagcgccggggccggggagccgcccgccacgcccgcggggctgggctcggggggagaccgcgtctgcttcaacttgggccgtgagctctatttctacccaggctgctgtcgtcgtgggagccaacggtccattgacctcaacaagccaattgacaagcggatctacaagggcacccagcccacctgccacgatttcaaccagttcactgctgccaccgagaccatctcgctgctggtgggcttctcagcgggtcaagtgcagtacctggatctcatcaaaaaggacaccagcaagctgttcaatgaggagcggttgatcgacaagaccaaggtgacatatctgaagtggctgcctgagtcggagagcctgttcctggcatcacacgccagtggccacctgtacctgtacaacgtcagccacccctgcgcctcggccccgccccagtacagcctgctgaagcagggcgagggcttctctgtctatgctgccaagagcaaggcaccccgcaacccgctggccaagtgggcggtgggtgaggggcccctcaacgagttcgccttctcgcccgatggccggcacctggcctgtgtgagccaggatggctgcctgcgcgtcttccacttcgactccatgctcctgcgtgggctcatgaagagctactttgggggcctgctgtgtgtgtgctggagccctgacggccgctacgtggtgacgggtggcgaagatgacctggtcaccgtgtggtccttcaccgagggccgcgtggtggctcgaggccatggccacaagtcctgggtcaacgctgtggcctttgacccctacaccacaagggcagaggaggcggcgacagcagccggtgctgatggggagcggagcggcgaagaggaggaggaggagcccgaggctgcgggcacaggctcggccgggggcgccccgctctctccactgcccaaggctggctccattacttaccgctttggctcggcgggccaggacacgcagttctgcctgtgggacctcactgaagacgtgctctacccgcacccgcccctggcccgcacccgcaccctccctggcacacctggcaccacgccaccggccgccagcagctcgaggggtggcgagcctggcccaggccccctgcctcgctcgctgtcccgctccaacagtctcccgcacccagctggcgggggcaaggcgggcggcccgggtgtggcggcagagcctggcacaccattcagcattggccgcttcgccacgctcacactgcaggagcggcgggaccggggggcagagaaggagcacaagcgctaccacagcctgggcaacatcagccggggtggcagtggcggcagtggcagtggtggggagaagcccagcggccctgttccccgcagccgcctggaccccgccaaggtgctgggcactgcgctgtgcccgcgcatccacgaggtgcccctgctggagccccttgtgtgcaagaagatcgcccaggagcggctcacagtcctcctgttcctggaggactgcatcatcactgcctgccaggagggcctcatctgcacctgggcccggccgggcaaggcgttcacagacgaggagaccgaggcccagacaggggaaggaagttggcccaggtcacccagcaagtcagtggtagagggcatctcctcccaaccaggcaactccccgagtggcacagtggtgtgaagccatggatatcgggcccccccaaccccatgcccccagcctcctagccataaccctccctgctgacctcacagatcaacgtattaacaagactaaccatgatggatggactgctccagtccccccacctgcacaaaatttgggggccccccagactggcccggacacgggcgatgtaatagcccttgtggcctcagccttgtcccccacccactgccaagtacaatgacctcttcctctgaaacatcagtgttaccctcatccctgtccccagcatgtgactggtcactcctggggagagactccccgcccctgccacaagagccccaggtctgcagtgtgcccctcagttgagtgggcagggccgggggtggtccagccctcgcccggcccccaccccagctgcccttgctattgtctgtgcttttgaagagtgttaaattatggaagcccctcaggttcctccctgtcccgcaggacctcttatttatactaaagttccctgttttctcagcgggtctgtccccttcggaggagatgatgtagaggacctgtgtgtgtactctgtggttctaggcagtccgctttccccagaggaggagtgcaggcctgctcccagcccagcgcctcccaccccttttcatagcaggaaaagccggagcccagggagggaacggacctgcgagtcacacaactggtgacccacaccagcggctggagcaggaccctcttggggagaagagcatcctgcccgcagccagggcccctcatcaaagtcctcggtgttttttaaattatcagaactgcccaggaccacgtttcccaggccctgcccagctgggactcctcggtccttgcctcctagtttctcaggcctggccctctcaaggcccaggcaccccaggccggttggaggccccgacttccactctggagaaccgtccaccctggaaagaagagctcagattcctcttggctctcggagccgcagggagtgtgtcttcccgcgccaccctccaccccccgaaatgtttctgtttctaatcccagcctgggcaggaatgtggctccccggccaggggccaaggagctattttggggtctcgtttgcccagggagggcttggctccaccactttcctcccccagcctttgggcagcaggtcacccctgttcaggctctgagggtgccccctcctggtcctgtcctcaccaccccttccccacctcctgggaaaaaaaaaaaaaaaaaaaaaaaagctggtataaagcagagagcctgagggctaaatttaactgtccgagtcggaatccatctctgagtcacccaagaagctgccctggcctcccgtccccttcccaggcctcaacccctttctcccacccagccccaacccccagccctcaccccctagcccccagttctggagcttgtcgggagcaagggggtggttgctactgggtcactcagcctcaattggccctgtttcagcaatgggcaggttcttcttgaaattcatcacacctgtggcttcctctgtgctctacctttttattggggtgacagtgtgacagctgagattctccatgcattccccctactctagcactgaagggttctgaagggccctggaaggagggagcttggggggctggcttgtgaggggttaaggctgggaggcgggaggggggctggaccaaggggtggggagaaggggaggaggcctcggccggccgcagagagaagtggccagagaggcccaggggacagccagggacaggcagacatgcagccagggctccagggcctggacaggggctgccaggccctgtgacaggaggaccccgagcccccggcccggggaggggccatggtgctgcctgtccaacatgtcagccgaggtgcggctgaggcggctccagcagctggtgttggacccgggcttcctggggctggagcccctgctcgaccttctcctgggcgtccaccaggagctgggcgcctccgaactggcccaggacaagtacgtggccgacttcttgcagtgggccccaaatccagggttttccaaagtgtggttcaagaaccacctgcatctgaatctagagcggagcccatcgtggtgaggcttaaggaggtccgactgcagagggacgacttcgagattctgaaggtgatcggacgcggggcgttcagcgaggtagcggtagtgaagatgaagcagacgggccaggtgtatgccatgaagatcatgaacaagtgggacatgctgaagaggggcgaggtgtcgtgcttccgtgaggagagggacgtgttggtgaatggggaccggcggtggatcacgcagctgcacttcgccttccaggatgagaactacctgtacctggtcatggagtattacgtgggcggggacctgctgacactgctgagcaagtttggggagcggattccggccgagatggcgcgcttctacctggcggagattgtcatggccatagactcggtgcaccggcttggctacgtgcacagggacatcaaacccgacaacatcctgctggaccgctgtggccacatccgcctggccgacttcggctcttgcctcaagctgcgggcagatggaacggtgcggtcgctggtggctgtgggcaccccagactacctgtcccccgagatcctgcaggctgtgggcggtgggcctgggacaggcagctacgggcccgagtgtgactggtgggcgctgggtgtattcgcctatgaaatgttctatgggcagacgcccttctacgcggattccacggcggagacctatggcaagatcgtccactacaaggagcacctctctctgccgctggtggacgaaggggtccctgaggaggctcgagacttcattcagcggttgctgtgtcccccggagacacggctgggccggggtggagcaggcgacttccggacacatcccttcttctttggcctcgactgggatggtctccgggacagcgtgcccccctttacaccggatttcgaaggtgccaccgacacatgcaacttcgacttggtggaggacgggctcactgccatggtgagcgggggcggggagacactgtcggacattcgggaaggtgcgccgctaggggtccacctgccttttgtgggctactcctactcctgcatggccctcagggacagtgaggtcccaggccccacacccatggaactggaggccgagcagctgcttgagccacacgtgcaagcgcccagcctggagccctcggtgtccccacaggatgaaacagctgaagtggcagttccagcggctgtccctgcggcagaggctgaggccgaggtgacgctgcgggagctccaggaagccctggaggaggaggtgctcacccggcagagcctgagccgggagatggaggccatccgcacggacaaccagaacttcgccagtcaactacgcgaggcagaggctcggaaccgggacctagaggcacacgtccggcagttgcaggagcggatggagttgctgcaggcagagggagccacagctgtcacgggggtccccagtccccgggccacggatccaccttcccatgtaagacccctctctttcccctgcctcagacctgctgcccattctgcagatcccctccctggctcctggtctccccgtccagatatagggctcaccctacgtctttgcgactttagagggcagaagccctttattcagccccagatctccctccgttcaggcctcaccagattccctccgggatctccctagataacctccccaacctcgattcccctcgctgtctctcgccccaccgctgagggctgggctgggctccgatcgggtcacctgtcccttctctctccagctagatggccccccggccgtggctgtgggccagtgcccgctggtggggccaggccccatgcaccgccgccacctgctgctccctgccagggtacgtccggctgcccacgcccccctccgccgtcgcgccccgcgctccacccgccccntgccacccgcttagctgcgcatttgcggggctgggcccacggnaggagggcggatcttcgggcagncaatcaacacaggccgctaggaagcagccaatgacgagttcggacgggattcgaggcgtgcgagtggactaacaacagctgtaggctgttggggcgggggcggggcgcagggaagagtgcgggcccacctatgggcgtaggcggggcgagtcccaggagccaatcagaggcccatgccgggtgttgacctcgccctctccccgcaggtccctaggcctggcctatcggaggcgctttccctgctcctgttcgccgttgttctgtctcgtgccgccgccctgggctgcattgggttggtggcccacgccggccaactcaccgcagtctggcgccgcccaggagccgcccgcgctccctgaaccctagaactgtcttcgactccggggccccgttggaagactgagtgcccggggcacggcacagaagccgcgcccaccgcctgccagttcacaaccgctccgagcgtgggtctccgcccagctccagtcctgtgatccgggcccgccccctagcggccggggagggaggggccgggtccgcggccggcgaacggggctcgaagggtccttgtagccgggaatgtgctgctgctgctgctgctgctgctggggggatcacagaccatttctttctttcggccaggctgaggccctgacgtggatgggcaaactgcaggcctgggaaggcagcaagccgggccgtccgtgttccatcctccacgcacccccacctatcgttggttcgcaaagtgcaaagctttcttgtgcatgacgccctgctctggggagcgtctggcgcgatctctgcctgcttactcgggaaatttgcttttgccaaacccgctttttcggggatcccgcgcccccctcctcacttgcgctgctctcggagccccagccggctccgcccgcttcggcggtttggatatttattgacctcgtcctccgactcgctgacaggctacaggacccccaacaaccccaatccacgttttggatgcactgagaccccgacattcctcggtatttattgtctgtccccacctaggacccccacccccgaccctcgcgaataaaaggccctccatctgcccaaagctctggactccacagtgtccgcggtttgcgttgtgggccggaggctccgcagcgggccaatccggaggcgtgtggaggcggccgaaggtctgggaggagctagcgggatgcgaagcggccgaatcagggttgggggaggaaaagccacggggcggggctttggcgtccggccaataggagggcgagcgggccacccggaggcaccgcccccgcccagctgtggcccagctgtgccaccgagcgtcgagaagagggggctgggctggcagcgcgcgcggccatcctccttccactgcgcctgcgcacgccacgcgcatccgctcctgggacgcaagctcgagaaaagttgctgcaaactttctagcccgttccccgcccctcctcccggccagacccgccccccctgcggagccgggaattccgaggggcggagcgcaggccgagatggggaatgtgggggcctgcagaggaccctggagacggaggcgtgcagaagctcagtctcggggcggaggcttcgcgcccttagtcctcctggacggcccgttaccttctgcgttgtcccgatggggaaactgaggccctgagccagaagcacacgctggggggaggcagaaagcgcggccagaggcggagggaaaacaaagggagaatcacagacagacgggagggggacggacacacacaaggggacagagacccgagtggagagctggatctcgccttcccggcgtggggcgcagggtcggccagaaagaagatcgagaagagcggggagtgggggcgaaaaggggggacaggtgggggaggaggctggggaaagcccgagggaggaagagagggagggaggaacttcccaaagttgcaaaacatggctaccttgccactgaagccagagacggccatctccgtgcctgagggaggcctcccggtggcccccagccctgctctcccagaggctcacgccctaggcaccctttctgcacagcagccaccccccgccgctgccaccacctccagcaccagcctgcccttctcccctgactcccctggcctcctgcccaacttcccggcgcccccaccagaggggctgatgttgtcacccgcggccgtgcctgtctggtcagcagggctggaactaagcgcaggaacagaggggctgctggaagcggaaaaggggctggggacacaggccccccacaccatgctgaggctgccagaccccgaccctgaggggctgctcctgggggccaccgcagggggtgaggttgacgaggggttggaagctgaggccaaggttctgacccagctccagtcggtgcctgtggaggagcccttggaactgtgacccagtgtggccccgtggcctctcccgacattggtgctgaagacgcagggacaggaatgggaggggggagccccagaaatgcggttgctgaagaccccagtcaccacatccttctgcctgggtggcctctccaagccctggtggtgctgggggttgtatccccggccacctcctgtccaggtctccatccccctttggatgggaggcctctctgttacagccctccccatgctgtgccctgccatatacgtgggggactcagggtcctgactcaggggccctgccccctccacttggtactagctgtaagcggaacaccctgccccagggccggacttccagcccccagagccctctccctgtcactccctgaaacactattaatagctctgccgatagctggtgttgtcacaactgcctggaatccgaaggtggaggacaggcagccccgcgcccctgagactggagaccctccccagtgtggcatttcctgccaggggcggggggtggggcagctgtggggagacgggggtcttccttcaccagctcccctcgactcaagcccttgtcctcattatccggcccagaccaaagattccctcatccctgggggcagccctgccgctgtgtctcctttgtatcctaaatctttatttttctaggacatgttatgcctccattttcaattaaaataaagttatcggattacaccacca

SEQ ID NO: 369558 - DNA, 8689 bp, Homo sapiens
cggctgcgggcggcagtccggcagtggcggggcccggggggcgcccaagatggcggcgggcggcgcggagggcggctcgggccccggcgccgccatgggggactgcgcggagattaagtcgcaattccgcacgcgcgagggtttctacaagctactcccgggcgacggcgccgctcgcaggtcgggtccggcttccgcccagactccggtgccgcctcagccaccgcagcccccgcccggccctgcctccgcctccggtcccggcgctgcaggccccgcgtcgtccccgccgcccgcaggccccggacccgggcccgccctgcccgccgtgcgcctcagcctcgtgcgcctcggggagccggacagcgccggggccggggagccgcccgccacgcccgcggggctgggctcggggggagaccgcgtctgcttcaacttgggccgtgagctctatttctacccaggctgctgtcgtcgtgggagccaacggtccattgacctcaacaagccaattgacaagcggatctacaagggcacccagcccacctgccacgatttcaaccagttcactgctgccaccgagaccatctcgctgctggtgggcttctcagcgggtcaagtgcagtacctggatctcatcaaaaaggacaccagcaagctgttcaatgaggagcggttgatcgacaagaccaaggtgacatatctgaagtggctgcctgagtcggagagcctgttcctggcatcacacgccagtggccacctgtacctgtacaacgtcagccacccctgcgcctcggccccgccccagtacagcctgctgaagcagggcgagggcttctctgtctatgctgccaagagcaaggcaccccgcaacccgctggccaagtgggcggtgggtgaggggcccctcaacgagttcgccttctcgcccgatggccggcacctggcctgtgtgagccaggatggctgcctgcgcgtcttccacttcgactccatgctcctgcgtgggctcatgaagagctactttgggggcctgctgtgtgtgtgctggagccctgacggccgctacgtggtgacgggtggcgaagatgacctggtcaccgtgtggtccttcaccgagggccgcgtggtggctcgaggccatggccacaagtcctgggtcaacgctgtggcctttgacccctacaccacaagggcagaggaggcggcgacagcagccggtgctgatggggagcggagcggcgaagaggaggaggaggagcccgaggctgcgggcacaggctcggccgggggcgccccgctctctccactgcccaaggctggctccattacttaccgctttggctcggcgggccaggacacgcagttctgcctgtgggacctcactgaagacgtgctctacccgcacccgcccctggcccgcacccgcaccctccctggcacacctggcaccacgccaccggccgccagcagctcgaggggtggcgagcctggcccaggccccctgcctcgctcgctgtcccgctccaacagtctcccgcacccagctggcgggggcaaggcgggcggcccgggtgtggcggcagagcctggcacaccattcagcattggccgcttcgccacgctcacactgcaggagcggcgggaccggggggcagagaaggagcacaagcgctaccacagcctgggcaacatcagccggggtggcagtggcggcagtggcagtggtggggagaagcccagcggccctgttccccgcagccgcctggaccccgccaaggtgctgggcactgcgctgtgcccgcgcatccacgaggtgcccctgctggagccccttgtgtgcaagaagatcgcccaggagcggctcacagtcctcctgttcctggaggactgcatcatcactgcctgccaggagggcctcatctgcacctgggcccggccgggcaaggcgttcacagacgaggagaccgaggcccagacaggggaaggaagttggcccaggtcacccagcaagtcagtggtagagggcatctcctcccaaccaggcaactccccgagtggcacagtggtgtgaagccatggatatcgggcccccccaaccccatgcccccagcctcctagccataaccctccctgctgacctcacagatcaacgtattaacaagactaaccatgatggatggactgctccagtccccccacctgcacaaaatttgggggccccccagactggcccggacacgggcgatgtaatagcccttgtggcctcagccttgtcccccacccactgccaagtacaatgacctcttcctctgaaacatcagtgttaccctcatccctgtccccagcatgtgactggtcactcctggggagagactccccgcccctgccacaagagccccaggtctgcagtgtgcccctcagttgagtgggcagggccgggggtggtccagccctcgcccggcccccaccccagctgcccttgctattgtctgtgcttttgaagagtgttaaattatggaagcccctcaggttcctccctgtcccgcaggacctcttatttatactaaagttccctgttttctcagcgggtctgtccccttcggaggagatgatgtagaggacctgtgtgtgtactctgtggttctaggcagtccgctttccccagaggaggagtgcaggcctgctcccagcccagcgcctcccaccccttttcatagcaggaaaagccggagcccagggagggaacggacctgcgagtcacacaactggtgacccacaccagcggctggagcaggaccctcttggggagaagagcatcctgcccgcagccagggcccctcatcaaagtcctcggtgttttttaaattatcagaactgcccaggaccacgtttcccaggccctgcccagctgggactcctcggtccttgcctcctagtttctcaggcctggccctctcaaggcccaggcaccccaggccggttggaggccccgacttccactctggagaaccgtccaccctggaaagaagagctcagattcctcttggctctcggagccgcagggagtgtgtcttcccgcgccaccctccaccccccgaaatgtttctgtttctaatcccagcctgggcaggaatgtggctccccggccaggggccaaggagctattttggggtctcgtttgcccagggagggcttggctccaccactttcctcccccagcctttgggcagcaggtcacccctgttcaggctctgagggtgccccctcctggtcctgtcctcaccaccccttccccacctcctgggaaaaaaaaaaaaaaaaaaaaaaaagctggtataaagcagagagcctgagggctaaatttaactgtccgagtcggaatccatctctgagtcacccaagaagctgccctggcctcccgtccccttcccaggcctcaacccctttctcccacccagccccaacccccagccctcaccccctagcccccagttctggagcttgtcgggagcaagggggtggttgctactgggtcactcagcctcaattggccctgtttcagcaatgggcaggttcttcttgaaattcatcacacctgtggcttcctctgtgctctacctttttattggggtgacagtgtgacagctgagattctccatgcattccccctactctagcactgaagggttctgaagggccctggaaggagggagcttggggggctggcttgtgaggggttaaggctgggaggcgggaggggggctggaccaaggggtggggagaaggggaggaggcctcggccggccgcagagagaagtggccagagaggcccaggggacagccagggacaggcagacatgcagccagggctccagggcctggacaggggctgccaggccctgtgacaggaggaccccgagcccccggcccggggaggggccatggtgctgcctgtccaacatgtcagccgaggtgcggctgaggcggctccagcagctggtgttggacccgggcttcctggggctggagcccctgctcgaccttctcctgggcgtccaccaggagctgggcgcctccgaactggcccaggacaagtacgtggccgacttcttgcagtgggcggagcccatcgtggtgaggcttaaggaggtccgactgcagagggacgacttcgagattctgaaggtgatcggacgcggggcgttcagcgaggtagcggtagtgaagatgaagcagacgggccaggtgtatgccatgaagatcatgaacaagtgggacatgctgaagaggggcgaggtgtcgtgcttccgtgaggagagggacgtgttggtgaatggggaccggcggtggatcacgcagctgcacttcgccttccaggatgagaactacctgtacctggtcatggagtattacgtgggcggggacctgctgacactgctgagcaagtttggggagcggattccggccgagatggcgcgcttctacctggcggagattgtcatggccatagactcggtgcaccggcttggctacgtgcacagggacatcaaacccgacaacatcctgctggaccgctgtggccacatccgcctggccgacttcggctcttgcctcaagctgcgggcagatggaacggtgcggtcgctggtggctgtgggcaccccagactacctgtcccccgagatcctgcaggctgtgggcggtgggcctgggacaggcagctacgggcccgagtgtgactggtgggcgctgggtgtattcgcctatgaaatgttctatgggcagacgcccttctacgcggattccacggcggagacctatggcaagatcgtccactacaaggagcacctctctctgccgctggtggacgaaggggtccctgaggaggctcgagacttcattcagcggttgctgtgtcccccggagacacggctgggccggggtggagcaggcgacttccggacacatcccttcttctttggcctcgactgggatggtctccgggacagcgtgcccccctttacaccggatttcgaaggtgccaccgacacatgcaacttcgacttggtggaggacgggctcactgccatggtgagcgggggcggggagacactgtcggacattcgggaaggtgcgccgctaggggtccacctgccttttgtgggctactcctactcctgcatggccctcagggacagtgaggtcccaggccccacacccatggaactggaggccgagcagctgcttgagccacacgtgcaagcgcccagcctggagccctcggtgtccccacaggatgaaacagctgaagtggcagttccagcggctgtccctgcggcagaggctgaggccgaggtgacgctgcgggagctccaggaagccctggaggaggaggtgctcacccggcagagcctgagccgggagatggaggccatccgcacggacaaccagaacttcgccagtcaactacgcgaggcagaggctcggaaccgggacctagaggcacacgtccggcagttgcaggagcggatggagttgctgcaggcagagggagccacagctgtcacgggggtccccagtccccgggccacggatccaccttcccatctagatggccccccggccgtggctgtgggccagtgcccgctggtggggccaggccccatgcaccgccgccacctgctgctccctgccagggtccctaggcctggcctatcggaggcgctttccctgctcctgttcgccgttgttctgtctcgtgccgccgccctgggctgcattgggttggtggcccacgccggccaactcaccgcagtctggcgccgcccaggagccgcccgcgctccctgaaccctagaactgtcttcgactccggggccccgttggaagactgagtgcccggggcacggcacagaagccgcgcccaccgcctgccagttcacaaccgctccgagcgtgggtctccgcccagctccagtcctgtgatccgggcccgccccctagcggccggggagggaggggccgggtccgcggccggcgaacggggctcgaagggtccttgtagccgggaatgctgctgctgctgctgctgctgctgctgctgctgctgctgctgctgctgctgctgctgctggggggatcacagaccatttctttctttcggccaggctgaggccctgacgtggatgggcaaactgcaggcctgggaaggcagcaagccgggccgtccgtgttccatcctccacgcacccccacctatcgttggttcgcaaagtgcaaagctttcttgtgcatgacgccctgctctggggagcgtctggcgcgatctctgcctgcttactcgggaaatttgcttttgccaaacccgctttttcggggatcccgcgcccccctcctcacttgcgctgctctcggagccccagccggctccgcccgcttcggcggtttggatatttattgacctcgtcctccgactcgctgacaggctacaggacccccaacaaccccaatccacgttttggatgcactgagaccccgacattcctcggtatttattgtctgtccccacctaggacccccacccccgaccctcgcgaataaaaggccctccatctgcccaaagctctggactccacagtgtccgcggtttgcgttgtgggccggaggctccgcagcgggccaatccggaggcgtgtggaggcggccgaaggtctgggaggagctagcgggatgcgaagcggccgaatcagggttgggggaggaaaagccacggggcggggctttggcgtccggccaataggagggcgagcgggccacccggaggcaccgcccccgcccagctgtggcccagctgtgccaccgagcgtcgagaagagggggctgggctggcagcgcgcgcggccatcctccttccactgcgcctgcgcacgccacgcgcatccgctcctgggacgcaagctcgagaaaagttgctgcaaactttctagcccgttccccgcccctcctcccggccagacccgccccccctgcggagccgggaattccgaggggcggagcgcaggccgagatggggaatgtgggggcctgcagaggaccctggagacggaggcgtgcagaagctcagtctcggggcggaggcttcgcgcccttagtcctcctggacggcccgttaccttctgcgttgtcccgatggggaaactgaggccctgagccagaagcacacgctggggggaggcagaaagcgcggccagaggcggagggaaaacaaagggagaatcacagacagacgggagggggacggacacacacaaggggacagagacccgagtggagagctggatctcgccttcccggcgtggggcgcagggtcggccagaaagaagatcgagaagagcggggagtgggggcgaaaaggggggacaggtgggggaggaggctggggaaagcccgagggaggaagagagggagggaggaacttcccaaagttgcaaaacatggctaccttgccactgaagccagagacggccatctccgtgcctgagggaggcctcccggtggcccccagccctgctctcccagaggctcacgccctaggcaccctttctgcacagcagccaccccccgccgctgccaccacctccagcaccagcctgcccttctcccctgactcccctggcctcctgcccaacttcccggcgcccccaccagaggggctgatgttgtcacccgcggccgtgcctgtctggtcagcagggctggaactaagcgcaggaacagaggggctgctggaagcggaaaaggggctggggacacaggccccccacaccatgctgaggctgccagaccccgaccctgaggggctgctcctgggggccaccgcagggggtgaggttgacgaggggttggaagctgaggccaaggttctgacccagctccagtcggtgcctgtggaggagcccttggaactgtgacccagtgtggccccgtggcctctcccgacattggtgctgaagacgcagggacaggaatgggaggggggagccccagaaatgcggttgctgaagaccccagtcaccacatccttctgcctgggtggcctctccaagccctggtggtgctgggggttgtatccccggccacctcctgtccaggtctccatccccctttggatgggaggcctctctgttacagccctccccatgctgtgccctgccatatacgtgggggactcagggtcctgactcaggggccctgccccctccacttggtactagctgtaagcggaacaccctgccccagggccggacttccagcccccagagccctctccctgtcactccctgaaacactattaatagctctgccgatagctggtgttgtcacaactgcctggaatccgaaggtggaggacaggcagccccgcgcccctgagactggagaccctccccagtgtggcatttcctgccaggggcggggggtggggcagctgtggggagacgggggtcttccttcaccagctcccctcgactcaagcccttgtcctcattatccggcccagaccaaagattccctcatccctgggggcagccctgccgctgtgtctcctttgtatcctaaatctttatttttctaggacatgttatgcctccattttcaattaaaataaagttatcggattacaccacca

SEQ ID NO: 369559 - DNA, 8477 bp, Homo sapiens
cggctgcgggcggcagtccggcagtggcggggcccggggggcgcccaagatggcggcgggcggcgcggagggcggctcgggccccggcgccgccatgggggactgcgcggagattaagtcgcaattccgcacgcgcgagggtttctacaagctactcccgggcgacggcgccgctcgcaggtcgggtccggcttccgcccagactccggtgccgcctcagccaccgcagcccccgcccggccctgcctccgcctccggtcccggcgctgcaggccccgcgtcgtccccgccgcccgcaggccccggacccgggcccgccctgcccgccgtgcgcctcagcctcgtgcgcctcggggagccggacagcgccggggccggggagccgcccgccacgcccgcggggctgggctcggggggagaccgcgtctgcttcaacttgggccgtgagctctatttctacccaggctgctgtcgtcgtgggagccaacggtccattgacctcaacaagccaattgacaagcggatctacaagggcacccagcccacctgccacgatttcaaccagttcactgctgccaccgagaccatctcgctgctggtgggcttctcagcgggtcaagtgcagtacctggatctcatcaaaaaggacaccagcaagctgttcaatgaggagcggttgatcgacaagaccaaggtgacatatctgaagtggctgcctgagtcggagagcctgttcctggcatcacacgccagtggccacctgtacctgtacaacgtcagccacccctgcgcctcggccccgccccagtacagcctgctgaagcagggcgagggcttctctgtctatgctgccaagagcaaggcaccccgcaacccgctggccaagtgggcggtgggtgaggggcccctcaacgagttcgccttctcgcccgatggccggcacctggcctgtgtgagccaggatggctgcctgcgcgtcttccacttcgactccatgctcctgcgtgggctcatgaagagctactttgggggcctgctgtgtgtgtgctggagccctgacggccgctacgtggtgacgggtggcgaagatgacctggtcaccgtgtggtccttcaccgagggccgcgtggtggctcgaggccatggccacaagtcctgggtcaacgctgtggcctttgacccctacaccacaagggcagaggaggcggcgacagcagccggtgctgatggggagcggagcggcgaagaggaggaggaggagcccgaggctgcgggcacaggctcggccgggggcgccccgctctctccactgcccaaggctggctccattacttaccgctttggctcggcgggccaggacacgcagttctgcctgtgggacctcactgaagacgtgctctacccgcacccgcccctggcccgcacccgcaccctccctggcacacctggcaccacgccaccggccgccagcagctcgaggggtggcgagcctggcccaggccccctgcctcgctcgctgtcccgctccaacagtctcccgcacccagctggcgggggcaaggcgggcggcccgggtgtggcggcagagcctggcacaccattcagcattggccgcttcgccacgctcacactgcaggagcggcgggaccggggggcagagaaggagcacaagcgctaccacagcctgggcaacatcagccggggtggcagtggcggcagtggcagtggtggggagaagcccagcggccctgttccccgcagccgcctggaccccgccaaggtgctgggcactgcgctgtgcccgcgcatccacgaggtgcccctgctggagccccttgtgtgcaagaagatcgcccaggagcggctcacagtcctcctgttcctggaggactgcatcatcactgcctgccaggagggcctcatctgcacctgggcccggccgggcaaggcgttcacagacgaggagaccgaggcccagacaggggaaggaagttggcccaggtcacccagcaagtcagtggtagagggcatctcctcccaaccaggcaactccccgagtggcacagtggtgtgaagccatggatatcgggcccccccaaccccatgcccccagcctcctagccataaccctccctgctgacctcacagatcaacgtattaacaagactaaccatgatggatggactgctccagtccccccacctgcacaaaatttgggggccccccagactggcccggacacgggcgatgtaatagcccttgtggcctcagccttgtcccccacccactgccaagtacaatgacctcttcctctgaaacatcagtgttaccctcatccctgtccccagcatgtgactggtcactcctggggagagactccccgcccctgccacaagagccccaggtctgcagtgtgcccctcagttgagtgggcagggccgggggtggtccagccctcgcccggcccccaccccagctgcccttgctattgtctgtgcttttgaagagtgttaaattatggaagcccctcaggttcctccctgtcccgcaggacctcttatttatactaaagttccctgttttctcagcgggtctgtccccttcggaggagatgatgtagaggacctgtgtgtgtactctgtggttctaggcagtccgctttccccagaggaggagtgcaggcctgctcccagcccagcgcctcccaccccttttcatagcaggaaaagccggagcccagggagggaacggacctgcgagtcacacaactggtgacccacaccagcggctggagcaggaccctcttggggagaagagcatcctgcccgcagccagggcccctcatcaaagtcctcggtgttttttaaattatcagaactgcccaggaccacgtttcccaggccctgcccagctgggactcctcggtccttgcctcctagtttctcaggcctggccctctcaaggcccaggcaccccaggccggttggaggccccgacttccactctggagaaccgtccaccctggaaagaagagctcagattcctcttggctctcggagccgcagggagtgtgtcttcccgcgccaccctccaccccccgaaatgtttctgtttctaatcccagcctgggcaggaatgtggctccccggccaggggccaaggagctattttggggtctcgtttgcccagggagggcttggctccaccactttcctcccccagcctttgggcagcaggtcacccctgttcaggctctgagggtgccccctcctggtcctgtcctcaccaccccttccccacctcctgggaaaaaaaaaaaaaaaaaaaaaaaagctggtataaagcagagagcctgagggctaaatttaactgtccgagtcggaatccatctctgagtcacccaagaagctgccctggcctcccgtccccttcccaggcctcaacccctttctcccacccagccccaacccccagccctcaccccctagcccccagttctggagcttgtcgggagcaagggggtggttgctactgggtcactcagcctcaattggccctgtttcagcaatgggcaggttcttcttgaaattcatcacacctgtggcttcctctgtgctctacctttttattggggtgacagtgtgacagctgagattctccatgcattccccctactctagcactgaagggttctgaagggccctggaaggagggagcttggggggctggcttgtgaggggttaaggctgggaggcgggaggggggctggaccaaggggtggggagaaggggaggaggcctcggccggccgcagagagaagtggccagagaggcccaggggacagccagggacaggcagacatgcagccagggctccagggcctggacaggggctgccaggccctgtgacaggaggaccccgagcccccggcccggggaggggccatggtgctgcctgtccaacatgtcagccgaggtgcggctgaggcggctccagcagctggtgttggacccgggcttcctggggctggagcccctgctcgaccttctcctgggcgtccaccaggagctgggcgcctccgaactggcccaggacaagtacgtggccgacttcttgcagtgggcggagcccatcgtggtgaggcttaaggaggtccgactgcagagggacgacttcgagattctgaaggtgatcggacgcggggcgttcagcgaggtagcggtagtgaagatgaagcagacgggccaggtgtatgccatgaagatcatgaacaagtgggacatgctgaagaggggcgaggtgtcgtgcttccgtgaggagagggacgtgttggtgaatggggaccggcggtggatcacgcagctgcacttcgccttccaggatgagaactacctgtacctggtcatggagtattacgtgggcggggacctgctgacactgctgagcaagtttggggagcggattccggccgagatggcgcgcttctacctggcggagattgtcatggccatagactcggtgcaccggcttggctacgtgcacagggacatcaaacccgacaacatcctgctggaccgctgtggccacatccgcctggccgacttcggctcttgcctcaagctgcgggcagatggaacggtgcggtcgctggtggctgtgggcaccccagactacctgtcccccgagatcctgcaggctgtgggcggtgggcctgggacaggcagctacgggcccgagtgtgactggtgggcgctgggtgtattcgcctatgaaatgttctatgggcagacgcccttctacgcggattccacggcggagacctatggcaagatcgtccactacaaggagcacctctctctgccgctggtggacgaaggggtccctgaggaggctcgagacttcattcagcggttgctgtgtcccccggagacacggctgggccggggtggagcaggcgacttccggacacatcccttcttctttggcctcgactgggatggtctccgggacagcgtgcccccctttacaccggatttcgaaggtgccaccgacacatgcaacttcgacttggtggaggacgggctcactgccatggtgagcgggggcggggagacactgtcggacattcgggaaggtgcgccgctaggggtccacctgccttttgtgggctactcctactcctgcatggccctcagggacagtgaggtcccaggccccacacccatggaactggaggccgagcagctgcttgagccacacgtgcaagcgcccagcctggagccctcggtgtccccacaggatgaaacagctgaagtggcagttccagcggctgtccctgcggcagaggctgaggccgaggtgacgctgcgggagctccaggaagccctggaggaggaggtgctcacccggcagagcctgagccgggagatggaggccatccgcacggacaaccagaacttcgccagtcaactacgcgaggcagaggctcggaaccgggacctagaggcacacgtccggcagttgcaggagcggatggagttgctgcaggcagagggagccacagctgtcacgggggtccccagtccccgggccacggatccaccttcccatctagatggccccccggccgtggctgtgggccagtgcccgctggtggggccaggccccatgcaccgccgccacctgctgctccctgccagggtccctaggcctggcctatcggaggcgctttccctgctcctgttcgccgttgttctgtctcgtgccgccgccctgggctgcattgggttggtggcccacgccggccaactcaccgcagtctggcgccgcccaggagccgcccgcgctccctgaaccctagaactgtcttcgactccggggccccgttggaagactgagtgcccggggcacggcacagaagccgcgcccaccgcctgccagttcacaaccgctccgagcgctgaggccctgacgtggatgggcaaactgcaggcctgggaaggcagcaagccgggccgtccgtgttccatcctccacgcacccccacctatcgttggttcgcaaagtgcaaagctttcttgtgcatgacgccctgctctggggagcgtctggcgcgatctctgcctgcttactcgggaaatttgcttttgccaaacccgctttttcggggatcccgcgcccccctcctcacttgcgctgctctcggagccccagccggctccgcccgcttcggcggtttggatatttattgacctcgtcctccgactcgctgacaggctacaggacccccaacaaccccaatccacgttttggatgcactgagaccccgacattcctcggtatttattgtctgtccccacctaggacccccacccccgaccctcgcgaataaaaggccctccatctgcccaaagctctggactccacagtgtccgcggtttgcgttgtgggccggaggctccgcagcgggccaatccggaggcgtgtggaggcggccgaaggtctgggaggagctagcgggatgcgaagcggccgaatcagggttgggggaggaaaagccacggggcggggctttggcgtccggccaataggagggcgagcgggccacccggaggcaccgcccccgcccagctgtggcccagctgtgccaccgagcgtcgagaagagggggctgggctggcagcgcgcgcggccatcctccttccactgcgcctgcgcacgccacgcgcatccgctcctgggacgcaagctcgagaaaagttgctgcaaactttctagcccgttccccgcccctcctcccggccagacccgccccccctgcggagccgggaattccgaggggcggagcgcaggccgagatggggaatgtgggggcctgcagaggaccctggagacggaggcgtgcagaagctcagtctcggggcggaggcttcgcgcccttagtcctcctggacggcccgttaccttctgcgttgtcccgatggggaaactgaggccctgagccagaagcacacgctggggggaggcagaaagcgcggccagaggcggagggaaaacaaagggagaatcacagacagacgggagggggacggacacacacaaggggacagagacccgagtggagagctggatctcgccttcccggcgtggggcgcagggtcggccagaaagaagatcgagaagagcggggagtgggggcgaaaaggggggacaggtgggggaggaggctggggaaagcccgagggaggaagagagggagggaggaacttcccaaagttgcaaaacatggctaccttgccactgaagccagagacggccatctccgtgcctgagggaggcctcccggtggcccccagccctgctctcccagaggctcacgccctaggcaccctttctgcacagcagccaccccccgccgctgccaccacctccagcaccagcctgcccttctcccctgactcccctggcctcctgcccaacttcccggcgcccccaccagaggggctgatgttgtcacccgcggccgtgcctgtctggtcagcagggctggaactaagcgcaggaacagaggggctgctggaagcggaaaaggggctggggacacaggccccccacaccatgctgaggctgccagaccccgaccctgaggggctgctcctgggggccaccgcagggggtgaggttgacgaggggttggaagctgaggccaaggttctgacccagctccagtcggtgcctgtggaggagcccttggaactgtgacccagtgtggccccgtggcctctcccgacattggtgctgaagacgcagggacaggaatgggaggggggagccccagaaatgcggttgctgaagaccccagtcaccacatccttctgcctgggtggcctctccaagccctggtggtgctgggggttgtatccccggccacctcctgtccaggtctccatccccctttggatgggaggcctctctgttacagccctccccatgctgtgccctgccatatacgtgggggactcagggtcctgactcaggggccctgccccctccacttggtactagctgtaagcggaacaccctgccccagggccggacttccagcccccagagccctctccctgtcactccctgaaacactattaatagctctgccgatagctggtgttgtcacaactgcctggaatccgaaggtggaggacaggcagccccgcgcccctgagactggagaccctccccagtgtggcatttcctgccaggggcggggggtggggcagctgtggggagacgggggtcttccttcaccagctcccctcgactcaagcccttgtcctcattatccggcccagaccaaagattccctcatccctgggggcagccctgccgctgtgtctcctttgtatcctaaatctttatttttctaggacatgttatgcctccattttcaattaaaataaagttatcggattacaccacca

SEQ ID NO: 369560 - DNA, 8219 bp, Homo sapiens
cggctgcgggcggcagtccggcagtggcggggcccggggggcgcccaagatggcggcgggcggcgcggagggcggctcgggccccggcgccgccatgggggactgcgcggagattaagtcgcaattccgcacgcgcgagggtttctacaagctactcccgggcgacggcgccgctcgcaggtcgggtccggcttccgcccagactccggtgccgcctcagccaccgcagcccccgcccggccctgcctccgcctccggtcccggcgctgcaggccccgcgtcgtccccgccgcccgcaggccccggacccgggcccgccctgcccgccgtgcgcctcagcctcgtgcgcctcggggagccggacagcgccggggccggggagccgcccgccacgcccgcggggctgggctcggggggagaccgcgtctgcttcaacttgggccgtgagctctatttctacccaggctgctgtcgtcgtgggagccaacggtccattgacctcaacaagccaattgacaagcggatctacaagggcacccagcccacctgccacgatttcaaccagttcactgctgccaccgagaccatctcgctgctggtgggcttctcagcgggtcaagtgcagtacctggatctcatcaaaaaggacaccagcaagctgttcaatgaggagcggttgatcgacaagaccaaggtgacatatctgaagtggctgcctgagtcggagagcctgttcctggcatcacacgccagtggccacctgtacctgtacaacgtcagccacccctgcgcctcggccccgccccagtacagcctgctgaagcagggcgagggcttctctgtctatgctgccaagagcaaggcaccccgcaacccgctggccaagtgggcggtgggtgaggggcccctcaacgagttcgccttctcgcccgatggccggcacctggcctgtgtgagccaggatggctgcctgcgcgtcttccacttcgactccatgctcctgcgtgggctcatgaagagctactttgggggcctgctgtgtgtgtgctggagccctgacggccgctacgtggtgacgggtggcgaagatgacctggtcaccgtgtggtccttcaccgagggccgcgtggtggctcgaggccatggccacaagtcctgggtcaacgctgtggcctttgacccctacaccacaagggcagaggaggcggcgacagcagccggtgctgatggggagcggagcggcgaagaggaggaggaggagcccgaggctgcgggcacaggctcggccgggggcgccccgctctctccactgcccaaggctggctccattacttaccgctttggctcggcgggccaggacacgcagttctgcctgtgggacctcactgaagacgtgctctacccgcacccgcccctggcccgcacccgcaccctccctggcacacctggcaccacgccaccggccgccagcagctcgaggggtggcgagcctggcccaggccccctgcctcgctcgctgtcccgctccaacagtctcccgcacccagctggcgggggcaaggcgggcggcccgggtgtggcggcagagcctggcacaccattcagcattggccgcttcgccacgctcacactgcaggagcggcgggaccggggggcagagaaggagcacaagcgctaccacagcctgggcaacatcagccggggtggcagtggcggcagtggcagtggtggggagaagcccagcggccctgttccccgcagccgcctggaccccgccaaggtgctgggcactgcgctgtgcccgcgcatccacgaggtgcccctgctggagccccttgtgtgcaagaagatcgcccaggagcggctcacagtcctcctgttcctggaggactgcatcatcactgcctgccaggagggcctcatctgcacctgggcccggccgggcaaggcgttcacagacgaggagaccgaggcccagacaggggaaggaagttggcccaggtcacccagcaagtcagtggtagagggcatctcctcccaaccaggcaactccccgagtggcacagtggtgtgaagccatggatatcgggcccccccaaccccatgcccccagcctcctagccataaccctccctgctgacctcacagatcaacgtattaacaagactaaccatgatggatggactgctccagtccccccacctgcacaaaatttgggggccccccagactggcccggacacgggcgatgtaatagcccttgtggcctcagccttgtcccccacccactgccaagtacaatgacctcttcctctgaaacatcagtgttaccctcatccctgtccccagcatgtgactggtcactcctggggagagactccccgcccctgccacaagagccccaggtctgcagtgtgcccctcagttgagtgggcagggccgggggtggtccagccctcgcccggcccccaccccagctgcccttgctattgtctgtgcttttgaagagtgttaaattatggaagcccctcaggttcctccctgtcccgcaggacctcttatttatactaaagttccctgttttctcagcgggtctgtccccttcggaggagatgatgtagaggacctgtgtgtgtactctgtggttctaggcagtccgctttccccagaggaggagtgcaggcctgctcccagcccagcgcctcccaccccttttcatagcaggaaaagccggagcccagggagggaacggacctgcgagtcacacaactggtgacccacaccagcggctggagcaggaccctcttggggagaagagcatcctgcccgcagccagggcccctcatcaaagtcctcggtgttttttaaattatcagaactgcccaggaccacgtttcccaggccctgcccagctgggactcctcggtccttgcctcctagtttctcaggcctggccctctcaaggcccaggcaccccaggccggttggaggccccgacttccactctggagaaccgtccaccctggaaagaagagctcagattcctcttggctctcggagccgcagggagtgtgtcttcccgcgccaccctccaccccccgaaatgtttctgtttctaatcccagcctgggcaggaatgtggctccccggccaggggccaaggagctattttggggtctcgtttgcccagggagggcttggctccaccactttcctcccccagcctttgggcagcaggtcacccctgttcaggctctgagggtgccccctcctggtcctgtcctcaccaccccttccccacctcctgggaaaaaaaaaaaaaaaaaaaaaaaagctggtataaagcagagagcctgagggctaaatttaactgtccgagtcggaatccatctctgagtcacccaagaagctgccctggcctcccgtccccttcccaggcctcaacccctttctcccacccagccccaacccccagccctcaccccctagcccccagttctggagcttgtcgggagcaagggggtggttgctactgggtcactcagcctcaattggccctgtttcagcaatgggcaggttcttcttgaaattcatcacacctgtggcttcctctgtgctctacctttttattggggtgacagtgtgacagctgagattctccatgcattccccctactctagcactgaagggttctgaagggccctggaaggagggagcttggggggctggcttgtgaggggttaaggctgggaggcgggaggggggctggaccaaggggtggggagaaggggaggaggcctcggccggccgcagagagaagtggccagagaggcccaggggacagccagggacaggcagacatgcagccagggctccagggcctggacaggggctgccaggccctgtgacaggaggaccccgagcccccggcccggggaggggccatggtgctgcctgtccaacatgtcagccgaggtgcggctgaggcggctccagcagctggtgttggacccgggcttcctggggctggagcccctgctcgaccttctcctgggcgtccaccaggagctgggcgcctccgaactggcccaggacaagtacgtggccgacttcttgcagtgggcggagcccatcgtggtgaggcttaaggaggtccgactgcagagggacgacttcgagattctgaaggtgatcggacgcggggcgttcagcgaggtagcggtagtgaagatgaagcagacgggccaggtgtatgccatgaagatcatgaacaagtgggacatgctgaagaggggcgaggtgtcgtgcttccgtgaggagagggacgtgttggtgaatggggaccggcggtggatcacgcagctgcacttcgccttccaggatgagaactacctgtacctggtcatggagtattacgtgggcggggacctgctgacactgctgagcaagtttggggagcggattccggccgagatggcgcgcttctacctggcggagattgtcatggccatagactcggtgcaccggcttggctacgtgcacagggacatcaaacccgacaacatcctgctggaccgctgtggccacatccgcctggccgacttcggctcttgcctcaagctgcgggcagatggaacggtgcggtcgctggtggctgtgggcaccccagactacctgtcccccgagatcctgcaggctgtgggcggtgggcctgggacaggcagctacgggcccgagtgtgactggtgggcgctgggtgtattcgcctatgaaatgttctatgggcagacgcccttctacgcggattccacggcggagacctatggcaagatcgtccactacaaggagcacctctctctgccgctggtggacgaaggggtccctgaggaggctcgagacttcattcagcggttgctgtgtcccccggagacacggctgggccggggtggagcaggcgacttccggacacatcccttcttctttggcctcgactgggatggtctccgggacagcgtgcccccctttacaccggatttcgaaggtgccaccgacacatgcaacttcgacttggtggaggacgggctcactgccatggtgagcgggggcggggagacactgtcggacattcgggaaggtgcgccgctaggggtccacctgccttttgtgggctactcctactcctgcatggccctcagggacagtgaggtcccaggccccacacccatggaactggaggccgagcagctgcttgagccacacgtgcaagcgcccagcctggagccctcggtgtccccacaggatgaaacagctgaagtggcagttccagcggctgtccctgcggcagaggctgaggccgaggtgacgctgcgggagctccaggaagccctggaggaggaggtgctcacccggcagagcctgagccgggagatggaggccatccgcacggacaaccagaacttcgccagtcaactacgcgaggcagaggctcggaaccgggacctagaggcacacgtccggcagttgcaggagcggatggagttgctgcaggcagagggagccacagctgtcacgggggtccccagtccccgggccacggatccaccttcccatctagatggccccccggccgtggctgtgggccagtgcccgctggtggggccaggccccatgcaccgccgccacctgctgctccctgccagggctgaggccctgacgtggatgggcaaactgcaggcctgggaaggcagcaagccgggccgtccgtgttccatcctccacgcacccccacctatcgttggttcgcaaagtgcaaagctttcttgtgcatgacgccctgctctggggagcgtctggcgcgatctctgcctgcttactcgggaaatttgcttttgccaaacccgctttttcggggatcccgcgcccccctcctcacttgcgctgctctcggagccccagccggctccgcccgcttcggcggtttggatatttattgacctcgtcctccgactcgctgacaggctacaggacccccaacaaccccaatccacgttttggatgcactgagaccccgacattcctcggtatttattgtctgtccccacctaggacccccacccccgaccctcgcgaataaaaggccctccatctgcccaaagctctggactccacagtgtccgcggtttgcgttgtgggccggaggctccgcagcgggccaatccggaggcgtgtggaggcggccgaaggtctgggaggagctagcgggatgcgaagcggccgaatcagggttgggggaggaaaagccacggggcggggctttggcgtccggccaataggagggcgagcgggccacccggaggcaccgcccccgcccagctgtggcccagctgtgccaccgagcgtcgagaagagggggctgggctggcagcgcgcgcggccatcctccttccactgcgcctgcgcacgccacgcgcatccgctcctgggacgcaagctcgagaaaagttgctgcaaactttctagcccgttccccgcccctcctcccggccagacccgccccccctgcggagccgggaattccgaggggcggagcgcaggccgagatggggaatgtgggggcctgcagaggaccctggagacggaggcgtgcagaagctcagtctcggggcggaggcttcgcgcccttagtcctcctggacggcccgttaccttctgcgttgtcccgatggggaaactgaggccctgagccagaagcacacgctggggggaggcagaaagcgcggccagaggcggagggaaaacaaagggagaatcacagacagacgggagggggacggacacacacaaggggacagagacccgagtggagagctggatctcgccttcccggcgtggggcgcagggtcggccagaaagaagatcgagaagagcggggagtgggggcgaaaaggggggacaggtgggggaggaggctggggaaagcccgagggaggaagagagggagggaggaacttcccaaagttgcaaaacatggctaccttgccactgaagccagagacggccatctccgtgcctgagggaggcctcccggtggcccccagccctgctctcccagaggctcacgccctaggcaccctttctgcacagcagccaccccccgccgctgccaccacctccagcaccagcctgcccttctcccctgactcccctggcctcctgcccaacttcccggcgcccccaccagaggggctgatgttgtcacccgcggccgtgcctgtctggtcagcagggctggaactaagcgcaggaacagaggggctgctggaagcggaaaaggggctggggacacaggccccccacaccatgctgaggctgccagaccccgaccctgaggggctgctcctgggggccaccgcagggggtgaggttgacgaggggttggaagctgaggccaaggttctgacccagctccagtcggtgcctgtggaggagcccttggaactgtgacccagtgtggccccgtggcctctcccgacattggtgctgaagacgcagggacaggaatgggaggggggagccccagaaatgcggttgctgaagaccccagtcaccacatccttctgcctgggtggcctctccaagccctggtggtgctgggggttgtatccccggccacctcctgtccaggtctccatccccctttggatgggaggcctctctgttacagccctccccatgctgtgccctgccatatacgtgggggactcagggtcctgactcaggggccctgccccctccacttggtactagctgtaagcggaacaccctgccccagggccggacttccagcccccagagccctctccctgtcactccctgaaacactattaatagctctgccgatagctggtgttgtcacaactgcctggaatccgaaggtggaggacaggcagccccgcgcccctgagactggagaccctccccagtgtggcatttcctgccaggggcggggggtggggcagctgtggggagacgggggtcttccttcaccagctcccctcgactcaagcccttgtcctcattatccggcccagaccaaagattccctcatccctgggggcagccctgccgctgtgtctcctttgtatcctaaatctttatttttctaggacatgttatgcctccattttcaattaaaataaagttatcggattacaccacca

SEQ ID NO: 369561 - DNA, 8651 bp, Homo sapiens
cggctgcgggcggcagtccggcagtggcggggcccggggggcgcccaagatggcggcgggcggcgcggagggcggctcgggccccggcgccgccatgggggactgcgcggagattaagtcgcaattccgcacgcgcgagggtttctacaagctactcccgggcgacggcgccgctcgcaggtcgggtccggcttccgcccagactccggtgccgcctcagccaccgcagcccccgcccggccctgcctccgcctccggtcccggcgctgcaggccccgcgtcgtccccgccgcccgcaggccccggacccgggcccgccctgcccgccgtgcgcctcagcctcgtgcgcctcggggagccggacagcgccggggccggggagccgcccgccacgcccgcggggctgggctcggggggagaccgcgtctgcttcaacttgggccgtgagctctatttctacccaggctgctgtcgtcgtgggagccaacggtccattgacctcaacaagccaattgacaagcggatctacaagggcacccagcccacctgccacgatttcaaccagttcactgctgccaccgagaccatctcgctgctggtgggcttctcagcgggtcaagtgcagtacctggatctcatcaaaaaggacaccagcaagctgttcaatgaggagcggttgatcgacaagaccaaggtgacatatctgaagtggctgcctgagtcggagagcctgttcctggcatcacacgccagtggccacctgtacctgtacaacgtcagccacccctgcgcctcggccccgccccagtacagcctgctgaagcagggcgagggcttctctgtctatgctgccaagagcaaggcaccccgcaacccgctggccaagtgggcggtgggtgaggggcccctcaacgagttcgccttctcgcccgatggccggcacctggcctgtgtgagccaggatggctgcctgcgcgtcttccacttcgactccatgctcctgcgtgggctcatgaagagctactttgggggcctgctgtgtgtgtgctggagccctgacggccgctacgtggtgacgggtggcgaagatgacctggtcaccgtgtggtccttcaccgagggccgcgtggtggctcgaggccatggccacaagtcctgggtcaacgctgtggcctttgacccctacaccacaagggcagaggaggcggcgacagcagccggtgctgatggggagcggagcggcgaagaggaggaggaggagcccgaggctgcgggcacaggctcggccgggggcgccccgctctctccactgcccaaggctggctccattacttaccgctttggctcggcgggccaggacacgcagttctgcctgtgggacctcactgaagacgtgctctacccgcacccgcccctggcccgcacccgcaccctccctggcacacctggcaccacgccaccggccgccagcagctcgaggggtggcgagcctggcccaggccccctgcctcgctcgctgtcccgctccaacagtctcccgcacccagctggcgggggcaaggcgggcggcccgggtgtggcggcagagcctggcacaccattcagcattggccgcttcgccacgctcacactgcaggagcggcgggaccggggggcagagaaggagcacaagcgctaccacagcctgggcaacatcagccggggtggcagtggcggcagtggcagtggtggggagaagcccagcggccctgttccccgcagccgcctggaccccgccaaggtgctgggcactgcgctgtgcccgcgcatccacgaggtgcccctgctggagccccttgtgtgcaagaagatcgcccaggagcggctcacagtcctcctgttcctggaggactgcatcatcactgcctgccaggagggcctcatctgcacctgggcccggccgggcaaggcgttcacagacgaggagaccgaggcccagacaggggaaggaagttggcccaggtcacccagcaagtcagtggtagagggcatctcctcccaaccaggcaactccccgagtggcacagtggtgtgaagccatggatatcgggcccccccaaccccatgcccccagcctcctagccataaccctccctgctgacctcacagatcaacgtattaacaagactaaccatgatggatggactgctccagtccccccacctgcacaaaatttgggggccccccagactggcccggacacgggcgatgtaatagcccttgtggcctcagccttgtcccccacccactgccaagtacaatgacctcttcctctgaaacatcagtgttaccctcatccctgtccccagcatgtgactggtcactcctggggagagactccccgcccctgccacaagagccccaggtctgcagtgtgcccctcagttgagtgggcagggccgggggtggtccagccctcgcccggcccccaccccagctgcccttgctattgtctgtgcttttgaagagtgttaaattatggaagcccctcaggttcctccctgtcccgcaggacctcttatttatactaaagttccctgttttctcagcgggtctgtccccttcggaggagatgatgtagaggacctgtgtgtgtactctgtggttctaggcagtccgctttccccagaggaggagtgcaggcctgctcccagcccagcgcctcccaccccttttcatagcaggaaaagccggagcccagggagggaacggacctgcgagtcacacaactggtgacccacaccagcggctggagcaggaccctcttggggagaagagcatcctgcccgcagccagggcccctcatcaaagtcctcggtgttttttaaattatcagaactgcccaggaccacgtttcccaggccctgcccagctgggactcctcggtccttgcctcctagtttctcaggcctggccctctcaaggcccaggcaccccaggccggttggaggccccgacttccactctggagaaccgtccaccctggaaagaagagctcagattcctcttggctctcggagccgcagggagtgtgtcttcccgcgccaccctccaccccccgaaatgtttctgtttctaatcccagcctgggcaggaatgtggctccccggccaggggccaaggagctattttggggtctcgtttgcccagggagggcttggctccaccactttcctcccccagcctttgggcagcaggtcacccctgttcaggctctgagggtgccccctcctggtcctgtcctcaccaccccttccccacctcctgggaaaaaaaaaaaaaaaaaaaaaaaagctggtataaagcagagagcctgagggctaaatttaactgtccgagtcggaatccatctctgagtcacccaagaagctgccctggcctcccgtccccttcccaggcctcaacccctttctcccacccagccccaacccccagccctcaccccctagcccccagttctggagcttgtcgggagcaagggggtggttgctactgggtcactcagcctcaattggccctgtttcagcaatgggcaggttcttcttgaaattcatcacacctgtggcttcctctgtgctctacctttttattggggtgacagtgtgacagctgagattctccatgcattccccctactctagcactgaagggttctgaagggccctggaaggagggagcttggggggctggcttgtgaggggttaaggctgggaggcgggaggggggctggaccaaggggtggggagaaggggaggaggcctcggccggccgcagagagaagtggccagagaggcccaggggacagccagggacaggcagacatgcagccagggctccagggcctggacaggggctgccaggccctgtgacaggaggaccccgagcccccggcccggggaggggccatggtgctgcctgtccaacatgtcagccgaggtgcggctgaggcggctccagcagctggtgttggacccgggcttcctggggctggagcccctgctcgaccttctcctgggcgtccaccaggagctgggcgcctccgaactggcccaggacaagtacgtggccgacttcttgcagtgggcggagcccatcgtggtgaggcttaaggaggtccgactgcagagggacgacttcgagattctgaaggtgatcggacgcggggcgttcagcgaggtagcggtagtgaagatgaagcagacgggccaggtgtatgccatgaagatcatgaacaagtgggacatgctgaagaggggcgaggtgtcgtgcttccgtgaggagagggacgtgttggtgaatggggaccggcggtggatcacgcagctgcacttcgccttccaggatgagaactacctgtacctggtcatggagtattacgtgggcggggacctgctgacactgctgagcaagtttggggagcggattccggccgagatggcgcgcttctacctggcggagattgtcatggccatagactcggtgcaccggcttggctacgtgcacagggacatcaaacccgacaacatcctgctggaccgctgtggccacatccgcctggccgacttcggctcttgcctcaagctgcgggcagatggaacggtgcggtcgctggtggctgtgggcaccccagactacctgtcccccgagatcctgcaggctgtgggcggtgggcctgggacaggcagctacgggcccgagtgtgactggtgggcgctgggtgtattcgcctatgaaatgttctatgggcagacgcccttctacgcggattccacggcggagacctatggcaagatcgtccactacaaggagcacctctctctgccgctggtggacgaaggggtccctgaggaggctcgagacttcattcagcggttgctgtgtcccccggagacacggctgggccggggtggagcaggcgacttccggacacatcccttcttctttggcctcgactgggatggtctccgggacagcgtgcccccctttacaccggatttcgaaggtgccaccgacacatgcaacttcgacttggtggaggacgggctcactgccatggtgagcgggggcggggagacactgtcggacattcgggaaggtgcgccgctaggggtccacctgccttttgtgggctactcctactcctgcatggccctcagggacagtgaggtcccaggccccacacccatggaactggaggccgagcagctgcttgagccacacgtgcaagcgcccagcctggagccctcggtgtccccacaggatgaaacagctgaagtggcagttccagcggctgtccctgcggcagaggctgaggccgaggtgacgctgcgggagctccaggaagccctggaggaggaggtgctcacccggcagagcctgagccgggagatggaggccatccgcacggacaaccagaacttcgccagtcaactacgcgaggcagaggctcggaaccgggacctagaggcacacgtccggcagttgcaggagcggatggagttgctgcaggcagagggagccacagctgtcacgggggtccccagtccccgggccacggatccaccttcccatctagatggccccccggccgtggctgtgggccagtgcccgctggtggggccaggccccatgcaccgccgccacctgctgctccctgccagggtccctaggcctggcctatcggaggcgctttccctgctcctgttcgccgttgttctgtctcgtgccgccgccctgggctgcattgggttggtggcccacgccggccaactcaccgcagtctggcgccgcccaggagccgcccgcgctccctgaaccctagaactgtcttcgactccggggccccgttggaagactgagtgcccggggcacggcacagaagccgcgcccaccgcctgccagttcacaaccgctccgagcgtgggtctccgcccagctccagtcctgtgatccgggcccgccccctagcggccggggagggaggggccgggtccgcggccggcgaacggggctcgaagggtccttgtagccgggaatgctgctgctgctgctgctgctgctgctgctgctgctgctgctgctgctgctgctgctgctggggggatcacagaccatttctttctttcggccaggctgaggccctgacgtggatgggcaaactgcaggcctgggaaggcagcaagccgggccgtccgtgttccatcctccacgcacccccacctatcgttggttcgcaaagtgcaaagctttcttgtgcgcctgcttactcgggaaatttgcttttgccaaacccgctttttcggggatcccgcgcccccctcctcacttgcgctgctctcggagccccagccggctccgcccgcttcggcggtttggatatttattgacctcgtcctccgactcgctgacaggctacaggacccccaacaaccccaatccacgttttggatgcactgagaccccgacattcctcggtatttattgtctgtccccacctaggacccccacccccgaccctcgcgaataaaaggccctccatctgcccaaagctctggactccacagtgtccgcggtttgcgttgtgggccggaggctccgcagcgggccaatccggaggcgtgtggaggcggccgaaggtctgggaggagctagcgggatgcgaagcggccgaatcagggttgggggaggaaaagccacggggcggggctttggcgtccggccaataggagggcgagcgggccacccggaggcaccgcccccgcccagctgtggcccagctgtgccaccgagcgtcgagaagagggggctgggctggcagcgcgcgcggccatcctccttccactgcgcctgcgcacgccacgcgcatccgctcctgggacgcaagctcgagaaaagttgctgcaaactttctagcccgttccccgcccctcctcccggccagacccgccccccctgcggagccgggaattccgaggggcggagcgcaggccgagatggggaatgtgggggcctgcagaggaccctggagacggaggcgtgcagaagctcagtctcggggcggaggcttcgcgcccttagtcctcctggacggcccgttaccttctgcgttgtcccgatggggaaactgaggccctgagccagaagcacacgctggggggaggcagaaagcgcggccagaggcggagggaaaacaaagggagaatcacagacagacgggagggggacggacacacacaaggggacagagacccgagtggagagctggatctcgccttcccggcgtggggcgcagggtcggccagaaagaagatcgagaagagcggggagtgggggcgaaaaggggggacaggtgggggaggaggctggggaaagcccgagggaggaagagagggagggaggaacttcccaaagttgcaaaacatggctaccttgccactgaagccagagacggccatctccgtgcctgagggaggcctcccggtggcccccagccctgctctcccagaggctcacgccctaggcaccctttctgcacagcagccaccccccgccgctgccaccacctccagcaccagcctgcccttctcccctgactcccctggcctcctgcccaacttcccggcgcccccaccagaggggctgatgttgtcacccgcggccgtgcctgtctggtcagcagggctggaactaagcgcaggaacagaggggctgctggaagcggaaaaggggctggggacacaggccccccacaccatgctgaggctgccagaccccgaccctgaggggctgctcctgggggccaccgcagggggtgaggttgacgaggggttggaagctgaggccaaggttctgacccagctccagtcggtgcctgtggaggagcccttggaactgtgacccagtgtggccccgtggcctctcccgacattggtgctgaagacgcagggacaggaatgggaggggggagccccagaaatgcggttgctgaagaccccagtcaccacatccttctgcctgggtggcctctccaagccctggtggtgctgggggttgtatccccggccacctcctgtccaggtctccatccccctttggatgggaggcctctctgttacagccctccccatgctgtgccctgccatatacgtgggggactcagggtcctgactcaggggccctgccccctccacttggtactagctgtaagcggaacaccctgccccagggccggacttccagcccccagagccctctccctgtcactccctgaaacactattaatagctctgccgatagctggtgttgtcacaactgcctggaatccgaaggtggaggacaggcagccccgcgcccctgagactggagaccctccccagtgtggcatttcctgccaggggcggggggtggggcagctgtggggagacgggggtcttccttcaccagctcccctcgactcaagcccttgtcctcattatccggcccagaccaaagattccctcatccctgggggcagccctgccgctgtgtctcctttgtatcctaaatctttatttttctaggacatgttatgcctccattttcaattaaaataaagttatcggattacaccacca

SEQ ID NO: 369562 - DNA, 6314 bp, Homo sapiens
cggctgcgggcggcagtccggcagtggcggggcccggggggcgcccaagatggcggcgggcggcgcggagggcggctcgggccccggcgccgccatgggggactgcgcggagattaagtcgcaattccgcacgcgcgagggtttctacaagctactcccgggcgacggcgccgctcgcaggtcgggtccggcttccgcccagactccggtgccgcctcagccaccgcagcccccgcccggccctgcctccgcctccggtcccggcgctgcaggccccgcgtcgtccccgccgcccgcaggccccggacccgggcccgccctgcccgccgtgcgcctcagcctcgtgcgcctcggggagccggacagcgccggggccggggagccgcccgccacgcccgcggggctgggctcggggggagaccgcgtctgcttcaacttgggccgtgagctctatttctacccaggctgctgtcgtcgtgggagccaacggtccattgacctcaacaagccaattgacaagcggatctacaagggcacccagcccacctgccacgatttcaaccagttcactgctgccaccgagaccatctcgctgctggtgggcttctcagcgggtcaagtgcagtacctggatctcatcaaaaaggacaccagcaagctgttcaatgaggagcggttgatcgacaagaccaaggtgacatatctgaagtggctgcctgagtcggagagcctgttcctggcatcacacgccagtggccacctgtacctgtacaacgtcagccacccctgcgcctcggccccgccccagtacagcctgctgaagcagggcgagggcttctctgtctatgctgccaagagcaaggcaccccgcaacccgctggccaagtgggcggtgggtgaggggcccctcaacgagttcgccttctcgcccgatggccggcacctggcctgtgtgagccaggatggctgcctgcgcgtcttccacttcgactccatgctcctgcgtgggctcatgaagagctactttgggggcctgctgtgtgtgtgctggagccctgacggccgctacgtggtgacgggtggcgaagatgacctggtcaccgtgtggtccttcaccgagggccgcgtggtggctcgaggccatggccacaagtcctgggtcaacgctgtggcctttgacccctacaccacaagggcagaggaggcggcgacagcagccggtgctgatggggagcggagcggcgaagaggaggaggaggagcccgaggctgcgggcacaggctcggccgggggcgccccgctctctccactgcccaaggctggctccattacttaccgctttggctcggcgggccaggacacgcagttctgcctgtgggacctcactgaagacgtgctctacccgcacccgcccctggcccgcacccgcaccctccctggcacacctggcaccacgccaccggccgccagcagctcgaggggtggcgagcctggcccaggccccctgcctcgctcgctgtcccgctccaacagtctcccgcacccagctggcgggggcaaggcgggcggcccgggtgtggcggcagagcctggcacaccattcagcattggccgcttcgccacgctcacactgcaggagcggcgggaccggggggcagagaaggagcacaagcgctaccacagcctgggcaacatcagccggggtggcagtggcggcagtggcagtggtggggagaagcccagcggccctgttccccgcagccgcctggaccccgccaaggtgctgggcactgcgctgtgcccgcgcatccacgaggtgcccctgctggagccccttgtgtgcaagaagatcgcccaggagcggctcacagtcctcctgttcctggaggactgcatcatcactgcctgccaggagggcctcatctgcacctgggcccggccgggcaaggcgttcacagacgaggagaccgaggcccagacaggggaaggaagttggcccaggtcacccagcaagtcagtggtagagggcatctcctcccaaccaggcaactccccgagtggcacagtggtgtgaagccatggatatcgggcccccccaaccccatgcccccagcctcctagccataaccctccctgctgacctcacagatcaacgtattaacaagactaaccatgatggatggactgctccagtccccccacctgcacaaaatttgggggccccccagactggcccggacacgggcgatgtaatagcccttgtggcctcagccttgtcccccacccactgccaagtacaatgacctcttcctctgaaacatcagtgttaccctcatccctgtccccagcatgtgactggtcactcctggggagagactccccgcccctgccacaagagccccaggtctgcagtgtgcccctcagttgagtgggcagggccgggggtggtccagccctcgcccggcccccaccccagctgcccttgctattgtctgtgcttttgaagagtgttaaattatggaagcccctcaggttcctccctgtcccgcaggacctcttatttatactaaagttccctgttttctcagcgggtctgtccccttcggaggagatgatgtagaggacctgtgtgtgtactctgtggttctaggcagtccgctttccccagaggaggagtgcaggcctgctcccagcccagcgcctcccaccccttttcatagcaggaaaagccggagcccagggagggaacggacctgcgagtcacacaactggtgacccacaccagcggctggagcaggaccctcttggggagaagagcatcctgcccgcagccagggcccctcatcaaagtcctcggtgttttttaaattatcagaactgcccaggaccacgtttcccaggccctgcccagctgggactcctcggtccttgcctcctagtttctcaggcctggccctctcaaggcccaggcaccccaggccggttggaggccccgacttccactctggagaaccgtccaccctggaaagaagagctcagattcctcttggctctcggagccgcagggagtgtgtcttcccgcgccaccctccaccccccgaaatgtttctgtttctaatcccagcctgggcaggaatgtggctccccggccaggggccaaggagctattttggggtctcgtttgcccagggagggcttggctccaccactttcctcccccagcctttgggcagcaggtcacccctgttcaggctctgagggtgccccctcctggtcctgtcctcaccaccccttccccacctcctgggaaaaaaaaaaaaaaaaaaaaaaaagctggtataaagcagagagcctgagggctaaatttaactgtccgagtcggaatccatctctgagtcacccaagaagctgccctggcctcccgtccccttcccaggcctcaacccctttctcccacccagccccaacccccagccctcaccccctagcccccagttctggagcttgtcgggagcaagggggtggttgctactgggtcactcagcctcaattggccctgtttcagcaatgggcaggttcttcttgaaattcatcacacctgtggcttcctctgtgctctacctttttattggggtgacagtgtgacagctgagattctccatgcattccccctactctagcactgaagggttctgaagggccctggaaggagggagcttggggggctggcttgtgaggggttaaggctgggaggcgggaggggggctggaccaaggggtggggagaaggggaggaggcctcggccggccgcagagagaagtggccagagaggcccaggggacagccagggacaggcagacatgcagccagggctccagggcctggacaggggctgccaggccctgtgacaggaggaccccgagcccccggcccggggaggggccatggtgctgcctgtccaacatgtcagccgaggtgcggctgaggcggctccagcagctggtgttggacccgggcttcctggggctggagcccctgctcgaccttctcctgggcgtccaccaggagctgggcgcctccgaactggcccaggacaagtacgtggccgacttcttgcagtgggcggagcccatcgtggtgaggcttaaggaggtccgactgcagagggacgacttcgagattctgaaggtgatcggacgcggggcgttcagcgaggtagcggtagtgaagatgaagcagacgggccaggtgtatgccatgaagatcatgaacaagtgggacatgctgaagaggggcgaggtgtcgtgcttccgtgaggagagggacgtgttggtgaatggggaccggcggtggatcacgcagctgcacttcgccttccaggatgagaactacctgtacctggtcatggagtattacgtgggcggggacctgctgacactgctgagcaagtttggggagcggattccggccgagatggcgcgcttctacctggcggagattgtcatggccatagactcggtgcaccggcttggctacgtgcacagggacatcaaacccgacaacatcctgctggaccgctgtggccacatccgcctggccgacttcggctcttgcctcaagctgcgggcagatggaacggtgcggtcgctggtggctgtgggcaccccagactacctgtcccccgagatcctgcaggctgtgggcggtgggcctgggacaggcagctacgggcccgagtgtgactggtgggcgctgggtgtattcgcctatgaaatgttctatgggcagacgcccttctacgcggattccacggcggagacctatggcaagatcgtccactacaaggagcacctctctctgccgctggtggacgaaggggtccctgaggaggctcgagacttcattcagcggttgctgtgtcccccggagacacggctgggccggggtggagcaggcgacttccggacacatcccttcttctttggcctcgactgggatggtctccgggacagcgtgcccccctttacaccggatttcgaaggtgccaccgacacatgcaacttcgacttggtggaggacgggctcactgccatggtgagcgggggcggggtgagcgggggcggggtaggtacctgtggcccctgctcggctgcgggaacctccccatgctccctccataaagttggagtaaggacagtgcctaccttctggggtcctgaatcactcattccccagagcacctgctctgtgcccatctactactgaggacccagcagtgacctagacttacagtccagtgggggaacacagagcagtcttcagacagtaaggccccagagtgatcagggctgagacaatggagtgcagggggtgggggactcctgactcagcaaggaaggtcctggagggctttctggagtggggagctatctgagctgagacttggagggatgagaagcaggagaggactcctcctcccttaggccgtctctcttcaccgtgtaacaagctgtcatggcatgcttgctcggctctgggtgcccttttgctgaacaatactggggatccagcacggaccagatgagctctggtccctgccctcatccagttgcagtctagagaattagagaattatggagagtgtggcaggtgccctgaagggaagcaacaggatacaagaaaaaatgatggggccaggcacggtggctcacgcctgtaaccccagcaatttggcaggccgaagtgggtggattgcttgagcccaggagttcgagaccagcctgggcaatgtggtgagacccccgtctctacaaaaatgttttaaaaattggttgggcgtggtggcgcatgcctgtatactcagctactagggtggccgacgtgggcttgagcccaggaggtcaaggctgcagtgagctgtgattgtgccactgcactccagcctgggcaacggagagagactctgtctcaaaaataagataaactgaaattaaaaaataggctgggctggccgggcgtggtggctcacgcctgtaatctcagcactttgggaggccgaggcgggtggatcacgaggtcaggagatcgagaccatcttggctaacacggtgaaaccccatctctcctaaaaatacaaaaaattagccaggcgtggtggcgggcgcctgtagtcccagctactcaggaggctgaggcaggagaatggcgtgaacccgggaggcagagtttgcagtgagccgagatcgtgccactgcactccagcctgggcgacagagcgagactctgtctcagaaaaaaaaaaaaaaaaaaaaaaa

SEQ ID NO: 369563 - DNA, 2498 bp, Homo sapiens
cggctgcgggcggcagtccggcagtggcggggcccggggggcgcccaagatggcggcgggcggcgcggagggcggctcgggccccggcgccgccatgggggactgcgcggagattaagtcgcaattccgcacgcgcgagggtttctacaagctactcccgggcgacggcgccgctcgcaggtcgggtccggcttccgcccagactccggtgccgcctcagccaccgcagcccccgcccggccctgcctccgcctccggtcccggcgctgcaggccccgcgtcgtccccgccgcccgcaggccccggacccgggcccgccctgcccgccgtgcgcctcagcctcgtgcgcctcggggagccggacagcgccggggccggggagccgcccgccacgcccgcggggctgggctcggggggagaccgcgtctgcttcaacttgggccgtgagctctatttctacccaggctgctgtcgtcgtgggagccaacggtccattgacctcaacaagccaattgacaagcggatctacaagggcacccagcccacctgccacgatttcaaccagttcactgctgccaccgagaccatctcgctgctggtgggcttctcagcgggtcaagtgcagtacctggatctcatcaaaaaggacaccagcaagctgttcaatgaggagcggttgatcgacaagaccaaggtgacatatctgaagtggctgcctgagtcggagagcctgttcctggcatcacacgccagtggccacctgtacctgtacaacgtcagccacccctgcgcctcggccccgccccagtacagcctgctgaagcagggcgagggcttctctgtctatgctgccaagagcaaggcaccccgcaacccgctggccaagtgggcggtgggtgaggggcccctcaacgagttcgccttctcgcccgatggccggcacctggcctgtgtgagccaggatggctgcctgcgcgtcttccacttcgactccatgctcctgcgtgggctcatgaagagctactttgggggcctgctgtgtgtgtgctggagccctgacggccgctacgtggtgacgggtggcgaagatgacctggtcaccgtgtggtccttcaccgagggccgcgtggtggctcgaggccatggccacaagtcctgggtcaacgctgtggcctttgacccctacaccacaagggcagaggaggcggcgacagcagccggtgctgatggggagcggagcggcgaagaggaggaggaggagcccgaggctgcgggcacaggctcggccgggggcgccccgctctctccactgcccaaggctggctccattacttaccgctttggctcggcgggccaggacacgcagttctgcctgtgggacctcactgaagacgtgctctacccgcacccgcccctggcccgcacccgcaccctccctggcacacctggcaccacgccaccggccgccagcagctcgaggggtggcgagcctggcccaggccccctgcctcgctcgctgtcccgctccaacagtctcccgcacccagctggcgggggcaaggcgggcggcccgggtgtggcggcagagcctggcacaccattcagcattggccgcttcgccacgctcacactgcaggagcggcgggaccggggggcagagaaggagcacaagcgctaccacagcctgggcaacatcagccggggtggcagtggcggcagtggcagtggtggggagaagcccagcggccctgttccccgcagccgcctggaccccgccaaggtgctgggcactgcgctgtgcccgcgcatccacgaggtgcccctgctggagccccttgtgtgcaagaagatcgcccaggagcggctcacagtcctcctgttcctggaggactgcatcatcactgcctgccaggagggcctcatctgcacctgggcccggccgggcaaggcgttcacagacgaggagaccgaggcccagacaggggaaggaagttggcccaggtcacccagcaagtcagtggtagagggcatctcctcccaaccaggcaactccccgagtggcacagtggtgtgaagccatggatatcgggcccccccaaccccatgcccccagcctcctagccataaccctccctgctgacctcacagatcaacgtattaacaagactaaccatgatggatggactgctccagtccccccacctgcacaaaatttgggggccccccagactggcccggacacgggcgatgtaatagcccttgtggcctcagccttgtcccccacccactgccaagtacaatgacctcttcctctgaaacatcagtgttaccctcatccctgtccccagcatgtgactggtcactcctggggagagactccccgcccctgccacaagagccccaggtctgcagtgtgcccctcagttgagtgggcaaggacccgtggtgttttattcttagcccggtcgctataaccaactttgctggcaaatgttttg

SEQ ID NO: 369564 - DNA, 2450 bp, Homo sapiens
gcggccgcctactactactactgctcgaattcaagcttctaacgatgtacggggacatgacgccctgctctggggagcgtctggcgcgatctctgcctgcttactcgggaaatttgcttttgccaaacccgctttttcggggatcccgcgcccccctcctcacttgcgctgctctcggagccccagccggctccgcccgcttcggcggtttggatatttattgacctcgtcctccgactcgctgacaggctacaggacccccaacaaccccaatccacgttttggatgcactgagaccccgacattcctcggtatttattgtctgtccccacctaggacccccacccccgaccctcgcgaataaaaggccctccatctgcccaaagctctggactccacagtgtccgcggtttgcgttgtgggccggaggctccgcagcgggccaatccggaggcgtgtggaggcggccgaaggtctgggaggagctagcgggatgcgaagcggccgaatcagggttgggggaggaaaagccacggggcggggctttggcgtccggccaataggagggcgagcgggccacccggaggcaccgcccccgcccagctgtggcccagctgtgccaccgagcgtcgagaagagggggctgggctggcagcgcgcgcggccatcctccttccactgcgcctgcgcacgccacgcgcatccgctcctgggacgcaagctcgagaaaagttgctgcaaactttctagcccgttccccgcccctcctcccggccagacccgccccccctgcggagccgggaattccgaggggcggagcgcaggccgagatggggaatgtgggggcctgcagaggaccctggagacggaggcgtgcagaagctcagtctcggggcggaggcttcgcgcccttagtcctcctggacggcccgttaccttctgcgttgtcccgatggggaaactgaggccctgagccagaagcacacgctggggggaggcagaaagcgcggccagaggcggagggaaaacaaagggagaatcacagacagacgggagggggacggacacacacaaggggacagagacccgagtggagagctggatctcgccttcccggcgtggggcgcagggtcggccagaaagaagatcgagaagagcggggagtgggggcgaaaaggggggacaggtgggggaggaggctggggaaagcccgagggaggaagagagggagggaggaacttcccaaagttgcaaaacatggctaccttgccactgaagccagagacggccatctccgtgcctgagggaggcctcccggtggcccccagccctgctctcccagaggctcacgccctaggcaccctttctgcacagcagccaccccccgccgctgccaccacctccagcaccagcctgcccttctcccctgactcccctggcctcctgcccaacttcccggcgcccccaccagaggggctgatgttgtcacccgcggccgtgcctgtctggtcagcagggctggaactaagcgcaggaacagaggggctgctggaagcggaaaaggggctggggacacaggccccccacaccatgctgaggctgccagaccccgaccctgaggggctgctcctgggggccaccgcagggggtgaggttgacgaggggttggaagctgaggccaaggttctgacccagctccagtcggtgcctgtggaggagcccttggaactgtgacccagtgtggccccgtggcctctcccgacattggtgctgaagacgcagggacaggaatgggaggggggagccccagaaatgcggttgctgaagaccccagtcaccacatccttctgcctgggtggcctctccaagccctggtggtgctgggggttgtatccccggccacctcctgtccaggtctccatccccctttggatgggaggcctctctgttacagccctccccatgctgtgccctgccatatacgtgggggactcagggtcctgactcaggggccctgccccctccacttggtactagctgtaagcggaacaccctgccccagggccggacttccagcccccagagccctctccctgtcactccctgaaacactattaatagctctgccgatagctggtgttgtcacaactgcctggaatccgaaggtggaggacaggcagccccgcgcccctgagactggagaccctccccagtgtggcatttcctgccaggggcggggggtggggcagctgtggggagacgggggtcttccttcaccagctcccctcgactcaagcccttgtcctcattatccggcccagaccaaagattccctcatccctgggggcagccctgccgctgtgtctcctttgtatcctaaatctttatttttctaggacatgttatgcctccattttcaattaaaataaagttatcggattacaccacca

SEQ ID NO: 369565 - DNA, 3251 bp, Homo sapiens
ccacttcttccacccccgggagtccaggcctccctgtccccacagtccctgagccacaagcctccaccccagctggtcccccacccaggctgcccagtttaacattcctagtcataggaccttgacttctgagaggcctgattgtcatctgtaaataaggggtaggactaaagcactcctcctggaggactgagagatgggctggaccggagcacttgagtctgggatatgtgaccatgctacctttgtctccctgtcctgttccttcccccagccccaaatccagggttttccaaagtgtggttcaagaaccacctgcatctgaatctagaggtactggatacaaccccacgtctgggccgttacccaggacattctacatgagaacgtgggggtggggccctggctgcacctgaactgtcacctggagtcagggtggaaggtggaagaactgggtcttatttccttctccccttgttctttagggtctgtccttctgcagactccgttaccccaccctaaccatcctgcacacccttggagccctctgggccaatgccctgtcccgcaaagggcttctcaggcatctcacctctatgggagggcatttttggcccccagaaccttacacggtgtttatgtggggaagcccctgggaagcagacagtcctagggtgaagctgagaggcagagagaaggggagacagacagagggtggggctttcccccttgtctccagtgccctttctggtgaccctcggttcttttcccccaccacccccccagcggagcccatcgtggtgaggcttaaggaggtccgactgcagagggacgacttcgagattctgaaggtgatcggacgcggggcgttcagcgaggtagcggtagtgaagatgaagcagacgggccaggtgtatgccatgaagatcatgaacaagtgggacatgctgaagaggggcgaggtgtcgtgcttccgtgaggagagggacgtgttggtgaatggggaccggcggtggatcacgcagctgcacttcgccttccaggatgagaactacctgtacctggtcatggagtattacgtgggcggggacctgctgacactgctgagcaagtttggggagcggattccggccgagatggcgcgcttctacctggcggagattgtcatggccatagactcggtgcaccggcttggctacgtgcacagggacatcaaacccgacaacatcctgctggaccgctgtggccacatccgcctggccgacttcggctcttgcctcaagctgcgggcagatggaacggtgcggtcgctggtggctgtgggcaccccagactacctgtcccccgagatcctgcaggctgtgggcggtgggcctgggacaggcagctacgggcccgagtgtgactggtgggcgctgggtgtattcgcctatgaaatgttctatgggcagacgcccttctacgcggattccacggcggagacctatggcaagatcgtccactacaaggagcacctctctctgccgctggtggacgaaggggtccctgaggaggctcgagacttcattcagcggttgctgtgtcccccggagacacggctgggccggggtggagcaggcgacttccggacacatcccttcttctttggcctcgactgggatggtctccgggacagcgtgcccccctttacaccggatttcgaaggtgccaccgacacatgcaacttcgacttggtggaggacgggctcactgccatggtgagcgggggcggggagacactgtcggacattcgggaaggtgcgccgctaggggtccacctgccttttgtgggctactcctactcctgcatggccctcagggacagtgaggtcccaggccccacacccatggaactggaggccgagcagctgcttgagccacacgtgcaagcgcccagcctggagccctcggtgtccccacaggatgaaacagctgaagtggcagttccagcggctgtccctgcggcagaggctgaggccgaggtgacgctgcgggagctccaggaagccctggaggaggaggtgctcacccggcagagcctgagccgggagatggaggccatccgcacggacaaccagaacttcgccagtcaactacgcgaggcagaggctcggaaccgggacctagaggcacacgtccggcagttgcaggagcggatggagttgctgcaggcagagggagccacagctgtcacgggggtccccagtccccgggccacggatccaccttcccatctagatggccccccggccgtggctgtgggccagtgcccgctggtggggccaggccccatgcaccgccgccacctgctgctccctgccagggtccctaggcctggcctatcggaggcgctttccctgctcctgttcgccgttgttctgtctcgtgccgccgccctgggctgcattgggttggtggcccacgccggccaactcaccgcagtctggcgccgcccaggagccgcccgcgctccctgaaccctagaactgtcttcgactccggggccccgttggaagactgagtgcccggggcacggcacagaagccgcgcccaccgcctgccagttcacaaccgctccgagcgtgggtctccgcccagctccagtcctgtgatccgggcccgccccctagcggccggggagggaggggccgggtccgcggccggcgaacggggctcgaagggtccttgtagccgggaatgtgctgctgctgctgctgctgctgctggggggatcacagaccatttctttctttcggccaggctgaggccctgacgtggatgggcaaactgcaggcctgggaaggcagcaagccgggccgtccgtgttccatcctccacgcacccccacctatcgttggttcgcaaagtgcaaagctttcttgtgcatgacgccctgctctggggagcgtctggcgcgatctctgcctgcttactcgggaaatttgcttttgccaaacccgctttttcggggatcccgcgcccccctcctcacttgcgctgctctcggagccccagccggctccgcccgcttcggcggtttggatatttattgacctcgtcctccgactcgctgacaggctacaggacccccaacaaccccaatccacgttttggatgcactgagaccccgacattcctcggtatttattgtctgtccccacctaggacccccacccccgaccctcgcgaataaaaggccctccatctgccca

SEQ ID NO: 369566 - DNA, 6588 bp, Homo sapiens
cggctgcgggcggcagtccggcagtggcggggcccggggggcgcccaagatggcggcgggcggcgcggagggcggctcgggccccggcgccgccatgggggactgcgcggagattaagtcgcaattccgcacgcgcgagggtttctacaagctactcccgggcgacggcgccgctcgcaggtcgggtccggcttccgcccagactccggtgccgcctcagccaccgcagcccccgcccggccctgcctccgcctccggtcccggcgctgcaggccccgcgtcgtccccgccgcccgcaggccccggacccgggcccgccctgcccgccgtgcgcctcagcctcgtgcgcctcggggagccggacagcgccggggccggggagccgcccgccacgcccgcggggctgggctcggggggagaccgcgtctgcttcaacttgggccgtgagctctatttctacccaggctgctgtcgtcgtgggagccaacggtccattgacctcaacaagccaattgacaagcggatctacaagggcacccagcccacctgccacgatttcaaccagttcactgctgccaccgagaccatctcgctgctggtgggcttctcagcgggtcaagtgcagtacctggatctcatcaaaaaggacaccagcaagctgttcaatgaggagcggttgatcgacaagaccaaggtgacatatctgaagtggctgcctgagtcggagagcctgttcctggcatcacacgccagtggccacctgtacctgtacaacgtcagccacccctgcgcctcggccccgccccagtacagcctgctgaagcagggcgagggcttctctgtctatgctgccaagagcaaggcaccccgcaacccgctggccaagtgggcggtgggtgaggggcccctcaacgagttcgccttctcgcccgatggccggcacctggcctgtgtgagccaggatggctgcctgcgcgtcttccacttcgactccatgctcctgcgtgggctcatgaagagctactttgggggcctgctgtgtgtgtgctggagccctgacggccgctacgtggtgacgggtggcgaagatgacctggtcaccgtgtggtccttcaccgagggccgcgtggtggctcgaggccatggccacaagtcctgggtcaacgctgtggcctttgacccctacaccacaagggcagaggaggcggcgacagcagccggtgctgatggggagcggagcggcgaagaggaggaggaggagcccgaggctgcgggcacaggctcggccgggggcgccccgctctctccactgcccaaggctggctccattacttaccgctttggctcggcgggccaggacacgcagttctgcctgtgggacctcactgaagacgtgctctacccgcacccgcccctggcccgcacccgcaccctccctggcacacctggcaccacgccaccggccgccagcagctcgaggggtggcgagcctggcccaggccccctgcctcgctcgctgtcccgctccaacagtctcccgcacccagctggcgggggcaaggcgggcggcccgggtgtggcggcagagcctggcacaccattcagcattggccgcttcgccacgctcacactgcaggagcggcgggaccggggggcagagaaggagcacaagcgctaccacagcctgggcaacatcagccggggtggcagtggcggcagtggcagtggtggggagaagcccagcggccctgttccccgcagccgcctggaccccgccaaggtgctgggcactgcgctgtgcccgcgcatccacgaggtgcccctgctggagccccttgtgtgcaagaagatcgcccaggagcggctcacagtcctcctgttcctggaggactgcatcatcactgcctgccaggagggcctcatctgcacctgggcccggccgggcaaggcgttcacagacgaggagaccgaggcccagacaggggaaggaagttggcccaggtcacccagcaagtcagtggtagagggcatctcctcccaaccaggcaactccccgagtggcacagtggtgtgaagccatggatatcgggcccccccaaccccatgcccccagcctcctagccataaccctccctgctgacctcacagatcaacgtattaacaagactaaccatgatggatggactgctccagtccccccacctgcacaaaatttgggggccccccagactggcccggacacgggcgatgtaatagcccttgtggcctcagccttgtcccccacccactgccaagtacaatgacctcttcctctgaaacatcagtgttaccctcatccctgtccccagcatgtgactggtcactcctggggagagactccccgcccctgccacaagagccccaggtctgcagtgtgcccctcagttgagtgggcagggccgggggtggtccagccctcgcccggcccccaccccagctgcccttgctattgtctgtgcttttgaagagtgttaaattatggaagcccctcaggttcctccctgtcccgcaggacctcttatttatactaaagttccctgttttctcagcgggtctgtccccttcggaggagatgatgtagaggacctgtgtgtgtactctgtggttctaggcagtccgctttccccagaggaggagtgcaggcctgctcccagcccagcgcctcccaccccttttcatagcaggaaaagccggagcccagggagggaacggacctgcgagtcacacaactggtgacccacaccagcggctggagcaggaccctcttggggagaagagcatcctgcccgcagccagggcccctcatcaaagtcctcggtgttttttaaattatcagaactgcccaggaccacgtttcccaggccctgcccagctgggactcctcggtccttgcctcctagtttctcaggcctggccctctcaaggcccaggcaccccaggccggttggaggccccgacttccactctggagaaccgtccaccctggaaagaagagctcagattcctcttggctctcggagccgcagggagtgtgtcttcccgcgccaccctccaccccccgaaatgtttctgtttctaatcccagcctgggcaggaatgtggctccccggccaggggccaaggagctattttggggtctcgtttgcccagggagggcttggctccaccactttcctcccccagcctttgggcagcaggtcacccctgttcaggctctgagggtgccccctcctggtcctgtcctcaccaccccttccccacctcctgggaaaaaaaaaaaaaaaaaaaaaaaagctggtataaagcagagagcctgagggctaaatttaactgtccgagtcggaatccatctctgagtcacccaagaagctgccctggcctcccgtccccttcccaggcctcaacccctttctcccacccagccccaacccccagccctcaccccctagcccccagttctggagcttgtcgggagcaagggggtggttgctactgggtcactcagcctcaattggccctgtttcagcaatgggcaggttcttcttgaaattcatcacacctgtggcttcctctgtgctctacctttttattggggtgacagtgtgacagctgagattctccatgcattccccctactctagcactgaagggttctgaagggccctggaaggagggagcttggggggctggcttgtgaggggttaaggctgggaggcgggaggggggctggaccaaggggtggggagaaggggaggaggcctcggccggccgcagagagaagtggccagagaggcccaggggacagccagggacaggcagacatgcagccagggctccagggcctggacaggggctgccaggccctgtgacaggaggaccccgagcccccggcccggggaggggccatggtgctgcctgtccaacatgtcagccgaggtgcggctgaggcggctccagcagctggtgttggacccgggcttcctggggctggagcccctgctcgaccttctcctgggcgtccaccaggagctgggcgcctccgaactggcccaggacaagtacgtggccgacttcttgcagtgggcggagcccatcgtggtgaggcttaaggaggtccgactgcagagggacgacttcgagattctgaaggtgatcggacgcggggcgttcagcgaggtagcggtagtgaagatgaagcagacgggccaggtgtatgccatgaagatcatgaacaagtgggacatgctgaagaggggcgaggtgtcgtgcttccgtgaggagagggacgtgttggtgaatggggaccggcggtggatcacgcagctgcacttcgccttccaggatgagaactacctgtacctggtcatggagtattacgtgggcggggacctgctgacactgctgagcaagtttggggagcggattccggccgagatggcgcgcttctacctggcggagattgtcatggccatagactcggtgcaccggcttggctacgtgcacagggacatcaaacccgacaacatcctgctggaccgctgtggccacatccgcctggccgacttcggctcttgcctcaagctgcgggcagatggaacggtgcggtcgctggtggctgtgggcaccccagactacctgtcccccgagatcctgcaggctgtgggcggtgggcctgggacaggcagctacgggcccgagtgtgactggtgggcgctgggtgtattcgcctatgaaatgttctatgggcagacgcccttctacgcggattccacggcggagacctatggcaagatcgtccactacaaggagcacctctctctgccgctggtggacgaaggggtccctgaggaggctcgagacttcattcagcggttgctgtgtcccccggagacacggctgggccggggtggagcaggcgacttccggacacatcccttcttctttggcctcgactgggatggtctccgggacagcgtgcccccctttacaccggatttcgaaggtgccaccgacacatgcaacttcgacttggtggaggacgggctcactgccatggtgagcgggggcggggagacactgtcggacattcgggaaggtgcgccgctaggggtccacctgccttttgtgggctactcctactcctgcatggccctcagggacagtgaggtcccaggccccacacccatggaactggaggccgagcagctgcttgagccacacgtgcaagcgcccagcctggagccctcggtgtccccacaggatgaaacagctgaagtggcagttccagcggctgtccctgcggcagaggctgaggccgaggtgacgctgcgggagctccaggaagccctggaggaggaggtgctcacccggcagagcctgagccgggagatggaggccatccgcacggacaaccagaacttcgccagtcaactacgcgaggcagaggctcggaaccgggacctagaggcacacgtccggcagttgcaggagcggatggagttgctgcaggcagagggagccacagctgtcacgggggtccccagtccccgggccacggatccaccttcccatctagatggccccccggccgtggctgtgggccagtgcccgctggtggggccaggccccatgcaccgccgccacctgctgctccctgccagggtccctaggcctggcctatcggaggcgctttccctgctcctgttcgccgttgttctgtctcgtgccgccgccctgggctgcattgggttggtggcccacgccggccaactcaccgcagtctggcgccgcccaggagccgcccgcgctccctgaaccctagaactgtcttcgactccggggccccgttggaagactgagtgcccggggcacggcacagaagccgcgcccaccgcctgccagttcacaaccgctccgagcgtgggtctccgcccagctccagtcctgtgatccgggcccgccccctagcggccggggagggaggggccgggtccgcggccggcgaacggggctcgaagggtccttgtagccgggaatgtgctgctgctgctgctgctgctgctggggggatcacagaccatttctttctttcggccaggctgaggccctgacgtggatgggcaaactgcaggcctgggaaggcagcaagccgggccgtccgtgttccatcctccacgcacccccacctatcgttggttcgcaaagtgcaaagctttcttgtgcatgacgccctgctctggggagcgtctggcgcgatctctgcctgcttactcgggaaatttgcttttgccaaacccgctttttcggggatcccgcgcccccctcctcacttgcgctgctctcggagccccagccggctccgcccgcttcggcggtttggatatttattgacctcgtcctccgactcgctgacaggctacaggacccccaacaaccccaatccacgttttggatgcactgagaccccgacattcctcggtatttattgtctgtccccacctaggacccccacccccgaccctcgcgaataaaaggccctccatctgccca

SEQ ID NO: 369567 - DNA, 6505 bp, Homo sapiens
cggctgcgggcggcagtccggcagtggcggggcccggggggcgcccaagatggcggcgggcggcgcggagggcggctcgggccccggcgccgccatgggggactgcgcggagattaagtcgcaattccgcacgcgcgagggtttctacaagctactcccgggcgacggcgccgctcgcaggtcgggtccggcttccgcccagactccggtgccgcctcagccaccgcagcccccgcccggccctgcctccgcctccggtcccggcgctgcaggccccgcgtcgtccccgccgcccgcaggccccggacccgggcccgccctgcccgccgtgcgcctcagcctcgtgcgcctcggggagccggacagcgccggggccggggagccgcccgccacgcccgcggggctgggctcggggggagaccgcgtctgcttcaacttgggccgtgagctctatttctacccaggctgctgtcgtcgtgggagccaacggtccattgacctcaacaagccaattgacaagcggatctacaagggcacccagcccacctgccacgatttcaaccagttcactgctgccaccgagaccatctcgctgctggtgggcttctcagcgggtcaagtgcagtacctggatctcatcaaaaaggacaccagcaagctgttcaatgaggagcggttgatcgacaagaccaaggtgacatatctgaagtggctgcctgagtcggagagcctgttcctggcatcacacgccagtggccacctgtacctgtacaacgtcagccacccctgcgcctcggccccgccccagtacagcctgctgaagcagggcgagggcttctctgtctatgctgccaagagcaaggcaccccgcaacccgctggccaagtgggcggtgggtgaggggcccctcaacgagttcgccttctcgcccgatggccggcacctggcctgtgtgagccaggatggctgcctgcgcgtcttccacttcgactccatgctcctgcgtgggctcatgaagagctactttgggggcctgctgtgtgtgtgctggagccctgacggccgctacgtggtgacgggtggcgaagatgacctggtcaccgtgtggtccttcaccgagggccgcgtggtggctcgaggccatggccacaagtcctgggtcaacgctgtggcctttgacccctacaccacaagggcagaggaggcggcgacagcagccggtgctgatggggagcggagcggcgaagaggaggaggaggagcccgaggctgcgggcacaggctcggccgggggcgccccgctctctccactgcccaaggctggctccattacttaccgctttggctcggcgggccaggacacgcagttctgcctgtgggacctcactgaagacgtgctctacccgcacccgcccctggcccgcacccgcaccctccctggcacacctggcaccacgccaccggccgccagcagctcgaggggtggcgagcctggcccaggccccctgcctcgctcgctgtcccgctccaacagtctcccgcacccagctggcgggggcaaggcgggcggcccgggtgtggcggcagagcctggcacaccattcagcattggccgcttcgccacgctcacactgcaggagcggcgggaccggggggcagagaaggagcacaagcgctaccacagcctgggcaacatcagccggggtggcagtggcggcagtggcagtggtggggagaagcccagcggccctgttccccgcagccgcctggaccccgccaaggtgctgggcactgcgctgtgcccgcgcatccacgaggtgcccctgctggagccccttgtgtgcaagaagatcgcccaggagcggctcacagtcctcctgttcctggaggactgcatcatcactgcctgccaggagggcctcatctgcacctgggcccggccgggcaaggcgttcacagacgaggagaccgaggcccagacaggggaaggaagttggcccaggtcacccagcaagtcagtggtagagggcatctcctcccaaccaggcaactccccgagtggcacagtggtgtgaagccatggatatcgggcccccccaaccccatgcccccagcctcctagccataaccctccctgctgacctcacagatcaacgtattaacaagactaaccatgatggatggactgctccagtccccccacctgcacaaaatttgggggccccccagactggcccggacacgggcgatgtaatagcccttgtggcctcagccttgtcccccacccactgccaagtacaatgacctcttcctctgaaacatcagtgttaccctcatccctgtccccagcatgtgactggtcactcctggggagagactccccgcccctgccacaagagccccaggtctgcagtgtgcccctcagttgagtgggcagggccgggggtggtccagccctcgcccggcccccaccccagctgcccttgctattgtctgtgcttttgaagagtgttaaattatggaagcccctcaggttcctccctgtcccgcaggacctcttatttatactaaagttccctgttttctcagcgggtctgtccccttcggaggagatgatgtagaggacctgtgtgtgtactctgtggttctaggcagtccgctttccccagaggaggagtgcaggcctgctcccagcccagcgcctcccaccccttttcatagcaggaaaagccggagcccagggagggaacggacctgcgagtcacacaactggtgacccacaccagcggctggagcaggaccctcttggggagaagagcatcctgcccgcagccagggcccctcatcaaagtcctcggtgttttttaaattatcagaactgcccaggaccacgtttcccaggccctgcccagctgggactcctcggtccttgcctcctagtttctcaggcctggccctctcaaggcccaggcaccccaggccggttggaggccccgacttccactcctccaccccccgaaatgtttctgtttctaatcccagcctgggcaggaatgtggctccccggccaggggccaaggagctattttggggtctcgtttgcccagggagggcttggctccaccactttcctcccccagcctttgggcagcaggtcacccctgttcaggctctgagggtgccccctcctggtcctgtcctcaccaccccttccccacctcctgggaaaaaaaaaaaaaaaaaaaaaaaagctggtataaagcagagagcctgagggctaaatttaactgtccgagtcggaatccatctctgagtcacccaagaagctgccctggcctcccgtccccttcccaggcctcaacccctttctcccacccagccccaacccccagccctcaccccctagcccccagttctggagcttgtcgggagcaagggggtggttgctactgggtcactcagcctcaattggccctgtttcagcaatgggcaggttcttcttgaaattcatcacacctgtggcttcctctgtgctctacctttttattggggtgacagtgtgacagctgagattctccatgcattccccctactctagcactgaagggttctgaagggccctggaaggagggagcttggggggctggcttgtgaggggttaaggctgggaggcgggaggggggctggaccaaggggtggggagaaggggaggaggcctcggccggccgcagagagaagtggccagagaggcccaggggacagccagggacaggcagacatgcagccagggctccagggcctggacaggggctgccaggccctgtgacaggaggaccccgagcccccggcccggggaggggccatggtgctgcctgtccaacatgtcagccgaggtgcggctgaggcggctccagcagctggtgttggacccgggcttcctggggctggagcccctgctcgaccttctcctgggcgtccaccaggagctgggcgcctccgaactggcccaggacaagtacgtggccgacttcttgcagtgggcggagcccatcgtggtgaggcttaaggaggtccgactgcagagggacgacttcgagattctgaaggtgatcggacgcggggcgttcagcgaggtagcggtagtgaagatgaagcagacgggccaggtgtatgccatgaagatcatgaacaagtgggacatgctgaagaggggcgaggtgtcgtgcttccgtgaggagagggacgtgttggtgaatggggaccggcggtggatcacgcagctgcacttcgccttccaggatgagaactacctgtacctggtcatggagtattacgtgggcggggacctgctgacactgctgagcaagtttggggagcggattccggccgagatggcgcgcttctacctggcggagattgtcatggccatagactcggtgcaccggcttggctacgtgcacagggacatcaaacccgacaacatcctgctggaccgctgtggccacatccgcctggccgacttcggctcttgcctcaagctgcgggcagatggaacggtgcggtcgctggtggctgtgggcaccccagactacctgtcccccgagatcctgcaggctgtgggcggtgggcctgggacaggcagctacgggcccgagtgtgactggtgggcgctgggtgtattcgcctatgaaatgttctatgggcagacgcccttctacgcggattccacggcggagacctatggcaagatcgtccactacaaggagcacctctctctgccgctggtggacgaaggggtccctgaggaggctcgagacttcattcagcggttgctgtgtcccccggagacacggctgggccggggtggagcaggcgacttccggacacatcccttcttctttggcctcgactgggatggtctccgggacagcgtgcccccctttacaccggatttcgaaggtgccaccgacacatgcaacttcgacttggtggaggacgggctcactgccatggtgagcgggggcggggagacactgtcggacattcgggaaggtgcgccgctaggggtccacctgccttttgtgggctactcctactcctgcatggccctcagggacagtgaggtcccaggccccacacccatggaactggaggccgagcagctgcttgagccacacgtgcaagcgcccagcctggagccctcggtgtccccacaggatgaaacagctgaagtggcagttccagcggctgtccctgcggcagaggctgaggccgaggtgacgctgcgggagctccaggaagccctggaggaggaggtgctcacccggcagagcctgagccgggagatggaggccatccgcacggacaaccagaacttcgccagtcaactacgcgaggcagaggctcggaaccgggacctagaggcacacgtccggcagttgcaggagcggatggagttgctgcaggcagagggagccacagctgtcacgggggtccccagtccccgggccacggatccaccttcccatctagatggccccccggccgtggctgtgggccagtgcccgctggtggggccaggccccatgcaccgccgccacctgctgctccctgccagggtccctaggcctggcctatcggaggcgctttccctgctcctgttcgccgttgttctgtctcgtgccgccgccctgggctgcattgggttggtggcccacgccggccaactcaccgcagtctggcgccgcccaggagccgcccgcgctccctgaaccctagaactgtcttcgactccggggccccgttggaagactgagtgcccggggcacggcacagaagccgcgcccaccgcctgccagttcacaaccgctccgagcgtgggtctccgcccagctccagtcctgtgatccgggcccgccccctagcggccggggagggaggggccgggtccgcggccggcgaacggggctcgaagggtccttgtagccgggaatgtgctgctgctgctgctgctgctgctggggggatcacagaccatttctttctttcggccaggctgaggccctgacgtggatgggcaaactgcaggcctgggaaggcagcaagccgggccgtccgtgttccatcctccacgcacccccacctatcgttggttcgcaaagtgcaaagctttcttgtgcatgacgccctgctctggggagcgtctggcgcgatctctgcctgcttactcgggaaatttgcttttgccaaacccgctttttcggggatcccgcgcccccctcctcacttgcgctgctctcggagccccagccggctccgcccgcttcggcggtttggatatttattgacctcgtcctccgactcgctgacaggctacaggacccccaacaaccccaatccacgttttggatgcactgagaccccgacattcctcggtatttattgtctgtccccacctaggacccccacccccgaccctcgcgaataaaaggccctccatctgccca

SEQ ID NO: 369568 - DNA, 5234 bp, Homo sapiens
cggctgcgggcggcagtccggcagtggcggggcccggggggcgcccaagatggcggcgggcggcgcggagggcggctcgggccccggcgccgccatgggggactgcgcggagattaagtcgcaattccgcacgcgcgagggtttctacaagctactcccgggcgacggcgccgctcgcaggtcgggtccggcttccgcccagactccggtgccgcctcagccaccgcagcccccgcccggccctgcctccgcctccggtcccggcgctgcaggccccgcgtcgtccccgccgcccgcaggccccggacccgggcccgccctgcccgccgtgcgcctcagcctcgtgcgcctcggggagccggacagcgccggggccggggagccgcccgccacgcccgcggggctgggctcggggggagaccgcgtctgcttcaacttgggccgtgagctctatttctacccaggctgctgtcgtcgtgggagccaacggtccattgacctcaacaagccaattgacaagcggatctacaagggcacccagcccacctgccacgatttcaaccagttcactgctgccaccgagaccatctcgctgctggtgggcttctcagcgggtcaagtgcagtacctggatctcatcaaaaaggacaccagcaagctgttcaatgaggagcggttgatcgacaagaccaaggtgacatatctgaagtggctgcctgagtcggagagcctgttcctggcatcacacgccagtggccacctgtacctgtacaacgtcagccacccctgcgcctcggccccgccccagtacagcctgctgaagcagggcgagggcttctctgtctatgctgccaagagcaaggcaccccgcaacccgctggccaagtgggcggtgggtgaggggcccctcaacgagttcgccttctcgcccgatggccggcacctggcctgtgtgagccaggatggctgcctgcgcgtcttccacttcgactccatgctcctgcgtgggctcatgaagagctactttgggggcctgctgtgtgtgtgctggagccctgacggccgctacgtggtgacgggtggcgaagatgacctggtcaccgtgtggtccttcaccgagggccgcgtggtggctcgaggccatggccacaagtcctgggtcaacgctgtggcctttgacccctacaccacaagggcagaggaggcggcgacagcagccggtgctgatggggagcggagcggcgaagaggaggaggaggagcccgaggctgcgggcacaggctcggccgggggcgccccgctctctccactgcccaaggctggctccattacttaccgctttggctcggcgggccaggacacgcagttctgcctgtgggacctcactgaagacgtgctctacccgcacccgcccctggcccgcacccgcaccctccctggcacacctggcaccacgccaccggccgccagcagctcgaggggtggcgagcctggcccaggccccctgcctcgctcgctgtcccgctccaacagtctcccgcacccagctggcgggggcaaggcgggcggcccgggtgtggcggcagagcctggcacaccattcagcattggccgcttcgccacgctcacactgcaggagcggcgggaccggggggcagagaaggagcacaagcgctaccacagcctgggcaacatcagccggggtggcagtggcggcagtggcagtggtggggagaagcccagcggccctgttccccgcagccgcctggaccccgccaaggtgctgggcactgcgctgtgcccgcgcatccacgaggtgcccctgctggagccccttgtgtgcaagaagatcgcccaggagcggctcacagtcctcctgttcctggaggactgcatcatcactgcctgccaggagggcctcatctgcacctgggcccggccgggcaaggcgttcacagacgaggagaccgaggcccagacaggggaaggaagttggcccaggtcacccagcaagtcagtggtagagggcatctcctcccaaccaggcaactccccgagtggcacagtggtgtgaagccatggatatcgggcccccccaaccccatgcccccagcctcctagccataaccctccctgctgacctcacagatcaacgtattaacaagactaaccatgatggatggactgctccagtccccccacctgcacaaaatttgggggccccccagactggcccggacacgggcgatgtaatagcccttgtggcctcagccttgtcccccacccactgccaagtacaatgacctcttcctctgaaacatcagtgttaccctcatccctgtccccagcatgtgactggtcactcctggggagagactccccgcccctgccacaagagccccaggtctgcagtgtgcccctcagttgagtgggcagggccgggggtggtccagccctcgcccggcccccaccccagctgcccttgctattgtctgtgcttttgaagagtgttaaattatggaagcccctcaggttcctccctgtcccgcaggacctcttatttatactaaagttccctgttttctcagcgggtctgtccccttcggaggagatgatgtagaggacctgtgtgtgtactctgtggttctaggcagtccgctttccccagaggaggagtgcaggcctgctcccagcccagcgcctcccaccccttttcatagcaggaaaagccggagcccagggagggaacggacctgcgagtcacacaactggtgacccacaccagcggctggagcaggaccctcttggggagaagagcatcctgcccgcagccagggcccctcatcaaagtcctcggtgttttttaaattatcagaactgcccaggaccacgtttcccaggccctgcccagctgggactcctcggtccttgcctcctagtttctcaggcctggccctctcaaggcccaggcaccccaggccggttggaggccccgacttccactctggagaaccgtccaccctggaaagaagagctcagattcctcttggctctcggagccgcagggagtgtgtcttcccgcgccaccctccaccccccgaaatgtttctgtttctaatcccagcctgggcaggaatgtggctccccggccaggggccaaggagctattttggggtctcgtttgcccagggagggcttggctccaccactttcctcccccagcctttgggcagcaggtcacccctgttcaggctctgagggtgccccctcctggtcctgtcctcaccaccccttccccacctcctgggaaaaaaaaaaaaaaaaaaaaaaaagctggtataaagcagagagcctgagggctaaatttaactgtccgagtcggaatccatctctgagtcacccaagaagctgccctggcctcccgtccccttcccaggcctcaacccctttctcccacccagccccaacccccagccctcaccccctagcccccagttctggagcttgtcgggagcaagggggtggttgctactgggtcactcagcctcaattggccctgtttcagcaatgggcaggttcttcttgaaattcatcacacctgtggcttcctctgtgctctacctttttattggggtgacagtgtgacagctgagattctccatgcattccccctactctagcactgaagggttctgaagggccctggaaggagggagcttggggggctggcttgtgaggggttaaggctgggaggcgggaggggggctggaccaaggggtggggagaaggggaggaggcctcggccggccgcagagagaagtggccagagaggcccaggggacagccagggacaggcagacatgcagccagggctccagggcctggacaggggctgccaggccctgtgacaggaggaccccgagcccccggcccggggaggggccatggtgctgcctgtccaacatgtcagccgaggtgcggctgaggcggctccagcagctggtgttggacccgggcttcctggggctggagcccctgctcgaccttctcctgggcgtccaccaggagctgggcgcctccgaactggcccaggacaagtacgtggccgacttcttgcagtgggcggagcccatcgtggtgaggcttaaggaggtccgactgcagagggacgacttcgagattctgaaggtgatcggacgcggggcgttcagcgaggtagcggtagtgaagatgaagcagacgggccaggtgtatgccatgaagatcatgaacaagtgggacatgctgaagaggggcgaggtgtcgtgcttccgtgaggagagggacgtgttggtgaatggggaccggcggtggatcacgcagctgcacttcgccttccaggatgagaactacctgtacctggtcatggagtattacgtgggcggggacctgctgacactgctgagcaagtttggggagcggattccggccgagatggcgcgcttctacctggcggagattgtcatggccatagactcggtgcaccggcttggctacgtgcacagggacatcaaacccgacaacatcctgctggaccgctgtggccacatccgcctggccgacttcggctcttgcctcaagctgcgggcagatggaacggtgcggtcgctggtggctgtgggcaccccagactacctgtcccccgagatcctgcaggctgtgggcggtgggcctgggacaggcagctacgggcccgagtgtgactggtgggcgctgggtgtattcgcctatgaaatgttctatgggcagacgcccttctacgcggattccacggcggagacctatggcaagatcgtccactacaaggagcacctctctctgccgctggtggacgaaggggtccctgaggaggctcgagacttcattcagcggttgctgtgtcccccggagacacggctgggccggggtggagcaggcgacttccggacacatcccttcttctttggcctcgactgggatggtctccgggacagcgtgcccccctttacaccggatttcgaaggtgccaccgacacatgcaacttcgacttggtggaggacgggctcactgccatggtgagcgggggcggggagacactgtcggacattcgggaaggtgcgccgctaggggtccacctgccttttgtgggctactcctactcctgcatggccctcagggacagtgagtcccagccccacacccatgacttgatggt

SEQ ID NO: 369569 - DNA, 5042 bp, Homo sapiens
  misc_feature (1815)..(1815): n is a, c, g, or t
  misc_feature (1858)..(1858): n is a, c, g, or t
  misc_feature (1881)..(1881): n is a, c, g, or t
atataagaggcattgtcctctggaggctcgaatgaagcagtcagacatgctgctagagagaggggtgtctgctttttcaacgtgagagagggacgtgttggtgaatggggaccggcggtggatcacgcagctgcacttcgccttccaggatgagaactacctgtacctggtcatggagtattacgtgggcggggacctgctgacactgctgagcaagtttggggagcggattccggccgagatggcgcgcttctacctggcggagattgtcatggccatagactcggtgcaccggcttggctacgtgcacagggacatcaaacccgacaacatcctgctggaccgctgtggccacatccgcctggccgacttcggctcttgcctcaagctgcgggcagatggaacggtgcggtcgctggtggctgtgggcaccccagactacctgtcccccgagatcctgcaggctgtgggcggtgggcctgggacaggcagctacgggcccgagtgtgactggtgggcgctgggtgtattcgcctatgaaatgttctatgggcagacgcccttctacgcggattccacggcggagacctatggcaagatcgtccactacaaggagcacctctctctgccgctggtggacgaaggggtccctgaggaggctcgagacttcattcagcggttgctgtgtcccccggagacacggctgggccggggtggagcaggcgacttccggacacatcccttcttctttggcctcgactgggatggtctccgggacagcgtgcccccctttacaccggatttcgaaggtgccaccgacacatgcaacttcgacttggtggaggacgggctcactgccatggtgagcgggggcggggagacactgtcggacattcgggaaggtgcgccgctaggggtccacctgccttttgtgggctactcctactcctgcatggccctcagggacagtgaggtcccaggccccacacccatggaactggaggccgagcagctgcttgagccacacgtgcaagcgcccagcctggagccctcggtgtccccacaggatgaaacagctgaagtggcagttccagcggctgtccctgcggcagaggctgaggccgaggtgacgctgcgggagctccaggaagccctggaggaggaggtgctcacccggcagagcctgagccgggagatggaggccatccgcacggacaaccagaacttcgccagtcaactacgcgaggcagaggctcggaaccgggacctagaggcacacgtccggcagttgcaggagcggatggagttgctgcaggcagagggagccacagctgtcacgggggtccccagtccccgggccacggatccaccttcccatgtaagacccctctctttcccctgcctcagacctgctgcccattctgcagatcccctccctggctcctggtctccccgtccagatatagggctcaccctacgtctttgcgactttagagggcagaagccctttattcagccccagatctccctccgttcaggcctcaccagattccctccgggatctccctagataacctccccaacctcgattcccctcgctgtctctcgccccaccgctgagggctgggctgggctccgatcgggtcacctgtcccttctctctccagctagatggccccccggccgtggctgtgggccagtgcccgctggtggggccaggccccatgcaccgccgccacctgctgctccctgccagggtacgtccggctgcccacgcccccctccgccgtcgcgccccgcgctccacccgccccntgccacccgcttagctgcgcatttgcggggctgggcccacggnaggagggcggatcttcgggcagncaatcaacacaggccgctaggaagcagccaatgacgagttcggacgggattcgaggcgtgcgagtggactaacaacagctgtaggctgttggggcgggggcggggcgcagggaagagtgcgggcccacctatgggcgtaggcggggcgagtcccaggagccaatcagaggcccatgccgggtgttgacctcgccctctccccgcaggtccctaggcctggcctatcggaggcgctttccctgctcctgttcgccgttgttctgtctcgtgccgccgccctgggctgcattgggttggtggcccacgccggccaactcaccgcagtctggcgccgcccaggagccgcccgcgctccctgaaccctagaactgtcttcgactccggggccccgttggaagactgagtgcccggggcacggcacagaagccgcgcccaccgcctgccagttcacaaccgctccgagcgtgggtctccgcccagctccagtcctgtgatccgggcccgccccctagcggccggggagggaggggccgggtccgcggccggcgaacggggctcgaagggtccttgtagccgggaatgtgctgctgctgctgctgctgctgctggggggatcacagaccatttctttctttcggccaggctgaggccctgacgtggatgggcaaactgcaggcctgggaaggcagcaagccgggccgtccgtgttccatcctccacgcacccccacctatcgttggttcgcaaagtgcaaagctttcttgtgcatgacgccctgctctggggagcgtctggcgcgatctctgcctgcttactcgggaaatttgcttttgccaaacccgctttttcggggatcccgcgcccccctcctcacttgcgctgctctcggagccccagccggctccgcccgcttcggcggtttggatatttattgacctcgtcctccgactcgctgacaggctacaggacccccaacaaccccaatccacgttttggatgcactgagaccccgacattcctcggtatttattgtctgtccccacctaggacccccacccccgaccctcgcgaataaaaggccctccatctgcccaaagctctggactccacagtgtccgcggtttgcgttgtgggccggaggctccgcagcgggccaatccggaggcgtgtggaggcggccgaaggtctgggaggagctagcgggatgcgaagcggccgaatcagggttgggggaggaaaagccacggggcggggctttggcgtccggccaataggagggcgagcgggccacccggaggcaccgcccccgcccagctgtggcccagctgtgccaccgagcgtcgagaagagggggctgggctggcagcgcgcgcggccatcctccttccactgcgcctgcgcacgccacgcgcatccgctcctgggacgcaagctcgagaaaagttgctgcaaactttctagcccgttccccgcccctcctcccggccagacccgccccccctgcggagccgggaattccgaggggcggagcgcaggccgagatggggaatgtgggggcctgcagaggaccctggagacggaggcgtgcagaagctcagtctcggggcggaggcttcgcgcccttagtcctcctggacggcccgttaccttctgcgttgtcccgatggggaaactgaggccctgagccagaagcacacgctggggggaggcagaaagcgcggccagaggcggagggaaaacaaagggagaatcacagacagacgggagggggacggacacacacaaggggacagagacccgagtggagagctggatctcgccttcccggcgtggggcgcagggtcggccagaaagaagatcgagaagagcggggagtgggggcgaaaaggggggacaggtgggggaggaggctggggaaagcccgagggaggaagagagggagggaggaacttcccaaagttgcaaaacatggctaccttgccactgaagccagagacggccatctccgtgcctgagggaggcctcccggtggcccccagccctgctctcccagaggctcacgccctaggcaccctttctgcacagcagccaccccccgccgctgccaccacctccagcaccagcctgcccttctcccctgactcccctggcctcctgcccaacttcccggcgcccccaccagaggggctgatgttgtcacccgcggccgtgcctgtctggtcagcagggctggaactaagcgcaggaacagaggggctgctggaagcggaaaaggggctggggacacaggccccccacaccatgctgaggctgccagaccccgaccctgaggggctgctcctgggggccaccgcagggggtgaggttgacgaggggttggaagctgaggccaaggttctgacccagctccagtcggtgcctgtggaggagcccttggaactgtgacccagtgtggccccgtggcctctcccgacattggtgctgaagacgcagggacaggaatgggaggggggagccccagaaatgcggttgctgaagaccccagtcaccacatccttctgcctgggtggcctctccaagccctggtggtgctgggggttgtatccccggccacctcctgtccaggtctccatccccctttggatgggaggcctctctgttacagccctccccatgctgtgccctgccatatacgtgggggactcagggtcctgactcaggggccctgccccctccacttggtactagctgtaagcggaacaccctgccccagggccggacttccagcccccagagccctctccctgtcactccctgaaacactattaatagctctgccgatagctggtgttgtcacaactgcctggaatccgaaggtggaggacaggcagccccgcgcccctgagactggagaccctccccagtgtggcatttcctgccaggggcggggggtggggcagctgtggggagacgggggtcttccttcaccagctcccctcgactcaagcccttgtcctcattatccggcccagaccaaagattccctcatccctgggggcagccctgccgctgtgtctcctttgtatcctaaatctttatttttctaggacatgttatgcctccattttcaattaaaataaagttatcggattacaccacca

SEQ ID NO: 369570 - DNA, 3039 bp, Homo sapiens
ggtcctcactatgtctgtgagctctgcaacaaaggcttcaccacggcagcatacctgcgtattcacgcggtgaaggaccacaaggtccctaggcctggcctatcggaggcgctttccctgctcctgttcgccgttgttctgtctcgtgccgccgccctgggctgcattgggttggtggcccacgccggccaactcaccgcagtctggcgccgcccaggagccgcccgcgctccctgaaccctagaactgtcttcgactccggggccccgttggaagactgagtgcccggggcacggcacagaagccgcgcccaccgcctgccagttcacaaccgctccgagcgtgggtctccgcccagctccagtcctgtgatccgggcccgccccctagcggccggggagggaggggccgggtccgcggccggcgaacggggctcgaagggtccttgtagccgggaatgtgctgctgctgctgctgctgctgctggggggatcacagaccatttctttctttcggccaggctgaggccctgacgtggatgggcaaactgcaggcctgggaaggcagcaagccgggccgtccgtgttccatcctccacgcacccccacctatcgttggttcgcaaagtgcaaagctttcttgtgcatgacgccctgctctggggagcgtctggcgcgatctctgcctgcttactcgggaaatttgcttttgccaaacccgctttttcggggatcccgcgcccccctcctcacttgcgctgctctcggagccccagccggctccgcccgcttcggcggtttggatatttattgacctcgtcctccgactcgctgacaggctacaggacccccaacaaccccaatccacgttttggatgcactgagaccccgacattcctcggtatttattgtctgtccccacctaggacccccacccccgaccctcgcgaataaaaggccctccatctgcccaaagctctggactccacagtgtccgcggtttgcgttgtgggccggaggctccgcagcgggccaatccggaggcgtgtggaggcggccgaaggtctgggaggagctagcgggatgcgaagcggccgaatcagggttgggggaggaaaagccacggggcggggctttggcgtccggccaataggagggcgagcgggccacccggaggcaccgcccccgcccagctgtggcccagctgtgccaccgagcgtcgagaagagggggctgggctggcagcgcgcgcggccatcctccttccactgcgcctgcgcacgccacgcgcatccgctcctgggacgcaagctcgagaaaagttgctgcaaactttctagcccgttccccgcccctcctcccggccagacccgccccccctgcggagccgggaattccgaggggcggagcgcaggccgagatggggaatgtgggggcctgcagaggaccctggagacggaggcgtgcagaagctcagtctcggggcggaggcttcgcgcccttagtcctcctggacggcccgttaccttctgcgttgtcccgatggggaaactgaggccctgagccagaagcacacgctggggggaggcagaaagcgcggccagaggcggagggaaaacaaagggagaatcacagacagacgggagggggacggacacacacaaggggacagagacccgagtggagagctggatctcgccttcccggcgtggggcgcagggtcggccagaaagaagatcgagaagagcggggagtgggggcgaaaaggggggacaggtgggggaggaggctggggaaagcccgagggaggaagagagggagggaggaacttcccaaagttgcaaaacatggctaccttgccactgaagccagagacggccatctccgtgcctgagggaggcctcccggtggcccccagccctgctctcccagaggctcacgccctaggcaccctttctgcacagcagccaccccccgccgctgccaccacctccagcaccagcctgcccttctcccctgactcccctggcctcctgcccaacttcccggcgcccccaccagaggggctgatgttgtcacccgcggccgtgcctgtctggtcagcagggctggaactaagcgcaggaacagaggggctgctggaagcggaaaaggggctggggacacaggccccccacaccatgctgaggctgccagaccccgaccctgaggggctgctcctgggggccaccgcagggggtgaggttgacgaggggttggaagctgaggccaaggttctgacccagctccagtcggtgcctgtggaggagcccttggaactgtgacccagtgtggccccgtggcctctcccgacattggtgctgaagacgcagggacaggaatgggaggggggagccccagaaatgcggttgctgaagaccccagtcaccacatccttctgcctgggtggcctctccaagccctggtggtgctgggggttgtatccccggccacctcctgtccaggtctccatccccctttggatgggaggcctctctgttacagccctccccatgctgtgccctgccatatacgtgggggactcagggtcctgactcaggggccctgccccctccacttggtactagctgtaagcggaacaccctgccccagggccggacttccagcccccagagccctctccctgtcactccctgaaacactattaatagctctgccgatagctggtgttgtcacaactgcctggaatccgaaggtggaggacaggcagccccgcgcccctgagactggagaccctccccagtgtggcatttcctgccaggggcggggggtggggcagctgtggggagacgggggtcttccttcaccagctcccctcgactcaagcccttgtcctcattatccggcccagaccaaagattccctcatccctgggggcagccctgccgctgtgtctcctttgtatcctaaatctttatttttctaggacatgttatgcctccattttcaattaaaataaagttatcggattacaccacca

SEQ ID NO: 369571 - DNA, 187 bp, Homo sapiens
gcctatgaaatgttctatgggcagacgcccttctacgcggattccacggcggagacctatggcaagatcgtccactacaaggtgagcacggccgcagggagacctggcctctcccggtaggcgctcccaggctatcgcctcctctccctctgagcaggagcacctctctctgccgctggtggacgaa

SEQ ID NO: 369572 - DNA, 8696 bp, Homo sapiens
cggctgcgggcggcagtccggcagtggcggggcccggggggcgcccaagatggcggcgggcggcgcggagggcggctcgggccccggcgccgccatgggggactgcgcggagattaagtcgcaattccgcacgcgcgagggtttctacaagctactcccgggcgacggcgccgctcgcaggtcgggtccggcttccgcccagactccggtgccgcctcagccaccgcagcccccgcccggccctgcctccgcctccggtcccggcgctgcaggccccgcgtcgtccccgccgcccgcaggccccggacccgggcccgccctgcccgccgtgcgcctcagcctcgtgcgcctcggggagccggacagcgccggggccggggagccgcccgccacgcccgcggggctgggctcggggggagaccgcgtctgcttcaacttgggccgtgagctctatttctacccaggctgctgtcgtcgtgggagccaacggtccattgacctcaacaagccaattgacaagcggatctacaagggcacccagcccacctgccacgatttcaaccagttcactgctgccaccgagaccatctcgctgctggtgggcttctcagcgggtcaagtgcagtacctggatctcatcaaaaaggacaccagcaagctgttcaatgaggagcggttgatcgacaagaccaaggtgacatatctgaagtggctgcctgagtcggagagcctgttcctggcatcacacgccagtggccacctgtacctgtacaacgtcagccacccctgcgcctcggccccgccccagtacagcctgctgaagcagggcgagggcttctctgtctatgctgccaagagcaaggcaccccgcaacccgctggccaagtgggcggtgggtgaggggcccctcaacgagttcgccttctcgcccgatggccggcacctggcctgtgtgagccaggatggctgcctgcgcgtcttccacttcgactccatgctcctgcgtgggctcatgaagagctactttgggggcctgctgtgtgtgtgctggagccctgacggccgctacgtggtgacgggtggcgaagatgacctggtcaccgtgtggtccttcaccgagggccgcgtggtggctcgaggccatggccacaagtcctgggtcaacgctgtggcctttgacccctacaccacaagggcagaggaggcggcgacagcagccggtgctgatggggagcggagcggcgaagaggaggaggaggagcccgaggctgcgggcacaggctcggccgggggcgccccgctctctccactgcccaaggctggctccattacttaccgctttggctcggcgggccaggacacgcagttctgcctgtgggacctcactgaagacgtgctctacccgcacccgcccctggcccgcacccgcaccctccctggcacacctggcaccacgccaccggccgccagcagctcgaggggtggcgagcctggcccaggccccctgcctcgctcgctgtcccgctccaacagtctcccgcacccagctggcgggggcaaggcgggcggcccgggtgtggcggcagagcctggcacaccattcagcattggccgcttcgccacgctcacactgcaggagcggcgggaccggggggcagagaaggagcacaagcgctaccacagcctgggcaacatcagccggggtggcagtggcggcagtggcagtggtggggagaagcccagcggccctgttccccgcagccgcctggaccccgccaaggtgctgggcactgcgctgtgcccgcgcatccacgaggtgcccctgctggagccccttgtgtgcaagaagatcgcccaggagcggctcacagtcctcctgttcctggaggactgcatcatcactgcctgccaggagggcctcatctgcacctgggcccggccgggcaaggcgttcacagacgaggagaccgaggcccagacaggggaaggaagttggcccaggtcacccagcaagtcagtggtagagggcatctcctcccaaccaggcaactccccgagtggcacagtggtgtgaagccatggatatcgggcccccccaaccccatgcccccagcctcctagccataaccctccctgctgacctcacagatcaacgtattaacaagactaaccatgatggatggactgctccagtccccccacctgcacaaaatttgggggccccccagactggcccggacacgggcgatgtaatagcccttgtggcctcagccttgtcccccacccactgccaagtacaatgacctcttcctctgaaacatcagtgttaccctcatccctgtccccagcatgtgactggtcactcctggggagagactccccgcccctgccacaagagccccaggtctgcagtgtgcccctcagttgagtgggcagggccgggggtggtccagccctcgcccggcccccaccccagctgcccttgctattgtctgtgcttttgaagagtgttaaattatggaagcccctcaggttcctccctgtcccgcaggacctcttatttatactaaagttccctgttttctcagcgggtctgtccccttcggaggagatgatgtagaggacctgtgtgtgtactctgtggttctaggcagtccgctttccccagaggaggagtgcaggcctgctcccagcccagcgcctcccaccccttttcatagcaggaaaagccggagcccagggagggaacggacctgcgagtcacacaactggtgacccacaccagcggctggagcaggaccctcttggggagaagagcatcctgcccgcagccagggcccctcatcaaagtcctcggtgttttttaaattatcagaactgcccaggaccacgtttcccaggccctgcccagctgggactcctcggtccttgcctcctagtttctcaggcctggccctctcaaggcccaggcaccccaggccggttggaggccccgacttccactctggagaaccgtccaccctggaaagaagagctcagattcctcttggctctcggagccgcagggagtgtgtcttcccgcgccaccctccaccccccgaaatgtttctgtttctaatcccagcctgggcaggaatgtggctccccggccaggggccaaggagctattttggggtctcgtttgcccagggagggcttggctccaccactttcctcccccagcctttgggcagcaggtcacccctgttcaggctctgagggtgccccctcctggtcctgtcctcaccaccccttccccacctcctgggaaaaaaaaaaaaaaaaaaaaaaaagctggtataaagcagagagcctgagggctaaatttaactgtccgagtcggaatccatctctgagtcacccaagaagctgccctggcctcccgtccccttcccaggcctcaacccctttctcccacccagccccaacccccagccctcaccccctagcccccagttctggagcttgtcgggagcaagggggtggttgctactgggtcactcagcctcaattggccctgtttcagcaatgggcaggttcttcttgaaattcatcacacctgtggcttcctctgtgctctacctttttattggggtgacagtgtgacagctgagattctccatgcattccccctactctagcactgaagggttctgaagggccctggaaggagggagcttggggggctggcttgtgaggggttaaggctgggaggcgggaggggggctggaccaaggggtggggagaaggggaggaggcctcggccggccgcagagagaagtggccagagaggcccaggggacagccagggacaggcagacatgcagccagggctccagggcctggacaggggctgccaggccctgtgacaggaggaccccgagcccccggcccggggaggggccatggtgctgcctgtccaacatgtcagccgaggtgcggctgaggcggctccagcagctggtgttggacccgggcttcctggggctggagcccctgctcgaccttctcctgggcgtccaccaggagctgggcgcctccgaactggcccaggacaagtacgtggccgacttcttgcagtgggcggagcccatcgtggtgaggcttaaggaggtccgactgcagagggacgacttcgagattctgaaggtgatcggacgcggggcgttcagcgaggtagcggtagtgaagatgaagcagacgggccaggtgtatgccatgaagatcatgaacaagtgggacatgctgaagaggggcgaggtgtcgtgcttccgtgaggagagggacgtgttggtgaatggggaccggcggtggatcacgcagctgcacttcgccttccaggatgagaactacctgtacctggtcatggagtattacgtgggcggggacctgctgacactgctgagcaagtttggggagcggattccggccgagatggcgcgcttctacctggcggagattgtcatggccatagactcggtgcaccggcttggctacgtgcacagggacatcaaacccgacaacatcctgctggaccgctgtggccacatccgcctggccgacttcggctcttgcctcaagctgcgggcagatggaacggtgcggtcgctggtggctgtgggcaccccagactacctgtcccccgagatcctgcaggctgtgggcggtgggcctgggacaggcagctacgggcccgagtgtgactggtgggcgctgggtgtattcgcctatgaaatgttctatgggcagacgcccttctacgcggattccacggcggagacctatggcaagatcgtccactacaaggagcacctctctctgccgctggtggacgaaggggtccctgaggaggctcgagacttcattcagcggttgctgtgtcccccggagacacggctgggccggggtggagcaggcgacttccggacacatcccttcttctttggcctcgactgggatggtctccgggacagcgtgcccccctttacaccggatttcgaaggtgccaccgacacatgcaacttcgacttggtggaggacgggctcactgccatggtgagcgggggcggggagacactgtcggacattcgggaaggtgcgccgctaggggtccacctgccttttgtgggctactcctactcctgcatggccctcagggacagtgaggtcccaggccccacacccatggaactggaggccgagcagctgcttgagccacacgtgcaagcgcccagcctggagccctcggtgtccccacaggatgaaacagctgaagtggcagttccagcggctgtccctgcggcagaggctgaggccgaggtgacgctgcgggagctccaggaagccctggaggaggaggtgctcacccggcagagcctgagccgggagatggaggccatccgcacggacaaccagaacttcgccagtcaactacgcgaggcagaggctcggaaccgggacctagaggcacacgtccggcagttgcaggagcggatggagttgctgcaggcagagggagccacagctgtcacgggggtccccagtccccgggccacggatccaccttcccatctagatggccccccggccgtggctgtgggccagtgcccgctggtggggccaggccccatgcaccgccgccacctgctgctccctgccagggtccctaggcctggcctatcggaggcgctttccctgctcctgttcgccgttgttctgtctcgtgccgccgccctgggctgcattgggttggtggcccacgccggccaactcaccgcagtctggcgccgcccaggagccgcccgcgctccctgaaccctagaactgtcttcgactccggggccccgttggaagactgagtgcccggggcacggcacagaagccgcgcccaccgcctgccagttcacaaccgctccgagcgtgggtctccgcccagctccagtcctgtgatccgggcccgccccctagcggccggggagggaggggccgggtccgcggccggcgaacggggctcgaagggtccttgtagccgggaatgtgctgctgctgctgctgctgctgctggggggatcacagaccatttctttctttcggccaggctgaggccctgacgtggatgggcaaactgcaggcctgggaaggcagcaagccgggccgtccgtgttccatcctccacgcacccccacctatcgttggttcgcaaagtgcaaagctttcttgtgcatgacgccctgctctggggagcgtctggcgcgatctctgcctgcttactcgggaaatttgcttttgccaaacccgctttttcggggatcccgcgcccccctcctcacttgcgctgctctcggagccccagccggctccgcccgcttcggcggtttggatatttattgacctcgtcctccgactcgctgacaggctacaggacccccaacaaccccaatccacgttttggatgcactgagaccccgacattcctcggtatttattgtctgtccccacctaggacccccacccccgaccctcgcgaataaaaggccctccatctgcccaaagctctggactccacagtgtccgcggtttgcgttgtgggccggaggctccgcagcgggccaatccggaggcgtgtggaggcggccgaaggtctgggaggagctagcgggatgcgaagcggccgaatcagggttgggggaggaaaagccacggggcggggctttggcgtccggccaataggagggcgagcgggccacccggaggcaccgcccccgcccagctgtggcccagctgtgccaccgagcgtcgagaagagggggctgggctggcagcgcgcgcggccatcctccttccactgcgcctgcgcacgccacgcgcatccgctcctgggacgcaagctcgagaaaagttgctgcaaactttctagcccgttccccgcccctcctcccggccagacccgccccccctgcggagccgggaattccgaggggcggagcgcaggccgagatggggaatgtgggggcctgcagaggaccctggagacggaggcgtgcagaagctcagtctcggggcggaggcttcgcgcccttagtcctcctggacggcccgttaccttctgcgttgtcccgatggggaaactgaggccctgagccagaagcacacgctggggggaggcagaaagcgcggccagaggcggagggaaaacaaagggagaatcacagacagacgggagggggacggacacacacaaggggacagagacccgagtggagagctggatctcgccttcccggcgtggggcgcagggtcggccagaaagaagatcgagaagagcggggagtgggggcgaaaaggggggacaggtgggggaggaggctggggaaagcccgagggaggaagagagggagggaggaacttcccaaagttgcaaaacatggctaccttgccactgaagccagagacggccatctccgtgcctgagggaggcctcccggtggcccccagccctgctctcccagaggctcacgccctaggcaccctttctgcacagcagccaccccccgccgctgccaccacctccagcaccagcctgcccttctcccctgactcccctggcctcctgcccaacttcccggcgcccccaccagaggggctgatgttgtcacccgcggccgtgcctgtctggtcagcagggctggaactaagcgcaggaacagaggggctgctggaagcggaaaaggggctggggacacaggccccccacaccatgctgaggctgccagaccccgaccctgaggggctgctcctgggggccaccgcagggggtgaggttgacgaggggttggaagctgaggccaaggttctgacccagctccagtcggtgcctgtggaggagcccttggaactgtgacccagtgtggccccgtggcctctcccgacattggtgctgaagacgcagggacaggaatgggaggggggagccccagaaatgcggttgctgaagaccccagtcaccacatccttctgcctgggtggcctctccaagccctggtggtgctgggggttgtatccccggccacctcctgtccaggtctccatccccctttggatgggaggcctctctgttacagccctccccatgctgtgccctgccatatacgtgggggactcagggtcctgactcaggggccctgccccctccacttggtactagctgtaagcggaacaccctgccccagggccggacttccagcccccagagccctctccctgtcactccctgaaacactattaatagctctgccgatagctggtgttgtcacaactgcctggaatccgaaggtggaggacaggcagccccgcgcccctgagactggagaccctccccagtgtggcatttcctgccaggggcggggggtggggcagctgtggggagacgggggtcttccttcaccagctcccctcgactcaagcccttgtcctcattatccggcccagaccaaagattccctcatccctgggggcagccctgccgctgtgtctcctttgtatcctaaatctttatttttctaggacatgttatgcctccattttcaattaaaataaagttatcggattacaccaccaccaggggtctggggtgccttccagtgtctgtccaaagcagc

SEQ ID NO: 369573 - DNA, 8538 bp, Homo sapiens
cggctgcgggcggcagtccggcagtggcggggcccggggggcgcccaagatggcggcgggcggcgcggagggcggctcgggccccggcgccgccatgggggactgcgcggagattaagtcgcaattccgcacgcgcgagggtttctacaagctactcccgggcgacggcgccgctcgcaggtcgggtccggcttccgcccagactccggtgccgcctcagccaccgcagcccccgcccggccctgcctccgcctccggtcccggcgctgcaggccccgcgtcgtccccgccgcccgcaggccccggacccgggcccgccctgcccgccgtgcgcctcagcctcgtgcgcctcggggagccggacagcgccggggccggggagccgcccgccacgcccgcggggctgggctcggggggagaccgcgtctgcttcaacttgggccgtgagctctatttctacccaggctgctgtcgtcgtgggagccaacggtccattgacctcaacaagccaattgacaagcggatctacaagggcacccagcccacctgccacgatttcaaccagttcactgctgccaccgagaccatctcgctgctggtgggcttctcagcgggtcaagtgcagtacctggatctcatcaaaaaggacaccagcaagctgttcaatgaggagcggttgatcgacaagaccaaggtgacatatctgaagtggctgcctgagtcggagagcctgttcctggcatcacacgccagtggccacctgtacctgtacaacgtcagccacccctgcgcctcggccccgccccagtacagcctgctgaagcagggcgagggcttctctgtctatgctgccaagagcaaggcaccccgcaacccgctggccaagtgggcggtgggtgaggggcccctcaacgagttcgccttctcgcccgatggccggcacctggcctgtgtgagccaggatggctgcctgcgcgtcttccacttcgactccatgctcctgcgtgggctcatgaagagctactttgggggcctgctgtgtgtgtgctggagccctgacggccgctacgtggtgacgggtggcgaagatgacctggtcaccgtgtggtccttcaccgagggccgcgtggtggctcgaggccatggccacaagtcctgggtcaacgctgtggcctttgacccctacaccacaagggcagaggaggcggcgacagcagccggtgctgatggggagcggagcggcgaagaggaggaggaggagcccgaggctgcgggcacaggctcggccgggggcgccccgctctctccactgcccaaggctggctccattacttaccgctttggctcggcgggccaggacacgcagttctgcctgtgggacctcactgaagacgtgctctacccgcacccgcccctggcccgcacccgcaccctccctggcacacctggcaccacgccaccggccgccagcagctcgaggggtggcgagcctggcccaggccccctgcctcgctcgctgtcccgctccaacagtctcccgcacccagctggcgggggcaaggcgggcggcccgggtgtggcggcagagcctggcacaccattcagcattggccgcttcgccacgctcacactgcaggagcggcgggaccggggggcagagaaggagcacaagcgctaccacagcctgggcaacatcagccggggtggcagtggcggcagtggcagtggtggggagaagcccagcggccctgttccccgcagccgcctggaccccgccaaggtgctgggcactgcgctgtgcccgcgcatccacgaggtgcccctgctggagccccttgtgtgcaagaagatcgcccaggagcggctcacagtcctcctgttcctggaggactgcatcatcactgcctgccaggagggcctcatctgcacctgggcccggccgggcaaggcgttcacagacgaggagaccgaggcccagacaggggaaggaagttggcccaggtcacccagcaagtcagtggtagagggcatctcctcccaaccaggcaactccccgagtggcacagtggtgtgaagccatggatatcgggcccccccaaccccatgcccccagcctcctagccataaccctccctgctgacctcacagatcaacgtattaacaagactaaccatgatggatggactgctccagtccccccacctgcacaaaatttgggggccccccagactggcccggacacgggcgatgtaatagcccttgtggcctcagccttgtcccccacccactgccaagtacaatgacctcttcctctgaaacatcagtgttaccctcatccctgtccccagcatgtgactggtcactcctggggagagactccccgcccctgccacaagagccccaggtctgcagtgtgcccctcagttgagtgggcagggccgggggtggtccagccctcgcccggcccccaccccagctgcccttgctattgtctgtgcttttgaagagtgttaaattatggaagcccctcaggttcctccctgtcccgcaggacctcttatttatactaaagttccctgttttctcagcgggtctgtccccttcggaggagatgatgtagaggacctgtgtgtgtactctgtggttctaggcagtccgctttccccagaggaggagtgcaggcctgctcccagcccagcgcctcccaccccttttcatagcaggaaaagccggagcccagggagggaacggacctgcgagtcacacaactggtgacccacaccagcggctggagcaggaccctcttggggagaagagcatcctgcccgcagccagggcccctcatcaaagtcctcggtgttttttaaattatcagaactgcccaggaccacgtttcccaggccctgcccagctgggactcctcggtccttgcctcctagtttctcaggcctggccctctcaaggcccaggcaccccaggccggttggaggccccgacttccactctggagaaccgtccaccctggaaagaagagctcagattcctcttggctctcggagccgcagggagtgtgtcttcccgcgccaccctccaccccccgaaatgtttctgtttctaatcccagcctgggcaggaatgtggctccccggccaggggccaaggagctattttggggtctcgtttgcccagggagggcttggctccaccactttcctcccccagcctttgggcagcaggtcacccctgttcaggctctgagggtgccccctcctggtcctgtcctcaccaccccttccccacctcctgggaaaaaaaaaaaaaaaaaaaaaaaagctggtataaagcagagagcctgagggctaaatttaactgtccgagtcggaatccatctctgagtcacccaagaagctgccctggcctcccgtccccttcccaggcctcaacccctttctcccacccagccccaacccccagccctcaccccctagcccccagttctggagcttgtcgggagcaagggggtggttgctactgggtcactcagcctcaattggccctgtttcagcaatgggcaggttcttcttgaaattcatcacacctgtggcttcctctgtgctctacctttttattggggtgacagtgtgacagctgagattctccatgcattccccctactctagcactgaagggttctgaagggccctggaaggagggagcttggggggctggcttgtgaggggttaaggctgggaggcgggaggggggctggaccaaggggtggggagaaggggaggaggcctcggccggccgcagagagaagtggccagagaggcccaggggacagccagggacaggcagacatgcagccagggctccagggcctggacaggggctgccaggccctgtgacaggaggaccccgagcccccggcccggggaggggccatggtgctgcctgtccaacatgtcagccgaggtgcggctgaggcggctccagcagctggtgttggacccgggcttcctggggctggagcccctgctcgaccttctcctgggcgtccaccaggagctgggcgcctccgaactggcccaggacaagtacgtggccgacttcttgcagtgggcggagcccatcgtggtgaggcttaaggaggtccgactgcagagggacgacttcgagattctgaaggtgatcggacgcggggcgttcagcgaggtagcggtagtgaagatgaagcagacgggccaggtgtatgccatgaagatcatgaacaagtgggacatgctgaagaggggcgaggtgtcgtgcttccgtgaggagagggacgtgttggtgaatggggaccggcggtggatcacgcagctgcacttcgccttccaggatgagaactacctgtacctggtcatggagtattacgtgggcggggacctgctgacactgctgagcaagtttggggagcggattccggccgagatggcgcgcttctacctggcggagattgtcatggccatagactcggtgcaccggcttggctacgtgcacagggacatcaaacccgacaacatcctgctggaccgctgtggccacatccgcctggccgacttcggctcttgcctcaagctgcgggcagatggaacggtgcggtcgctggtggctgtgggcaccccagactacctgtcccccgagatcctgcaggctgtgggcggtgggcctgggacaggcagctacgggcccgagtgtgactggtgggcgctgggtgtattcgcctatgaaatgttctatgggcagacgcccttctacgcggattccacggcggagacctatggcaagatcgtccactacaaggagcacctctctctgccgctggtggacgaaggggtccctgaggaggctcgagacttcattcagcggttgctgtgtcccccggagacacggctgggccggggtggagcaggcgacttccggacacatcccttcttctttggcctcgactgggatggtctccgggacagcgtgcccccctttacaccggatttcgaaggtgccaccgacacatgcaacttcgacttggtggaggacgggctcactgccatggtgagcgggggcggggagacactgtcggacattcgggaaggtgcgccgctaggggtccacctgccttttgtgggctactcctactcctgcatggccctcagggacagtgaggtcccaggccccacacccatggaactggaggccgagcagctgcttgagccacacgtgcaagcgcccagcctggagccctcggtgtccccacaggatgaaacagctgaagtggcagttccagcggctgtccctgcggcagaggctgaggccgaggtgacgctgcgggagctccaggaagccctggaggaggaggtgctcacccggcagagcctgagccgggagatggaggccatccgcacggacaaccagaacttcgccagtcaactacgcgaggcagaggctcggaaccgggacctagaggcacacgtccggcagttgcaggagcggatggagttgctgcaggcagagggagccacagctgtcacgggggtccccagtccccgggccacggatccaccttcccatctagatggccccccggccgtggctgtgggccagtgcccgctggtggggccaggccccatgcaccgccgccacctgctgctccctgccagggtccctaggcctggcctatcggaggcgctttccctgctcctgttcgccgttgttctgtctcgtgccgccgccctgggctgcattgggttggtggcccacgccggccaactcaccgcagtctggcgccgcccaggagccgcccgcgctccctgaaccctagaactgtcttcgactccggggccccgttggaagactgagtgcccggggcacggcacagaagccgcgcccaccgcctgccagttcacaaccgctccgagcgtgggtctccgcccagctccagtcctgtgatccgggcccgccccctagcggccggggagggaggggccgggtccgcggccggcgaacggggctcgaagggtccttgtagccgggaatgtgctgctgctgctgctgctgctgctggggggatcacagaccatttctttctttcggccaggctgaggccctgacgtggatgggcaaactgcaggcctgggaaggcagcaagccgggccgtccgtgttccatcctccacgcacccccacctatcgttggttcgcaaagtgcaaagctttcttgtgcatgacgccctgctctggggagcgtctggcgcgatctctgcctgcttactcgggaaatttgcttttgccaaacccgctttttcggggatcccgcgcccccctcctcacttgcgctgctctcggagccccagccggctccgcccgcttcggcggtttggatatttattgacctcgtcctccgactcgctgacaggctacaggacccccaacaaccccaatccacgttttggatgcactgagaccccgacattcctcggtatttattgtctgtccccacctaggacccccacccccgaccctcgcgaataaaaggccctccatctgcccaaagctctggactccacagtgtccgcggtttgcgttgtgggccggaggctccgcagcgggccaatccggaggcgtgtggaggcggccgaaggtctgggaggagctagcgggatgcgaagcggccgaatcagggttgggggaggaaaagccacggggcggggctttggcgtccggccaataggagggcgagcgggccacccggaggcaccgcccccgcccagctgtggcccagctgtgccaccgagcgtcgagaagagggggctgggctggcagcgcgcgcggccatcctccttccactgcgcctgcgcacgccacgcgcatccgctcctgggacgcaagctcgagaaaagttgctgcaaactttctagcccgttccccgcccctcctcccggccagacccgccccccctgcggagccgggaattccgaggggcggagcgcaggccgagatggggaatgtgggggcctgcagaggaccctggagacggaggcgtgcagaagctcagtctcggggcggaggcttcgcgcccttagtcctcctggacggcccgttaccttctgcgttgtcccgatggggaaactgaggccctgagccagaagcacacgctggggggaggcagaaagcgcggccagaggcggagggaaaacaaagggagaatcacagacagacgggagggggacggacacacacaaggggacagagacccgagtggagagctggatctcgccttcccggcgtggggcgcagggtcggccagaaagaagatcgagaagagcggggagtgggggcgaaaaggggggacaggtgggggaggaggctggggaaagcccgagggaggaagagagggagggaggaacttcccaaagttgcaaaacatggctaccttgcctgcggagccgagcgcggggccggcggctgggggggaggcggtggcggcggcggcggcgaccgaagaggaggaggaggaagcgcgccagctcttgcagactttgcaggcggccgagggtgaggcggcggcggcggccggggccggggcgggcgcagcggctgcgggagctgagggcccgggatccccgggcgtccccgggtcgccccccgaggccgcttccgaaccgcccacgggcctccgcttctcgcccgagcaggtggcgtgcgtctgcgaggcgctgctccaggcgggccacgccggccgcttgagccgcttcctgggcgcactgcccccggccgagcgcctacgtggcagcgacccggtgttgcgcgcgcgggccctggtggccttccagcggggcgagtacgccgagctctaccggctactcgagagccgccccttccccgccgcccaccacgccttcctgcaggacctctacctgcgcgcgcgctaccatgaggccgagcgggcccgcggccgcgcgcttggcgcagtggacaagtatcgactgcgcaagaagttcccgctgcccaagaccatctgggacggcgaggagacagtctactgcttcaaggagcgctcccgcgcagcgctcaaggcctgctaccgcggcaaccgctaccccacgccggacgagaagcgccgcctggccacactcaccggcctgtcgctcacgcaggtcagcaactggttcaagaaccggcgacagcgcgaccggaccggggccggaggcggcgcgccctgcaagaggtgaggggcctcgggcggcgcaagtccagctctcccggggacatcccgtccaccagccctcttcccccgtgcccactgctggggccggcgcgccgaggtcctcggacatctcccgggaccagctcacaatctcaggcgcccgcggggcgcggggactaagtgtggacgggacaggcacccgcccgggccctctccccgcacgcgtctcctcttccagcggctccattccgagctccttcccaaatcccatcggtgttggggaatcacactgcg

SEQ ID NO: 369574 - DNA, 612 bp, Homo sapiens
agttgttttttgttttttgttttttttttaatttttttttgagatgggaagaacttgggtcctccttgctccacccaccctgcatggtgagaatggtggagcaggaaaggcaaaggggacctgatggagtgtctctcctgccagggctccctccttccggctgccacccgatcccagcttgccctgcatcctggtgggtccaggcactggcattgcccccttccggggattctggcaggagcggctgcatgacattgagagcaaaggtgaggctggggactaaaggactgcctgaagggagtcacacaatctagggacagaggggtggggctggaaggcaggaaataggaaagagagggcaggaaacaaagtccacaaagctgaaaagacgctcatgagaccaaggggagggcaggtaccaaaggcaagggctgggccctgagcttctggcttcctgtggcacaatctcggctcactgcaacctccgcctcccaagttcaagtgattcttctgcttcagcctcctgagtagctgagactacaggtgtgtgccaccacacccagctaattttttgtatttttagtagagatggggtttcaccatgttggccag

SEQ ID NO: 369575 - DNA, 591 bp, Homo sapiens
ctaactcctgggttcaagcaatccacctgcctcggcctcccaaagtgctgcgattatagacgtgagccactgcacctggccctcagtatcttaagcaagttggaatctcgtgaaaccctttttgctgccttagtgtccgtttcagccctcattctgacctaccttttcaagaaaaatagcaccagcaattgacttttttttagcataaaggtgtatagacacccatataacctacagccttcacaaggcatagcacattttcaccaccctggaaagttccctcatcagttcctcacgtgaatcccttcccagtctgtctccctgccagaagtgtctgtcaccacagaatagtttcgcctgctctagaacggcacctagatggaagcacgcagtgttgcggcgtctcctgctgaggctgtttttgaggcgcactcgtgttgctgcgtgactcagtatttcactcattctgctgctgagtgccgttcattgtgtgaatatccccagtttgtttacccattctcttgttggtgacacttgggctgtttccaggtcggggctattatgaataaacctgttatgaacattcttgta

SEQ ID NO: 369576 - DNA, 4076 bp, Homo sapiens
  misc_feature (4)..(6): n is a, c, g, or t
  misc_feature (18)..(19): n is a, c, g, or t
  misc_feature (22)..(23): n is a, c, g, or t
  misc_feature (31)..(31): n is a, c, g, or t
gaannnccactctgctgnngcnncagcaganggacgcacagtaacatgggcaacttgaagagcgtggcccaggagcctgggccaccctgcggcctggggctggggctgggccttgggctgtgcggcaagcagggcccagccaccccggcccctgagcccagccgggccccagcatccctactcccaccagcgccagaacacagccccccgagctccccgctaacccagcccccagaggggcccaagttccctcgtgtgaagaactgggaggtggggagcatcacctatgacaccctcagcgcccaggcgcagcaggatgggccctgcaccccaagacgctgcctgggctccctggtatttccacggaaactacagggccggccctcccccggccccccggcccctgagcagctgctgagtcaggcccgggacttcatcaaccagtactacagctccattaagaggagcggctcccaggcccacgaacagcggcttcaagaggtggaagccgaggtggcagccacaggcacctaccagcttagggagagcgagctggtgttcggggctaagcaggcctggcgcaacgctccccgctgcgtgggccggatccagtgggggaagctgcaggtgttcgatgcccgggactgcaggtctgcacaggaaatgttcacctacatctgcaaccacatcaagtatgccaccaaccggggcaaccttcgctcggccatcacagtgttcccgcagcgctgccctggccgaggagacttccgaatctggaacagccagctggtgcgctacgcgggctaccggcagcaggacggctctgtgcggggggacccagccaacgtggagatcaccgagctctgcattcagcacggctggaccccaggaaacggtcgcttcgacgtgctgcccctgctgctgcaggccccagatgagcccccagaactcttccttctgccccccgagctggtccttgaggtgcccctggagcaccccacgctggagtggtttgcagccctgggcctgcgctggtacgccctcccggcagtgtccaacatgctgctggaaattgggggcctggagttccccgcagcccccttcagtggctggtacatgagcactgagatcggcacgaggaacctgtgtgaccctcaccgctacaacatcctggaggatgtggctgtctgcatggacctggatacccggaccacctcgtccctgtggaaagacaaggcagcagtggaaatcaacgtggccgtgctgcacagttaccagctagccaaagtcaccatcgtggaccaccacgccgccacggcctctttcatgaagcacctggagaatgagcagaaggccagggggggctgccctgcagactgggcctggatcgtgccccccatctcgggcagcctcactcctgttttccatcaggagatggtcaactatttcctgtccccggccttccgctaccagccagacccctggaaggggagtgccgccaagggcaccggcatcaccaggaagaagacctttaaagaagtggccaacgccgtgaagatctccgcctcgctcatgggcacggtgatggcgaagcgagtgaaggcgacaatcctgtatggctccgagaccggccgggcccagagctacgcacagcagctggggagactcttccggaaggcttttgatccccgggtcctgtgtatggatgagtatgacgtggtgtccctcgaacacgagacgctggtgctggtggtaaccagcacatttgggaatggggatcccccggagaatggagagagctttgcagctgccctgatggagatgtccggcccctacaacagctcccctcggccggaacagcacaagagttataagatccgcttcaacagcatctcctgctcagacccactggtgtcctcttggcggcggaagaggaaggagtccagtaacacagacagtgcaggggccctgggcaccctcaggttctgtgtgttcgggctcggctcccgggcatacccccacttctgcgcctttgctcgtgccgtggacacacggctggaggaactgggcggggagcggctgctgcagctgggccagggcgacgagctgtgcggccaggaggaggccttccgaggctgggcccaggctgccttccaggccgcctgtgagaccttctgtgtgggagaggatgccaaggccgccgcccgagacatcttcagccccaaacggagctggaagcgccagaggtaccggctgagcgcccaggccgagggcctgcagttgctgccaggtctgatccacgtgcacaggcggaagatgttccaggctacaatccgctcagtggaaaacctgcaaagcagcaagtccacgagggccaccatcctggtgcgcctggacaccggaggccaggaggggctgcagtaccagccgggggaccacataggtgtctgcccgcccaaccggcccggccttgtggaggcgctgctgagccgcgtggaggacccgccggcgcccactgagcccgtggcagtagagcagctggagaagggcagccctggtggccctccccccggctgggtgcgggacccccggctgcccccgtgcacgctgcgccaggctctcaccttcttcctggacatcacctccccacccagccctcagctcttgcggctgctcagcaccttggcagaagagcccagggaacagcaggagctggaggccctcagccaggatccccgacgctacgaggagtggaagtggttccgctgccccacgctgctggaggtgctggagcagttcccgtcggtggcgctgcctgccccactgctcctcacccagctgcctctgctccagccccggtactactcagtcagctcggcacccagcacccacccaggagagatccacctcactgtagctgtgctggcatacaggactcaggatgggctgggccccctgcactatggagtctgctccacgtggctaagccagctcaagcccggagaccctgtgccctgcttcatccggggggctccctccttccggctgccacccgatcccagcttgccctgcatcctggtgggtccaggcactggcattgcccccttccggggattctggcaggagcggctgcatgacattgagagcaaagggctgcagcccactcccatgactttggtgttcggctgccgatgctcccaacttgaccatctctaccgcgacgaggtgcagaacgcccagcagcgcggggtgtttggccgagtcctcaccgccttctcccgggaacctgacaaccccaagacctacgtgcaggacatcctgaggacggagctggctgcggaggtgcaccgcgtgctgtgcctcgagcggggccacatgtttgtctgcggcgatgttaccatggcaaccaacgtcctgcagaccgtgcagcgcatcctggcgacggagggcgacatggagctggacgaggccggcgacgtcatcggcgtgctgcgggatcagcaacgctaccacgaagacattttcgggctcacgctgcgcacccaggaggtgacaagccgcatacgcacccagagcttttccttgcaggagcgtcagttgcggggcgcagtgccctgggcgttcgaccctcccggctcagacaccaacagcccctgagagccgcctggctttcccttccagttccgggagagcggctgcccgactcaggtccgcccgaccaggatcagccccgctcctcccctcttgaggtggtgccttctcacatctgtccagaggctgcaaggattcagcattattcctccaggaaggagcaaaacgcctcttttccctctctaggcctgttgcctcgggcctgggtccgccttaatctggaaggcccctcccagcagcggtaccccagggcctactgccacccgcttcctgtttcttagtcgaatgttagattcctcttgcctctctcaggagtatcttacctgtaaagtctaatctctaaatcaagtatttattattgaagatttaccataagggactgtgccagatgttaggagaactactaaagtgcctaccccagctca

SEQ ID NO: 369577 - DNA, 264 bp, Homo sapiens
  misc_feature (260)..(260): n is a, c, g, or t
  misc_feature (263)..(263): n is a, c, g, or t
agttgttttttgttttttgttttttttttaatttttttttgagatgggaagaacttgggtcctccttgctccacccaccctgcatggtgagaatggtggagcaggaaaggcaaaggggacctgatggagtgtctctcctgccagggctccctccttccggctgccacccgatcccagcttgccctgcatcctggtgggtccaggcactggcattgcccccttctgtcgtcttctagcagcggaagagaagaagaagcccnccnc

SEQ ID NO: 369578 - DNA, 1978 bp, Homo sapiens
agttgttttttgttttttgttttttttttaatttttttttgagatgggaagaacttgggtcctccttgctccacccaccctgcatggtgagaatggtggagcaggaaaggcaaaggggacctgatggagtgtctctcctgccagggctccctccttccggctgccacccgatcccagcttgccctgcatcctggtgggtccaggcactggcattgcccccttccggggattctggcaggagcggctgcatgacattgagagcaaaggtgaggctggggactaaaggactgcctgaagggagtcacacaatctagggacagaggggtggggctggaaggcaggaaataggaaagagagggcaggaaacaaagtccacaaagctgaaaagacgctcatgagaccaaggggagggcaggtaccaaaggcaagggctgggccctgagcttctggcttcctggtgcctggtacatagtaggtgttgactggattgaggacaaaggaaaatagaattttcaaagggattagggctaagactcaaagaagaactgcccaaggtggattcttgactgtgccagagctgaccgaggtctgtccaagacctaaggatgctacaaggtgttcatattgagcatggggtgcccagggtggtctgtcaatcaaaagaagagggctgtgactgggaggagagttataagtatgggagaatatgaagtgggagcggggaaggggactgcgatgtcacacaatgcaaagggcatggaattctgagtccgaagccgcgcattctagcgcagctccaccaggggccaccacctcacccgcgcttcccttccctctgtaaatcagggctgtgcagggtctctgtgaaagcattctacactctcttagagatgaaacagccaaagtaatggtggtttcagcccaaaacgctgggctgccaggctgggcgacggtggcctgtggggaggccccactagcactgtgccccggagaagagccttcccaagcgcggggttgcttgcagggctgcagcccactcccatgactttggtgttcggctgccgatgctcccaacttgaccatctctaccgcgacgaggtgcagaacgcccagcagcgcggggtgtttggccgagtcctcaccgccttctcccgggaacctgacaaccccaaggtgtgagaccctgagggcgcaatggtaacacctacgtgcaggacatcctgaggacggagctggctgcggaggtgcaccgcgtgctgtgcctcgagcggggccacatgtttgtctgcggcgatgttaccatggcaaccaacgtcctgcagaccgtgcagcgcatcctggcgacggagggcgacatggagctggacgaggccggcgacgtcatcggcgtgctgcgggatcagcaacgctaccacgaagacattttcgggctcacgctgcgcacccaggaggtgacaagccgcatacgcacccagagcttttccttgcaggagcgtcagttgcggggcgcagtgccctgggcgttcgaccctcccggctcagacaccaacagcccctgagagccgcctggctttcccttccagttccgggagagcggctgcccgactcaggtccgcccgaccaggatcagccccgctcctcccctcttgaggtggtgccttctcacatctgtccagaggctgcaaggattcagcattattcctccaggaaggagcaaaacgcctcttttccctctctaggcctgttgcctcgggcctgggtccgccttaatctggaaggcccctcccagcagcggtaccccagggcctactgccacccgcttcctgtttcttagtcgaatgttagattcctcttgcctctctcaggagtatcttacctgtaaagtctaatctctaaatcaagtatttattattgaagatttaccataagggactgtgccagatgttaggagaactactaaagtgcctaccccagctca

SEQ ID NO: 369579 - DNA, 2067 bp, Homo sapiens
agttgttttttgttttttgttttttttttaatttttttttgagatgggaagaacttgggtcctccttgctccacccaccctgcatggtgagaatggtggagcaggaaaggcaaaggggacctgatggagtgtctctcctgccagggctccctccttccggctgccacccgatcccagcttgccctgcatcctggtgggtccaggcactggcattgcccccttccggggattctggcaggagcggctgcatgacattgagagcaaaggtgaggctggggactaaaggactgcctgaagggagtcacacaatctagggacagaggggtggggctggaaggcaggaaataggaaagagagggcaggaaacaaagtccacaaagctgaaaagacgctcatgagaccaaggggagggcaggtaccaaaggcaagggctgggccctgagcttctggcttcctggtgcctggtacatagtaggtgttgactggattgaggacaaaggaaaatagaattttcaaagggattagggctaagactcaaagaagaactgcccaaggtggattcttgactgtgccagagctgaccgaggtctgtccaagacctaaggatgctacaaggtgttcatattgagcatggggtgcccagggtggtctgtcaatcaaaagaagagggctgtgactgggaggagagttataagtatgggagaatatgaagtgggagcggggaaggggactgcgatgtcacacaatgcaaagggcatggaattctgagtccgaagccgcgcattctagcgcagctccaccaggggccaccacctcacccgcgcttcccttccctctgtaaatcagggctgtgcagggtctctgtgaaagcattctacactctcttagagatgaaacagccaaagtaatggtggtttcagcccaaaacgctgggctgccaggctgggcgacggtggcctgtggggaggccccactagcactgtgccccggagaagagccttcccaagcgcggggttgcttgcagggctgcagcccactcccatgactttggtgttcggctgccgatgctcccaacttgaccatctctaccgcgacgaggtgcagaacgcccagcagcgcggggtgtttggccgagtcctcaccgccttctcccgggaacctgacaaccccaaggtgtgagaccctgagggcgcaatggtaacacctacgtgcaggacatcctgaggacggagctggctgcggaggtgcaccgcgtgctgtgcctcgagcggggccacatgtttgtctgcggcgatgttaccatggcaaccaacgtcctgcagaccgtgcagcgcatcctggcgacggagggcgacatggagctggacgaggccggcgacgtcatcggcgtgctgcgggtgcggaggggcgggccgggcctgagcgtgcggggttcctgctaaggtctccgagtcgggttctgatccactgtgctcttttccgacaggatcagcaacgctaccacgaagacattttcgggctcacgctgcgcacccaggaggtgacaagccgcatacgcacccagagcttttccttgcaggagcgtcagttgcggggcgcagtgccctgggcgttcgaccctcccggctcagacaccaacagcccctgagagccgcctggctttcccttccagttccgggagagcggctgcccgactcaggtccgcccgaccaggatcagccccgctcctcccctcttgaggtggtgccttctcacatctgtccagaggctgcaaggattcagcattattcctccaggaaggagcaaaacgcctcttttccctctctaggcctgttgcctcgggcctgggtccgccttaatctggaaggcccctcccagcagcggtaccccagggcctactgccacccgcttcctgtttcttagtcgaatgttagattcctcttgcctctctcaggagtatcttacctgtaaagtctaatctctaaatcaagtatttattattgaagatttaccataagggactgtgccagatgttaggagaactactaaagtgcctaccccagctca

SEQ ID NO: 369580 - DNA, 1917 bp, Homo sapiens
agttgttttttgttttttgttttttttttaatttttttttgagatgggaagaacttgggtcctccttgctccacccaccctgcatggtgagaatggtggagcaggaaaggcaaaggggacctgatggagtgtctctcctgccagggctccctccttccggctgccacccgatcccagcttgccctgcatgacattgagagcaaaggtgaggctggggactaaaggactgcctgaagggagtcacacaatctagggacagaggggtggggctggaaggcaggaaataggaaagagagggcaggaaacaaagtccacaaagctgaaaagacgctcatgagaccaaggggagggcaggtaccaaaggcaagggctgggccctgagcttctggcttcctggtgcctggtacatagtaggtgttgactggattgaggacaaaggaaaatagaattttcaaagggattagggctaagactcaaagaagaactgcccaaggtggattcttgactgtgccagagctgaccgaggtctgtccaagacctaaggatgctacaaggtgttcatattgagcatggggtgcccagggtggtctgtcaatcaaaagaagagggctgtgactgggaggagagttataagtatgggagaatatgaagtgggagcggggaaggggactgcgatgtcacacaatgcaaagggcatggaattctgagtccgaagccgcgcattctagcgcagctccaccaggggccaccacctcacccgcgcttcccttccctctgtaaatcagggctgtgcagggtctctgtgaaagcattctacactctcttagagatgaaacagccaaagtaatggtggtttcagcccaaaacgctgggctgccaggctgggcgacggtggcctgtggggaggccccactagcactgtgccccggagaagagccttcccaagcgcggggttgcttgcagggctgcagcccactcccatgactttggtgttcggctgccgatgctcccaacttgaccatctctaccgcgacgaggtgcagaacgcccagcagcgcggggtgtttggccgagtcctcaccgccttctcccgggaacctgacaaccccaaggtgtgagaccctgagggcgcaatggtaacacctacgtgcaggacatcctgaggacggagctggctgcggaggtgcaccgcgtgctgtgcctcgagcggggccacatgtttgtctgcggcgatgttaccatggcaaccaacgtcctgcagaccgtgcagcgcatcctggcgacggagggcgacatggagctggacgaggccggcgacgtcatcggcgtgctgcgggatcagcaacgctaccacgaagacattttcgggctcacgctgcgcacccaggaggtgacaagccgcatacgcacccagagcttttccttgcaggagcgtcagttgcggggcgcagtgccctgggcgttcgaccctcccggctcagacaccaacagcccctgagagccgcctggctttcccttccagttccgggagagcggctgcccgactcaggtccgcccgaccaggatcagccccgctcctcccctcttgaggtggtgccttctcacatctgtccagaggctgcaaggattcagcattattcctccaggaaggagcaaaacgcctcttttccctctctaggcctgttgcctcgggcctgggtccgccttaatctggaaggcccctcccagcagcggtaccccagggcctactgccacccgcttcctgtttcttagtcgaatgttagattcctcttgcctctctcaggagtatcttacctgtaaagtctaatctctaaatcaagtatttattattgaagatttaccataagggactgtgccagatgttaggagaactactaaagtgcctaccccagctca

SEQ ID NO: 369581 - DNA, 1803 bp, Homo sapiens
agttgttttttgttttttgttttttttttaatttttttttgagatgggaagaacttgggtcctccttgctccacccaccctgcatggtgagaatggtggagcaggaaaggcaaaggggacctgatggagtgtctctcctgccagggctccctccttccggctgccacccgatcccagcttgccctgcatcctggtgggtccaggcactggcattgcccccttccggggattctggcaggagcggcaaaggcaagggctgggccctgagcttctggcttcctggtgcctggtacatagtaggtgttgactggattgaggacaaaggaaaatagaattttcaaagggattagggctaagactcaaagaagaactgcccaaggtggattcttgactgtgccagagctgaccgaggtctgtccaagacctaaggatgctacaaggtgttcatattgagcatggggtgcccagggtggtctgtcaatcaaaagaagagggctgtgactgggaggagagttataagtatgggagaatatgaagtgggagcggggaaggggactgcgatgtcacacaatgcaaagggcatggaattctgagtccgaagccgcgcattctagcgcagctccaccaggggccaccacctcacccgcgcttcccttccctctgtaaatcagggctgtgcagggtctctgtgaaagcattctacactctcttagagatgaaacagccaaagtaatggtggtttcagcccaaaacgctgggctgccaggctgggcgacggtggcctgtggggaggccccactagcactgtgccccggagaagagccttcccaagcgcggggttgcttgcagggctgcagcccactcccatgactttggtgttcggctgccgatgctcccaacttgaccatctctaccgcgacgaggtgcagaacgcccagcagcgcggggtgtttggccgagtcctcaccgccttctcccgggaacctgacaaccccaaggtgtgagaccctgagggcgcaatggtaacacctacgtgcaggacatcctgaggacggagctggctgcggaggtgcaccgcgtgctgtgcctcgagcggggccacatgtttgtctgcggcgatgttaccatggcaaccaacgtcctgcagaccgtgcagcgcatcctggcgacggagggcgacatggagctggacgaggccggcgacgtcatcggcgtgctgcgggatcagcaacgctaccacgaagacattttcgggctcacgctgcgcacccaggaggtgacaagccgcatacgcacccagagcttttccttgcaggagcgtcagttgcggggcgcagtgccctgggcgttcgaccctcccggctcagacaccaacagcccctgagagccgcctggctttcccttccagttccgggagagcggctgcccgactcaggtccgcccgaccaggatcagccccgctcctcccctcttgaggtggtgccttctcacatctgtccagaggctgcaaggattcagcattattcctccaggaaggagcaaaacgcctcttttccctctctaggcctgttgcctcgggcctgggtccgccttaatctggaaggcccctcccagcagcggtaccccagggcctactgccacccgcttcctgtttcttagtcgaatgttagattcctcttgcctctctcaggagtatcttacctgtaaagtctaatctctaaatcaagtatttattattgaagatttaccataagggactgtgccagatgttaggagaactactaaagtgcctaccccagctca

SEQ ID NO: 369582 - DNA, 1196 bp, Homo sapiens
agttgttttttgttttttgttttttttttaatttttttttgagatgggaagaacttgggtcctccttgctccacccaccctgcatggtgagaatggtggagcaggaaaggcaaaggggacctgatggagtgtctctcctgccagggctccctccttccggctgccacccgatcccagcttgccctgcatcctggtgggtccaggcactggcattgcccccttccggggattctggcaggagcggctgcatgacattgagagcaaaggtgaggctggggactaaaggactgcctgaagggagtcacacaatctagggacagaggggtggggctggaaggcaggaaataggaaagagagggcaggaaacaaagtccacaaagctgaaaagacgctcatgagaccaaggggagggcaggtaccaaaggcaagggctgggccctgagcttctggcttcctggtgcctggtacatagtaggtgttgactggattgaggacaaaggaaaatagaattttcaaagggattagggctaagactcaaagaagaactgcccaaggtggattcttgactgtgccagagctgaccgaggtctgtccaagacctaaggatgctacaaggtgttcatattgagcatggggtgcccagggtggtctgtcaatcaaaagaagagggctgtgactgggaggagagttataagtatgggagaatatgaagtgggagcggggaaggggactgcgatgtcacacaatgcaaagggcatggaattctgagtccgaagccgcgcattctagcgcagctccaccaggggccaccacctcacccgcgcttcccttccctctgtaaatcagggctgtgcagggtctctgtgaaagcattctacactctcttagagatgaaacagccaaagtaatggtggttggcaggaaacaaagtccacaaagctgaaaagacgctcatgagaccaaggggagggcaggtaccaaaggcaagggctgggccctgagcttctggcttcctggtgcctggtacatagtaggtgttgactggattgaggacaaaggaaaatagaattttcaaagggattagggctaagactcaaagaagaactgcccaaggtggattcttgactgtgccagagctgaccgaggtctgtccaagacctaaggatgctacaaggtgttcatattgagcatggggt

SEQ ID NO: 369583 - DNA, 3255 bp, Homo sapiens
  misc_feature (4)..(6): n is a, c, g, or t
  misc_feature (18)..(19): n is a, c, g, or t
  misc_feature (22)..(23): n is a, c, g, or t
  misc_feature (31)..(31): n is a, c, g, or t
gaannnccactctgctgnngcnncagcaganggacgcacagtaacatgggcaacttgaagagcgtggcccaggagcctgggccaccctgcggcctggggctggggctgggccttgggctgtgcggcaagcagggcccagccaccccggcccctgagcccagccgggccccagcatccctactcccaccagcgccagaacacagccccccgagctccccgctaacccagcccccagaggggcccaagttccctcgtgtgaagaactgggaggtggggagcatcacctatgacaccctcagcgcccaggcgcagcaggatgggccctgcaccccaagacgctgcctgggctccctggtatttccacggaaactacagggccggccctcccccggccccccggcccctgagcagctgctgagtcaggcccgggacttcatcaaccagtactacagctccattaagaggagcggctcccaggcccacgaacagcggcttcaagaggtggaagccgaggtggcagccacaggcacctaccagcttagggagagcgagctggtgttcggggctaagcaggcctggcgcaacgctccccgctgcgtgggccggatccagtgggggaagctgcaggtgttcgatgcccgggactgcaggtctgcacaggaaatgttcacctacatctgcaaccacatcaagtatgccaccaaccggggcaaccttcgctcggccatcacagtgttcccgcagcgctgccctggccgaggagacttccgaatctggaacagccagctggtgcgctacgcgggctaccggcagcaggacggctctgtgcggggggacccagccaacgtggagatcaccgagctctgcattcagcacggctggaccccaggaaacggtcgcttcgacgtgctgcccctgctgctgcaggccccagatgagcccccagaactcttccttctgccccccgagctggtccttgaggtgcccctggagcaccccacgctggagtggtttgcagccctgggcctgcgctggtacgccctcccggcagtgtccaacatgctgctggaaattgggggcctggagttccccgcagcccccttcagtggctggtacatgagcactgagatcggcacgaggaacctgtgtgaccctcaccgctacaacatcctggaggatgtggctgtctgcatggacctggatacccggaccacctcgtccctgtggaaagacaaggcagcagtggaaatcaacgtggccgtgctgcacagttaccagctagccaaagtcaccatcgtggaccaccacgccgccacggcctctttcatgaagcacctggagaatgagcagaaggccagggggggctgccctgcagactgggcctggatcgtgccccccatctcgggcagcctcactcctgttttccatcaggagatggtcaactatttcctgtccccggccttccgctaccagccagacccctggaaggggagtgccgccaagggcaccggcatcaccaggaagaagacctttaaagaagtggccaacgccgtgaagatctccgcctcgctcatgggcacggtgatggcgaagcgagtgaaggcgacaatcctgtatggctccgagaccggccgggcccagagctacgcacagcagctggggagactcttccggaaggcttttgatccccgggtcctgtgtatggatgagtatgacgtggtgtccctcgaacacgagacgctggtgctggtggtaaccagcacatttgggaatggggatcccccggagaatggagagagctttgcagctgccctgatggagatgtccggcccctacaacagctcccctcggccggaacagcacaagagttataagatccgcttcaacagcatctcctgctcagacccactggtgtcctcttggcggcggaagaggaaggagtccagtaacacagacagtgcaggggccctgggcaccctcaggttctgtgtgttcgggctcggctcccgggcatacccccacttctgcgcctttgctcgtgccgtggacacacggctggaggaactgggcggggagcggctgctgcagctgggccagggcgacgagctgtgcggccaggaggaggccttccgaggctgggcccaggctgccttccaggccgcctgtgagaccttctgtgtgggagaggatgccaaggccgccgcccgagacatcttcagccccaaacggagctggaagcgccagaggtaccggctgagcgcccaggccgagggcctgcagttgctgccaggtctgatccacgtgcacaggcggaagatgttccaggctacaatccgctcagtggaaaacctgcaaagcagcaagtccacgagggccaccatcctggtgcgcctggacaccggaggccaggaggggctgcagtaccagccgggggaccacataggtgtctgcccgcccaaccggcccggccttgtggaggcgctgctgagccgcgtggaggacccgccggcgcccactgagcccgtggcagtagagcagctggagaagggcagccctggtggccctccccccggctgggtgcgggacccccggctgcccccgtgcacgctgcgccaggctctcaccttcttcctggacatcacctccccacccagccctcagctcttgcggctgctcagcaccttggcagaagagcccagggaacagcaggagctggaggccctcagccaggatccccgacgctacgaggagtggaagtggttccgctgccccacgctgctggaggtgctggagcagttcccgtcggtggcgctgcctgccccactgctcctcacccagctgcctctgctccagccccggtactactcagtcagctcggcacccagcacccacccaggagagatccacctcactgtagctgtgctggcatacaggactcaggatgggctgggccccctgcactatggagtctgctccacgtggctaagccagctcaagcccggagaccctgtgccctgcttcatccggggggctccctccttccgccatttcacttctaacttcctgtgtctaacatgattctagctctggactttctccttcgtgtgatccagccaagacctggcgggcttggctcttccttcccagaagagccagtgaccacccaggctagaggtcctttgccctagcagctatgccacgccgcatctcaccgctggccatagttgaactcccgctgtgagcgtcgcaagaaga

SEQ ID NO: 369584 - DNA, 2076 bp, Homo sapiens
  misc_feature (4)..(6): n is a, c, g, or t
  misc_feature (18)..(19): n is a, c, g, or t
  misc_feature (22)..(23): n is a, c, g, or t
  misc_feature (31)..(31): n is a, c, g, or t
gaannnccactctgctgnngcnncagcaganggacgcacagtaacatgggcaacttgaagagcgtggcccaggagcctgggccaccctgcggcctggggctggggctgggccttgggctgtgcggcaagcagggcccagccaccccggcccctgagcccagccgggccccagcatccctactcccaccagcgccagaacacagccccccgagctccccgctaacccagcccccagaggggcccaagttccctcgtgtgaagaactgggaggtggggagcatcacctatgacaccctcagcgcccaggcgcagcaggatgggccctgcaccccaagacgctgcctgggctccctggtatttccacggaaactacagggccggccctcccccggccccccggcccctgagcagctgctgagtcaggcccgggacttcatcaaccagtactacagctccattaagaggagcggctcccaggcccacgaacagcggcttcaagaggtggaagccgaggtggcagccacaggcacctaccagcttagggagagcgagctggtgttcggggctaagcaggcctggcgcaacgctccccgctgcgtgggccggatccagtgggggaagctgcaggtgttcgatgcccgggactgcaggtctgcacaggaaatgttcacctacatctgcaaccacatcaagtatgccaccaaccggggcaaccttcgctcggccatcacagtgttcccgcagcgctgccctggccgaggagacttccgaatctggaacagccagctggtgcgctacgcgggctaccggcagcaggacggctctgtgcggggggacccagccaacgtggagatcaccgagctctgcattcagcacggctggaccccaggaaacggtcgcttcgacgtgctgcccctgctgctgcaggccccagatgagcccccagaactcttccttctgccccccgagctggtccttgaggtgcccctggagcaccccacgctggagtggtttgcagccctgggcctgcgctggtacgccctcccggcagtgtccaacatgctgctggaaattgggggcctggagttccccgcagcccccttcagtggctggtacatgagcactgagatcggcacgaggaacctgtgtgaccctcaccgctacaacatcctggaggatgtggctgtctgcatggacctggatacccggaccacctcgtccctgtggaaagacaaggcagcagtggaaatcaacgtggccgtgctgcacagttaccagctagccaaagtcaccatcgtggaccaccacgccgccacggcctctttcatgaagcacctggagaatgagcagaaggccagggggggctgccctgcagactgggcctggatcgtgccccccatctcgggcagcctcactcctgttttccatcaggagatggtcaactatttcctgtccccggccttccgctaccagccagacccctggaaggggagtgccgccaagggcaccggcatcaccaggaagaagacctttaaagaagtggccaacgccgtgaagatctccgcctcgctcatgggcacggtgatggcgaagcgagtgaaggcgacaatcctgtatggctccgagaccggccgggcccagagctacgcacagcagctggggagactcttccggaaggcttttgatccccgggtcctgtgtatggatgagtatgacgtggtgtccctcgaacacgagacgctggtgctggtggtaaccagcacatttgggaatggggatcccccggagaatggagagtctgtctccctgccagaagtgtctgtcaccacagaatagtttcgcctgctctagaacggcacctagatggaagcacgcagtgttgcggcgtctcctgctgaggctgtttttgaggcgcactcgtgttgctgcgtgactcagtatttcactcattctgctgctgagtgccgttcattgtgtgaatatccccagtttgtttacccattctcttgttggtgacacttgggctgtttccaggtcggggctattatgaataaacctgttatgaacattcttgta

SEQ ID NO: 369585 - DNA, 516 bp, Homo sapiens
agccgcatacgcacccagagcttttccttgcaggagcgtcagttgcggggcgcagtgccctgggcgttcgaccctcccggctcagacaccaacagcccctgagagccgcctggctttcccttccagttccgggagagcggctgcccgactcaggtccgcccgaccaggatcagccccgctcctcccctcttgaggtggtgccttctcacatctgtccagaggctgcaaggattcagcattattcctccaggaaggagcaaaacgcctcttttccctctctaggcctgttgcctcgggcctgggtccgccttaatctggaaggcccctcccagcagcggtaccccagggcctactgccacccgcttcctgtttcttagtcgaatgttagattcctcttgcctctctcaggagtatcttacctgtaaagtctaatctctaaatcaagtatttattattgaagatttaccataagggactgtgccagatgttaggagaactactaaagtgcctacccca

SEQ ID NO: 369586 - DNA, 231 bp, Homo sapiens
ggggtgtttggccgagtcctcaccgccttctcccgggaacctgacaaccccaaggtgtgagaccctgagggcgcaatggtaacctgaagatagggagagaggggaggactcgcgctctccagcggggcacaccaaccacggccctcccgtggcctcccacgaccactcagccacccctgcacactctggcccacccttgtgccccggcccctctaggcccgcctcctcccg

SEQ ID NO: 369587 - DNA, 131 bp, Homo sapiens
tccaacccactgcatcctgccccgccaggatccccgacgctacgaggagtggaagtggttccgctgccccacgctgctggaggtgctggagcagttcccgtcggtggcgctgcctgccccactgctcctca

SEQ ID NO: 369588 - DNA, 246 bp, Homo sapiens
cctaacccggctggttctctgaggcccccacaccccgggactaaagcactctggggccaggccctgctccctagctcaggctgcctcatttgcccctccccgcccccaggtctgatccacgtgcacaggcggaagatgttccaggctacaatccgctcagtggaaaacctgcaaagcagcaagtccacgtgaggacgacggctttaccgcccccccacccctgtcctgaacaccctgaccctggac

SEQ ID NO: 369589 - DNA, 4470 bp, Homo sapiens
  misc_feature (4)..(6): n is a, c, g, or t
  misc_feature (18)..(19): n is a, c, g, or t
  misc_feature (22)..(23): n is a, c, g, or t
  misc_feature (31)..(31): n is a, c, g, or t
gaannnccactctgctgnngcnncagcaganggacgcacagtaacatgggcaacttgaagagcgtggcccaggagcctgggccaccctgcggcctggggctggggctgggccttgggctgtgcggcaagcagggcccagccaccccggcccctgagcccagccgggccccagcatccctactcccaccagcgccagaacacagccccccgagctccccgctaacccagcccccagaggggcccaagttccctcgtgtgaagaactgggaggtggggagcatcacctatgacaccctcagcgcccaggcgcagcaggatgggccctgcaccccaagacgctgcctgggctccctggtatttccacggaaactacagggccggccctcccccggccccccggcccctgagcagctgctgagtcaggcccgggacttcatcaaccagtactacagctccattaagaggagcggctcccaggcccacgaacagcggcttcaagaggtggaagccgaggtggcagccacaggcacctaccagcttagggagagcgagctggtgttcggggctaagcaggcctggcgcaacgctccccgctgcgtgggccggatccagtgggggaagctgcaggtgttcgatgcccgggactgcaggtctgcacaggaaatgttcacctacatctgcaaccacatcaagtatgccaccaaccggggcaaccttcgctcggccatcacagtgttcccgcagcgctgccctggccgaggagacttccgaatctggaacagccagctggtgcgctacgcgggctaccggcagcaggacggctctgtgcggggggacccagccaacgtggagatcaccgagctctgcattcagcacggctggaccccaggaaacggtcgcttcgacgtgctgcccctgctgctgcaggccccagatgagcccccagaactcttccttctgccccccgagctggtccttgaggtgcccctggagcaccccacgctggagtggtttgcagccctgggcctgcgctggtacgccctcccggcagtgtccaacatgctgctggaaattgggggcctggagttccccgcagcccccttcagtggctggtacatgagcactgagatcggcacgaggaacctgtgtgaccctcaccgctacaacatcctggaggatgtggctgtctgcatggacctggatacccggaccacctcgtccctgtggaaagacaaggcagcagtggaaatcaacgtggccgtgctgcacagttaccagctagccaaagtcaccatcgtggaccaccacgccgccacggcctctttcatgaagcacctggagaatgagcagaaggccagggggggctgccctgcagactgggcctggatcgtgccccccatctcgggcagcctcactcctgttttccatcaggagatggtcaactatttcctgtccccggccttccgctaccagccagacccctggaaggggagtgccgccaagggcaccggcatcaccaggaagaagacctttaaagaagtggccaacgccgtgaagatctccgcctcgctcatgggcacggtgatggcgaagcgagtgaaggcgacaatcctgtatggctccgagaccggccgggcccagagctacgcacagcagctggggagactcttccggaaggcttttgatccccgggtcctgtgtatggatgagtatgacgtggtgtccctcgaacacgagacgctggtgctggtggtaaccagcacatttgggaatggggatcccccggagaatggagagagctttgcagctgccctgatggagatgtccggcccctacaacagctcccctcggccggaacagcacaagagttataagatccgcttcaacagcatctcctgctcagacccactggtgtcctcttggcggcggaagaggaaggagtccagtaacacagacagtgcaggggccctgggcaccctcaggttctgtgtgttcgggctcggctcccgggcatacccccacttctgcgcctttgctcgtgccgtggacacacggctggaggaactgggcggggagcggctgctgcagctgggccagggcgacgagctgtgcggccaggaggaggccttccgaggctgggcccaggctgccttccaggccgcctgtgagaccttctgtgtgggagaggatgccaaggccgccgcccgagacatcttcagccccaaacggagctggaagcgccagaggtaccggctgagcgcccaggccgagggcctgcagttgctgccaggtctgatccacgtgcacaggcggaagatgttccaggctacaatccgctcagtggaaaacctgcaaagcagcaagtccacgagggccaccatcctggtgcgcctggacaccggaggccaggaggggctgcagtaccagccgggggaccacataggtgtctgcccgcccaaccggcccggccttgtggaggcgctgctgagccgcgtggaggacccgccggcgcccactgagcccgtggcagtagagcagctggagaagggcagccctggtggccctccccccggctgggtgcgggacccccggctgcccccgtgcacgctgcgccaggctctcaccttcttcctggacatcacctccccacccagccctcagctcttgcggctgctcagcaccttggcagaagagcccagggaacagcaggagctggaggccctcagccaggatccccgacgctacgaggagtggaagtggttccgctgccccacgctgctggaggtgctggagcagttcccgtcggtggcgctgcctgccccactgctcctcacccagctgcctctgctccagccccggtactactcagtcagctcggcacccagcacccacccaggagagatccacctcactgtagctgtgctggcatacaggactcaggatgggctgggccccctgcactatggagtctgctccacgtggctaagccagctcaagcccggagaccctgtgccctgcttcatccggggggctccctccttccggctgccacccgatcccagcttgccctgcatcctggtgggtccaggcactggcattgcccccttccggggattctggcaggagcggctgcatgacattgagagcaaagggctgcagcccactcccatgactttggtgttcggctgccgatgctcccaacttgaccatctctaccgcgacgaggtgcagaacgcccagcagcgcggggtgtttggccgagtcctcaccgccttctcccgggaacctgacaaccccaagacctacgtgcaggacatcctgaggacggagctggctgcggaggtgcaccgcgtgctgtgcctcgagcggggccacatgtttgtctgcggcgatgttaccatggcaaccaacgtcctgcagaccgtgcagcgcatcctggcgacggagggcgacatggagctggacgaggccggcgacgtcatcggcgtgctgcgggatcagcaacgctaccacgaagacattttcgggctcacgctgcgcacccaggaggtgacaagccgcatacgcacccagagcttttccttgcaggagcgtcagttgcggggcgcagtgccctgggcgttcgaccctcccggctcagacaccaacagcccctgagagccgcctggctttcccttccagttccgggagagcggctgcccgactcaggtccgcccgaccaggatcagccccgctcctcccctcttgaggtggtgccttctcacatctgtccagaggctgcaaggattcagcattattcctccaggaaggagcaaaacgcctcttttccctctctaggcctgttgcctcgggcctgggtccgccttaatctggaaggcccctcccagcagcggtaccccagggcctactgccacccgcttcctgtttcttagtcgaatgttagattcctcttgcctctctcaggagtatcttacctgtaaagtctaatctctaaatcaagtatttattattgaagatttaccataagggactgtgccagatgttaggagaactactaaagtgcctaccccagctcatgtggattacagtttttttttttttggtttttttttttttgaaacggagtctccctctgccgcccgggctggagtgcagtggcgtgatctcagctcactgcaacctccaccccacaagttcaagtgattctcctgcctcagcctcccaagtagttgggattacaggtgcctgccaccgcgcccggctaggttttgtatttttagtaaagacggggtttcaccatcttggccaggctggtcttgaactcctgacctcgtgatccaaccgcctcagcctcccaaagtgctgggattacaggtgtgagctactgcacccggcgtggattacaattataaaatgacaagatttctgttttaacctgtgcagttgtgggtatgtggtggggaaaggggt

SEQ ID NO: 369590 - DNA, 1920 bp, Homo sapiens
agttgttttttgttttttgttttttttttaatttttttttgagatgggaagaacttgggtcctccttgctccacccaccctgcatggtgagaatggtggagcaggaaaggcaaaggggacctgatggagtgtctctcctgccagggctccctccttccggctgccacccgatcccagcttgccctgcatcctggtgggtccaggcactggcattgcccccttccggggattctggcaggagcggctgcatgacattgagagcaaaggtggggctggaaggcaggaaataggaaagagagggcaggaaacaaagtccacaaagctgaaaagacgctcatgagaccaaggggagggcaggtaccaaaggcaagggctgggccctgagcttctggcttcctggtgcctggtacatagtaggtgttgactggattgaggacaaaggaaaatagaattttcaaagggattagggctaagactcaaagaagaactgcccaaggtggattcttgactgtgccagagctgaccgaggtctgtccaagacctaaggatgctacaaggtgttcatattgagcatggggtgcccagggtggtctgtcaatcaaaagaagagggctgtgactgggaggagagttataagtatgggagaatatgaagtgggagcggggaaggggactgcgatgtcacacaatgcaaagggcatggaattctgagtccgaagccgcgcattctagcgcagctccaccaggggccaccacctcacccgcgcttcccttccctctgtaaatcagggctgtgcagggtctctgtgaaagcattctacactctcttagagatgaaacagccaaagtaatggtggtttcagcccaaaacgctgggctgccaggctgggcgacggtggcctgtggggaggccccactagcactgtgccccggagaagagccttcccaagcgcggggttgcttgcagggctgcagcccactcccatgactttggtgttcggctgccgatgctcccaacttgaccatctctaccgcgacgaggtgcagaacgcccagcagcgcggggtgtttggccgagtcctcaccgccttctcccgggaacctgacaaccccaaggtgtgagaccctgagggcgcaatggtaacacctacgtgcaggacatcctgaggacggagctggctgcggaggtgcaccgcgtgctgtgcctcgagcggggccacatgtttgtctgcggcgatgttaccatggcaaccaacgtcctgcagaccgtgcagcgcatcctggcgacggagggcgacatggagctggacgaggccggcgacgtcatcggcgtgctgcgggatcagcaacgctaccacgaagacattttcgggctcacgctgcgcacccaggaggtgacaagccgcatacgcacccagagcttttccttgcaggagcgtcagttgcggggcgcagtgccctgggcgttcgaccctcccggctcagacaccaacagcccctgagagccgcctggctttcccttccagttccgggagagcggctgcccgactcaggtccgcccgaccaggatcagccccgctcctcccctcttgaggtggtgccttctcacatctgtccagaggctgcaaggattcagcattattcctccaggaaggagcaaaacgcctcttttccctctctaggcctgttgcctcgggcctgggtccgccttaatctggaaggcccctcccagcagcggtaccccagggcctactgccacccgcttcctgtttcttagtcgaatgttagattcctcttgcctctctcaggagtatcttacctgtaaagtctaatctctaaatcaagtatttattattgaagatttaccataagggactgtgccagatgttaggagaactactaaagtgcctaccccagctca

SEQ ID NO: 369591 - DNA, 1932 bp, Homo sapiens
  misc_feature (4)..(6): n is a, c, g, or t
  misc_feature (18)..(19): n is a, c, g, or t
  misc_feature (22)..(23): n is a, c, g, or t
  misc_feature (31)..(31): n is a, c, g, or t
gaannnccactctgctgnngcnncagcaganggacgcacagtaacatgggcaacttgaagagcgtggcccaggagcctgggccaccctgcggcctggggctggggctgggccttgggctgtgcggcaagcagggcccagccaccccggcccctgagcccagccgggccccagcatccctactcccaccagcgccagaacacagccccccgagctccccgctaacccagcccccagaggggcccaagttccctcgtgtgaagaactgggaggtggggagcatcacctatgacaccctcagcgcccaggcgcagcaggatgggccctgcaccccaagacgctgcctgggctccctggtatttccacggaaactacagggccggccctcccccggccccccggcccctgagcagctgctgagtcaggcccgggacttcatcaaccagtactacagctccattaagaggagcggctcccaggcccacgaacagcggcttcaagaggtggaagccgaggtggcagccacaggcacctaccagcttagggagagcgagctggtgttcggggctaagcaggcctggcgcaacgctccccgctgcgtgggccggatccagtgggggaagctgcaggtgttcgatgcccgggactgcaggtctgcacaggaaatgttcacctacatctgcaaccacatcaagtatgccaccaaccggggcaaccttcgctcggccatcacagtgttcccgcagcgctgccctggccgaggagacttccgaatctggaacagccagctggtgcgctacgcgggctaccggcagcaggacggctctgtgcggggggacccagccaacgtggagatcaccgagctctgcattcagcacggctggaccccaggaaacggtcgcttcgacgtgctgcccctgctgctgcaggccccagatgagcccccagaactcttccttctgccccccgagctggtccttgaggtgcccctggagcaccccacgctggagtggtttgcagccctgggcctgcgctggtacgccctcccggcagtgtccaacatgctgctggaaattgggggcctggagttccccgcagcccccttcagtggctggtacatgagcactgagatcggcacgaggaacctgtgtgaccctcaccgctacaacatcctggaggatgtggctgtctgcatggacctggatacccggaccacctcgtccctgtggaaagacaaggcagcagtggaaatcaacgtggccgtgctgcacagttaccagctagccaaagtcaccatcgtggaccaccacgccgccacggcctctttcatgaagcacctggagaatgagcagaaggccagggggggctgccctgcagactgggcctggatcgtgccccccatctcgggcagcctcactcctgttttccatcaggagatggtcaactatttcctgtccccggccttccgctaccagccagacccctggaaggggagtgccgccaagggcaccggcatcaccaggaagaagacctttaaagaagtggccaacgccgtgaagatctccgcctcgctcatgggcacggtgatggcgaagcgagtgaaggcgacaatcctgtatggctccgagaccggccgggcccagagctacgcacagcagctggggagactcttccggaaggcttttgatccccgggtcctgtgtatggatgagtatgacgtggtgtccctcgaacacgagacgctggtgctggtggtaaccagcacatttgggaatggggatcccccggagaatggagagaacctatttacgttgcccaggctggccttgaactcctagcctcaagagatcctcctgccgcaggctcctttttcaaaagaagaaattgagcgctgtttagatgccaacatagattaaataacttcactttttaaa

SEQ ID NO: 369592 - DNA, 420 bp, Homo sapiens
gcatttggggaaatgggttaagctattgtgaaatttcttcaagggattaagctaggatatcatttcagttacttgtagaattacttttttcataccagttatgaaatgctgcaagataatgttgaaggatatcgtcgagaaataacatcacttcatgagagaaatcagaaactcactgccacaactcaaaagcaagaacagattatcaatacgatgactcaagatttgagaggagcaaatgagaagctagctgtcgcagaagtaagagcagaaaatttgaagaaggaaaaggaaatgcttaaattgtctgaagttcgtctttctcagcaaagagagtctttgttagctgaacaaagggggcaaaacttactgctaactaatctgcaaacaattcaggtaaccaaataaaaagcctatgta

SEQ ID NO: 369593 - DNA, 7976 bp, Homo sapiens
gcgcaagaggatcagggatagcctctgagctcgggttcccagggttcgtagcttccaacggctgcgcgcgcacttcggtcgcgggcggtgaggtgctgttgctgaaacgctgccgctgagggtggactcgatttcccagggtcccgccgcgggagtctccggcgggcgggcgcgcgcgagccaccgagcgaggtgatagaggcggcggcccaggcgtctgggtcctgctggtcttcgcctttcttctccgcttctaccccgtcggccgctgccactggggtccctggccccaccgacatggcggcggtgttgcagcaagtcctggagcgcacggagctgaacaagctgcccaagtctgtccagaacaaacttgaaaagttccttgctgatcagcaatccgagatcgatggcctgaaggggcggcatgagaaatttaaggtggagagcgaacaacagtattttgaaatagaaaagaggttgtcccacagtcaggagagacttgtgaatgaaacccgagagtgtcaaagcttgcggcttgagctagagaaactcaacaatcaactgaaggcactaactgagaaaaacaaagaacttgaaattgctcaggatcgcaatattgccattcagagccaatttacaagaacaaaggaagaattagaagctgagaaaagagacttaattagaaccaatgagagactatctcaagaacttgaatacttaacagaggatgttaaacgtctgaatgaaaaacttaaagaaagcaatacaacaaagggtgaacttcagttaaaattggatgaacttcaagcttctgatgtttctgttaagtatcgagaaaaacgcttggagcaagaaaaggaattgctacatagtcagaatacatggctgaatacagagttgaaaaccaaaactgatgaacttctggctcttggaagagaaaaagggaatgagattctagagcttaaatgtaatcttgaaaataaaaaagaagaggtttctagactggaagaacaaatgaatggcttaaaaacatcaaatgaacatcttcaaaagcatgtggaggatctgttgaccaaattaaaagaggccaaggaacaacaggccagtatggaagagaaattccacaatgaattaaatgcccacataaaactttctaatttgtacaagagtgccgctgatgactcagaagcaaagagcaatgaactaacccgggcagtagaggaactacacaaacttttgaaagaagctggtgaagccaacaaagcaatacaagatcatcttctagaggtggagcaatccaaagatcaaatggaaaaagaaatgcttgagaaaatagggagattggagaaggaattagagaatgcaaatgaccttctttctgccacaaaacgtaaaggagccatattgtctgaagaagagcttgccgccatgtctcctactgcagcagctgtagctaagatagtgaaacctgggatgaaactaactgagctctataatgcttatgtggaaactcaggatcagttgcttttggagaaactagagaacaaaagaattaataagtacctagatgaaatagtgaaagaagtggaagccaaagcaccaattttgaaacgccagcgtgaggaatatgaacgtgcacagaaagctgtagcaagtttatctgttaagcttgaacaagctatgaaggagattcagcgattgcaggaggacactgataaagccaacaagcaatcatctgtacttgagagagataatcgaagaatggaaatacaagtaaaagatctttcacaacagattagagtgcttttgatggaacttgaagaagcaaggggtaaccacgtaattcgtgatgaggaagtaagctctgctgatataagtagttcatctgaggtaatatcacagcatctagtatcttacagaaatattgaagagcttcaacaacaaaatcaacgtctcttagtggcccttagagagcttggggaaaccagagaaagagaagaacaagaaacaacttcatccaaaatcactgagcttcagctcaaacttgagagtgcccttactgaactagaacaactccgcaaatcacgacagcatcaaatgcagcttgttgattccatagttcgtcagcgtgatatgtaccgtattttattgtcacaaacaacaggagttgccattccattacatgcttcaagcttagatgatgtttctcttgcatcaactccaaaacgtccaagtacatcacagactgtttccactcctgctccagtacctgttattgaatcaacagaggctatagaggctaaggctgcccttaaacagttgcaggaaatttttgagaactacaaaaaagaaaaagcagaaaatgaaaaaatacaaaatgagcagcttgagaaacttcaagaacaagttacagatttgcgatcacaaaataccaaaatttctacccagctagattttgcttctaaacgttatgaaatgctgcaagataatgttgaaggatatcgtcgagaaataacatcacttcatgagagaaatcagaaactcactgccacaactcaaaagcaagaacagattatcaatacgatgactcaagatttgagaggagcaaatgagaagctagctgtcgcagaagtaagagcagaaaatttgaagaaggaaaaggaaatgcttaaattgtctgaagttcgtctttctcagcaaagagagtctttgttagctgaacaaagggggcaaaacttactgctaactaatctgcaaacaattcagggaatactggagcgatctgaaacagaaaccaaacaaaggcttagtagccagatagaaaaactggaacatgagatctctcatctaaagaagaagttggaaaatgaggtggaacaaaggcatacacttactagaaatctagatgttcaacttttagatacaaagagacaactggatacagagacaaatcttcatcttaacacaaaagaactattaaaaaatgctcaaaaagaaattgccacattgaaacagcacctcagtaatatggaagtccaagttgcttctcagtcttcacagagaactggtaaaggtcagcctagcaacaaagaagatgtggatgatcttgtgagtcagctaagacagacagaagagcaggtgaatgacttaaaggagagactcaaaacaagtacgagcaatgtggaacaatatcaagcaatggttactagtttagaagaatccctgaacaaggaaaaacaggtgacagaagaagtgcgtaagaatattgaagttcgtttaaaagagtcagctgaatttcagacacagttggaaaagaagttgatggaagtagagaaggaaaaacaagaacttcaggatgataaaagaagagccatagagagcatggaacaacagttatctgaattgaagaaaacactttctagtgttcagaatgaagtacaagaagctcttcagagagcaagcacagctttaagtaatgagcagcaagccagacgtgactgtcaggaacaagctaaaatagctgtggaagctcagaataagtatgagagagaattgatgctgcatgctgctgatgttgaagctctacaagctgcgaaggagcaggtttcaaaaatggcatcagtccgtcagcatttggaagaaacaacacagaaagcagaatcacagttgttggagtgtaaagcatcttgggaggaaagagagagaatgttaaaggatgaagtttccaaatgtgtatgtcgctgtgaagatctggagaaacaaaacagattacttcatgatcagatcgaaaaattaagtgacaaggtcgttgcctctgtgaaggaaggtgtacaaggtccactgaatgtatctctcagtgaagaaggaaaatctcaagaacaaattttggaaattctcagatttatacgacgagaaaaagaaattgctgaaactaggtttgaggtggctcaggttgagagtctgcgttatcgacaaagggttgaacttttagaaagagagctgcaggaactgcaagatagtctaaatgctgaaagggagaaagtccaggtaactgcaaaaacaatggctcagcatgaagaactgatgaagaaaactgaaacaatgaatgtagttatggagaccaataaaatgctaagagaagagaaggagagactagaacaggatctacagcaaatgcaagcaaaggtgaggaaactggagttagatattttacccttacaagaagcaaatgctgagctgagtgagaaaagcggtatgttgcaggcagagaagaagctcttagaagaggatgtcaaacgttggaaagcacgtaaccagcatctagtaagtcaacagaaagatccagatacagaagaatatcggaagctcctttctgaaaaggaagttcatactaagcgtattcaacaattgacagaagaaattggtagacttaaagctgaaattgcaagatcaaatgcatctttgactaacaaccagaacttaattcagagtctgaaggaagatctaaataaagtaagaactgaaaaggaaaccatccagaaggacttagatgccaaaataattgatatccaagaaaaagtcaaaactattactcaagttaagaaaattggacgtaggtacaagactcaatatgaagaacttaaagcacaacaggataaggttatggagacatcggctcagtcctctggagaccatcaggagcagcatgtttcagtccaggaaatgcaggaactcaaagaaacgctcaaccaagctgaaacaaaatcaaaatcacttgaaagtcaagtagagaatctgcagaagacattatctgaaaaagagacagaagcaagaaatctccaggaacagactgtgcaacttcagtctgaactttcacgacttcgtcaggatcttcaagatagaaccacacaggaggagcagctccgacaacagataactgaaaaggaagaaaaaaccagaaaggctattgtagcagcaaagtcaaaaattgcacacttagctggtgtaaaagatcagctaactaaagaaaatgaggagcttaaacaaaggaatggagccttagatcagcagaaagatgaattggatgttcgcattactgcgctaaagtcccaatatgaaggtcgaattagtcgcttggaaagagaactcagggagcatcaagagagacaccttgagcagagagatgagcctcaagaaccttctaataaggtccctgaacagcagagacagatcacattgaaaacaactccagcttctggtgaaagaggaattgccagcacatcagacccaccaacagccaatatcaagccaactcctgttgtgtctactccaagtaaagtgacagctgcagctatggctggaaataagtcaacacccagggctagtatccgcccaatggttacacctgcaactgttacaaatcccactactaccccaacagctacagtgatgcccactacacaagtggaatcacaggaagctatgcagtcagaagggcctgtggaacatgttccagtttttggaagcacaagtggatccgttcgttctactagtcctaatgtccagccttctatctctcaacctattttaactgttcagcaacaaacacaggctacagcttttgtgcaacccactcaacagagtcatcctcagattgagcctgccaatcaagagttatcttcaaacatagtagaggttgttcagagttcaccagttgagcggccttctacttccacagcagtatttggcacagtttcggctacccccagttcttctttgccaaagcgtacacgtgaagaggaagaggatagcaccatagaagcatcagaccaagtctctgatgatacagtggaaatgcctcttccaaagaagttgaaaagtgtcacacctgtaggaactgaggaagaagttatggcagaagaaagtactgatggagaggtagagactcaggtatacaaccaggattctcaagattccattggagaaggagttacccagggagattatacacctatggaagacagtgaagaaacctctcagtctctacaaatagatcttgggccacttcaatcagatcagcagacgacaacttcatcccaggatggtcaaggcaaaggagatgatgtcattgtaattgacagtgatgatgattatgaagaggatgaggaagatgatgatgatgatgaagatgacacagggatgggagatgagggtgaagatagtaatgaaggaactggtagtgccgatggcaatgatggttatgaagctgatgatgctgagggtggtgatgggactgatccaggtacagaaacagaagaaagtatgggtggaggtgaaggtaatcacagagctgctgattctcaaaacagtggtgaaggaaatacaggtgctgcagaatcttctttttctcaggaggtttctagagaacaacagccatcatcagcatctgaaagacaggcccctcgagcacctcagtcaccgagacgcccaccacatccacttcccccaagactgaccattcatgccccacctcaggagttgggaccaccagttcagagaattcagatgacccgaaggcagtctgtaggacgtggccttcagttgactccaggaataggtggcatgcaacagcatttttttgatgatgaagacagaacagttccaagtactccaactcttgtggtgccacatcgtactgatggatttgctgaagcaattcattcgccgcaggttgctggtgtccctagattccggtttgggccacctgaagatatgccacaaacaagttctagtcactctgatcttggccagcttgcttctcaaggaggtttaggaatgtatgaaacacccctgttcctagctcatgaagaagagtcaggtggccgaagtgttcccactactccactacaagtagcagccccagtgactgtatttactgagagcaccacctctgatgcttcggaacatgcctctcaatctgttccaatggtgactacatccactggcactttatctacaacaaatgaaacagcaacaggtgatgatggagatgaagtatttgtggaggcagaatctgaaggtattagttcagaagcaggcctagaaattgatagccagcaggaagaagagccggttcaagcatctgatgagtcagatctcccctccaccagccaggatcctccttctagctcatctgtagatactagtagtagtcaaccaaagcctttcagacgagtaagacttcagacaacattgagacaaggtgtccgtggtcgtcagtttaacagacagagaggtgtgagccatgcaatgggagggagaggaggaataaacagaggaaatattaattaaatggtctgtaaacaataacaactgtgaataagattatcaaatctgttttagtgtaatgattgtcaagtttaaaaacatttttatatataaactggtatactcatgtcaatattctttattaataaaatgtttttcagtgtcaaaatttattattcatttcttcattagttgactcctcctttgctcatcagtctaaggacagttgtaccagactttggataaggtctgcccagaacgagtagtaattgctcttgctgttctactaggcacatcaatgttatagtattgatctaaatggaagagaaaacatttttttagttaaaaagaaaacaatgcccaaactaaaaaataacttatgttgactattatgctcaaagacaatgtttatcattttaatagagatgtttttactaattaatttgaactttataacaaaaagaaaaacaattgcctagacttttcagcttttttgatgtttcaaaagattgacatttcaccatctttttgtaaaatcaggttcagctctcctttatgaagtaaacattaaagagtaaccaagtttgaaaaataatttacttggggttattccttttaaaaaatacatgccaatgtcattcatattatga

SEQ ID NO: 369594 - DNA, 7530 bp, Homo sapiens
gcgcaagaggatcagggatagcctctgagctcgggttcccagggttcgtagcttccaacggctgcgcgcgcacttcggtcgcgggcggtgaggtgctgttgctgaaacgctgccgctgagggtggactcgatttcccagggtcccgccgcgggagtctccggcgggcgggcgcgcgcgagccaccgagcgaggtgatagaggcggcggcccaggcgtctgggtcctgctggtcttcgcctttcttctccgcttctaccccgtcggccgctgccactggggtccctggccccaccgacatggcggcggtgttgcagcaagtcctggagcgcacggagctgaacaagctgcccaagtctgtccagaacaaacttgaaaagttccttgctgatcagcaatccgagatcgatggcctgaaggggcggcatgagaaatttaaggtggagagcgaacaacagtattttgaaatagaaaagaggttgtcccacagtcaggagagacttgtgaatgaaacccgagagtgtcaaagcttgcggcttgagctagagaaactcaacaatcaactgaaggcactaactgagaaaaacaaagaacttgaaattgctcaggatcgcaatattgccattcagagccaatttacaagaacaaaggaagaattagaagctgagaaaagagacttaattagaaccaatgagagactatctcaagaacttgaatacttaacagaggatgttaaacgtctgaatgaaaaacttaaagaaagcaatacaacaaagggtgaacttcagttaaaattggatgaacttcaagcttctgatgtttctgttaagtatcgagaaaaacgcttggagcaagaaaaggaattgctacatagtcagaatacatggctgaatacagagttgaaaaccaaaactgatgaacttctggctcttggaagagaaaaagggaatgagattctagagcttaaatgtaatcttgaaaataaaaaagaagaggtttctagactggaagaacaaatgaatggcttaaaaacatcaaatgaacatcttcaaaagcatgtggaggatctgttgaccaaattaaaagaggccaaggaacaacaggccagtatggaagagaaattccacaatgaattaaatgcccacataaaactttctaatttgtacaagagtgccgctgatgactcagaagcaaagagcaatgaactaacccgggcagtagaggaactacacaaacttttgaaagaagctggtgaagccaacaaagcaatacaagatcatcttctagaggtggagcaatccaaagatcaaatggaaaaagaaatgcttgagaaaatagggagattggagaaggaattagagaatgcaaatgaccttctttctgccacaaaacgtaaaggagccatattgtctgaagaagagcttgccgccatgtctcctactgcagcagctgtagctaagatagtgaaacctgggatgaaactaactgagctctataatgcttatgtggaaactcaggatcagttgcttttggagaaactagagaacaaaagaattaataagtacctagatgaaatagtgaaagaagtggaagccaaagcaccaattttgaaacgccagcgtgaggaatatgaacgtgcacagaaagctgtagcaagtttatctgttaagcttgaacaagctatgaaggagattcagcgattgcaggaggacactgataaagccaacaagcaatcatctgtacttgagagagataatcgaagaatggaaatacaagtaaaagatctttcacaacagattagagtgcttttgatggaacttgaagaagcaaggggtaaccacgtaattcgtgatgaggaagtaagctctgctgatataagtagttcatctgaggtaatatcacagcatctagtatcttacagaaatattgaagagcttcaacaacaaaatcaacgtctcttagtggcccttagagagcttggggaaaccagagaaagagaagaacaagaaacaacttcatccaaaatcactgagcttcagctcaaacttgagagtgcccttactgaactagaacaactccgcaaatcacgacagcatcaaatgcagcttgttgattccatagttcgtcagcgtgatatgtaccgtattttattgtcacaaacaacaggagttgccattccattacatgcttcaagcttagatgatgtttctcttgcatcaactccaaaacgtccaagtacatcacagactgtttccactcctgctccagtacctgttattgaatcaacagaggctatagaggctaaggctgcccttaaacagttgcaggaaatttttgagaactacaaaaaagaaaaagcagaaaatgaaaaaatacaaaatgagcagcttgagaaacttcaagaacaagttacagatttgcgatcacaaaataccaaaatttctacccagctagattttgcttctaaacgttatgaaatgctgcaagataatgttgaaggatatcgtcgagaaataacatcacttcatgagagaaatcagaaactcactgccacaactcaaaagcaagaacagattatcaatacgatgactcaagatttgagaggagcaaatgagaagctagctgtcgcagaagtaagagcagaaaatttgaagaaggaaaaggaaatgcttaaattgtctgaagttcgtctttctcagcaaagagagtctttgttagctgaacaaagggggcaaaacttactgctaactaatctgcaaacaattcagggaatactggagcgatctgaaacagaaaccaaacaaaggcttagtagccagatagaaaaactggaacatgagatctctcatctaaagaagaagttggaaaatgaggtggaacaaaggcatacacttactagaaatctagatgttcaacttttagatacaaagagacaactggatacagagacaaatcttcatcttaacacaaaagaactattaaaaaatgctcaaaaagaaattgccacattgaaacagcacctcagtaatatggaagtccaagttgcttctcagtcttcacagagaactggtaaaggtcagcctagcaacaaagaagatgtggatgatcttgtgagtcagctaagacagacagaagagcaggtgaatgacttaaaggagagactcaaaacaagtacgagcaatgtggaacaatatcaagcaatggttactagtttagaagaatccctgaacaaggaaaaacaggtgacagaagaagtgcgtaagaatattgaagttcgtttaaaagagtcagctgaatttcagacacagttggaaaagaagttgatggaagtagagaaggaaaaacaagaacttcaggatgataaaagaagagccatagagagcatggaacaacagttatctgaattgaagaaaacactttctagtgttcagaatgaagtacaagaagctcttcagagagcaagcacagctttaagtaatgagcagcaagccagacgtgactgtcaggaacaagctaaaatagctgtggaagctcagaataagtatgagagagaattgatgctgcatgctgctgatgttgaagctctacaagctgcgaaggagcaggtttcaaaaatggcatcagtccgtcagcatttggaagaaacaacacagaaagcagaatcacagttgttggagtgtaaagcatcttgggaggaaagagagagaatgttaaaggatgaagtttccaaatgtgtatgtcgctgtgaagatctggagaaacaaaacagattacttcatgatcagatcgaaaaattaagtgacaaggtcgttgcctctgtgaaggaaggtgtacaaggtccactgaatgtatctctcagtgaagaaggaaaatctcaagaacaaattttggaaattctcagatttatacgacgagaaaaagaaattgctgaaactaggtttgaggtggctcaggttgagagtctgcgttatcgacaaagggttgaacttttagaaagagagctgcaggaactgcaagatagtctaaatgctgaaagggagaaagtccaggtaactgcaaaaacaatggctcagcatgaagaactgatgaagaaaactgaaacaatgaatgtagttatggagaccaataaaatgctaagagaagagaaggagagactagaacaggatctacagcaaatgcaagcaaaggtgaggaaactggagttagatattttacccttacaagaagcaaatgctgagctgagtgagaaaagcggtatgttgcaggcagagaagaagctcttagaagaggatgtcaaacgttggaaagcacgtaaccagcatctagtaagtcaacagaaagatccagatacagaagaatatcggaagctcctttctgaaaaggaagttcatactaagcgtattcaacaattgacagaagaaattggtagacttaaagctgaaattgcaagatcaaatgcatctttgactaacaaccagaacttaattcagagtctgaaggaagatctaaataaagtaagaactgaaaaggaaaccatccagaaggacttagatgccaaaataattgatatccaagaaaaagtcaaaactattactcaagttaagaaaattggacgtaggtacaagactcaatatgaagaacttaaagcacaacaggataaggttatggagacatcggctcagtcctctggagaccatcaggagcagcatgtttcagtccaggaaatgcaggaactcaaagaaacgctcaaccaagctgaaacaaaatcaaaatcacttgaaagtcaagtagagaatctgcagaagacattatctgaaaaagagacagaagcaagaaatctccaggaacagactgtgcaacttcagtctgaactttcacgacttcgtcaggatcttcaagatagaaccacacaggaggagcagctccgacaacagataactgaaaaggaagaaaaaaccagaaaggctattgtagcagcaaagtcaaaaattgcacacttagctggtgtaaaagatcagctaactaaagaaaatgaggagcttaaacaaaggaatggagccttagatcagcagaaagatgaattggatgttcgcattactgcgctaaagtcccaatatgaaggtcgaattagtcgcttggaaagagaactcagggagcatcaagagagacaccttgagcagagagatgagcctcaagaaccttctaataaggtccctgaacagcagagacagatcacattgaaaacaactccagcttctggtgaaagaggaattgccagcacatcagacccaccaacagccaatatcaagccaactcctgttgtgtctactccaagtaaagtgacagctgcagctatggctggaaataagtcaacacccagggctagtatccgcccaatggttacacctgcaactgttacaaatcccactactaccccaacagctacagtgatgcccactacacaagtggaatcacaggaagctatgcagtcagaagggcctgtggaacatgttccagtttttggaagcacaagtggatccgttcgttctactagtcctaatgtccagccttctatctctcaacctattttaactgttcagcaacaaacacaggctacagcttttgtgcaacccactcaacagagtcatcctcagattgagcctgccaatcaagagttatcttcaaacatagtagaggttgttcagagttcaccagttgagcggccttctacttccacagcagtatttggcacagtttcggctacccccagttcttctttgccaaagcgtacacgtgaagaggaagaggatagcaccatagaagcatcagaccaagtctctgatgatacagtggaaatgcctcttccaaagaagttgaaaagtgtcacacctgtaggaactgaggaagaagttatggcagaagaaagtactgatggagaggtagagactcaggtatacaaccaggattctcaagattccattggagaaggagttacccagggagattatacacctatggaagacagtgaagaaacctctcagtctctacaaatagatcttgggccacttcaatcagatcagcagacgacaacttcatcccaggatggtcaaggcaaaggagatgatgtcattgtaattgacagtgatgatgaagaagaggatgatgatgaaaatgatggagaacatgaggattatgaagaggatgaggaagatgatgatgatgatgaagatgacacagggatgggagatgagggtgaagatagtaatgaaggaactggtagtgccgatggcaatgatggttatgaagctgatgatgctgagggtggtgatgggactgatccaggtacagaaacagaagaaagtatgggtggaggtgaaggtaatcacagagctgctgattctcaaaacagtggtgaaggaaatacaggtgctgcagaatcttctttttctcaggaggtttctagagaacaacagccatcatcagcatctgaaagacaggcccctcgagcacctcagtcaccgagacgcccaccacatccacttcccccaagactgaccattcatgccccacctcaggagttgggaccaccagttcagagaattcagatgacccgaaggcagtctgtaggacgtggccttcagttgactccaggaataggtggcatgcaacagcatttttttgatgatgaagacagaacagttccaagtactccaactcttgtggtgccacatcgtactgatggatttgctgaagcaattcattcgccgcaggttgctggtgtccctagattccggtttgggccacctgaagatatgccacaaacaagttctagtcactctgatcttggccagcttgcttctcaaggaggtttaggaatgtatgaaacacccctgttcctagctcatgaagaagagtcaggtggccgaagtgttcccactactccactacaagtagcagccccagtgactgtatttactgagagcaccacctctgatgcttcggaacatgcctctcaatctgttccaatggtgactacatccactggcactttatctacaacaaatgaaacagcaacaggtgatgatggagatgaagtatttgtggaggcagaatctgaaggtattagttcagaagcaggcctagaaattgatagccagcaggaagaagagccggttcaagcatctgatgagtcagatctcccctccaccagccaggatcctccttctagctcatctgtagatactagtagtagtcaaccaaagcctttcagacgagtaagacttcagacaacattgagacaaggtgtccgtggtcgtcagtttaacagacagagaggtgtgagccatgcaatgggagggagaggaggaataaacagaggaaatattaattaaatggtctgtaaacaataacaactgtgaataagattatcaaatctgttttagtgtaatgattgtcaagtttaaaaacatttttatatataaactggtatactcatgtcaatattctttattaataaaatgtttttcagtgtc

SEQ ID NO: 369595 - DNA, 9982 bp, Homo sapiens
  misc_feature (5441)..(5441): n is a, c, g, or t
  misc_feature (5486)..(5486): n is a, c, g, or t
  misc_feature (5859)..(5859): n is a, c, g, or t
  misc_feature (5885)..(5885): n is a, c, g, or t
gcgcaagaggatcagggatagcctctgagctcgggttcccagggttcgtagcttccaacggctgcgcgcgcacttcggtcgcgggcggtgaggtgctgttgctgaaacgctgccgctgagggtggactcgatttcccagggtcccgccgcgggagtctccggcgggcgggcgcgcgcgagccaccgagcgaggtgatagaggcggcggcccaggcgtctgggtcctgctggtcttcgcctttcttctccgcttctaccccgtcggccgctgccactggggtccctggccccaccgacatggcggcggtgttgcagcaagtcctggagcgcacggagctgaacaagctgcccaagtctgtccagaacaaacttgaaaagttccttgctgatcagcaatccgagatcgatggcctgaaggggcggcatgagaaatttaaggtggagagcgaacaacagtattttgaaatagaaaagaggttgtcccacagtcaggagagacttgtgaatgaaacccgagagtgtcaaagcttgcggcttgagctagagaaactcaacaatcaactgaaggcactaactgagaaaaacaaagaacttgaaattgctcaggatcgcaatattgccattcagagccaatttacaagaacaaaggaagaattagaagctgagaaaagagacttaattagaaccaatgagagactatctcaagaacttgaatacttaacagaggatgttaaacgtctgaatgaaaaacttaaagaaagcaatacaacaaagggtgaacttcagttaaaattggatgaacttcaagcttctgatgtttctgttaagtatcgagaaaaacgcttggagcaagaaaaggaattgctacatagtcagaatacatggctgaatacagagttgaaaaccaaaactgatgaacttctggctcttggaagagaaaaagggaatgagattctagagcttaaatgtaatcttgaaaataaaaaagaagaggtttctagactggaagaacaaatgaatggcttaaaaacatcaaatgaacatcttcaaaagcatgtggaggatctgttgaccaaattaaaagaggccaaggaacaacaggccagtatggaagagaaattccacaatgaattaaatgcccacataaaactttctaatttgtacaagagtgccgctgatgactcagaagcaaagagcaatgaactaacccgggcagtagaggaactacacaaacttttgaaagaagctggtgaagccaacaaagcaatacaagatcatcttctagaggtggagcaatccaaagatcaaatggaaaaagaaatgcttgagaaaatagggagattggagaaggaattagagaatgcaaatgaccttctttctgccacaaaacgtaaaggagccatattgtctgaagaagagcttgccgccatgtctcctactgcagcagctgtagctaagatagtgaaacctgggatgaaactaactgagctctataatgcttatgtggaaactcaggatcagttgcttttggagaaactagagaacaaaagaattaataagtacctagatgaaatagtgaaagaagtggaagccaaagcaccaattttgaaacgccagcgtgaggaatatgaacgtgcacagaaagctgtagcaagtttatctgttaagcttgaacaagctatgaaggagattcagcgattgcaggaggacactgataaagccaacaagcaatcatctgtacttgagagagataatcgaagaatggaaatacaagtaaaagatctttcacaacagattagagtgcttttgatggaacttgaagaagcaaggggtaaccacgtaattcgtgatgaggaagtaagctctgctgatataagtagttcatctgaggtaatatcacagcatctagtatcttacagaaatattgaagagcttcaacaacaaaatcaacgtctcttagtggcccttagagagcttggggaaaccagagaaagagaagaacaagaaacaacttcatccaaaatcactgagcttcagctcaaacttgagagtgcccttactgaactagaacaactccgcaaatcacgacagcatcaaatgcagcttgttgattccatagttcgtcagcgtgatatgtaccgtattttattgtcacaaacaacaggagttgccattccattacatgcttcaagcttagatgatgtttctcttgcatcaactccaaaacgtccaagtacatcacagactgtttccactcctgctccagtacctgttattgaatcaacagaggctatagaggctaaggctgcccttaaacagttgcaggaaatttttgagaactacaaaaaagaaaaagcagaaaatgaaaaaatacaaaatgagcagcttgagaaacttcaagaacaagttacagatttgcgatcacaaaataccaaaatttctacccagctagattttgcttctaaacgttacttgtagaattacttttttcataccagttatgaaatgctgcaagataatgttgaaggatatcgtcgagaaataacatcacttcatgagagaaatcagaaactcactgccacaactcaaaagcaagaacagattatcaatacgatgactcaagatttgagaggagcaaatgagaagctagctgtcgcagaagtaagagcagaaaatttgaagaaggaaaaggaaatgcttaaattgtctgaagttcgtctttctcagcaaagagagtctttgttagctgaacaaagggggcaaaacttactgctaactaatctgcaaacaattcagggaatactggagcgatctgaaacagaaaccaaacaaaggcttagtagccagatagaaaaactggaacatgagatctctcatctaaagaagaagttggaaaatgaggtggaacaaaggcatacacttactagaaatctagatgttcaacttttagatacaaagagacaactggatacagagacaaatcttcatcttaacacaaaagaactattaaaaaatgctcaaaaagaaattgccacattgaaacagcacctcagtaatatggaagtccaagttgcttctcagtcttcacagagaactggtaaaggtcagcctagcaacaaagaagatgtggatgatcttgtgagtcagctaagacagacagaagagcaggtgaatgacttaaaggagagactcaaaacaagtacgagcaatgtggaacaatatcaagcaatggttactagtttagaagaatccctgaacaaggaaaaacaggtgacagaagaagtgcgtaagaatattgaagttcgtttaaaagagtcagctgaatttcagacacagttggaaaagaagttgatggaagtagagaaggaaaaacaagaacttcaggatgataaaagaagagccatagagagcatggaacaacagttatctgaattgaagaaaacactttctagtgttcagaatgaagtacaagaagctcttcagagagcaagcacagctttaagtaatgagcagcaagccagacgtgactgtcaggaacaagctaaaatagctgtggaagctcagaataagtatgagagagaattgatgctgcatgctgctgatgttgaagctctacaagctgcgaaggagcaggtttcaaaaatggcatcagtccgtcagcatttggaagaaacaacacagaaagcagaatcacagttgttggagtgtaaagcatcttgggaggaaagagagagaatgttaaaggatgaagtttccaaatgtgtatgtcgctgtgaagatctggagaaacaaaacagattacttcatgatcagatcgaaaaattaagtgacaaggtcgttgcctctgtgaaggaaggtgtacaaggtccactgaatgtatctctcagtgaagaaggaaaatctcaagaacaaattttggaaattctcagatttatacgacgagaaaaagaaattgctgaaactaggtttgaggtggctcaggttgagagtctgcgttatcgacaaagggttgaacttttagaaagagagctgcaggaactgcaagatagtctaaatgctgaaagggagaaagtccaggtaggtatactaagctttaagaaagcacttgttaaatcaaaagagaagcactcatttatatctctaccatttaacgtaatgtaaaatttaacttgaagtaagcattcttctaaacttgtaaattcattaagcatttgttaaacactaatatagtatagtgcttaaaagtaaaggctctgtaaccaaactgcctggtttcagattctagcttcataccattagctgtggccttgggtacattgtttaacttccctgctcttagtttcttcatctgtaatatttggataataatgaggtttaattgagtttgtgcacatgaagcatttagaagcatgtctggtatgtagtgggtgcttaataaattccagctatcttaatttattatagttatggattatacgtgtggatagtcattctaggataaagtgatttaaactgctacagaatatctttctcacccaaggagcaaaaagtagtaaaaactaacaaccaaaggaaaagaagctgtggtagtgaaatggatgataataagacaagcttgactccttaccccacactaccacccaaagcttattgttgagttacttcattcttaggagctacagtaatatacccccacctctagaaggaaggaaattaagatcttaaaacatttatcttcttttaactgatgagtagtcaaaatgactgttaagaagaaaccattgaacagggaaaagtaaataatgaattttatgggatttatgtgttcagcaaaagctaaaggttccagaattatatcctgtttaattcaaatgtatctcaccatggaaataatagagcctccagttcaatagagttaatacttggaggaaaagggacagaatcagagtctctaacaaagactgcatattgtttcagtcttttccgcttcattttttattcctttgggctatagaaagtaaatactagaaaatgcccgcctacgaatgagttcatagggggaaaccaactcttaaatacaggaagaagagagtcaacaagtaacatagattatataaaaaataatataatgggccgggcatggtggctcatgcctgtaatcccagcactttgggaggccgaggcgggtggatcacgaggttaggagattgagaccatcctggctaacacggtgaaaccccgtctctactaaaaatacaaaaaaattagctgggcatggtggtggcaggcacctgtagtcccagctactcgggaggctgaggcaggagaacggcgtaaatccgggaggcggagcttgcagtgagccgagatcacaccactggactccagtctgggcgacagagcgagactccgtctcaaaaaaaaaaaaaaattataatagnaatgtaatgtctgtctaagcatgaacagtgtagcatggcaaccangaaatatgctatagctttaaaaacagtgggggaagaaagtaataccaagtgcagaagatggataattataacctatgagaaggaaaaaattcttcacagataattcagtaaaatttctcatggccaaagtgatgaaacaatggatcaaaatgagagatttctgaacaagagggaataaactgaggattagaataacattttagaactaataaatttagtgcagcaaggaaaaaaagatacagaaaggtaaatagagatttggattaatgtttttacctaatgttaatactttgttggtgggatttgtagcatcttttcacttttgtctttgtaattcttgtatttgtttaaagtctgcagttcgcatgcctcncagaaaagtaaacgtgaactttcaanaattttagttctaaaagttgaaacttaaatcctctttattttgtcatagggaggatttgagctcataggaacaggtagactttcaactattgttagatgttggtatgtatatttatttgaaatgtttaggtaactgcaaaaacaatggctcagcatgaagaactgatgaagaaaactgaaacaatgaatgtagttatggagaccaataaaatgctaagagaagagaaggagagactagaacaggatctacagcaaatgcaagcaaaggtgaggaaactggagttagatattttacccttacaagaagcaaatgctgagctgagtgagaaaagcggtatgttgcaggcagagaagaagctcttagaagaggatgtcaaacgttggaaagcacgtaaccagcatctagtaagtcaacagaaagatccagatacagaagaatatcggaagctcctttctgaaaaggaagttcatactaagcgtattcaacaattgacagaagaaattggtagacttaaagctgaaattgcaagatcaaatgcatctttgactaacaaccagaacttaattcagagtctgaaggaagatctaaataaagtaagaactgaaaaggaaaccatccagaaggacttagatgccaaaataattgatatccaagaaaaagtcaaaactattactcaagttaagaaaattggacgtaggtacaagactcaatatgaagaacttaaagcacaacaggataaggttatggagacatcggctcagtcctctggagaccatcaggagcagcatgtttcagtccaggaaatgcaggaactcaaagaaacgctcaaccaagctgaaacaaaatcaaaatcacttgaaagtcaagtagagaatctgcagaagacattatctgaaaaagagacagaagcaagaaatctccaggaacagactgtgcaacttcagtctgaactttcacgacttcgtcaggatcttcaagatagaaccacacaggaggagcagctccgacaacagataactgaaaaggaagaaaaaaccagaaaggctattgtagcagcaaagtcaaaaattgcacacttagctggtgtaaaagatcagctaactaaagaaaatgaggagcttaaacaaaggaatggagccttagatcagcagaaagatgaattggatgttcgcattactgcgctaaagtcccaatatgaaggtcgaattagtcgcttggaaagagaactcagggagcatcaagagagacaccttgagcagagagatgagcctcaagaaccttctaataaggtccctgaacagcagagacagatcacattgaaaacaactccagcttctggtgaaagaggaattgccagcacatcagacccaccaacagccaatatcaagccaactcctgttgtgtctactccaagtaaagtgacagctgcagctatggctggaaataagtcaacacccagggctagtatccgcccaatggttacacctgcaactgttacaaatcccactactaccccaacagctacagtgatgcccactacacaagtggaatcacaggaagctatgcagtcagaagggcctgtggaacatgttccagtttttggaagcacaagtggatccgttcgttctactagtcctaatgtccagccttctatctctcaacctattttaactgttcagcaacaaacacaggctacagcttttgtgcaacccactcaacagagtcatcctcagattgagcctgccaatcaagagttatcttcaaacatagtagaggttgttcagagttcaccagttgagcggccttctacttccacagcagtatttggcacagtttcggctacccccagttcttctttgccaaagcgtacacgtgaagaggaagaggatagcaccatagaagcatcagaccaagtctctgatgatacagtggaaatgcctcttccaaagaagttgaaaagtgtcacacctgtaggaactgaggaagaagttatggcagaagaaagtactgatggagaggtagagactcaggtatacaaccaggattctcaagattccattggagaaggagttacccagggagattatacacctatggaagacagtgaagaaacctctcagtctctacaaatagatcttgggccacttcaatcagatcagcagacgacaacttcatcccaggatggtcaaggcaaaggagatgatgtcattgtaattgacagtgatgatgaagaagaggatgatgatgaaaatgatggagaacatgaggattatgaagaggatgaggaagatgatgatgatgatgaagatgacacagggatgggagatgagggtgaagatagtaatgaaggaactggtagtgccgatggcaatgatggttatgaagctgatgatgctgagggtggtgatgggactgatccaggtacagaaacagaagaaagtatgggtggaggtgaaggtaatcacagagctgctgattctcaaaacagtggtgaaggaaatacaggtgctgcagaatcttctttttctcaggaggtttctagagaacaacagccatcatcagcatctgaaagacaggcccctcgagcacctcagtcaccgagacgcccaccacatccacttcccccaagactgaccattcatgccccacctcaggagttgggaccaccagttcagagaattcagatgacccgaaggcagtctgtaggacgtggccttcagttgactccaggaataggtggcatgcaacagcatttttttgatgatgaagacagaacagttccaagtactccaactcttgtggtgccacatcgtactgatggatttgctgaagcaattcattcgccgcaggttgctggtgtccctagattccggtttgggccacctgaagatatgccacaaacaagttctagtcactctgatcttggccagcttgcttctcaaggaggtttaggaatgtatgaaacacccctgttcctagctcatgaagaagagtcaggtggccgaagtgttcccactactccactacaagtagcagccccagtgactgtatttactgagagcaccacctctgatgcttcggaacatgcctctcaatctgttccaatggtgactacatccactggcactttatctacaacaaatgaaacagcaacaggtgatgatggagatgaagtatttgtggaggcagaatctgaaggtattagttcagaagcaggcctagaaattgatagccagcaggaagaagagccggttcaagcatctgatgagtcagatctcccctccaccagccaggatcctccttctagctcatctgtagatactagtagtagtcaaccaaagcctttcagacgagtaagacttcagacaacattgagacaaggtgtccgtggtcgtcagtttaacagacagagaggtgtgagccatgcaatgggagggagaggaggaataaacagaggaaatattaattaaatggtctgtaaacaataacaactgtgaataagattatcaaatctgttttagtgtaatgattgtcaagtttaaaaacatttttatatataaactggtatactcatgtcaatattctttattaataaaatgtttttcagtgtcaaaatttattattcatttcttcattagttgactcctcctttgctcatcagtctaaggacagttgtaccagactttggataaggtctgcccagaacgagtagtaattgctcttgctgttctactaggcacatcaatgttatagtattgatctaaatggaagagaaaacatttttttagttaaaaagaaaacaatgcccaaactaaaaaataacttatgttgactattatgctcaaagacaatgtttatcattttaatagagatgtttttactaattaatttgaactttataacaaaaagaaaaacaattgcctagacttttcagcttttttgatgtttcaaaagattgacatttcaccatctttttgtaaaatcaggttcagctctcctttatgaagtaaacattaaagagtaaccaagtttgaaaaataatttacttggggttattccttttaaaaaatacatgccaatgtcattcatattatga

SEQ ID NO: 369596 - DNA, 9825 bp, Homo sapiens
  misc_feature (5441)..(5441): n is a, c, g, or t
  misc_feature (5486)..(5486): n is a, c, g, or t
  misc_feature (5859)..(5859): n is a, c, g, or t
  misc_feature (5885)..(5885): n is a, c, g, or t
gcgcaagaggatcagggatagcctctgagctcgggttcccagggttcgtagcttccaacggctgcgcgcgcacttcggtcgcgggcggtgaggtgctgttgctgaaacgctgccgctgagggtggactcgatttcccagggtcccgccgcgggagtctccggcgggcgggcgcgcgcgagccaccgagcgaggtgatagaggcggcggcccaggcgtctgggtcctgctggtcttcgcctttcttctccgcttctaccccgtcggccgctgccactggggtccctggccccaccgacatggcggcggtgttgcagcaagtcctggagcgcacggagctgaacaagctgcccaagtctgtccagaacaaacttgaaaagttccttgctgatcagcaatccgagatcgatggcctgaaggggcggcatgagaaatttaaggtggagagcgaacaacagtattttgaaatagaaaagaggttgtcccacagtcaggagagacttgtgaatgaaacccgagagtgtcaaagcttgcggcttgagctagagaaactcaacaatcaactgaaggcactaactgagaaaaacaaagaacttgaaattgctcaggatcgcaatattgccattcagagccaatttacaagaacaaaggaagaattagaagctgagaaaagagacttaattagaaccaatgagagactatctcaagaacttgaatacttaacagaggatgttaaacgtctgaatgaaaaacttaaagaaagcaatacaacaaagggtgaacttcagttaaaattggatgaacttcaagcttctgatgtttctgttaagtatcgagaaaaacgcttggagcaagaaaaggaattgctacatagtcagaatacatggctgaatacagagttgaaaaccaaaactgatgaacttctggctcttggaagagaaaaagggaatgagattctagagcttaaatgtaatcttgaaaataaaaaagaagaggtttctagactggaagaacaaatgaatggcttaaaaacatcaaatgaacatcttcaaaagcatgtggaggatctgttgaccaaattaaaagaggccaaggaacaacaggccagtatggaagagaaattccacaatgaattaaatgcccacataaaactttctaatttgtacaagagtgccgctgatgactcagaagcaaagagcaatgaactaacccgggcagtagaggaactacacaaacttttgaaagaagctggtgaagccaacaaagcaatacaagatcatcttctagaggtggagcaatccaaagatcaaatggaaaaagaaatgcttgagaaaatagggagattggagaaggaattagagaatgcaaatgaccttctttctgccacaaaacgtaaaggagccatattgtctgaagaagagcttgccgccatgtctcctactgcagcagctgtagctaagatagtgaaacctgggatgaaactaactgagctctataatgcttatgtggaaactcaggatcagttgcttttggagaaactagagaacaaaagaattaataagtacctagatgaaatagtgaaagaagtggaagccaaagcaccaattttgaaacgccagcgtgaggaatatgaacgtgcacagaaagctgtagcaagtttatctgttaagcttgaacaagctatgaaggagattcagcgattgcaggaggacactgataaagccaacaagcaatcatctgtacttgagagagataatcgaagaatggaaatacaagtaaaagatctttcacaacagattagagtgcttttgatggaacttgaagaagcaaggggtaaccacgtaattcgtgatgaggaagtaagctctgctgatataagtagttcatctgaggtaatatcacagcatctagtatcttacagaaatattgaagagcttcaacaacaaaatcaacgtctcttagtggcccttagagagcttggggaaaccagagaaagagaagaacaagaaacaacttcatccaaaatcactgagcttcagctcaaacttgagagtgcccttactgaactagaacaactccgcaaatcacgacagcatcaaatgcagcttgttgattccatagttcgtcagcgtgatatgtaccgtattttattgtcacaaacaacaggagttgccattccattacatgcttcaagcttagatgatgtttctcttgcatcaactccaaaacgtccaagtacatcacagactgtttccactcctgctccagtacctgttattgaatcaacagaggctatagaggctaaggctgcccttaaacagttgcaggaaatttttgagaactacaaaaaagaaaaagcagaaaatgaaaaaatacaaaatgagcagcttgagaaacttcaagaacaagttacagatttgcgatcacaaaataccaaaatttctacccagctagattttgcttctaaacgttacttgtagaattacttttttcataccagttatgaaatgctgcaagataatgttgaaggatatcgtcgagaaataacatcacttcatgagagaaatcagaaactcactgccacaactcaaaagcaagaacagattatcaatacgatgactcaagatttgagaggagcaaatgagaagctagctgtcgcagaagtaagagcagaaaatttgaagaaggaaaaggaaatgcttaaattgtctgaagttcgtctttctcagcaaagagagtctttgttagctgaacaaagggggcaaaacttactgctaactaatctgcaaacaattcagggaatactggagcgatctgaaacagaaaccaaacaaaggcttagtagccagatagaaaaactggaacatgagatctctcatctaaagaagaagttggaaaatgaggtggaacaaaggcatacacttactagaaatctagatgttcaacttttagatacaaagagacaactggatacagagacaaatcttcatcttaacacaaaagaactattaaaaaatgctcaaaaagaaattgccacattgaaacagcacctcagtaatatggaagtccaagttgcttctcagtcttcacagagaactggtaaaggtcagcctagcaacaaagaagatgtggatgatcttgtgagtcagctaagacagacagaagagcaggtgaatgacttaaaggagagactcaaaacaagtacgagcaatgtggaacaatatcaagcaatggttactagtttagaagaatccctgaacaaggaaaaacaggtgacagaagaagtgcgtaagaatattgaagttcgtttaaaagagtcagctgaatttcagacacagttggaaaagaagttgatggaagtagagaaggaaaaacaagaacttcaggatgataaaagaagagccatagagagcatggaacaacagttatctgaattgaagaaaacactttctagtgttcagaatgaagtacaagaagctcttcagagagcaagcacagctttaagtaatgagcagcaagccagacgtgactgtcaggaacaagctaaaatagctgtggaagctcagaataagtatgagagagaattgatgctgcatgctgctgatgttgaagctctacaagctgcgaaggagcaggtttcaaaaatggcatcagtccgtcagcatttggaagaaacaacacagaaagcagaatcacagttgttggagtgtaaagcatcttgggaggaaagagagagaatgttaaaggatgaagtttccaaatgtgtatgtcgctgtgaagatctggagaaacaaaacagattacttcatgatcagatcgaaaaattaagtgacaaggtcgttgcctctgtgaaggaaggtgtacaaggtccactgaatgtatctctcagtgaagaaggaaaatctcaagaacaaattttggaaattctcagatttatacgacgagaaaaagaaattgctgaaactaggtttgaggtggctcaggttgagagtctgcgttatcgacaaagggttgaacttttagaaagagagctgcaggaactgcaagatagtctaaatgctgaaagggagaaagtccaggtaggtatactaagctttaagaaagcacttgttaaatcaaaagagaagcactcatttatatctctaccatttaacgtaatgtaaaatttaacttgaagtaagcattcttctaaacttgtaaattcattaagcatttgttaaacactaatatagtatagtgcttaaaagtaaaggctctgtaaccaaactgcctggtttcagattctagcttcataccattagctgtggccttgggtacattgtttaacttccctgctcttagtttcttcatctgtaatatttggataataatgaggtttaattgagtttgtgcacatgaagcatttagaagcatgtctggtatgtagtgggtgcttaataaattccagctatcttaatttattatagttatggattatacgtgtggatagtcattctaggataaagtgatttaaactgctacagaatatctttctcacccaaggagcaaaaagtagtaaaaactaacaaccaaaggaaaagaagctgtggtagtgaaatggatgataataagacaagcttgactccttaccccacactaccacccaaagcttattgttgagttacttcattcttaggagctacagtaatatacccccacctctagaaggaaggaaattaagatcttaaaacatttatcttcttttaactgatgagtagtcaaaatgactgttaagaagaaaccattgaacagggaaaagtaaataatgaattttatgggatttatgtgttcagcaaaagctaaaggttccagaattatatcctgtttaattcaaatgtatctcaccatggaaataatagagcctccagttcaatagagttaatacttggaggaaaagggacagaatcagagtctctaacaaagactgcatattgtttcagtcttttccgcttcattttttattcctttgggctatagaaagtaaatactagaaaatgcccgcctacgaatgagttcatagggggaaaccaactcttaaatacaggaagaagagagtcaacaagtaacatagattatataaaaaataatataatgggccgggcatggtggctcatgcctgtaatcccagcactttgggaggccgaggcgggtggatcacgaggttaggagattgagaccatcctggctaacacggtgaaaccccgtctctactaaaaatacaaaaaaattagctgggcatggtggtggcaggcacctgtagtcccagctactcgggaggctgaggcaggagaacggcgtaaatccgggaggcggagcttgcagtgagccgagatcacaccactggactccagtctgggcgacagagcgagactccgtctcaaaaaaaaaaaaaaattataatagnaatgtaatgtctgtctaagcatgaacagtgtagcatggcaaccangaaatatgctatagctttaaaaacagtgggggaagaaagtaataccaagtgcagaagatggataattataacctatgagaaggaaaaaattcttcacagataattcagtaaaatttctcatggccaaagtgatgaaacaatggatcaaaatgagagatttctgaacaagagggaataaactgaggattagaataacattttagaactaataaatttagtgcagcaaggaaaaaaagatacagaaaggtaaatagagatttggattaatgtttttacctaatgttaatactttgttggtgggatttgtagcatcttttcacttttgtctttgtaattcttgtatttgtttaaagtctgcagttcgcatgcctcncagaaaagtaaacgtgaactttcaanaattttagttctaaaagttgaaacttaaatcctctttattttgtcatagggaggatttgagctcataggaacaggtagactttcaactattgttagatgttggtatgtatatttatttgaaatgtttaggtaactgcaaaaacaatggctcagcatgaagaactgatgaagaaaactgaaacaatgaatgtagttatggagaccaataaaatgctaagagaagagaaggagagactagaacaggatctacagcaaatgcaagcaaaggtgaggaaactggagttagatattttacccttacaagaagcaaatgctgagctgagtgagaaaagcggtatgttgcaggcagagaagaagctcttagaagaggatgtcaaacgttggaaagcacgtaaccagcatctagtaagtcaacagaaagatccagatacagaagaatatcggaagctcctttctgaaaaggaagttcatactaagcgtattcaacaattgacagaagaaattggtagacttaaagctgaaattgcaagatcaaatgcatctttgactaacaaccagaacttaattcagagtctgaaggaagatctaaataaagtaagaactgaaaaggaaaccatccagaaggacttagatgccaaaataattgatatccaagaaaaagtcaaaactattactcaagttaagaaaattggacgtaggtacaagactcaatatgaagaacttaaagcacaacaggataaggttatggagacatcggctcagtcctctggagaccatcaggagcagcatgtttcagtccaggaaatgcaggaactcaaagaaacgctcaaccaagctgaaacaaaatcaaaatcacttgaaagtcaagtagagaatctgcagaagacattatctgaaaaagagacagaagcaagaaatctccaggaacagactgtgcaacttcagtctgaactttcacgacttcgtcaggatcttcaagatagaaccacacaggaggagcagctccgacaacagataactgaaaaggaagaaaaaaccagaaaggctattgtagcagcaaagtcaaaaattgcacacttagctggtgtaaaagatcagctaactaaagaaaatgaggagcttaaacaaaggaatggagccttagatcagcagaaagatgaattggatgttcgcattactgcgctaaagtcccaatatgaaggtcgaattagtcgcttggaaagagaactcagggagcatcaagagagacaccttgagcagagagatgagcctcaagaaccttctaataaggtccctgaacagcagagacagatcacattgaaaacaactccagcttctggtgaaagaggaattgccagcacatcagacccaccaacagccaatatcaagccaactcctgttgtgtctactccaagtaaagtgacagctgcagctatggctggaaataagtcaacacccagggctagtatccgcccaatggttacacctgcaactgttacaaatcccactactaccccaacagctacagtgatgcccactacacaagtggaatcacaggaagctatgcagtcagaagggcctgtggaacatgttccagtttttggaagcacaagtggatccgttcgttctactagtcctaatgtccagccttctatctctcaacctattttaactgttcagcaacaaacacaggctacagcttttgtgcaacccactcaacagagtcatcctcagattgagcctgccaatcaagagttatcttcaaacatagtagaggttgttcagagttcaccagttgagcggccttctacttccacagcagtatttggcacagtttcggctacccccagttcttctttgccaaagcgtacacgtgaagaggaagaggatagcaccatagaagcatcagaccaagtctctgatgatacagtggaaatgcctcttccaaagaagttgaaaagtgtcacacctgtaggaactgaggaagaagttatggcagaagaaagtactgatggagaggtagagactcaggtatacaaccaggattctcaagattccattggagaaggagttacccagggagattatacacctatggaagacagtgaagaaacctctcagtctctacaaatagatcttgggccacttcaatcagatcagcagacgacaacttcatcccaggatggtcaaggcaaaggagatgatgtcattgtaattgacagtgatgatgaagaagaggatgatgatgaaaatgatggagaacatgaggattatgaagaggatgaggaagatgatgatgatgatgaagatgacacagggatgggagatgagggtgaagatagtaatgaaggaactggtagtgccgatggcaatgatggttatgaagctgatgatgctgagggtggtgatgggactgatccaggtacagaaacagaagaaagtatgggtggaggtgaaggtaatcacagagctgctgattctcaaaacagtggtgaaggaaatacaggtgctgcagaatcttctttttctcaggaggtttctagagaacaacagccatcatcagcatctgaaagacaggcccctcgagcacctcagtcaccgagacgcccaccacatccacttcccccaagactgaccattcatgccccacctcaggagttgggaccaccagttcagagaattcagatgacccgaaggcagtctgtaggacgtggccttcagttgactccaggaataggtggcatgcaacagcatttttttgatgatgaagacagaacagttccaagtactccaactcttgtggtgccacatcgtactgatggatttgctgaagcaattcattcgccgcaggttgctggtgtccctagattccggtttgggccacctgaagatatgccacaaacaagttctagtcactctgatcttggccagcttgcttctcaaggaggtttaggaatgtatgaaacacccctgttcctagctcatgaagaagagtcaggtggccgaagtgttcccactactccactacaagtagcagccccagtattagttcagaagcaggcctagaaattgatagccagcaggaagaagagccggttcaagcatctgatgagtcagatctcccctccaccagccaggatcctccttctagctcatctgtagatactagtagtagtcaaccaaagcctttcagacgagtaagacttcagacaacattgagacaaggtgtccgtggtcgtcagtttaacagacagagaggtgtgagccatgcaatgggagggagaggaggaataaacagaggaaatattaattaaatggtctgtaaacaataacaactgtgaataagattatcaaatctgttttagtgtaatgattgtcaagtttaaaaacatttttatatataaactggtatactcatgtcaatattctttattaataaaatgtttttcagtgtcaaaatttattattcatttcttcattagttgactcctcctttgctcatcagtctaaggacagttgtaccagactttggataaggtctgcccagaacgagtagtaattgctcttgctgttctactaggcacatcaatgttatagtattgatctaaatggaagagaaaacatttttttagttaaaaagaaaacaatgcccaaactaaaaaataacttatgttgactattatgctcaaagacaatgtttatcattttaatagagatgtttttactaattaatttgaactttataacaaaaagaaaaacaattgcctagacttttcagcttttttgatgtttcaaaagattgacatttcaccatctttttgtaaaatcaggttcagctctcctttatgaagtaaacattaaagagtaaccaagtttgaaaaataatttacttggggttattccttttaaaaaatacatgccaatgtcattcatattatga

SEQ ID NO: 369597 - DNA, 8461 bp, Homo sapiens
  misc_feature (5441)..(5441): n is a, c, g, or t
  misc_feature (5486)..(5486): n is a, c, g, or t
  misc_feature (5859)..(5859): n is a, c, g, or t
  misc_feature (5885)..(5885): n is a, c, g, or t
gcgcaagaggatcagggatagcctctgagctcgggttcccagggttcgtagcttccaacggctgcgcgcgcacttcggtcgcgggcggtgaggtgctgttgctgaaacgctgccgctgagggtggactcgatttcccagggtcccgccgcgggagtctccggcgggcgggcgcgcgcgagccaccgagcgaggtgatagaggcggcggcccaggcgtctgggtcctgctggtcttcgcctttcttctccgcttctaccccgtcggccgctgccactggggtccctggccccaccgacatggcggcggtgttgcagcaagtcctggagcgcacggagctgaacaagctgcccaagtctgtccagaacaaacttgaaaagttccttgctgatcagcaatccgagatcgatggcctgaaggggcggcatgagaaatttaaggtggagagcgaacaacagtattttgaaatagaaaagaggttgtcccacagtcaggagagacttgtgaatgaaacccgagagtgtcaaagcttgcggcttgagctagagaaactcaacaatcaactgaaggcactaactgagaaaaacaaagaacttgaaattgctcaggatcgcaatattgccattcagagccaatttacaagaacaaaggaagaattagaagctgagaaaagagacttaattagaaccaatgagagactatctcaagaacttgaatacttaacagaggatgttaaacgtctgaatgaaaaacttaaagaaagcaatacaacaaagggtgaacttcagttaaaattggatgaacttcaagcttctgatgtttctgttaagtatcgagaaaaacgcttggagcaagaaaaggaattgctacatagtcagaatacatggctgaatacagagttgaaaaccaaaactgatgaacttctggctcttggaagagaaaaagggaatgagattctagagcttaaatgtaatcttgaaaataaaaaagaagaggtttctagactggaagaacaaatgaatggcttaaaaacatcaaatgaacatcttcaaaagcatgtggaggatctgttgaccaaattaaaagaggccaaggaacaacaggccagtatggaagagaaattccacaatgaattaaatgcccacataaaactttctaatttgtacaagagtgccgctgatgactcagaagcaaagagcaatgaactaacccgggcagtagaggaactacacaaacttttgaaagaagctggtgaagccaacaaagcaatacaagatcatcttctagaggtggagcaatccaaagatcaaatggaaaaagaaatgcttgagaaaatagggagattggagaaggaattagagaatgcaaatgaccttctttctgccacaaaacgtaaaggagccatattgtctgaagaagagcttgccgccatgtctcctactgcagcagctgtagctaagatagtgaaacctgggatgaaactaactgagctctataatgcttatgtggaaactcaggatcagttgcttttggagaaactagagaacaaaagaattaataagtacctagatgaaatagtgaaagaagtggaagccaaagcaccaattttgaaacgccagcgtgaggaatatgaacgtgcacagaaagctgtagcaagtttatctgttaagcttgaacaagctatgaaggagattcagcgattgcaggaggacactgataaagccaacaagcaatcatctgtacttgagagagataatcgaagaatggaaatacaagtaaaagatctttcacaacagattagagtgcttttgatggaacttgaagaagcaaggggtaaccacgtaattcgtgatgaggaagtaagctctgctgatataagtagttcatctgaggtaatatcacagcatctagtatcttacagaaatattgaagagcttcaacaacaaaatcaacgtctcttagtggcccttagagagcttggggaaaccagagaaagagaagaacaagaaacaacttcatccaaaatcactgagcttcagctcaaacttgagagtgcccttactgaactagaacaactccgcaaatcacgacagcatcaaatgcagcttgttgattccatagttcgtcagcgtgatatgtaccgtattttattgtcacaaacaacaggagttgccattccattacatgcttcaagcttagatgatgtttctcttgcatcaactccaaaacgtccaagtacatcacagactgtttccactcctgctccagtacctgttattgaatcaacagaggctatagaggctaaggctgcccttaaacagttgcaggaaatttttgagaactacaaaaaagaaaaagcagaaaatgaaaaaatacaaaatgagcagcttgagaaacttcaagaacaagttacagatttgcgatcacaaaataccaaaatttctacccagctagattttgcttctaaacgttacttgtagaattacttttttcataccagttatgaaatgctgcaagataatgttgaaggatatcgtcgagaaataacatcacttcatgagagaaatcagaaactcactgccacaactcaaaagcaagaacagattatcaatacgatgactcaagatttgagaggagcaaatgagaagctagctgtcgcagaagtaagagcagaaaatttgaagaaggaaaaggaaatgcttaaattgtctgaagttcgtctttctcagcaaagagagtctttgttagctgaacaaagggggcaaaacttactgctaactaatctgcaaacaattcagggaatactggagcgatctgaaacagaaaccaaacaaaggcttagtagccagatagaaaaactggaacatgagatctctcatctaaagaagaagttggaaaatgaggtggaacaaaggcatacacttactagaaatctagatgttcaacttttagatacaaagagacaactggatacagagacaaatcttcatcttaacacaaaagaactattaaaaaatgctcaaaaagaaattgccacattgaaacagcacctcagtaatatggaagtccaagttgcttctcagtcttcacagagaactggtaaaggtcagcctagcaacaaagaagatgtggatgatcttgtgagtcagctaagacagacagaagagcaggtgaatgacttaaaggagagactcaaaacaagtacgagcaatgtggaacaatatcaagcaatggttactagtttagaagaatccctgaacaaggaaaaacaggtgacagaagaagtgcgtaagaatattgaagttcgtttaaaagagtcagctgaatttcagacacagttggaaaagaagttgatggaagtagagaaggaaaaacaagaacttcaggatgataaaagaagagccatagagagcatggaacaacagttatctgaattgaagaaaacactttctagtgttcagaatgaagtacaagaagctcttcagagagcaagcacagctttaagtaatgagcagcaagccagacgtgactgtcaggaacaagctaaaatagctgtggaagctcagaataagtatgagagagaattgatgctgcatgctgctgatgttgaagctctacaagctgcgaaggagcaggtttcaaaaatggcatcagtccgtcagcatttggaagaaacaacacagaaagcagaatcacagttgttggagtgtaaagcatcttgggaggaaagagagagaatgttaaaggatgaagtttccaaatgtgtatgtcgctgtgaagatctggagaaacaaaacagattacttcatgatcagatcgaaaaattaagtgacaaggtcgttgcctctgtgaaggaaggtgtacaaggtccactgaatgtatctctcagtgaagaaggaaaatctcaagaacaaattttggaaattctcagatttatacgacgagaaaaagaaattgctgaaactaggtttgaggtggctcaggttgagagtctgcgttatcgacaaagggttgaacttttagaaagagagctgcaggaactgcaagatagtctaaatgctgaaagggagaaagtccaggtaggtatactaagctttaagaaagcacttgttaaatcaaaagagaagcactcatttatatctctaccatttaacgtaatgtaaaatttaacttgaagtaagcattcttctaaacttgtaaattcattaagcatttgttaaacactaatatagtatagtgcttaaaagtaaaggctctgtaaccaaactgcctggtttcagattctagcttcataccattagctgtggccttgggtacattgtttaacttccctgctcttagtttcttcatctgtaatatttggataataatgaggtttaattgagtttgtgcacatgaagcatttagaagcatgtctggtatgtagtgggtgcttaataaattccagctatcttaatttattatagttatggattatacgtgtggatagtcattctaggataaagtgatttaaactgctacagaatatctttctcacccaaggagcaaaaagtagtaaaaactaacaaccaaaggaaaagaagctgtggtagtgaaatggatgataataagacaagcttgactccttaccccacactaccacccaaagcttattgttgagttacttcattcttaggagctacagtaatatacccccacctctagaaggaaggaaattaagatcttaaaacatttatcttcttttaactgatgagtagtcaaaatgactgttaagaagaaaccattgaacagggaaaagtaaataatgaattttatgggatttatgtgttcagcaaaagctaaaggttccagaattatatcctgtttaattcaaatgtatctcaccatggaaataatagagcctccagttcaatagagttaatacttggaggaaaagggacagaatcagagtctctaacaaagactgcatattgtttcagtcttttccgcttcattttttattcctttgggctatagaaagtaaatactagaaaatgcccgcctacgaatgagttcatagggggaaaccaactcttaaatacaggaagaagagagtcaacaagtaacatagattatataaaaaataatataatgggccgggcatggtggctcatgcctgtaatcccagcactttgggaggccgaggcgggtggatcacgaggttaggagattgagaccatcctggctaacacggtgaaaccccgtctctactaaaaatacaaaaaaattagctgggcatggtggtggcaggcacctgtagtcccagctactcgggaggctgaggcaggagaacggcgtaaatccgggaggcggagcttgcagtgagccgagatcacaccactggactccagtctgggcgacagagcgagactccgtctcaaaaaaaaaaaaaaattataatagnaatgtaatgtctgtctaagcatgaacagtgtagcatggcaaccangaaatatgctatagctttaaaaacagtgggggaagaaagtaataccaagtgcagaagatggataattataacctatgagaaggaaaaaattcttcacagataattcagtaaaatttctcatggccaaagtgatgaaacaatggatcaaaatgagagatttctgaacaagagggaataaactgaggattagaataacattttagaactaataaatttagtgcagcaaggaaaaaaagatacagaaaggtaaatagagatttggattaatgtttttacctaatgttaatactttgttggtgggatttgtagcatcttttcacttttgtctttgtaattcttgtatttgtttaaagtctgcagttcgcatgcctcncagaaaagtaaacgtgaactttcaanaattttagttctaaaagttgaaacttaaatcctctttattttgtcatagggaggatttgagctcataggaacaggtagactttcaactattgttagatgttggtatgtatatttatttgaaatgtttaggtaactgcaaaaacaatggctcagcatgaagaactgatgaagaaaactgaaacaatgaatgtagttatggagaccaataaaatgctaagagaagagaaggagagactagaacaggatctacagcaaatgcaagcaaaggtgaggaaactggagttagatattttacccttacaagaagcaaatgctgagctgagtgagaaaagcggtatgttgcaggcagagaagaagctcttagaagaggatgtcaaacgttggaaagcacgtaaccagcatctagtaagtcaacagaaagatccagatacagaagaatatcggaagctcctttctgaaaaggaagttcatactaagcgtattcaacaattgacagaagaaattggtagacttaaagctgaaattgcaagatcaaatgcatctttgactaacaaccagaacttaattcagagtctgaaggaagatctaaataaagtaagaactgaaaaggaaaccatccagaaggacttagatgccaaaataattgatatccaagaaaaagtcaaaactattactcaagttaagaaaattggacgtaggtacaagactcaatatgaagaacttaaagcacaacaggataaggttatggagacatcggctcagtcctctggagaccatcaggagcagcatgtttcagtccaggaaatgcaggaactcaaagaaacgctcaaccaagctgaaacaaaatcaaaatcacttgaaagtcaagtagagaatctgcagaagacattatctgaaaaagagacagaagcaagaaatctccaggaacagactgtgcaacttcagtctgaactttcacgacttcgtcaggatcttcaagatagaaccacacaggaggagcagctccgacaacagataactgaaaaggaagaaaaaaccagaaaggctattgtagcagcaaagtcaaaaattgcacacttagctggtgtaaaagatcagctaactaaagaaaatgaggagcttaaacaaaggaatggagccttagatcagcagaaagatgaattggatgttcgcattactgcgctaaagtcccaatatgaaggtcgaattagtcgcttggaaagagaactcagggagcatcaagagagacaccttgagcagagagatgagcctcaagaaccttctaataaggtccctgaacagcagagacagatcacattgaaaacaactccagcttctggtgaaagaggaattgccagcacatcagacccaccaacagccaatatcaagccaactcctgttgtgtctactccaagtaaagtgacagctgcagctatggctggaaataagtcaacacccagggctagtatccgcccaatggttacacctgcaactgttacaaatcccactactaccccaacagctacagtgatgcccactacacaagtggaatcacaggaagctatgcagtcagaagggcctgtggaacatgttccagtttttggaagcacaagtggatccgttcgttctactagtcctaatgtccagccttctatctctcaacctattttaactgttcagcaacaaacacaggctacagcttttgtgcaacccactcaacagagtcatcctcagattgagcctgccaatcaagagttatcttcaaacatagtagaggttgttcagagttcaccagttgagcggccttctacttccacagcagtatttggcacagtttcggctacccccagttcttctttgccaaagcgtacacgtgaagaggaagaggatagcaccatagaagcatcagaccaagtctctgatgatacagtggaaatgcctcttccaaagaagttgaaaagtgtcacacctgtaggaactgaggaagaagttatggcagaagaaagtactgatggagaggtagagactcaggtatacaaccaggattctcaagattccattggagaaggagttacccagggagattatacacctatggaagacagtgaagaaacctctcagtctctacaaatagatcttgggccacttcaatcagatcagcagacgacaacttcatcccaggatggtcaaggcaaaggagatgatgtcattgtaattgacagtgatgatgaagaagaggatgatgatgaaaatgatggagaacatgaggattatgaagaggatgaggaagatgatgatgatgatgaagatgacacagggatgggagatgagggtgaagatagtaatgaaggaactggtagtgccgatggcaatgatggttatgaagctgatgatgctgagggtggtgatgggactgatccaggtacagaatgcccttcatgcctccacctgtttgctgtagctgtgcacatgtggttcctggttcttgagaattcttcccctcctctgcctcctgaccatcccgtccctttcatgctgtcttctcgcttttatgcctgctgtccgcgttcgtcctg

SEQ ID NO: 369598 - DNA, 7816 bp, Homo sapiens
  misc_feature (5441)..(5441): n is a, c, g, or t
  misc_feature (5486)..(5486): n is a, c, g, or t
  misc_feature (5859)..(5859): n is a, c, g, or t
  misc_feature (5885)..(5885): n is a, c, g, or t
gcgcaagaggatcagggatagcctctgagctcgggttcccagggttcgtagcttccaacggctgcgcgcgcacttcggtcgcgggcggtgaggtgctgttgctgaaacgctgccgctgagggtggactcgatttcccagggtcccgccgcgggagtctccggcgggcgggcgcgcgcgagccaccgagcgaggtgatagaggcggcggcccaggcgtctgggtcctgctggtcttcgcctttcttctccgcttctaccccgtcggccgctgccactggggtccctggccccaccgacatggcggcggtgttgcagcaagtcctggagcgcacggagctgaacaagctgcccaagtctgtccagaacaaacttgaaaagttccttgctgatcagcaatccgagatcgatggcctgaaggggcggcatgagaaatttaaggtggagagcgaacaacagtattttgaaatagaaaagaggttgtcccacagtcaggagagacttgtgaatgaaacccgagagtgtcaaagcttgcggcttgagctagagaaactcaacaatcaactgaaggcactaactgagaaaaacaaagaacttgaaattgctcaggatcgcaatattgccattcagagccaatttacaagaacaaaggaagaattagaagctgagaaaagagacttaattagaaccaatgagagactatctcaagaacttgaatacttaacagaggatgttaaacgtctgaatgaaaaacttaaagaaagcaatacaacaaagggtgaacttcagttaaaattggatgaacttcaagcttctgatgtttctgttaagtatcgagaaaaacgcttggagcaagaaaaggaattgctacatagtcagaatacatggctgaatacagagttgaaaaccaaaactgatgaacttctggctcttggaagagaaaaagggaatgagattctagagcttaaatgtaatcttgaaaataaaaaagaagaggtttctagactggaagaacaaatgaatggcttaaaaacatcaaatgaacatcttcaaaagcatgtggaggatctgttgaccaaattaaaagaggccaaggaacaacaggccagtatggaagagaaattccacaatgaattaaatgcccacataaaactttctaatttgtacaagagtgccgctgatgactcagaagcaaagagcaatgaactaacccgggcagtagaggaactacacaaacttttgaaagaagctggtgaagccaacaaagcaatacaagatcatcttctagaggtggagcaatccaaagatcaaatggaaaaagaaatgcttgagaaaatagggagattggagaaggaattagagaatgcaaatgaccttctttctgccacaaaacgtaaaggagccatattgtctgaagaagagcttgccgccatgtctcctactgcagcagctgtagctaagatagtgaaacctgggatgaaactaactgagctctataatgcttatgtggaaactcaggatcagttgcttttggagaaactagagaacaaaagaattaataagtacctagatgaaatagtgaaagaagtggaagccaaagcaccaattttgaaacgccagcgtgaggaatatgaacgtgcacagaaagctgtagcaagtttatctgttaagcttgaacaagctatgaaggagattcagcgattgcaggaggacactgataaagccaacaagcaatcatctgtacttgagagagataatcgaagaatggaaatacaagtaaaagatctttcacaacagattagagtgcttttgatggaacttgaagaagcaaggggtaaccacgtaattcgtgatgaggaagtaagctctgctgatataagtagttcatctgaggtaatatcacagcatctagtatcttacagaaatattgaagagcttcaacaacaaaatcaacgtctcttagtggcccttagagagcttggggaaaccagagaaagagaagaacaagaaacaacttcatccaaaatcactgagcttcagctcaaacttgagagtgcccttactgaactagaacaactccgcaaatcacgacagcatcaaatgcagcttgttgattccatagttcgtcagcgtgatatgtaccgtattttattgtcacaaacaacaggagttgccattccattacatgcttcaagcttagatgatgtttctcttgcatcaactccaaaacgtccaagtacatcacagactgtttccactcctgctccagtacctgttattgaatcaacagaggctatagaggctaaggctgcccttaaacagttgcaggaaatttttgagaactacaaaaaagaaaaagcagaaaatgaaaaaatacaaaatgagcagcttgagaaacttcaagaacaagttacagatttgcgatcacaaaataccaaaatttctacccagctagattttgcttctaaacgttacttgtagaattacttttttcataccagttatgaaatgctgcaagataatgttgaaggatatcgtcgagaaataacatcacttcatgagagaaatcagaaactcactgccacaactcaaaagcaagaacagattatcaatacgatgactcaagatttgagaggagcaaatgagaagctagctgtcgcagaagtaagagcagaaaatttgaagaaggaaaaggaaatgcttaaattgtctgaagttcgtctttctcagcaaagagagtctttgttagctgaacaaagggggcaaaacttactgctaactaatctgcaaacaattcagggaatactggagcgatctgaaacagaaaccaaacaaaggcttagtagccagatagaaaaactggaacatgagatctctcatctaaagaagaagttggaaaatgaggtggaacaaaggcatacacttactagaaatctagatgttcaacttttagatacaaagagacaactggatacagagacaaatcttcatcttaacacaaaagaactattaaaaaatgctcaaaaagaaattgccacattgaaacagcacctcagtaatatggaagtccaagttgcttctcagtcttcacagagaactggtaaaggtcagcctagcaacaaagaagatgtggatgatcttgtgagtcagctaagacagacagaagagcaggtgaatgacttaaaggagagactcaaaacaagtacgagcaatgtggaacaatatcaagcaatggttactagtttagaagaatccctgaacaaggaaaaacaggtgacagaagaagtgcgtaagaatattgaagttcgtttaaaagagtcagctgaatttcagacacagttggaaaagaagttgatggaagtagagaaggaaaaacaagaacttcaggatgataaaagaagagccatagagagcatggaacaacagttatctgaattgaagaaaacactttctagtgttcagaatgaagtacaagaagctcttcagagagcaagcacagctttaagtaatgagcagcaagccagacgtgactgtcaggaacaagctaaaatagctgtggaagctcagaataagtatgagagagaattgatgctgcatgctgctgatgttgaagctctacaagctgcgaaggagcaggtttcaaaaatggcatcagtccgtcagcatttggaagaaacaacacagaaagcagaatcacagttgttggagtgtaaagcatcttgggaggaaagagagagaatgttaaaggatgaagtttccaaatgtgtatgtcgctgtgaagatctggagaaacaaaacagattacttcatgatcagatcgaaaaattaagtgacaaggtcgttgcctctgtgaaggaaggtgtacaaggtccactgaatgtatctctcagtgaagaaggaaaatctcaagaacaaattttggaaattctcagatttatacgacgagaaaaagaaattgctgaaactaggtttgaggtggctcaggttgagagtctgcgttatcgacaaagggttgaacttttagaaagagagctgcaggaactgcaagatagtctaaatgctgaaagggagaaagtccaggtaggtatactaagctttaagaaagcacttgttaaatcaaaagagaagcactcatttatatctctaccatttaacgtaatgtaaaatttaacttgaagtaagcattcttctaaacttgtaaattcattaagcatttgttaaacactaatatagtatagtgcttaaaagtaaaggctctgtaaccaaactgcctggtttcagattctagcttcataccattagctgtggccttgggtacattgtttaacttccctgctcttagtttcttcatctgtaatatttggataataatgaggtttaattgagtttgtgcacatgaagcatttagaagcatgtctggtatgtagtgggtgcttaataaattccagctatcttaatttattatagttatggattatacgtgtggatagtcattctaggataaagtgatttaaactgctacagaatatctttctcacccaaggagcaaaaagtagtaaaaactaacaaccaaaggaaaagaagctgtggtagtgaaatggatgataataagacaagcttgactccttaccccacactaccacccaaagcttattgttgagttacttcattcttaggagctacagtaatatacccccacctctagaaggaaggaaattaagatcttaaaacatttatcttcttttaactgatgagtagtcaaaatgactgttaagaagaaaccattgaacagggaaaagtaaataatgaattttatgggatttatgtgttcagcaaaagctaaaggttccagaattatatcctgtttaattcaaatgtatctcaccatggaaataatagagcctccagttcaatagagttaatacttggaggaaaagggacagaatcagagtctctaacaaagactgcatattgtttcagtcttttccgcttcattttttattcctttgggctatagaaagtaaatactagaaaatgcccgcctacgaatgagttcatagggggaaaccaactcttaaatacaggaagaagagagtcaacaagtaacatagattatataaaaaataatataatgggccgggcatggtggctcatgcctgtaatcccagcactttgggaggccgaggcgggtggatcacgaggttaggagattgagaccatcctggctaacacggtgaaaccccgtctctactaaaaatacaaaaaaattagctgggcatggtggtggcaggcacctgtagtcccagctactcgggaggctgaggcaggagaacggcgtaaatccgggaggcggagcttgcagtgagccgagatcacaccactggactccagtctgggcgacagagcgagactccgtctcaaaaaaaaaaaaaaattataatagnaatgtaatgtctgtctaagcatgaacagtgtagcatggcaaccangaaatatgctatagctttaaaaacagtgggggaagaaagtaataccaagtgcagaagatggataattataacctatgagaaggaaaaaattcttcacagataattcagtaaaatttctcatggccaaagtgatgaaacaatggatcaaaatgagagatttctgaacaagagggaataaactgaggattagaataacattttagaactaataaatttagtgcagcaaggaaaaaaagatacagaaaggtaaatagagatttggattaatgtttttacctaatgttaatactttgttggtgggatttgtagcatcttttcacttttgtctttgtaattcttgtatttgtttaaagtctgcagttcgcatgcctcncagaaaagtaaacgtgaactttcaanaattttagttctaaaagttgaaacttaaatcctctttattttgtcatagggaggatttgagctcataggaacaggtagactttcaactattgttagatgttggtatgtatatttatttgaaatgtttaggtaactgcaaaaacaatggctcagcatgaagaactgatgaagaaaactgaaacaatgaatgtagttatggagaccaataaaatgctaagagaagagaaggagagactagaacaggatctacagcaaatgcaagcaaaggtgaggaaactggagttagatattttacccttacaagaagcaaatgctgagctgagtgagaaaagcggtatgttgcaggcagagaagaagctcttagaagaggatgtcaaacgttggaaagcacgtaaccagcatctagtaagtcaacagaaagatccagatacagaagaatatcggaagctcctttctgaaaaggaagttcatactaagcgtattcaacaattgacagaagaaattggtagacttaaagctgaaattgcaagatcaaatgcatctttgactaacaaccagaacttaattcagagtctgaaggaagatctaaataaagtaagaactgaaaaggaaaccatccagaaggacttagatgccaaaataattgatatccaagaaaaagtcaaaactattactcaagttaagaaaattggacgtaggtacaagactcaatatgaagaacttaaagcacaacaggataaggttatggagacatcggctcagtcctctggagaccatcaggagcagcatgtttcagtccaggaaatgcaggaactcaaagaaacgctcaaccaagctgaaacaaaatcaaaatcacttgaaagtcaagtagagaatctgcagaagacattatctgaaaaagagacagaagcaagaaatctccaggaacagactgtgcaacttcagtctgaactttcacgacttcgtcaggatcttcaagatagaaccacacaggaggagcagctccgacaacagataactgaaaaggaagaaaaaaccagaaaggctattgtagcagcaaagtcaaaaattgcacacttagctggtgtaaaagatcagctaactaaagaaaatgaggagcttaaacaaaggaatggagccttagatcagcagaaagatgaattggatgttcgcattactgcgctaaagtcccaatatgaaggtcgaattagtcgcttggaaagagaactcagggagcatcaagagagacaccttgagcagagagatgagcctcaagaaccttctaataaggtccctgaacagcagagacagatcacattgaaaacaactccagcttctggtgaaagaggaattgccagcacatcagacccaccaacagccaatatcaagccaactcctgttgtgtctactccaagtaaagtgacagctgcagctatggctggaaataagtcaacacccagggctagtatccgcccaatggttacacctgcaactgttacaaatcccactactaccccaacagctacagtgatgcccactacacaagtggaatcacaggaagctatgcagtcagaagggcctgtggaacatgttccagtttttggaagcacaagtggatccgttcgttctactagtcctaatgtccagccttctatctctcaacctattttaactgttcagcaacaaacacaggctacagcttttgtgcaacccactcaacagagtcatcctcagattgagcctgccaatcaagagttatcttcaaacatagtagaggttgttcagagttcaccagttgagcggccttctacttccacagcagtatttggcacagtttcggctacccccagttcttctttgccaaagcgtacacgtgaagaggaagaggatagcaccatagaagaaggtcggctcacggggggatactctag

SEQ ID NO: 369599 - DNA, 3538 bp, Homo sapiens
gcgcaagaggatcagggatagcctctgagctcgggttcccagggttcgtagcttccaacggctgcgcgcgcacttcggtcgcgggcggtgaggtgctgttgctgaaacgctgccgctgagggtggactcgatttcccagggtcccgccgcgggagtctccggcgggcgggcgcgcgcgagccaccgagcgaggtgatagaggcggcggcccaggcgtctgggtcctgctggtcttcgcctttcttctccgcttctaccccgtcggccgctgccactggggtccctggccccaccgacatggcggcggtgttgcagcaagtcctggagcgcacggagctgaacaagctgcccaagtctgtccagaacaaacttgaaaagttccttgctgatcagcaatccgagatcgatggcctgaaggggcggcatgagaaatttaaggtggagagcgaacaacagtattttgaaatagaaaagaggttgtcccacagtcaggagagacttgtgaatgaaacccgagagtgtcaaagcttgcggcttgagctagagaaactcaacaatcaactgaaggcactaactgagaaaaacaaagaacttgaaattgctcaggatcgcaatattgccattcagagccaatttacaagaacaaaggaagaattagaagctgagaaaagagacttaattagaaccaatgagagactatctcaagaacttgaatacttaacagaggatgttaaacgtctgaatgaaaaacttaaagaaagcaatacaacaaagggtgaacttcagttaaaattggatgaacttcaagcttctgatgtttctgttaagtatcgagaaaaacgcttggagcaagaaaaggaattgctacatagtcagaatacatggctgaatacagagttgaaaaccaaaactgatgaacttctggctcttggaagagaaaaagggaatgagattctagagcttaaatgtaatcttgaaaataaaaaagaagaggtttctagactggaagaacaaatgaatggcttaaaaacatcaaatgaacatcttcaaaagcatgtggaggatctgttgaccaaattaaaagaggccaaggaacaacaggccagtatggaagagaaattccacaatgaattaaatgcccacataaaactttctaatttgtacaagagtgccgctgatgactcagaagcaaagagcaatgaactaacccgggcagtagaggaactacacaaacttttgaaagaagctggtgaagccaacaaagcaatacaagatcatcttctagaggtggagcaatccaaagatcaaatggaaaaagaaatgcttgagaaaatagggagattggagaaggaattagagaatgcaaatgaccttctttctgccacaaaacgtaaaggagccatattgtctgaagaagagcttgccgccatgtctcctactgcagcagctgtagctaagatagtgaaacctgggatgaaactaactgagctctataatgcttatgtggaaactcaggatcagttgcttttggagaaactagagaacaaaagaattaataagtacctagatgaaatagtgaaagaagtggaagccaaagcaccaattttgaaacgccagcgtgaggaatatgaacgtgcacagaaagctgtagcaagtttatctgttaagcttgaacaagctatgaaggagattcagcgattgcaggaggacactgataaagccaacaagcaatcatctgtacttgagagagataatcgaagaatggaaatacaagtaaaagatctttcacaacagattagagtgcttttgatggaacttgaagaagcaaggggtaaccacgtaattcgtgatgaggaagtaagctctgctgatataagtagttcatctgaggtaatatcacagcatctagtatcttacagaaatattgaagagcttcaacaacaaaatcaacgtctcttagtggcccttagagagcttggggaaaccagagaaagagaagaacaagaaacaacttcatccaaaatcactgagcttcagctcaaacttgagagtgcccttactgaactagaacaactccgcaaatcacgacagcatcaaatgcagcttgttgattccatagttcgtcagcgtgatatgtaccgtattttattgtcacaaacaacaggagttgccattccattacatgcttcaagcttagatgatgtttctcttgcatcaactccaaaacgtccaagtacatcacagactgtttccactcctgctccagtacctgttattgaatcaacagaggctatagaggctaaggctgcccttaaacagttgcaggaaatttttgagaactacaaaaaagaaaaagcagaaaatgaaaaaatacaaaatgagcagcttgagaaacttcaagaacaagttacagatttgcgatcacaaaataccaaaatttctacccagctagattttgcttctaaacgttacttgtagaattacttttttcataccagttatgaaatgctgcaagataatgttgaaggatatcgtcgagaaataacatcacttcatgagagaaatcagaaactcactgccacaactcaaaagcaagaacagattatcaatacgatgactcaagatttgagaggagcaaatgagaagctagctgtcgcagaagtaagagcagaaaatttgaagaaggaaaaggaaatgcttaaattgtctgaagttcgtctttctcagcaaagagagtctttgttagctgaacaaagggggcaaaacttactgctaactaatctgcaaacaattcagggaatactggagcgatctgaaacagaaaccaaacaaaggcttagtagccagatagaaaaactggaacatgagatctctcatctaaagaagaagttggaaaatgaggtggaacaaaggcatacacttactagaaatctagatgttcaacttttagatacaaagagacaactggatacagagacaaatcttcatcttaacacaaaagaactattaaaaaatgctcaaaaagaaattgccacattgaaacagcacctcagtaatatggaagtccaagttgcttctcagtcttcacagagaactggtaaaggtcagcctagcaacaaagaagatgtggatgatcttgtgagtcagctaagacagacagaagagcaggtgaatgacttaaaggagagactcaaaacaagtacgagcaatgtggaacaatatcaagcaatggttactagtttagaagaatccctgaacaaggaaaaacaggtgacagaagaagtgcgtaagaatattgaagttcgtttaaaagagtcagctgaatttcagacacagttggaaaagaagttgatggaagtagagaaggaaaaacaagaacttcaggatgataaaagaagagccatagagagcatggaacaacagttatctttttttcacttagacgtcagtgggtcagatgcaacattgggtatccattttacctttcatgtacggccaaactagcacaagtgttacaattacttgtctctacaaaaat

SEQ ID NO: 369600 - DNA, 326 bp, Homo sapiens
aggagcctttgtcagtgaattttggctaaaattcaatatatgcggagagaattaacaataatgacaatttttttgtggcatttttagtggactcttgtgggctaggaacaacaatcaagagctttctctttataggtccctgaacagcagagacagatcacattgaaaacaactccagcttctggtgaaagaggaatgtgagttttagttatttcatagtctgttatttttcttttaaagctcagggaatatctagtgatctttctgtttaggaaaaagaaatctgtgtattctattgtaaaaacatacactaaagagttgttttc

SEQ ID NO: 369601 - DNA, 344 bp, Homo sapiens
ggaggttacatttgctctattaaccaaccaaaaaatagactcaaagaggttaagggacttgcccaaagccacacagcgaataagtacacatcccattgtctctgggtgtaaaacccacatttgcttccatcacacctcactactttacttctgaaaatattcgtacggtgaacattcctgttggcaagatttatacttctagggattgtccaagtttttttgtggtaaatttagcagttcaaaagtaaatttctcttttcctacaggtgaaggaaatacaggtgctgcagaatcttctttttctcaggaggtttctagagaacaacagccatcatcagcatctg

SEQ ID NO: 369602 - DNA, 566 bp, Homo sapiens
cacccgggctcaagtgatcctctagcctcagcctcctgagtaactgggactgtaggcatgttccaccatgcccagctaattgttttataattttgtagaaacagggtctcgctgtgttgcccaggctggtctcgaactcctgagctcaagtgatcctcccaccttagcctcccaaagtgctgctttttttgttgtttaaccatttaccctttttcggtttgttaaatgttcctcattgtttgaaaaaaagaattgaaatcaaatgaacaagtctacatcttattcattcattcatttagtaattagtttgtatcattataaatgctttctcattttttcacttgcttttcttttatcttaatgtttttcttagatactagtagtagtcaaccaaagcctttcagacgagtaagacttcagacaacattgagacaaggtgtccgtggtcgtcagtttaacagacagagaggtgaatttctgacataactggattacatgatagaatgtggaatagtaataaatggaacaagttttctaatccttaagcctccaatttatttttttaa

SEQ ID NO: 369603 - DNA, 1388 bp, Homo sapiens
gcccgcaaaaaaaatctatgtgttcctaacagtgctagatacttgggatatagtgatatagggaggaaagaattgagcaacaataccaaacaaaaaatttctactccaagacctcaggttatgggtaagacagatgtaataaatagataataaaataggcaagtagacaatttgcattcactgtgattagtgcctatctgtgggatcatagcggtagaggacttgtcctagatttcagggagcagaccggcttcatggagaacctggagaacctatgtaagaattagtcagaggttttttcaaaatacatgtataatgtcttctagaagaggaagaatggctaagaaagcaagaagactagagtttggagtgagtggaactgatttaatttttacaaacaaatttttcagattgcattggtaagtataagtacctgagtcctgtgtggtggggatttaaaaagtagttcataaaatactcagcatgaaaaaaaataatgagagagacaaaaatggtatgatgaatggtaggcaaagatgcttggttaattacagtagaaattacaatcagttaactctcagttcagtcctgtgaattaggccgactttttctacagaatcactgagcttcagctcaaacttgagagtgcccttactgaactagaacaactccgcaaatcacgacagcatcaaatgcagcttgttgattccatagttcgtcagcgtgatatgtaccgtattttattgtcacaaacaacaggagttgccattccattacatgcttcaagcttagatgatgtttctcttgcatcaactccaaaacgtccaagtacatcacagactgtttccactcctgctccagtacctgttattgaatcaacagaggctatagaggctaaggctgcccttaaacagttgcaggaaatttttgagaactacaaaaaagaaaaagcagaaaatgaaaaaatacaaaatgagcagcttgagaaacttcaagaacaagttacagatttgcgatcacaaaataccaaaatttctacccagctagattttgcttctaaacgttatgaaatgctgcaagataatgttgaaggatatcgtcgagaaataacatcacttcatgagagaaatcagaaactcactgccacaactcaaaagcaagaacagattatcaatacgatgactcaagatttgagaggagcaaatgagaagctagctgtcgcagaagtaagagcagaaaatttgaagaaggaaaaggaaatgcttaaattgtctgaagttcgtctttctcagcaaagagagtctttgttagctgaacaaagggggcaaaacttactgctaactaatctgcaaacaattcagggaaatgggaactgggtaccgagctgg

SEQ ID NO: 369604 - DNA, 8180 bp, Homo sapiens
gcgcaagaggatcagggatagcctctgagctcgggttcccagggttcgtagcttccaacggctgcgcgcgcacttcggtcgcgggcggtgaggtgctgttgctgaaacgctgccgctgagggtggactcgatttcccagggtcccgccgcgggagtctccggcgggcgggcgcgcgcgagccaccgagcgaggtgatagaggcggcggcccaggcgtctgggtcctgctggtcttcgcctttcttctccgcttctaccccgtcggccgctgccactggggtccctggccccaccgacatggcggcggtgttgcagcaagtcctggagcgcacggagctgaacaagctgcccaagtctgtccagaacaaacttgaaaagttccttgctgatcagcaatccgagatcgatggcctgaaggggcggcatgagaaatttaaggtggagagcgaacaacagtattttgaaatagaaaagaggttgtcccacagtcaggagagacttgtgaatgaaacccgagagtgtcaaagcttgcggcttgagctagagaaactcaacaatcaactgaaggcactaactgagaaaaacaaagaacttgaaattgctcaggatcgcaatattgccattcagagccaatttacaagaacaaaggaagaattagaagctgagaaaagagacttaattagaaccaatgagagactatctcaagaacttgaatacttaacagaggatgttaaacgtctgaatgaaaaacttaaagaaagcaatacaacaaagggtgaacttcagttaaaattggatgaacttcaagcttctgatgtttctgttaagtatcgagaaaaacgcttggagcaagaaaaggaattgctacatagtcagaatacatggctgaatacagagttgaaaaccaaaactgatgaacttctggctcttggaagagaaaaagggaatgagattctagagcttaaatgtaatcttgaaaataaaaaagaagaggtttctagactggaagaacaaatgaatggcttaaaaacatcaaatgaacatcttcaaaagcatgtggaggatctgttgaccaaattaaaagaggccaaggaacaacaggccagtatggaagagaaattccacaatgaattaaatgcccacataaaactttctaatttgtacaagagtgccgctgatgactcagaagcaaagagcaatgaactaacccgggcagtagaggaactacacaaacttttgaaagaagctggtgaagccaacaaagcaatacaagatcatcttctagaggtggagcaatccaaagatcaaatggaaaaagaaatgcttgagaaaatagggagattggagaaggaattagagaatgcaaatgaccttctttctgccacaaaacgtaaaggagccatattgtctgaagaagagcttgccgccatgtctcctactgcagcagctgtagctaagatagtgaaacctgggatgaaactaactgagctctataatgcttatgtggaaactcaggatcagttgcttttggagaaactagagaacaaaagaattaataagtacctagatgaaatagtgaaagaagtggaagccaaagcaccaattttgaaacgccagcgtgaggaatatgaacgtgcacagaaagctgtagcaagtttatctgttaagcttgaacaagctatgaaggagattcagcgattgcaggaggacactgataaagccaacaagcaatcatctgtacttgagagagataatcgaagaatggaaatacaagtaaaagatctttcacaacagattagagtgcttttgatggaacttgaagaagcaaggggtaaccacgtaattcgtgatgaggaagtaagctctgctgatataagtagttcatctgaggtaatatcacagcatctagtatcttacagaaatattgaagagcttcaacaacaaaatcaacgtctcttagtggcccttagagagcttggggaaaccagagaaagagaagaacaagaaacaacttcatccaaaatcactgagcttcagctcaaacttgagagtgcccttactgaactagaacaactccgcaaatcacgacagcatcaaatgcagcttgttgattccatagttcgtcagcgtgatatgtaccgtattttattgtcacaaacaacaggagttgccattccattacatgcttcaagcttagatgatgtttctcttgcatcaactccaaaacgtccaagtacatcacagactgtttccactcctgctccagtacctgttattgaatcaacagaggctatagaggctaaggctgcccttaaacagttgcaggaaatttttgagaactacaaaaaagaaaaagcagaaaatgaaaaaatacaaaatgagcagcttgagaaacttcaagaacaagttacagatttgcgatcacaaaataccaaaatttctacccagctagattttgcttctaaacgttatgaaatgctgcaagataatgttgaaggatatcgtcgagaaataacatcacttcatgagagaaatcagaaactcactgccacaactcaaaagcaagaacagattatcaatacgatgactcaagatttgagaggagcaaatgagaagctagctgtcgcagaagtaagagcagaaaatttgaagaaggaaaaggaaatgcttaaattgtctgaagttcgtctttctcagcaaagagagtctttgttagctgaacaaagggggcaaaacttactgctaactaatctgcaaacaattcagggaatactggagcgatctgaaacagaaaccaaacaaaggcttagtagccagatagaaaaactggaacatgagatctctcatctaaagaagaagttggaaaatgaggtggaacaaaggcatacacttactagaaatctagatgttcaacttttagatacaaagagacaactggatacagagacaaatcttcatcttaacacaaaagaactattaaaaaatgctcaaaaagaaattgccacattgaaacagcacctcagtaatatggaagtccaagttgcttctcagtcttcacagagaactggtaaaggtcagcctagcaacaaagaagatgtggatgatcttgtgagtcagctaagacagacagaagagcaggtgaatgacttaaaggagagactcaaaacaagtacgagcaatgtggaacaatatcaagcaatggttactagtttagaagaatccctgaacaaggaaaaacaggtgacagaagaagtgcgtaagaatattgaagttcgtttaaaagagtcagctgaatttcagacacagttggaaaagaagttgatggaagtagagaaggaaaaacaagaacttcaggatgataaaagaagagccatagagagcatggaacaacagttatctgaattgaagaaaacactttctagtgttcagaatgaagtacaagaagctcttcagagagcaagcacagctttaagtaatgagcagcaagccagacgtgactgtcaggaacaagctaaaatagctgtggaagctcagaataagtatgagagagaattgatgctgcatgctgctgatgttgaagctctacaagctgcgaaggagcaggtttcaaaaatggcatcagtccgtcagcatttggaagaaacaacacagaaagcagaatcacagttgttggagtgtaaagcatcttgggaggaaagagagagaatgttaaaggatgaagtttccaaatgtgtatgtcgctgtgaagatctggagaaacaaaacagattacttcatgatcagatcgaaaaattaagtgacaaggtcgttgcctctgtgaaggaaggtgtacaaggtccactgaatgtatctctcagtgaagaaggaaaatctcaagaacaaattttggaaattctcagatttatacgacgagaaaaagaaattgctgaaactaggtttgaggtggctcaggttgagagtctgcgttatcgacaaagggttgaacttttagaaagagagctgcaggaactgcaagatagtctaaatgctgaaagggagaaagtccaggtaactgcaaaaacaatggctcagcatgaagaactgatgaagaaaactgaaacaatgaatgtagttatggagaccaataaaatgctaagagaagagaaggagagactagaacaggatctacagcaaatgcaagcaaaggtgaggaaactggagttagatattttacccttacaagaagcaaatgctgagctgagtgagaaaagcggtatgttgcaggcagagaagaagctcttagaagaggatgtcaaacgttggaaagcacgtaaccagcatctagtaagtcaacagaaagatccagatacagaagaatatcggaagctcctttctgaaaaggaagttcatactaagcgtattcaacaattgacagaagaaattggtagacttaaagctgaaattgcaagatcaaatgcatctttgactaacaaccagaacttaattcagagtctgaaggaagatctaaataaagtaagaactgaaaaggaaaccatccagaaggacttagatgccaaaataattgatatccaagaaaaagtcaaaactattactcaagttaagaaaattggacgtaggtacaagactcaatatgaagaacttaaagcacaacaggataaggttatggagacatcggctcagtcctctggagaccatcaggagcagcatgtttcagtccaggaaatgcaggaactcaaagaaacgctcaaccaagctgaaacaaaatcaaaatcacttgaaagtcaagtagagaatctgcagaagacattatctgaaaaagagacagaagcaagaaatctccaggaacagactgtgcaacttcagtctgaactttcacgacttcgtcaggatcttcaagatagaaccacacaggaggagcagctccgacaacagataactgaaaaggaagaaaaaaccagaaaggctattgtagcagcaaagtcaaaaattgcacacttagctggtgtaaaagatcagctaactaaagaaaatgaggagcttaaacaaaggaatggagccttagatcagcagaaagatgaattggatgttcgcattactgcgctaaagtcccaatatgaaggtcgaattagtcgcttggaaagagaactcagggagcatcaagagagacaccttgagcagagagatgagcctcaagaaccttctaataaggtccctgaacagcagagacagatcacattgaaaacaactccagcttctggtgaaagaggaattgccagcacatcagacccaccaacagccaatatcaagccaactcctgttgtgtctactccaagtaaagtgacagctgcagctatggctggaaataagtcaacacccagggctagtatccgcccaatggttacacctgcaactgttacaaatcccactactaccccaacagctacagtgatgcccactacacaagtggaatcacaggaagctatgcagtcagaagggcctgtggaacatgttccagtttttggaagcacaagtggatccgttcgttctactagtcctaatgtccagccttctatctctcaacctattttaactgttcagcaacaaacacaggctacagcttttgtgcaacccactcaacagagtcatcctcagattgagcctgccaatcaagagttatcttcaaacatagtagaggttgttcagagttcaccagttgagcggccttctacttccacagcagtatttggcacagtttcggctacccccagttcttctttgccaaagcgtacacgtgaagaggaagaggatagcaccatagaagcatcagaccaagtctctgatgatacagtggaaatgcctcttccaaagaagttgaaaagtgtcacacctgtaggaactgaggaagaagttatggcagaagaaagtactgatggagaggtagagactcaggtatacaaccaggattctcaagattccattggagaaggagttacccagggagattatacacctatggaagacagtgaagaaacctctcagtctctacaaatagatcttgggccacttcaatcagatcagcagacgacaacttcatcccaggatggtcaaggcaaaggagatgatgtcattgtaattgacagtgatgatgattatgaagaggatgaggaagatgatgatgatgatgaagatgacacagggatgggagatgagggtgaagatagtaatgaaggaactggtagtgccgatggcaatgatggttatgaagctgatgatgctgagggtggtgatgggactgatccaggtacagaaacagaagaaagtatgggtggaggtgaaggtaatcacagagctgctgattctcaaaacagtggtgaaggaaatacaggtgctgcagaatcttctttttctcaggaggtttctagagaacaacagccatcatcagcatctgaaagacaggcccctcgagcacctcagtcaccgagacgcccaccacatccacttcccccaagactgaccattcatgccccacctcaggagttgggaccaccagttcagagaattcagatgacccgaaggcagtctgtaggacgtggccttcagttgactccaggaataggtggcatgcaacagcatttttttgatgatgaagacagaacagttccaagtactccaactcttgtggtgccacatcgtactgatggatttgctgaagcaattcattcgccgcaggttgctggtgtccctagattccggtttgggccacctgaagatatgccacaaacaagttctagtcactctgatcttggccagcttgcttctcaaggaggtttaggaatgtatgaaacacccctgttcctagctcatgaagaagagtcaggtggccgaagtgttcccactactccactacaagtagcagccccagtgactgtatttactgagagcaccacctctgatgcttcggaacatgcctctcaatctgttccaatggtgactacatccactggcactttatctacaacaaatgaaacagcaacaggtgatgatggagatgaagtatttgtggaggcagaatctgaaggtattagttcagaagcaggcctagaaattgatagccagcaggaagaagagccggttcaagcatctgatgagtcagatctcccctccaccagccaggatcctccttctagctcatctgtagatactagtagtagtcaaccaaagcctttcagacgagtaagacttcagacaacattgagacaaggtgtccgtggtcgtcagtttaacagacagagaggtgtgagccatgcaatgggagggagaggaggaataaacagaggaaatattaattaaatggtctgtaaacaataacaactgtgaataagattatcaaatctgttttagtgtaatgattgtcaagtttaaaaacatttttatatataaactggtatactcatgtcaatattctttattaataaaatgtttttcagtgtcaaaatttattattcatttcttcattagttgactcctcctttgctcatcagtctaaggacagttgtaccagactttggataaggtctgcccagaacgagtagtaattgctcttgctgttctactaggcacatcaatgttatagtattgatctttagaaaaggcatagtaatcatagccgtcaggttttctgatgttgggcagtgatatagctgaggtaaccacatttggaagtcctctccacagtatactcactttaacttcattatgaaggacacctgtaagtggcatgtttaataaaagataccagattaaaaggcaatgtactatcttggaaagagccagacatctgagttttaatctcagttttagccctctgatgtagaactattgagggttatagactggtatataatgttcttggtaagaagtacttgataaatagtattggttataactaacaaacctgaacaaactgctttacttacccacaaggaaaaagaaagtattggtctttggttattcactaaggcaagtggatgagtttttcatcagtaagcttaaattattagggctgtttgatcagtatccatatttcataagccttactgtataagaaactgtattacatctacttatgtttaaggatttttttaacacaataaaaatgttacctttgtcttgataaaaaa

SEQ ID NO: 369605 - DNA, 7514 bp, Homo sapiens
catagagagcgtggcggtatcccggagcctgccgtccggccctaccgggaccgatgccctctagtggctcagtgtccagaagccgccaacgaggacgatccatggcatcccggggctttgacgggtcccgccgcgggagtctccggcgggcgggcgcgcgcgagccaccgagcgaggtgatagaggcggcggcccaggcgtctgggtcctgctggtcttcgcctttcttctccgcttctaccccgtcggccgctgccactggggtccctggccccaccgacatggcggcggtgttgcagcaagtcctggagcgcacggagctgaacaagctgcccaagtctgtccagaacaaacttgaaaagttccttgctgatcagcaatccgagatcgatggcctgaaggggcggcatgagaaatttaaggtggagagcgaacaacagtattttgaaatagaaaagaggttgtcccacagtcaggagagacttgtgaatgaaacccgagagtgtcaaagcttgcggcttgagctagagaaactcaacaatcaactgaaggcactaactgagaaaaacaaagaacttgaaattgctcaggatcgcaatattgccattcagagccaatttacaagaacaaaggaagaattagaagctgagaaaagagacttaattagaaccaatgagagactatctcaagaacttgaatacttaacagaggatgttaaacgtctgaatgaaaaacttaaagaaagcaatacaacaaagggtgaacttcagttaaaattggatgaacttcaagcttctgatgtttctgttaagtatcgagaaaaacgcttggagcaagaaaaggaattgctacatagtcagaatacatggctgaatacagagttgaaaaccaaaactgatgaacttctggctcttggaagagaaaaagggaatgagattctagagcttaaatgtaatcttgaaaataaaaaagaagaggtttctagactggaagaacaaatgaatggcttaaaaacatcaaatgaacatcttcaaaagcatgtggaggatctgttgaccaaattaaaagaggccaaggaacaacaggccagtatggaagagaaattccacaatgaattaaatgcccacataaaactttctaatttgtacaagagtgccgctgatgactcagaagcaaagagcaatgaactaacccgggcagtagaggaactacacaaacttttgaaagaagctggtgaagccaacaaagcaatacaagatcatcttctagaggtggagcaatccaaagatcaaatggaaaaagaaatgcttgagaaaatagggagattggagaaggaattagagaatgcaaatgaccttctttctgccacaaaacgtaaaggagccatattgtctgaagaagagcttgccgccatgtctcctactgcagcagctgtagctaagatagtgaaacctgggatgaaactaactgagctctataatgcttatgtggaaactcaggatcagttgcttttggagaaactagagaacaaaagaattaataagtacctagatgaaatagtgaaagaagtggaagccaaagcaccaattttgaaacgccagcgtgaggaatatgaacgtgcacagaaagctgtagcaagtttatctgttaagcttgaacaagctatgaaggagattcagcgattgcaggaggacactgataaagccaacaagcaatcatctgtacttgagagagataatcgaagaatggaaatacaagtaaaagatctttcacaacagattagagtgcttttgatggaacttgaagaagcaaggggtaaccacgtaattcgtgatgaggaagtaagctctgctgatataagtagttcatctgaggtaatatcacagcatctagtatcttacagaaatattgaagagcttcaacaacaaaatcaacgtctcttagtggcccttagagagcttggggaaaccagagaaagagaagaacaagaaacaacttcatccaaaatcactgagcttcagctcaaacttgagagtgcccttactgaactagaacaactccgcaaatcacgacagcatcaaatgcagcttgttgattccatagttcgtcagcgtgatatgtaccgtattttattgtcacaaacaacaggagttgccattccattacatgcttcaagcttagatgatgtttctcttgcatcaactccaaaacgtccaagtacatcacagactgtttccactcctgctccagtacctgttattgaatcaacagaggctatagaggctaaggctgcccttaaacagttgcaggaaatttttgagaactacaaaaaagaaaaagcagaaaatgaaaaaatacaaaatgagcagcttgagaaacttcaagaacaagttacagatttgcgatcacaaaataccaaaatttctacccagctagattttgcttctaaacgttatgaaatgctgcaagataatgttgaaggatatcgtcgagaaataacatcacttcatgagagaaatcagaaactcactgccacaactcaaaagcaagaacagattatcaatacgatgactcaagatttgagaggagcaaatgagaagctagctgtcgcagaagtaagagcagaaaatttgaagaaggaaaaggaaatgcttaaattgtctgaagttcgtctttctcagcaaagagagtctttgttagctgaacaaagggggcaaaacttactgctaactaatctgcaaacaattcagggaatactggagcgatctgaaacagaaaccaaacaaaggcttagtagccagatagaaaaactggaacatgagatctctcatctaaagaagaagttggaaaatgaggtggaacaaaggcatacacttactagaaatctagatgttcaacttttagatacaaagagacaactggatacagagacaaatcttcatcttaacacaaaagaactattaaaaaatgctcaaaaagaaattgccacattgaaacagcacctcagtaatatggaagtccaagttgcttctcagtcttcacagagaactggtaaaggtcagcctagcaacaaagaagatgtggatgatcttgtgagtcagctaagacagacagaagagcaggtgaatgacttaaaggagagactcaaaacaagtacgagcaatgtggaacaatatcaagcaatggttactagtttagaagaatccctgaacaaggaaaaacaggtgacagaagaagtgcgtaagaatattgaagttcgtttaaaagagtcagctgaatttcagacacagttggaaaagaagttgatggaagtagagaaggaaaaacaagaacttcaggatgataaaagaagagccatagagagcatggaacaacagttatctgaattgaagaaaacactttctagtgttcagaatgaagtacaagaagctcttcagagagcaagcacagctttaagtaatgagcagcaagccagacgtgactgtcaggaacaagctaaaatagctgtggaagctcagaataagtatgagagagaattgatgctgcatgctgctgatgttgaagctctacaagctgcgaaggagcaggtttcaaaaatggcatcagtccgtcagcatttggaagaaacaacacagaaagcagaatcacagttgttggagtgtaaagcatcttgggaggaaagagagagaatgttaaaggatgaagtttccaaatgtgtatgtcgctgtgaagatctggagaaacaaaacagattacttcatgatcagatcgaaaaattaagtgacaaggtcgttgcctctgtgaaggaaggtgtacaaggtccactgaatgtatctctcagtgaagaaggaaaatctcaagaacaaattttggaaattctcagatttatacgacgagaaaaagaaattgctgaaactaggtttgaggtggctcaggttgagagtctgcgttatcgacaaagggttgaacttttagaaagagagctgcaggaactgcaagatagtctaaatgctgaaagggagaaagtccaggtaactgcaaaaacaatggctcagcatgaagaactgatgaagaaaactgaaacaatgaatgtagttatggagaccaataaaatgctaagagaagagaaggagagactagaacaggatctacagcaaatgcaagcaaaggtgaggaaactggagttagatattttacccttacaagaagcaaatgctgagctgagtgagaaaagcggtatgttgcaggcagagaagaagctcttagaagaggatgtcaaacgttggaaagcacgtaaccagcatctagtaagtcaacagaaagatccagatacagaagaatatcggaagctcctttctgaaaaggaagttcatactaagcgtattcaacaattgacagaagaaattggtagacttaaagctgaaattgcaagatcaaatgcatctttgactaacaaccagaacttaattcagagtctgaaggaagatctaaataaagtaagaactgaaaaggaaaccatccagaaggacttagatgccaaaataattgatatccaagaaaaagtcaaaactattactcaagttaagaaaattggacgtaggtacaagactcaatatgaagaacttaaagcacaacaggataaggttatggagacatcggctcagtcctctggagaccatcaggagcagcatgtttcagtccaggaaatgcaggaactcaaagaaacgctcaaccaagctgaaacaaaatcaaaatcacttgaaagtcaagtagagaatctgcagaagacattatctgaaaaagagacagaagcaagaaatctccaggaacagactgtgcaacttcagtctgaactttcacgacttcgtcaggatcttcaagatagaaccacacaggaggagcagctccgacaacagataactgaaaaggaagaaaaaaccagaaaggctattgtagcagcaaagtcaaaaattgcacacttagctggtgtaaaagatcagctaactaaagaaaatgaggagcttaaacaaaggaatggagccttagatcagcagaaagatgaattggatgttcgcattactgcgctaaagtcccaatatgaaggtcgaattagtcgcttggaaagagaactcagggagcatcaagagagacaccttgagcagagagatgagcctcaagaaccttctaataaggtccctgaacagcagagacagatcacattgaaaacaactccagcttctggtgaaagaggaattgccagcacatcagacccaccaacagccaatatcaagccaactcctgttgtgtctactccaagtaaagtgacagctgcagctatggctggaaataagtcaacacccagggctagtatccgcccaatggttacacctgcaactgttacaaatcccactactaccccaacagctacagtgatgcccactacacaagtggaatcacaggaagctatgcagtcagaagggcctgtggaacatgttccagtttttggaagcacaagtggatccgttcgttctactagtcctaatgtccagccttctatctctcaacctattttaactgttcagcaacaaacacaggctacagcttttgtgcaacccactcaacagagtcatcctcagattgagcctgccaatcaagagttatcttcaaacatagtagaggttgttcagagttcaccagttgagcggccttctacttccacagcagtatttggcacagtttcggctacccccagttcttctttgccaaagcgtacacgtgaagaggaagaggatagcaccatagaagcatcagaccaagtctctgatgatacagtggaaatgcctcttccaaagaagttgaaaagtgtcacacctgtaggaactgaggaagaagttatggcagaagaaagtactgatggagaggtagagactcaggtatacaaccaggattctcaagattccattggagaaggagttacccagggagattatacacctatggaagacagtgaagaaacctctcagtctctacaaatagatcttgggccacttcaatcagatcagcagacgacaacttcatcccaggatggtcaaggcaaaggagatgatgtcattgtaattgacagtgatgatgaagaagaggatgatgatgaaaatgatggagaacatgaggattatgaagaggatgaggaagatgatgatgatgatgaagatgacacagggatgggagatgagggtgaagatagtaatgaaggaactggtagtgccgatggcaatgatggttatgaagctgatgatgctgagggtggtgatgggactgatccaggtacagaaacagaagaaagtatgggtggaggtgaaggtaatcacagagctgctgattctcaaaacagtggtgaaggaaatacaggtgctgcagaatcttctttttctcaggaggtttctagagaacaacagccatcatcagcatctgaaagacaggcccctcgagcacctcagtcaccgagacgcccaccacatccacttcccccaagactgaccattcatgccccacctcaggagttgggaccaccagttcagagaattcagatgacccgaaggcagtctgtaggacgtggccttcagttgactccaggaataggtggcatgcaacagcatttttttgatgatgaagacagaacagttccaagtactccaactcttgtggtgccacatcgtactgatggatttgctgaagcaattcattcgccgcaggttgctggtgtccctagattccggtttgggccacctgaagatatgccacaaacaagttctagtcactctgatcttggccagcttgcttctcaaggaggtttaggaatgtatgaaacacccctgttcctagctcatgaagaagagtcaggtggccgaagtgttcccactactccactacaagtagcagccccagtgactgtatttactgagagcaccacctctgatgcttcggaacatgcctctcaatctgttccaatggtgactacatccactggcactttatctacaacaaatgaaacagcaacaggtgatgatggagatgaagtatttgtggaggcagaatctgaaggtattagttcagaagcaggcctagaaattgatagccagcaggaagaagagccggttcaagcatctgatgagtcagatctcccctccaccagccaggatcctccttctagctcatctgtagatactagtagtagtcaaccaaagcctttcagacgagtaagacttcagacaacattgagacaaggtgtccgtggtcgtcagtttaacagacagagaggtgtgagccatgcaatgggagggagaggaggaataaacagaggaaatattaattaaatggtctgtaaacaataacaactgtgaataagattatcaaatctgttttagtgtaatgattgtcaagtttaaaaacatttttatatataaactggtatactcatgtcaatattctttattaataaaatgtttttcagtgtc

SEQ ID NO: 369606 - DNA, 8547 bp, Homo sapiens
  misc_feature (4006)..(4006): n is a, c, g, or t
  misc_feature (4051)..(4051): n is a, c, g, or t
  misc_feature (4424)..(4424): n is a, c, g, or t
  misc_feature (4450)..(4450): n is a, c, g, or t
gcccgcaaaaaaaatctatgtgttcctaacagtgctagatacttgggatatagtgatatagggaggaaagaattgagcaacaataccaaacaaaaaatttctactccaagacctcaggttatgggtaagacagatgtaataaatagataataaaataggcaagtagacaatttgcattcactgtgattagtgcctatctgtgggatcatagcggtagaggacttgtcctagatttcagggagcagaccggcttcatggagaacctggagaacctatgtaagaattagtcagaggttttttcaaaatacatgtataatgtcttctagaagaggaagaatggctaagaaagcaagaagactagagtttggagtgagtggaactgatttaatttttacaaacaaatttttcagattgcattggtaagtataagtacctgagtcctgtgtggtggggatttaaaaagtagttcataaaatactcagcatgaaaaaaaataatgagagagacaaaaatggtatgatgaatggtaggcaaagatgcttggttaattacagtagaaattacaatcagttaactctcagttcagtcctgtgaattaggccgactttttctacagaatcactgagcttcagctcaaacttgagagtgcccttactgaactagaacaactccgcaaatcacgacagcatcaaatgcagcttgttgattccatagttcgtcagcgtgatatgtaccgtattttattgtcacaaacaacaggagttgccattccattacatgcttcaagcttagatgatgtttctcttgcatcaactccaaaacgtccaagtacatcacagactgtttccactcctgctccagtacctgttattgaatcaacagaggctatagaggctaaggctgcccttaaacagttgcaggaaatttttgagaactacaaaaaagaaaaagcagaaaatgaaaaaatacaaaatgagcagcttgagaaacttcaagaacaagttacagatttgcgatcacaaaataccaaaatttctacccagctagattttgcttctaaacgttatgaaatgctgcaagataatgttgaaggatatcgtcgagaaataacatcacttcatgagagaaatcagaaactcactgccacaactcaaaagcaagaacagattatcaatacgatgactcaagatttgagaggagcaaatgagaagctagctgtcgcagaagtaagagcagaaaatttgaagaaggaaaaggaaatgcttaaattgtctgaagttcgtctttctcagcaaagagagtctttgttagctgaacaaagggggcaaaacttactgctaactaatctgcaaacaattcagggaatactggagcgatctgaaacagaaaccaaacaaaggcttagtagccagatagaaaaactggaacatgagatctctcatctaaagaagaagttggaaaatgaggtggaacaaaggcatacacttactagaaatctagatgttcaacttttagatacaaagagacaactggatacagagacaaatcttcatcttaacacaaaagaactattaaaaaatgctcaaaaagaaattgccacattgaaacagcacctcagtaatatggaagtccaagttgcttctcagtcttcacagagaactggtaaaggtcagcctagcaacaaagaagatgtggatgatcttgtgagtcagctaagacagacagaagagcaggtgaatgacttaaaggagagactcaaaacaagtacgagcaatgtggaacaatatcaagcaatggttactagtttagaagaatccctgaacaaggaaaaacaggtgacagaagaagtgcgtaagaatattgaagttcgtttaaaagagtcagctgaatttcagacacagttggaaaagaagttgatggaagtagagaaggaaaaacaagaacttcaggatgataaaagaagagccatagagagcatggaacaacagttatctgaattgaagaaaacactttctagtgttcagaatgaagtacaagaagctcttcagagagcaagcacagctttaagtaatgagcagcaagccagacgtgactgtcaggaacaagctaaaatagctgtggaagctcagaataagtatgagagagaattgatgctgcatgctgctgatgttgaagctctacaagctgcgaaggagcaggtttcaaaaatggcatcagtccgtcagcatttggaagaaacaacacagaaagcagaatcacagttgttggagtgtaaagcatcttgggaggaaagagagagaatgttaaaggatgaagtttccaaatgtgtatgtcgctgtgaagatctggagaaacaaaacagattacttcatgatcagatcgaaaaattaagtgacaaggtcgttgcctctgtgaaggaaggtgtacaaggtccactgaatgtatctctcagtgaagaaggaaaatctcaagaacaaattttggaaattctcagatttatacgacgagaaaaagaaattgctgaaactaggtttgaggtggctcaggttgagagtctgcgttatcgacaaagggttgaacttttagaaagagagctgcaggaactgcaagatagtctaaatgctgaaagggagaaagtccaggtaggtatactaagctttaagaaagcacttgttaaatcaaaagagaagcactcatttatatctctaccatttaacgtaatgtaaaatttaacttgaagtaagcattcttctaaacttgtaaattcattaagcatttgttaaacactaatatagtatagtgcttaaaagtaaaggctctgtaaccaaactgcctggtttcagattctagcttcataccattagctgtggccttgggtacattgtttaacttccctgctcttagtttcttcatctgtaatatttggataataatgaggtttaattgagtttgtgcacatgaagcatttagaagcatgtctggtatgtagtgggtgcttaataaattccagctatcttaatttattatagttatggattatacgtgtggatagtcattctaggataaagtgatttaaactgctacagaatatctttctcacccaaggagcaaaaagtagtaaaaactaacaaccaaaggaaaagaagctgtggtagtgaaatggatgataataagacaagcttgactccttaccccacactaccacccaaagcttattgttgagttacttcattcttaggagctacagtaatatacccccacctctagaaggaaggaaattaagatcttaaaacatttatcttcttttaactgatgagtagtcaaaatgactgttaagaagaaaccattgaacagggaaaagtaaataatgaattttatgggatttatgtgttcagcaaaagctaaaggttccagaattatatcctgtttaattcaaatgtatctcaccatggaaataatagagcctccagttcaatagagttaatacttggaggaaaagggacagaatcagagtctctaacaaagactgcatattgtttcagtcttttccgcttcattttttattcctttgggctatagaaagtaaatactagaaaatgcccgcctacgaatgagttcatagggggaaaccaactcttaaatacaggaagaagagagtcaacaagtaacatagattatataaaaaataatataatgggccgggcatggtggctcatgcctgtaatcccagcactttgggaggccgaggcgggtggatcacgaggttaggagattgagaccatcctggctaacacggtgaaaccccgtctctactaaaaatacaaaaaaattagctgggcatggtggtggcaggcacctgtagtcccagctactcgggaggctgaggcaggagaacggcgtaaatccgggaggcggagcttgcagtgagccgagatcacaccactggactccagtctgggcgacagagcgagactccgtctcaaaaaaaaaaaaaaattataatagnaatgtaatgtctgtctaagcatgaacagtgtagcatggcaaccangaaatatgctatagctttaaaaacagtgggggaagaaagtaataccaagtgcagaagatggataattataacctatgagaaggaaaaaattcttcacagataattcagtaaaatttctcatggccaaagtgatgaaacaatggatcaaaatgagagatttctgaacaagagggaataaactgaggattagaataacattttagaactaataaatttagtgcagcaaggaaaaaaagatacagaaaggtaaatagagatttggattaatgtttttacctaatgttaatactttgttggtgggatttgtagcatcttttcacttttgtctttgtaattcttgtatttgtttaaagtctgcagttcgcatgcctcncagaaaagtaaacgtgaactttcaanaattttagttctaaaagttgaaacttaaatcctctttattttgtcatagggaggatttgagctcataggaacaggtagactttcaactattgttagatgttggtatgtatatttatttgaaatgtttaggtaactgcaaaaacaatggctcagcatgaagaactgatgaagaaaactgaaacaatgaatgtagttatggagaccaataaaatgctaagagaagagaaggagagactagaacaggatctacagcaaatgcaagcaaaggtgaggaaactggagttagatattttacccttacaagaagcaaatgctgagctgagtgagaaaagcggtatgttgcaggcagagaagaagctcttagaagaggatgtcaaacgttggaaagcacgtaaccagcatctagtaagtcaacagaaagatccagatacagaagaatatcggaagctcctttctgaaaaggaagttcatactaagcgtattcaacaattgacagaagaaattggtagacttaaagctgaaattgcaagatcaaatgcatctttgactaacaaccagaacttaattcagagtctgaaggaagatctaaataaagtaagaactgaaaaggaaaccatccagaaggacttagatgccaaaataattgatatccaagaaaaagtcaaaactattactcaagttaagaaaattggacgtaggtacaagactcaatatgaagaacttaaagcacaacaggataaggttatggagacatcggctcagtcctctggagaccatcaggagcagcatgtttcagtccaggaaatgcaggaactcaaagaaacgctcaaccaagctgaaacaaaatcaaaatcacttgaaagtcaagtagagaatctgcagaagacattatctgaaaaagagacagaagcaagaaatctccaggaacagactgtgcaacttcagtctgaactttcacgacttcgtcaggatcttcaagatagaaccacacaggaggagcagctccgacaacagataactgaaaaggaagaaaaaaccagaaaggctattgtagcagcaaagtcaaaaattgcacacttagctggtgtaaaagatcagctaactaaagaaaatgaggagcttaaacaaaggaatggagccttagatcagcagaaagatgaattggatgttcgcattactgcgctaaagtcccaatatgaaggtcgaattagtcgcttggaaagagaactcagggagcatcaagagagacaccttgagcagagagatgagcctcaagaaccttctaataaggtccctgaacagcagagacagatcacattgaaaacaactccagcttctggtgaaagaggaattgccagcacatcagacccaccaacagccaatatcaagccaactcctgttgtgtctactccaagtaaagtgacagctgcagctatggctggaaataagtcaacacccagggctagtatccgcccaatggttacacctgcaactgttacaaatcccactactaccccaacagctacagtgatgcccactacacaagtggaatcacaggaagctatgcagtcagaagggcctgtggaacatgttccagtttttggaagcacaagtggatccgttcgttctactagtcctaatgtccagccttctatctctcaacctattttaactgttcagcaacaaacacaggctacagcttttgtgcaacccactcaacagagtcatcctcagattgagcctgccaatcaagagttatcttcaaacatagtagaggttgttcagagttcaccagttgagcggccttctacttccacagcagtatttggcacagtttcggctacccccagttcttctttgccaaagcgtacacgtgaagaggaagaggatagcaccatagaagcatcagaccaagtctctgatgatacagtggaaatgcctcttccaaagaagttgaaaagtgtcacacctgtaggaactgaggaagaagttatggcagaagaaagtactgatggagaggtagagactcaggtatacaaccaggattctcaagattccattggagaaggagttacccagggagattatacacctatggaagacagtgaagaaacctctcagtctctacaaatagatcttgggccacttcaatcagatcagcagacgacaacttcatcccaggatggtcaaggcaaaggagatgatgtcattgtaattgacagtgatgatgaagaagaggatgatgatgaaaatgatggagaacatgaggattatgaagaggatgaggaagatgatgatgatgatgaagatgacacagggatgggagatgagggtgaagatagtaatgaaggaactggtagtgccgatggcaatgatggttatgaagctgatgatgctgagggtggtgatgggactgatccaggtacagaaacagaagaaagtatgggtggaggtgaaggtaatcacagagctgctgattctcaaaacagtggtgaaggaaatacaggtgctgcagaatcttctttttctcaggaggtttctagagaacaacagccatcatcagcatctgaaagacaggcccctcgagcacctcagtcaccgagacgcccaccacatccacttcccccaagactgaccattcatgccccacctcaggagttgggaccaccagttcagagaattcagatgacccgaaggcagtctgtaggacgtggccttcagttgactccaggaataggtggcatgcaacagcatttttttgatgatgaagacagaacagttccaagtactccaactcttgtggtgccacatcgtactgatggatttgctgaagcaattcattcgccgcaggttgctggtgtccctagattccggtttgggccacctgaagatatgccacaaacaagttctagtcactctgatcttggccagcttgcttctcaaggaggtttaggaatgtatgaaacacccctgttcctagctcatgaagaagagtcaggtggccgaagtgttcccactactccactacaagtagcagccccagtgactgtatttactgagagcaccacctctgatgcttcggaacatgcctctcaatctgttccaatggtgactacatccactggcactttatctacaacaaatgaaacagcaacaggtgatgatggagatgaagtatttgtggaggcagaatctgaaggtattagttcagaagcaggcctagaaattgatagccagcaggaagaagagccggttcaagcatctgatgagtcagatctcccctccaccagccaggatcctccttctagctcatctgtagatactagtagtagtcaaccaaagcctttcagacgagtaagacttcagacaacattgagacaaggtgtccgtggtcgtcagtttaacagacagagaggtgtgagccatgcaatgggagggagaggaggaataaacagaggaaatattaattaaatggtctgtaaacaataacaactgtgaataagattatcaaatctgttttagtgtaatgattgtcaagtttaaaaacatttttatatataaactggtatactcatgtcaatattctttattaataaaatgtttttcagtgtcaaaatttattattcatttcttcattagttgactcctcctttgctcatcagtctaaggacagttgtaccagactttggataaggtctgcccagaacgagtagtaattgctcttgctgttctactaggcacatcaatgttatagtattgatctaaatggaagagaaaacatttttttagttaaaaagaaaacaatgcccaaactaaaaaataacttatgttgactattatgctcaaagacaatgtttatcattttaatagagatgtttttactaattaatttgaactttataacaaaaagaaaaacaattgcctagacttttcagcttttttgatgtttcaaaagattgacatttcaccatctttttgtaaaatcaggttcagctctcctttatgaagtaaacattaaagagtaaccaagtttgaaaaataatttacttggggttattccttttaaaaaatacatgccaatgtcattcatattatga

SEQ ID NO: 369607 - DNA, 9263 bp, Homo sapiens
  misc_feature (5441)..(5441): n is a, c, g, or t
  misc_feature (5486)..(5486): n is a, c, g, or t
  misc_feature (5859)..(5859): n is a, c, g, or t
  misc_feature (5885)..(5885): n is a, c, g, or t
gcgcaagaggatcagggatagcctctgagctcgggttcccagggttcgtagcttccaacggctgcgcgcgcacttcggtcgcgggcggtgaggtgctgttgctgaaacgctgccgctgagggtggactcgatttcccagggtcccgccgcgggagtctccggcgggcgggcgcgcgcgagccaccgagcgaggtgatagaggcggcggcccaggcgtctgggtcctgctggtcttcgcctttcttctccgcttctaccccgtcggccgctgccactggggtccctggccccaccgacatggcggcggtgttgcagcaagtcctggagcgcacggagctgaacaagctgcccaagtctgtccagaacaaacttgaaaagttccttgctgatcagcaatccgagatcgatggcctgaaggggcggcatgagaaatttaaggtggagagcgaacaacagtattttgaaatagaaaagaggttgtcccacagtcaggagagacttgtgaatgaaacccgagagtgtcaaagcttgcggcttgagctagagaaactcaacaatcaactgaaggcactaactgagaaaaacaaagaacttgaaattgctcaggatcgcaatattgccattcagagccaatttacaagaacaaaggaagaattagaagctgagaaaagagacttaattagaaccaatgagagactatctcaagaacttgaatacttaacagaggatgttaaacgtctgaatgaaaaacttaaagaaagcaatacaacaaagggtgaacttcagttaaaattggatgaacttcaagcttctgatgtttctgttaagtatcgagaaaaacgcttggagcaagaaaaggaattgctacatagtcagaatacatggctgaatacagagttgaaaaccaaaactgatgaacttctggctcttggaagagaaaaagggaatgagattctagagcttaaatgtaatcttgaaaataaaaaagaagaggtttctagactggaagaacaaatgaatggcttaaaaacatcaaatgaacatcttcaaaagcatgtggaggatctgttgaccaaattaaaagaggccaaggaacaacaggccagtatggaagagaaattccacaatgaattaaatgcccacataaaactttctaatttgtacaagagtgccgctgatgactcagaagcaaagagcaatgaactaacccgggcagtagaggaactacacaaacttttgaaagaagctggtgaagccaacaaagcaatacaagatcatcttctagaggtggagcaatccaaagatcaaatggaaaaagaaatgcttgagaaaatagggagattggagaaggaattagagaatgcaaatgaccttctttctgccacaaaacgtaaaggagccatattgtctgaagaagagcttgccgccatgtctcctactgcagcagctgtagctaagatagtgaaacctgggatgaaactaactgagctctataatgcttatgtggaaactcaggatcagttgcttttggagaaactagagaacaaaagaattaataagtacctagatgaaatagtgaaagaagtggaagccaaagcaccaattttgaaacgccagcgtgaggaatatgaacgtgcacagaaagctgtagcaagtttatctgttaagcttgaacaagctatgaaggagattcagcgattgcaggaggacactgataaagccaacaagcaatcatctgtacttgagagagataatcgaagaatggaaatacaagtaaaagatctttcacaacagattagagtgcttttgatggaacttgaagaagcaaggggtaaccacgtaattcgtgatgaggaagtaagctctgctgatataagtagttcatctgaggtaatatcacagcatctagtatcttacagaaatattgaagagcttcaacaacaaaatcaacgtctcttagtggcccttagagagcttggggaaaccagagaaagagaagaacaagaaacaacttcatccaaaatcactgagcttcagctcaaacttgagagtgcccttactgaactagaacaactccgcaaatcacgacagcatcaaatgcagcttgttgattccatagttcgtcagcgtgatatgtaccgtattttattgtcacaaacaacaggagttgccattccattacatgcttcaagcttagatgatgtttctcttgcatcaactccaaaacgtccaagtacatcacagactgtttccactcctgctccagtacctgttattgaatcaacagaggctatagaggctaaggctgcccttaaacagttgcaggaaatttttgagaactacaaaaaagaaaaagcagaaaatgaaaaaatacaaaatgagcagcttgagaaacttcaagaacaagttacagatttgcgatcacaaaataccaaaatttctacccagctagattttgcttctaaacgttacttgtagaattacttttttcataccagttatgaaatgctgcaagataatgttgaaggatatcgtcgagaaataacatcacttcatgagagaaatcagaaactcactgccacaactcaaaagcaagaacagattatcaatacgatgactcaagatttgagaggagcaaatgagaagctagctgtcgcagaagtaagagcagaaaatttgaagaaggaaaaggaaatgcttaaattgtctgaagttcgtctttctcagcaaagagagtctttgttagctgaacaaagggggcaaaacttactgctaactaatctgcaaacaattcagggaatactggagcgatctgaaacagaaaccaaacaaaggcttagtagccagatagaaaaactggaacatgagatctctcatctaaagaagaagttggaaaatgaggtggaacaaaggcatacacttactagaaatctagatgttcaacttttagatacaaagagacaactggatacagagacaaatcttcatcttaacacaaaagaactattaaaaaatgctcaaaaagaaattgccacattgaaacagcacctcagtaatatggaagtccaagttgcttctcagtcttcacagagaactggtaaaggtcagcctagcaacaaagaagatgtggatgatcttgtgagtcagctaagacagacagaagagcaggtgaatgacttaaaggagagactcaaaacaagtacgagcaatgtggaacaatatcaagcaatggttactagtttagaagaatccctgaacaaggaaaaacaggtgacagaagaagtgcgtaagaatattgaagttcgtttaaaagagtcagctgaatttcagacacagttggaaaagaagttgatggaagtagagaaggaaaaacaagaacttcaggatgataaaagaagagccatagagagcatggaacaacagttatctgaattgaagaaaacactttctagtgttcagaatgaagtacaagaagctcttcagagagcaagcacagctttaagtaatgagcagcaagccagacgtgactgtcaggaacaagctaaaatagctgtggaagctcagaataagtatgagagagaattgatgctgcatgctgctgatgttgaagctctacaagctgcgaaggagcaggtttcaaaaatggcatcagtccgtcagcatttggaagaaacaacacagaaagcagaatcacagttgttggagtgtaaagcatcttgggaggaaagagagagaatgttaaaggatgaagtttccaaatgtgtatgtcgctgtgaagatctggagaaacaaaacagattacttcatgatcagatcgaaaaattaagtgacaaggtcgttgcctctgtgaaggaaggtgtacaaggtccactgaatgtatctctcagtgaagaaggaaaatctcaagaacaaattttggaaattctcagatttatacgacgagaaaaagaaattgctgaaactaggtttgaggtggctcaggttgagagtctgcgttatcgacaaagggttgaacttttagaaagagagctgcaggaactgcaagatagtctaaatgctgaaagggagaaagtccaggtaggtatactaagctttaagaaagcacttgttaaatcaaaagagaagcactcatttatatctctaccatttaacgtaatgtaaaatttaacttgaagtaagcattcttctaaacttgtaaattcattaagcatttgttaaacactaatatagtatagtgcttaaaagtaaaggctctgtaaccaaactgcctggtttcagattctagcttcataccattagctgtggccttgggtacattgtttaacttccctgctcttagtttcttcatctgtaatatttggataataatgaggtttaattgagtttgtgcacatgaagcatttagaagcatgtctggtatgtagtgggtgcttaataaattccagctatcttaatttattatagttatggattatacgtgtggatagtcattctaggataaagtgatttaaactgctacagaatatctttctcacccaaggagcaaaaagtagtaaaaactaacaaccaaaggaaaagaagctgtggtagtgaaatggatgataataagacaagcttgactccttaccccacactaccacccaaagcttattgttgagttacttcattcttaggagctacagtaatatacccccacctctagaaggaaggaaattaagatcttaaaacatttatcttcttttaactgatgagtagtcaaaatgactgttaagaagaaaccattgaacagggaaaagtaaataatgaattttatgggatttatgtgttcagcaaaagctaaaggttccagaattatatcctgtttaattcaaatgtatctcaccatggaaataatagagcctccagttcaatagagttaatacttggaggaaaagggacagaatcagagtctctaacaaagactgcatattgtttcagtcttttccgcttcattttttattcctttgggctatagaaagtaaatactagaaaatgcccgcctacgaatgagttcatagggggaaaccaactcttaaatacaggaagaagagagtcaacaagtaacatagattatataaaaaataatataatgggccgggcatggtggctcatgcctgtaatcccagcactttgggaggccgaggcgggtggatcacgaggttaggagattgagaccatcctggctaacacggtgaaaccccgtctctactaaaaatacaaaaaaattagctgggcatggtggtggcaggcacctgtagtcccagctactcgggaggctgaggcaggagaacggcgtaaatccgggaggcggagcttgcagtgagccgagatcacaccactggactccagtctgggcgacagagcgagactccgtctcaaaaaaaaaaaaaaattataatagnaatgtaatgtctgtctaagcatgaacagtgtagcatggcaaccangaaatatgctatagctttaaaaacagtgggggaagaaagtaataccaagtgcagaagatggataattataacctatgagaaggaaaaaattcttcacagataattcagtaaaatttctcatggccaaagtgatgaaacaatggatcaaaatgagagatttctgaacaagagggaataaactgaggattagaataacattttagaactaataaatttagtgcagcaaggaaaaaaagatacagaaaggtaaatagagatttggattaatgtttttacctaatgttaatactttgttggtgggatttgtagcatcttttcacttttgtctttgtaattcttgtatttgtttaaagtctgcagttcgcatgcctcncagaaaagtaaacgtgaactttcaanaattttagttctaaaagttgaaacttaaatcctctttattttgtcatagggaggatttgagctcataggaacaggtagactttcaactattgttagatgttggtatgtatatttatttgaaatgtttaggtaactgcaaaaacaatggctcagcatgaagaactgatgaagaaaactgaaacaatgaatgtagttatggagaccaataaaatgctaagagaagagaaggagagactagaacaggatctacagcaaatgcaagcaaaggtgaggaaactggagttagatattttacccttacaagaagcaaatgctgagctgagtgagaaaagcggtatgttgcaggcagagaagaagctcttagaagaggatgtcaaacgttggaaagcacgtaaccagcatctagtaagtcaacagaaagatccagatacagaagaatatcggaagctcctttctgaaaaggaagttcatactaagcgtattcaacaattgacagaagaaattggtagacttaaagctgaaattgcaagatcaaatgcatctttgactaacaaccagaacttaattcagagtctgaaggaagatctaaataaagtaagaactgaaaaggaaaccatccagaaggacttagatgccaaaataattgatatccaagaaaaagtcaaaactattactcaagttaagaaaattggacgtaggtacaagactcaatatgaagaacttaaagcacaacaggataaggttatggagacatcggctcagtcctctggagaccatcaggagcagcatgtttcagtccaggaaatgcaggaactcaaagaaacgctcaaccaagctgaaacaaaatcaaaatcacttgaaagtcaagtagagaatctgcagaagacattatctgaaaaagagacagaagcaagaaatctccaggaacagactgtgcaacttcagtctgaactttcacgacttcgtcaggatcttcaagatagaaccacacaggaggagcagctccgacaacagataactgaaaaggaagaaaaaaccagaaaggctattgtagcagcaaagtcaaaaattgcacacttagctggtgtaaaagatcagctaactaaagaaaatgaggagcttaaacaaaggaatggagccttagatcagcagaaagatgaattggatgttcgcattactgcgctaaagtcccaatatgaaggtcgaattagtcgcttggaaagagaactcagggagcatcaagagagacaccttgagcagagagatgagcctcaagaaccttctaataaggtccctgaacagcagagacagatcacattgaaaacaactccagcttctggtgaaagaggaattgccagcacatcagacccaccaacagccaatatcaagccaactcctgttgtgtctactccaagtaaagtgacagctgcagctatggctggaaataagtcaacacccagggctagtatccgcccaatggttacacctgcaactgttacaaatcccactactaccccaacagctacagtgatgcccactacacaagtggaatcacaggaagctatgcagtcagaagggcctgtggaacatgttccagtttttggaagcacaagtggatccgttcgttctactagtcctaatgtccagccttctatctctcaacctattttaactgttcagcaacaaacacaggctacagcttttgtgcaacccactcaacagagtcatcctcagattgagcctgccaatcaagagttatcttcaaacatagtagaggttgttcagagttcaccagttgagcggccttctacttccacagcagtatttggcacagtttcggctacccccagttcttctttgccaaagcgtacacgtgaagaggaagaggatagcaccatagaagcatcagaccaagtctctgatgatacagtggaaatgcctcttccaaagaagttgaaaagtgtcacacctgtaggaactgaggaagaagttatggcagaagaaagtactgatggagaggtagagactcaggtatacaaccaggattctcaagattccattggagaaggagttacccagggagattatacacctatggaagacagtgaagaaacctctcagtctctacaaatagatcttgggccacttcaatcagatcagcagacgacaacttcatcccaggatggtcaaggcaaaggagatgatgtcattgtaattgacagtgatgatgaagaagaggatgatgatgaaaatgatggagaacatgaggattatgaagaggatgaggaagatgatgatgatgatgaagatgacacagggatgggagatgagggtgaagatagtaatgaaggaactggtagtgccgatggcaatgatggttatgaagctgatgatgctgagggtggtgatgggactgatccaggtacagaaacagaagaaagtatgggtggaggtgaaggtaatcacagagctgctgattctcaaaacagtggtgaaggaaatacaggtgctgcagaatcttctttttctcaggaggtttctagagaacaacagccatcatcagcatctgaaagacaggcccctcgagcacctcagtcaccgagacgcccaccacatccacttcccccaagactgaccattcatgccccacctcaggagttgggaccaccagttcagagaattcagatgacccgaaggcagtctgtaggacgtggccttcagttgactccaggaataggtggcatgcaacagcatttttttgatgatgaagacagaacagttccaagtactccaactcttgtggtgccacatcgtactgatggatttgctgaagcaattcattcgccgcaggttgctggtgtccctagattccggtttgggccacctgaagatatgccacaaacaagttctagtcactctgatcttggccagcttgcttctcaaggaggtaaatagttaaacctttagatcccctgaatttgtatgtatttggtaataaactattaagatgtgatttaaggggggaaaaagagcaaatatgaatatttttaaaattgatattgtttgctaatttatttttttaaatgctgtagtatacttattaagcactgccttacatcttatctttccaacaaagttctaatttctttgagcataaggattagcttttacattagtatctcttctggctcctggtgtaatgtcatacacgtagtttaagtattcaggaatatgtgttgaaccaataaatataggtactactagccattttaaagttgttggaaggaatgcagcatgttttctgtttacagcttgacacttgtaacatttctaattaaatgtataaggctagttatattttttgtattaacattactt

SEQ ID NO: 369608 - DNA, 7249 bp, Homo sapiens
  misc_feature (5441)..(5441): n is a, c, g, or t
  misc_feature (5486)..(5486): n is a, c, g, or t
  misc_feature (5859)..(5859): n is a, c, g, or t
  misc_feature (5885)..(5885): n is a, c, g, or t
gcgcaagaggatcagggatagcctctgagctcgggttcccagggttcgtagcttccaacggctgcgcgcgcacttcggtcgcgggcggtgaggtgctgttgctgaaacgctgccgctgagggtggactcgatttcccagggtcccgccgcgggagtctccggcgggcgggcgcgcgcgagccaccgagcgaggtgatagaggcggcggcccaggcgtctgggtcctgctggtcttcgcctttcttctccgcttctaccccgtcggccgctgccactggggtccctggccccaccgacatggcggcggtgttgcagcaagtcctggagcgcacggagctgaacaagctgcccaagtctgtccagaacaaacttgaaaagttccttgctgatcagcaatccgagatcgatggcctgaaggggcggcatgagaaatttaaggtggagagcgaacaacagtattttgaaatagaaaagaggttgtcccacagtcaggagagacttgtgaatgaaacccgagagtgtcaaagcttgcggcttgagctagagaaactcaacaatcaactgaaggcactaactgagaaaaacaaagaacttgaaattgctcaggatcgcaatattgccattcagagccaatttacaagaacaaaggaagaattagaagctgagaaaagagacttaattagaaccaatgagagactatctcaagaacttgaatacttaacagaggatgttaaacgtctgaatgaaaaacttaaagaaagcaatacaacaaagggtgaacttcagttaaaattggatgaacttcaagcttctgatgtttctgttaagtatcgagaaaaacgcttggagcaagaaaaggaattgctacatagtcagaatacatggctgaatacagagttgaaaaccaaaactgatgaacttctggctcttggaagagaaaaagggaatgagattctagagcttaaatgtaatcttgaaaataaaaaagaagaggtttctagactggaagaacaaatgaatggcttaaaaacatcaaatgaacatcttcaaaagcatgtggaggatctgttgaccaaattaaaagaggccaaggaacaacaggccagtatggaagagaaattccacaatgaattaaatgcccacataaaactttctaatttgtacaagagtgccgctgatgactcagaagcaaagagcaatgaactaacccgggcagtagaggaactacacaaacttttgaaagaagctggtgaagccaacaaagcaatacaagatcatcttctagaggtggagcaatccaaagatcaaatggaaaaagaaatgcttgagaaaatagggagattggagaaggaattagagaatgcaaatgaccttctttctgccacaaaacgtaaaggagccatattgtctgaagaagagcttgccgccatgtctcctactgcagcagctgtagctaagatagtgaaacctgggatgaaactaactgagctctataatgcttatgtggaaactcaggatcagttgcttttggagaaactagagaacaaaagaattaataagtacctagatgaaatagtgaaagaagtggaagccaaagcaccaattttgaaacgccagcgtgaggaatatgaacgtgcacagaaagctgtagcaagtttatctgttaagcttgaacaagctatgaaggagattcagcgattgcaggaggacactgataaagccaacaagcaatcatctgtacttgagagagataatcgaagaatggaaatacaagtaaaagatctttcacaacagattagagtgcttttgatggaacttgaagaagcaaggggtaaccacgtaattcgtgatgaggaagtaagctctgctgatataagtagttcatctgaggtaatatcacagcatctagtatcttacagaaatattgaagagcttcaacaacaaaatcaacgtctcttagtggcccttagagagcttggggaaaccagagaaagagaagaacaagaaacaacttcatccaaaatcactgagcttcagctcaaacttgagagtgcccttactgaactagaacaactccgcaaatcacgacagcatcaaatgcagcttgttgattccatagttcgtcagcgtgatatgtaccgtattttattgtcacaaacaacaggagttgccattccattacatgcttcaagcttagatgatgtttctcttgcatcaactccaaaacgtccaagtacatcacagactgtttccactcctgctccagtacctgttattgaatcaacagaggctatagaggctaaggctgcccttaaacagttgcaggaaatttttgagaactacaaaaaagaaaaagcagaaaatgaaaaaatacaaaatgagcagcttgagaaacttcaagaacaagttacagatttgcgatcacaaaataccaaaatttctacccagctagattttgcttctaaacgttacttgtagaattacttttttcataccagttatgaaatgctgcaagataatgttgaaggatatcgtcgagaaataacatcacttcatgagagaaatcagaaactcactgccacaactcaaaagcaagaacagattatcaatacgatgactcaagatttgagaggagcaaatgagaagctagctgtcgcagaagtaagagcagaaaatttgaagaaggaaaaggaaatgcttaaattgtctgaagttcgtctttctcagcaaagagagtctttgttagctgaacaaagggggcaaaacttactgctaactaatctgcaaacaattcagggaatactggagcgatctgaaacagaaaccaaacaaaggcttagtagccagatagaaaaactggaacatgagatctctcatctaaagaagaagttggaaaatgaggtggaacaaaggcatacacttactagaaatctagatgttcaacttttagatacaaagagacaactggatacagagacaaatcttcatcttaacacaaaagaactattaaaaaatgctcaaaaagaaattgccacattgaaacagcacctcagtaatatggaagtccaagttgcttctcagtcttcacagagaactggtaaaggtcagcctagcaacaaagaagatgtggatgatcttgtgagtcagctaagacagacagaagagcaggtgaatgacttaaaggagagactcaaaacaagtacgagcaatgtggaacaatatcaagcaatggttactagtttagaagaatccctgaacaaggaaaaacaggtgacagaagaagtgcgtaagaatattgaagttcgtttaaaagagtcagctgaatttcagacacagttggaaaagaagttgatggaagtagagaaggaaaaacaagaacttcaggatgataaaagaagagccatagagagcatggaacaacagttatctgaattgaagaaaacactttctagtgttcagaatgaagtacaagaagctcttcagagagcaagcacagctttaagtaatgagcagcaagccagacgtgactgtcaggaacaagctaaaatagctgtggaagctcagaataagtatgagagagaattgatgctgcatgctgctgatgttgaagctctacaagctgcgaaggagcaggtttcaaaaatggcatcagtccgtcagcatttggaagaaacaacacagaaagcagaatcacagttgttggagtgtaaagcatcttgggaggaaagagagagaatgttaaaggatgaagtttccaaatgtgtatgtcgctgtgaagatctggagaaacaaaacagattacttcatgatcagatcgaaaaattaagtgacaaggtcgttgcctctgtgaaggaaggtgtacaaggtccactgaatgtatctctcagtgaagaaggaaaatctcaagaacaaattttggaaattctcagatttatacgacgagaaaaagaaattgctgaaactaggtttgaggtggctcaggttgagagtctgcgttatcgacaaagggttgaacttttagaaagagagctgcaggaactgcaagatagtctaaatgctgaaagggagaaagtccaggtaggtatactaagctttaagaaagcacttgttaaatcaaaagagaagcactcatttatatctctaccatttaacgtaatgtaaaatttaacttgaagtaagcattcttctaaacttgtaaattcattaagcatttgttaaacactaatatagtatagtgcttaaaagtaaaggctctgtaaccaaactgcctggtttcagattctagcttcataccattagctgtggccttgggtacattgtttaacttccctgctcttagtttcttcatctgtaatatttggataataatgaggtttaattgagtttgtgcacatgaagcatttagaagcatgtctggtatgtagtgggtgcttaataaattccagctatcttaatttattatagttatggattatacgtgtggatagtcattctaggataaagtgatttaaactgctacagaatatctttctcacccaaggagcaaaaagtagtaaaaactaacaaccaaaggaaaagaagctgtggtagtgaaatggatgataataagacaagcttgactccttaccccacactaccacccaaagcttattgttgagttacttcattcttaggagctacagtaatatacccccacctctagaaggaaggaaattaagatcttaaaacatttatcttcttttaactgatgagtagtcaaaatgactgttaagaagaaaccattgaacagggaaaagtaaataatgaattttatgggatttatgtgttcagcaaaagctaaaggttccagaattatatcctgtttaattcaaatgtatctcaccatggaaataatagagcctccagttcaatagagttaatacttggaggaaaagggacagaatcagagtctctaacaaagactgcatattgtttcagtcttttccgcttcattttttattcctttgggctatagaaagtaaatactagaaaatgcccgcctacgaatgagttcatagggggaaaccaactcttaaatacaggaagaagagagtcaacaagtaacatagattatataaaaaataatataatgggccgggcatggtggctcatgcctgtaatcccagcactttgggaggccgaggcgggtggatcacgaggttaggagattgagaccatcctggctaacacggtgaaaccccgtctctactaaaaatacaaaaaaattagctgggcatggtggtggcaggcacctgtagtcccagctactcgggaggctgaggcaggagaacggcgtaaatccgggaggcggagcttgcagtgagccgagatcacaccactggactccagtctgggcgacagagcgagactccgtctcaaaaaaaaaaaaaaattataatagnaatgtaatgtctgtctaagcatgaacagtgtagcatggcaaccangaaatatgctatagctttaaaaacagtgggggaagaaagtaataccaagtgcagaagatggataattataacctatgagaaggaaaaaattcttcacagataattcagtaaaatttctcatggccaaagtgatgaaacaatggatcaaaatgagagatttctgaacaagagggaataaactgaggattagaataacattttagaactaataaatttagtgcagcaaggaaaaaaagatacagaaaggtaaatagagatttggattaatgtttttacctaatgttaatactttgttggtgggatttgtagcatcttttcacttttgtctttgtaattcttgtatttgtttaaagtctgcagttcgcatgcctcncagaaaagtaaacgtgaactttcaanaattttagttctaaaagttgaaacttaaatcctctttattttgtcatagggaggatttgagctcataggaacaggtagactttcaactattgttagatgttggtatgtatatttatttgaaatgtttaggtaactgcaaaaacaatggctcagcatgaagaactgatgaagaaaactgaaacaatgaatgtagttatggagaccaataaaatgctaagagaagagaaggagagactagaacaggatctacagcaaatgcaagcaaaggtgaggaaactggagttagatattttacccttacaagaagcaaatgctgagctgagtgagaaaagcggtatgttgcaggcagagaagaagctcttagaagaggatgtcaaacgttggaaagcacgtaaccagcatctagtaagtcaacagaaagatccagatacagaagaatatcggaagctcctttctgaaaaggaagttcatactaagcgtattcaacaattgacagaagaaattggtagacttaaagctgaaattgcaagatcaaatgcatctttgactaacaaccagaacttaattcagagtctgaaggaagatctaaataaagtaagaactgaaaaggaaaccatccagaaggacttagatgccaaaataattgatatccaagaaaaagtcaaaactattactcaagttaagaaaattggacgtaggtacaagactcaatatgaagaacttaaagcacaacaggataaggttatggagacatcggctcagtcctctggagaccatcaggagcagcatgtttcagtccaggaaatgcaggaactcaaagaaacgctcaaccaagctgaaacaaaatcaaaatcacttgaaagtcaagtagagaatctgcagaagacattatctgaaaaagagacagaagcaagaaatctccaggaacagactgtgcaacttcagtctgaactttcacgacttcgtcaggatcttcaagatagaaccacacaggaggatcacttgagtccaggagtttgaggctgcagtgaagcatgatcatgcaccacactctaagtgggacgacagggtaagaccctgttgcccgcaaaaaaaatctatgtgttcctaacagtgctagatacttgggatatagtgatatagggaggaaagaattgagcaacaataccaaacaaaaaatttctactccaagacctcaggttatgggtaagacagatgtataaatagataataaaataggcaagtagacaatttgcattcactgtgattagtgctatctgtgggatcatagcggtagaggacttgtcctagatttcagggagcagaccggttcatggagaacctggagaacctatgtaagaatt

SEQ ID NO: 369609 - DNA, 6183 bp, Homo sapiens
  misc_feature (1642)..(1642): n is a, c, g, or t
  misc_feature (1687)..(1687): n is a, c, g, or t
  misc_feature (2060)..(2060): n is a, c, g, or t
  misc_feature (2086)..(2086): n is a, c, g, or t
tagcaggacctcgagttctcccatcaggtgacaaggtcgttgcctctgtgaaggaaggtgtacaaggtccactgaatgtatctctcagtgaagaaggaaaatctcaagaacaaattttggaaattctcagatttatacgacgagaaaaagaaattgctgaaactaggtttgaggtggctcaggttgagagtctgcgttatcgacaaagggttgaacttttagaaagagagctgcaggaactgcaagatagtctaaatgctgaaagggagaaagtccaggtaggtatactaagctttaagaaagcacttgttaaatcaaaagagaagcactcatttatatctctaccatttaacgtaatgtaaaatttaacttgaagtaagcattcttctaaacttgtaaattcattaagcatttgttaaacactaatatagtatagtgcttaaaagtaaaggctctgtaaccaaactgcctggtttcagattctagcttcataccattagctgtggccttgggtacattgtttaacttccctgctcttagtttcttcatctgtaatatttggataataatgaggtttaattgagtttgtgcacatgaagcatttagaagcatgtctggtatgtagtgggtgcttaataaattccagctatcttaatttattatagttatggattatacgtgtggatagtcattctaggataaagtgatttaaactgctacagaatatctttctcacccaaggagcaaaaagtagtaaaaactaacaaccaaaggaaaagaagctgtggtagtgaaatggatgataataagacaagcttgactccttaccccacactaccacccaaagcttattgttgagttacttcattcttaggagctacagtaatatacccccacctctagaaggaaggaaattaagatcttaaaacatttatcttcttttaactgatgagtagtcaaaatgactgttaagaagaaaccattgaacagggaaaagtaaataatgaattttatgggatttatgtgttcagcaaaagctaaaggttccagaattatatcctgtttaattcaaatgtatctcaccatggaaataatagagcctccagttcaatagagttaatacttggaggaaaagggacagaatcagagtctctaacaaagactgcatattgtttcagtcttttccgcttcattttttattcctttgggctatagaaagtaaatactagaaaatgcccgcctacgaatgagttcatagggggaaaccaactcttaaatacaggaagaagagagtcaacaagtaacatagattatataaaaaataatataatgggccgggcatggtggctcatgcctgtaatcccagcactttgggaggccgaggcgggtggatcacgaggttaggagattgagaccatcctggctaacacggtgaaaccccgtctctactaaaaatacaaaaaaattagctgggcatggtggtggcaggcacctgtagtcccagctactcgggaggctgaggcaggagaacggcgtaaatccgggaggcggagcttgcagtgagccgagatcacaccactggactccagtctgggcgacagagcgagactccgtctcaaaaaaaaaaaaaaattataatagnaatgtaatgtctgtctaagcatgaacagtgtagcatggcaaccangaaatatgctatagctttaaaaacagtgggggaagaaagtaataccaagtgcagaagatggataattataacctatgagaaggaaaaaattcttcacagataattcagtaaaatttctcatggccaaagtgatgaaacaatggatcaaaatgagagatttctgaacaagagggaataaactgaggattagaataacattttagaactaataaatttagtgcagcaaggaaaaaaagatacagaaaggtaaatagagatttggattaatgtttttacctaatgttaatactttgttggtgggatttgtagcatcttttcacttttgtctttgtaattcttgtatttgtttaaagtctgcagttcgcatgcctcncagaaaagtaaacgtgaactttcaanaattttagttctaaaagttgaaacttaaatcctctttattttgtcatagggaggatttgagctcataggaacaggtagactttcaactattgttagatgttggtatgtatatttatttgaaatgtttaggtaactgcaaaaacaatggctcagcatgaagaactgatgaagaaaactgaaacaatgaatgtagttatggagaccaataaaatgctaagagaagagaaggagagactagaacaggatctacagcaaatgcaagcaaaggtgaggaaactggagttagatattttacccttacaagaagcaaatgctgagctgagtgagaaaagcggtatgttgcaggcagagaagaagctcttagaagaggatgtcaaacgttggaaagcacgtaaccagcatctagtaagtcaacagaaagatccagatacagaagaatatcggaagctcctttctgaaaaggaagttcatactaagcgtattcaacaattgacagaagaaattggtagacttaaagctgaaattgcaagatcaaatgcatctttgactaacaaccagaacttaattcagagtctgaaggaagatctaaataaagtaagaactgaaaaggaaaccatccagaaggacttagatgccaaaataattgatatccaagaaaaagtcaaaactattactcaagttaagaaaattggacgtaggtacaagactcaatatgaagaacttaaagcacaacaggataaggttatggagacatcggctcagtcctctggagaccatcaggagcagcatgtttcagtccaggaaatgcaggaactcaaagaaacgctcaaccaagctgaaacaaaatcaaaatcacttgaaagtcaagtagagaatctgcagaagacattatctgaaaaagagacagaagcaagaaatctccaggaacagactgtgcaacttcagtctgaactttcacgacttcgtcaggatcttcaagatagaaccacacaggaggagcagctccgacaacagataactgaaaaggaagaaaaaaccagaaaggctattgtagcagcaaagtcaaaaattgcacacttagctggtgtaaaagatcagctaactaaagaaaatgaggagcttaaacaaaggaatggagccttagatcagcagaaagatgaattggatgttcgcattactgcgctaaagtcccaatatgaaggtcgaattagtcgcttggaaagagaactcagggagcatcaagagagacaccttgagcagagagatgagcctcaagaaccttctaataaggtccctgaacagcagagacagatcacattgaaaacaactccagcttctggtgaaagaggaattgccagcacatcagacccaccaacagccaatatcaagccaactcctgttgtgtctactccaagtaaagtgacagctgcagctatggctggaaataagtcaacacccagggctagtatccgcccaatggttacacctgcaactgttacaaatcccactactaccccaacagctacagtgatgcccactacacaagtggaatcacaggaagctatgcagtcagaagggcctgtggaacatgttccagtttttggaagcacaagtggatccgttcgttctactagtcctaatgtccagccttctatctctcaacctattttaactgttcagcaacaaacacaggctacagcttttgtgcaacccactcaacagagtcatcctcagattgagcctgccaatcaagagttatcttcaaacatagtagaggttgttcagagttcaccagttgagcggccttctacttccacagcagtatttggcacagtttcggctacccccagttcttctttgccaaagcgtacacgtgaagaggaagaggatagcaccatagaagcatcagaccaagtctctgatgatacagtggaaatgcctcttccaaagaagttgaaaagtgtcacacctgtaggaactgaggaagaagttatggcagaagaaagtactgatggagaggtagagactcaggtatacaaccaggattctcaagattccattggagaaggagttacccagggagattatacacctatggaagacagtgaagaaacctctcagtctctacaaatagatcttgggccacttcaatcagatcagcagacgacaacttcatcccaggatggtcaaggcaaaggagatgatgtcattgtaattgacagtgatgatgaagaagaggatgatgatgaaaatgatggagaacatgaggattatgaagaggatgaggaagatgatgatgatgatgaagatgacacagggatgggagatgagggtgaagatagtaatgaaggaactggtagtgccgatggcaatgatggttatgaagctgatgatgctgagggtggtgatgggactgatccaggtacagaaacagaagaaagtatgggtggaggtgaaggtaatcacagagctgctgattctcaaaacagtggtgaaggaaatacaggtgctgcagaatcttctttttctcaggaggtttctagagaacaacagccatcatcagcatctgaaagacaggcccctcgagcacctcagtcaccgagacgcccaccacatccacttcccccaagactgaccattcatgccccacctcaggagttgggaccaccagttcagagaattcagatgacccgaaggcagtctgtaggacgtggccttcagttgactccaggaataggtggcatgcaacagcatttttttgatgatgaagacagaacagttccaagtactccaactcttgtggtgccacatcgtactgatggatttgctgaagcaattcattcgccgcaggttgctggtgtccctagattccggtttgggccacctgaagatatgccacaaacaagttctagtcactctgatcttggccagcttgcttctcaaggaggtttaggaatgtatgaaacacccctgttcctagctcatgaagaagagtcaggtggccgaagtgttcccactactccactacaagtagcagccccagtgactgtatttactgagagcaccacctctgatgcttcggaacatgcctctcaatctgttccaatggtgactacatccactggcactttatctacaacaaatgaaacagcaacaggtgatgatggagatgaagtatttgtggaggcagaatctgaaggtattagttcagaagcaggcctagaaattgatagccagcaggaagaagagccggttcaagcatctgatgagtcagatctcccctccaccagccaggatcctccttctagctcatctgtagatactagtagtagtcaaccaaagcctttcagacgagtaagacttcagacaacattgagacaaggtgtccgtggtcgtcagtttaacagacagagaggtgtgagccatgcaatgggagggagaggaggaataaacagaggaaatattaattaaatggtctgtaaacaataacaactgtgaataagattatcaaatctgttttagtgtaatgattgtcaagtttaaaaacatttttatatataaactggtatactcatgtcaatattctttattaataaaatgtttttcagtgtcaaaatttattattcatttcttcattagttgactcctcctttgctcatcagtctaaggacagttgtaccagactttggataaggtctgcccagaacgagtagtaattgctcttgctgttctactaggcacatcaatgttatagtattgatctaaatggaagagaaaacatttttttagttaaaaagaaaacaatgcccaaactaaaaaataacttatgttgactattatgctcaaagacaatgtttatcattttaatagagatgtttttactaattaatttgaactttataacaaaaagaaaaacaattgcctagacttttcagcttttttgatgtttcaaaagattgacatttcaccatctttttgtaaaatcaggttcagctctcctttatgaagtaaacattaaagagtaaccaagtttgaaaaataatttacttggggttattccttttaaaaaatacatgccaatgtcattcatattatga

SEQ ID NO: 369610 - DNA, 1533 bp, Homo sapiens
tgtctgctgactatttgttggcagcgtaataagctgtatctgttgatatttggtgtttgtttcattgcctcatttcttaaagcaaatgtaattcctttatcttgacacgcagagaattcagatgacccgaaggcagtctgtaggacgtggccttcagttgactccaggaataggtggcatgcaacagcatttttttgatgatgaagacagaacagttccaagtactccaactcttgtggtgccacatcgtactgatggatttgctgaagcaattcattcgccgcaggttgctggtgtccctagattccggtttgggccacctgaagatatgccacaaacaagttctagtcactctgatcttggccagcttgcttctcaaggaggtttaggaatgtatgaaacacccctgttcctagctcatgaagaagagtcaggtggccgaagtgttcccactactccactacaagtagcagccccagtgactgtatttactgagagcaccacctctgatgcttcggaacatgcctctcaatctgttccaatggtgactacatccactggcactttatctacaacaaatgaaacagcaacaggtgatgatggagatgaagtatttgtggaggcagaatctgaaggtattagttcagaagcaggcctagaaattgatagccagcaggaagaagagccggttcaagcatctgatgagtcagatctcccctccaccagccaggatcctccttctagctcatctgtagatactagtagtagtcaaccaaagcctttcagacgagtaagacttcagacaacattgagacaaggtgtccgtggtcgtcagtttaacagacagagaggtgtgagccatgcaatgggagggagaggaggaataaacagaggaaatattaattaaatggtctgtaaacaataacaactgtgaataagattatcaaatctgttttagtgtaatgattgtcaagtttaaaaacatttttatatataaactggtatactcatgtcaatattctttattaataaaatgtttttcagtgtcaaaatttattattcatttcttcattagttgactcctcctttgctcatcagtctaaggacagttgtaccagactttggataaggtctgcccagaacgagtagtaattgctcttgctgttctactaggcacatcaatgttatagtattgatctaaatggaagagaaaacatttttttagttaaaaagaaaacaatgcccaaactaaaaaataacttatgttgactattatgctcaaagacaatgtttatcattttaatagagatgtttttactaattaatttgaactttataacaaaaagaaaaacaattgcctagacttttcagcttttttgatgtttcaaaagattgacatttcaccatctttttgtaaaatcaggttcagctctcctttatgaagtaaacattaaagagtaaccaagtttgaaaaataatttacttggggttattccttttaaaaaatacatgccaatgtcattcatattatga

SEQ ID NO: 369611 - DNA, 2793 bp, Homo sapiens
gcgcaagaggatcagggatagcctctgagctcgggttcccagggttcgtagcttccaacggctgcgcgcgcacttcggtcgcgggcggtgaggtgctgttgctgaaacgctgccgctgagggtggactcgatttcccagggtcccgccgcgggagtctccggcgggcgggcgcgcgcgagccaccgagcgaggtgatagaggcggcggcccaggcgtctgggtcctgctggtcttcgcctttcttctccgcttctaccccgtcggccgctgccactggggtccctggccccaccgacatggcggcggtgttgcagcaagtcctggagcgcacggagctgaacaagctgcccaagtctgtccagaacaaacttgaaaagttccttgctgatcagcaatccgagatcgatggcctgaaggggcggcatgagaaatttaaggtggagagcgaacaacagtattttgaaatagaaaagaggttgtcccacagtcaggagagacttgtgaatgaaacccgagagtgtcaaagcttgcggcttgagctagagaaactcaacaatcaactgaaggcactaactgagaaaaacaaagaacttgaaattgctcaggatcgcaatattgccattcagagccaatttacaagaacaaaggaagaattagaagctgagaaaagagacttaattagaaccaatgagagactatctcaagaacttgaatacttaacagaggatgttaaacgtctgaatgaaaaacttaaagaaagcaatacaacaaagggtgaacttcagttaaaattggatgaacttcaagcttctgatgtttctgttaagtatcgagaaaaacgcttggagcaagaaaaggaattgctacatagtcagaatacatggctgaatacagagttgaaaaccaaaactgatgaacttctggctcttggaagagaaaaagggaatgagattctagagcttaaatgtaatcttgaaaataaaaaagaagaggtttctagactggaagaacaaatgaatggcttaaaaacatcaaatgaacatcttcaaaagcatgtggaggatctgttgaccaaattaaaagaggccaaggaacaacaggccagtatggaagagaaattccacaatgaattaaatgcccacataaaactttctaatttgtacaagagtgccgctgatgactcagaagcaaagagcaatgaactaacccgggcagtagaggaactacacaaacttttgaaagaagctggtgaagccaacaaagcaatacaagatcatcttctagaggtggagcaatccaaagatcaaatggaaaaagaaatgcttgagaaaatagggagattggagaaggaattagagaatgcaaatgaccttctttctgccacaaaacgtaaaggagccatattgtctgaagaagagcttgccgccatgtctcctactgcagcagctgtagctaagatagtgaaacctgggatgaaactaactgagctctataatgcttatgtggaaactcaggatcagttgcttttggagaaactagagaacaaaagaattaataagtacctagatgaaatagtgaaagaagtggaagccaaagcaccaattttgaaacgccagcgtgaggaatatgaacgtgcacagaaagctgtagcaagtttatctgttaagcttgaacaagctatgaaggagattcagcgattgcaggaggacactgataaagccaacaagcaatcatctgtacttgagagagataatcgaagaatggaaatacaagtaaaagatctttcacaacagattagagtgcttttgatggaacttgaagaagcaaggggtaaccacgtaattcgtgatgaggaagtaagctctgctgatataagtagttcatctgaggtaatatcacagcatctagtatcttacagaaatattgaagagcttcaacaacaaaatcaacgtctcttagtggcccttagagagcttggggaaaccagagaaagagaagaacaagaaacaacttcatccaaaatcactgagcttcagctcaaacttgagagtgcccttactgaactagaacaactccgcaaatcacgacagcatcaaatgcagcttgttgattccatagttcgtcagcgtgatatgtaccgtattttattgtcacaaacaacaggagttgccattccattacatgcttcaagcttagatgatgtttctcttgcatcaactccaaaacgtccaagtacatcacagactgtttccactcctgctccagtacctgttattgaatcaacagaggctatagaggctaaggctgcccttaaacagttgcaggaaatttttgagaactacaaaaaagaaaaagcagaaaatgaaaaaatacaaaatgagcagcttgagaaacttcaagaacaagttacagatttgcgatcacaaaataccaaaatttctacccagctagattttgcttctaaacgttatgaaatgctgcaagataatgttgaaggatatcgtcgagaaataacatcacttcatgagagaaatcagaaactcactgccacaactcaaaagcaagaacagattatcaatacgatgactcaagatttgagaggagcaaatgagaagctagctgtcgcagaagtaagagcagaaaatttgaagaaggaaaaggaaatgcttaaattgtctgaagttcgtctttctcagcaaagagagtctttgttagctgaacaaagggggcaaaacttactgctaactaatctgcaaacaattcagggaaatgggaactgggtaccgagctgg

SEQ ID NO: 369612 - DNA, 533 bp, Homo sapiens
tgccacacaacttgtggttctgacaccaaattgatagttttgtttcacatcaaattggacacattgtgcattcattaagatgtgcccagtgcttttcaagggggccaggaaatcaccttttaattcttaatcaaaaatcatagtaagatgtttattttcttaatcttcaaaagccactgatttgactgactcgtccttctaacaaatctttcctgtgcactgttgtgggccagctgtcactctagggctgggcattcaatagtcgtgtggtccctgctgtccctgagtgttgttcgtgttgggagggggtagtcagtgtacgtacacggatacacaaacatgatggtttcaggttgcgataagtatcatggagaaaagaagactgggccacggggatggaggagctggctctttagatggtgggtgtggagctggccccagcatggactcctgggaacagcggaggagccccagggcaaccctgttgctctgccttatggtcctggtgggggaggtgggagtacactgggggc

SEQ ID NO: 369613 - DNA, 905 bp, Homo sapiens
gggtaggcgaacgcgaactgctgggctgcaggcgggcccttcaggacccggcagcgcgagagggcagccctggagggacccagctgcagggccaggcgccatgacctttcgtagtgggggcggggacgcgctgggaaaggccgcctgtcttgtgccagccgcctcacgcccccagtctcccattttgcagatgacctcgcgagaggtcacgccgcaagtcggcaaccgggcaggatttggaatccgcgtctgcctttttcccccaagagacccagaatcctggcagccggtttcaaagctgttgtacgtacaccatacctcggggttcagatttataggtgtttttttgaaattgaggcttgtttccgttcagttgttactcgttaggcatctgtcatataccaggcactgtccttggtgctggagacacagcaatgaggaagatagataaaaatctctcatctcctgggggaaccagactttgaacaaattagaaataaacgaaacaggtgatttcagatactgataagttactaaaaatgcgttaatggtgtcgggaatttcgcttgaactcctgggctcaagcgatcctccccacttggacttccaaagcactaggattataggcatgagccactgctccctggctatttatttatttttagagacaggatctcagtatgttgcccaggctagagtgcagtggctattcacaagtgcagtcatggttcactgcaacctctaactactgaccttaaaggatcctccagcctcagtctcctgagtacctgagatgacaggcattcaccaccatgcctggataattcttaatttttttgtagagatggggtctctctatgttgcccaggctggtcttgaatccctgggctcaagtgatcctccta

SEQ ID NO: 369614 - DNA, 2780 bp, Homo sapiens
gatttgctacctccctggagctccctgacccggacgctctctgggccaatatggcagcgcccagcaacaagacagagctggcctggagtccgcggctggccgcgtgagtaggtgattgtctgacaagcagaggcatgagctgggtccaggccaccctactggcccgaggcctctgtagggcctggggaggcacctgcggggccgccctcacaggaacctccatctctcaggtccctcgccggctccctcggggcctccactgcagcgcagctgcccatagctctgaacagtccctggttcccagcccaccggaaccccggcagaggcccaccaaggctctggtgccctttgaggacctgtttgggcaggcgcctggtggggaacgggacaaggcgagcttcctgcagacggtgcagaaatttgcggagcacagcgtgcgtaagcggggccacattgacttcatctacctggccctgcgcaagatgcgggagtatggtgtcgagcgggacctggctgtgtacaaccagctgctcaacatcttccccaaggaggtcttccggcctcgcaacatcatccagcgcatcttcgtccactaccctcggcagcaggagtgtgggattgctgtcctggagcagatggagaaccacggtgtgatgcccaacaaggagacggagttcctgctgattcagatctttggacgcaaaagctaccccatgctcaagttggtgcgcctgaagctgtggttccctcgattcatgaacgtcaaccccttcccagtgccccgggacctgccccaggaccctgtggagctggccatgtttggcctgcggcacatggagcctgaccttagtgccagggtcaccatctaccaggttcctttgcccaaagactcaacaggtgcagcagatcccccccagccccacatcgtaggaatccagagtcccgatcagcaggccgccctggcccgccacaatccagcccggcctgtctttgttgagggccccttctccctgtggctccgcaacaagtgtgtgtattaccacatcctcagagctgacttgctgcccccggaggagagggtgagggcttaaagcaaagcatgtgttggggctggggagtgggctggcactaccctgagggtgcatgggagaggctggaggagggagaccgagagagccctggcctctgaccccgcctgcactccccaccttggagtaggaagtggaagagacgccggaggagtggaacctctactacccgatgcagctggacctggagtatgtgaggagtggctgggacaactacgagtttgacatcaatgaagtggaggaaggccctgtcttcgccatgtgcatggcgggtgctcatgaccaggcgacgatggctaagtggatccagggcctgcaggagaccaacccaaccctggcccagatccccgtggtcttccgcctcgccgggtccacccgggagctccagacatcctctgcagggctggaggagccgcccctgcccgaggaccaccaggaagaagacgacaacctgcagcgacagcagcagggccagagctagtctgagccggcgcgagggcacgggctgtggcccgaggaggcggtggactgaaggcatgagatgccctttgagtgtacagcaaatcaatgttttcctgcttggggctctcttccctcatctctagcagtatggcatcccctccccaggatctcgggctgccagcgatgggcaggcgagacccctccagaatctgcaggcgcctctggttctccgaattcaaataaaaaggggcgggagcgctgttggttgtgcgcaaaaaaaaaaaaaaaaaaataaaaaaaaacaaaaaaaaaaaaacaaaaaaaaaaacaaaaaagaacaaaacaacaaaaaagaagagagagagacaacacaacaacaaaagaaaacacacataaagaaagaccaacacaaaacaaaaacaaaacacacaacaaaaagaataaagaaaagaaagaagacgcgcaagaggaggagaggcgagagttttctataaaaagagggaaagaagggaaggaccaagacaccaaaagaacgaagacagcggacaacagaaacgagacaccggagagagcaacgggaggaaaaagagaagcataacagcaagtaggggggagctaaaacacaaaagaggagagcacacgcaaacgaccactgaaacaagcgctctgaagcagaagccaactaaagaggggagaaaagcaacagcaccaaagaagcgaagaacgtaacaaagggaatgaacaagcagaacaagacggtagaaaagatcggagcggacagaagaaaaaacaggaaccggggcgtgataaagagacgggagagtagtggtgacggggagagacggacaggtgtccgcgcagcggcggggagaaaaagtggtgaaaagagaggagaggtaggggaaggagaggggaaggcaggcgcaggagcgacaggacggagaaagagagaagaagtaaggtcaaggggcgggcggggagagaggtggagagacagaagacagcaagacgacgaaagacacaggaaggacggggacagtaaaagcaacgcgaagtaccggcgggcgtagaaagaggaggagagcgatacacgattgcagagtaagaccgacagaagagaaaagcaaggaaagagaacggcacgagggaggcagtggcacaagacgagtggagaagacgaacgaaagagggacgaagacccccggggacatcagagagcaagaaacgaag

SEQ ID NO: 369615 - DNA, 2598 bp, Homo sapiens
gatttgctacctccctggagctccctgacccggacgctctctgggccaatatggcagcgcccagcaacaagacagagctggcctggagtccgcggctggccgcgtgagtaggtgattgtctgacaagcagaggcatgagctgggtccaggccaccctactggcccgaggcctctgtagggcctggggaggcacctgcggggccgccctcacaggaacctccatctctcaggtccctcgccggctccctcggggcctccactgcagcgcagctgcccatagctctgaacagtccctggttcccagcccaccggaaccccggcagaggcccaccaaggctctggtgccctttgaggacctgtttgggcaggcgcctggtggggaacgggacaaggcgagcttcctgcagacggtgcagaaatttgcggagcacagcgtgcgtaagcggggccacattgacttcatctacctggccctgcgcaagatgcgggagtatggtgtcgagcgggacctggctgtgtacaaccagctgctcaacatcttccccaaggaggtcttccggcctcgcaacatcatccagcgcatcttcgtccactaccctcggcagcaggagtgtgggattgctgtcctggagcagatggagaaccacggtgtgatgcccaacaaggagacggagttcctgctgattcagatctttggacgcaaaagctaccccatgctcaagttggtgcgcctgaagctgtggttccctcgattcatgaacgtcaaccccttcccagtgccccgggacctgccccaggaccctgtggagctggccatgtttggcctgcggcacatggagcctgaccttagtgccagggtcaccatctaccaggttcctttgcccaaagactcaacaggtgcagcagatcccccccagccccacatcgtaggaatccagagtcccgatcagcaggccgccctggcccgccacaatccagcccggcctgtctttgttgagggccccttctccctgtggctccgcaacaagtgtgtgtagaagtggaagagacgccggaggagtggaacctctactacccgatgcagctggacctggagtatgtgaggagtggctgggacaactacgagtttgacatcaatgaagtggaggaaggccctgtcttcgccatgtgcatggcgggtgctcatgaccaggcgacgatggctaagtggatccagggcctgcaggagaccaacccaaccctggcccagatccccgtggtcttccgcctcgccgggtccacccgggagctccagacatcctctgcagggctggaggagccgcccctgcccgaggaccaccaggaagaagacgacaacctgcagcgacagcagcagggccagagctagtctgagccggcgcgagggcacgggctgtggcccgaggaggcggtggactgaaggcatgagatgccctttgagtgtacagcaaatcaatgttttcctgcttggggctctcttccctcatctctagcagtatggcatcccctccccaggatctcgggctgccagcgatgggcaggcgagacccctccagaatctgcaggcgcctctggttctccgaattcaaataaaaaggggcgggagcgctgttggttgtgcgcaaaaaaaaaaaaaaaaaaataaaaaaaaacaaaaaaaaaaaaacaaaaaaaaaaacaaaaaagaacaaaacaacaaaaaagaagagagagagacaacacaacaacaaaagaaaacacacataaagaaagaccaacacaaaacaaaaacaaaacacacaacaaaaagaataaagaaaagaaagaagacgcgcaagaggaggagaggcgagagttttctataaaaagagggaaagaagggaaggaccaagacaccaaaagaacgaagacagcggacaacagaaacgagacaccggagagagcaacgggaggaaaaagagaagcataacagcaagtaggggggagctaaaacacaaaagaggagagcacacgcaaacgaccactgaaacaagcgctctgaagcagaagccaactaaagaggggagaaaagcaacagcaccaaagaagcgaagaacgtaacaaagggaatgaacaagcagaacaagacggtagaaaagatcggagcggacagaagaaaaaacaggaaccggggcgtgataaagagacgggagagtagtggtgacggggagagacggacaggtgtccgcgcagcggcggggagaaaaagtggtgaaaagagaggagaggtaggggaaggagaggggaaggcaggcgcaggagcgacaggacggagaaagagagaagaagtaaggtcaaggggcgggcggggagagaggtggagagacagaagacagcaagacgacgaaagacacaggaaggacggggacagtaaaagcaacgcgaagtaccggcgggcgtagaaagaggaggagagcgatacacgattgcagagtaagaccgacagaagagaaaagcaaggaaagagaacggcacgagggaggcagtggcacaagacgagtggagaagacgaacgaaagagggacgaagacccccggggacatcagagagcaagaaacgaag

SEQ ID NO: 369616 - DNA, 2685 bp, Homo sapiens
gatttgctacctccctggagctccctgacccggacgctctctgggccaatatggcagcgcccagcaacaagacagagctggcctggagtccgcggctggccgcgtgagtaggtgattgtctgacaagcagaggcatgagctgggtccaggccaccctactggcccgaggcctctgtagggcctggggaggcacctgcggggccgccctcacaggaacctccatctctcaggtccctcgccggctccctcggggcctccactgcagcgcagctgcccatagctctgaacagtccctggttcccagcccaccggaaccccggcagaggcccaccaaggctctggtgccctttgaggacctgtttgggcaggcgcctggtggggaacgggacaaggcgagcttcctgcagacggtgcagaaatttgcggagcacagcgtgcgtaagcggggccacattgacttcatctacctggccctgcgcaagatgcgggagtatggtgtcgagcgggacctggctgtgtacaaccagctgctcaacatcttccccaaggaggtcttccggcctcgcaacatcatccagcgcatcttcgtccactaccctcggcagcaggagtgtgggattgctgtcctggagcagatggagaaccacggtgtgatgcccaacaaggagacggagttcctgctgattcagatctttggacgcaaaagctaccccatgctcaagttggtgcgcctgaagctgtggttccctcgattcatgaacgtcaaccccttcccagtgccccgggacctgccccaggaccctgtggagctggccatgtttggcctgcggcacatggagcctgaccttagtgccagggtcaccatctaccaggccccgtgcgctgcccctgacgccgcccgtctccctccccagaggttcctttgcccaaagactcaacaggtgcagcagatcccccccagccccacatcgtaggaatccagagtcccgatcagcaggccgccctggcccgccacaatccagcccggcctgtctttgttgagggccccttctccctgtggctccgcaacaagtgtgtgtattaccacatcctcagagctgacttgctgcccccggaggagagggaagtggaagagacgccggaggagtggaacctctactacccgatgcagctggacctggagtatgtgaggagtggctgggacaactacgagtttgacatcaatgaagtggaggaaggccctgtcttcgccatgtgcatggcgggtgctcatgaccaggcgacgatggctaagtggatccagggcctgcaggagaccaacccaaccctggcccagatccccgtggtcttccgcctcgccgggtccacccgggagctccagacatcctctgcagggctggaggagccgcccctgcccgaggaccaccaggaagaagacgacaacctgcagcgacagcagcagggccagagctagtctgagccggcgcgagggcacgggctgtggcccgaggaggcggtggactgaaggcatgagatgccctttgagtgtacagcaaatcaatgttttcctgcttggggctctcttccctcatctctagcagtatggcatcccctccccaggatctcgggctgccagcgatgggcaggcgagacccctccagaatctgcaggcgcctctggttctccgaattcaaataaaaaggggcgggagcgctgttggttgtgcgcaaaaaaaaaaaaaaaaaaataaaaaaaaacaaaaaaaaaaaaacaaaaaaaaaaacaaaaaagaacaaaacaacaaaaaagaagagagagagacaacacaacaacaaaagaaaacacacataaagaaagaccaacacaaaacaaaaacaaaacacacaacaaaaagaataaagaaaagaaagaagacgcgcaagaggaggagaggcgagagttttctataaaaagagggaaagaagggaaggaccaagacaccaaaagaacgaagacagcggacaacagaaacgagacaccggagagagcaacgggaggaaaaagagaagcataacagcaagtaggggggagctaaaacacaaaagaggagagcacacgcaaacgaccactgaaacaagcgctctgaagcagaagccaactaaagaggggagaaaagcaacagcaccaaagaagcgaagaacgtaacaaagggaatgaacaagcagaacaagacggtagaaaagatcggagcggacagaagaaaaaacaggaaccggggcgtgataaagagacgggagagtagtggtgacggggagagacggacaggtgtccgcgcagcggcggggagaaaaagtggtgaaaagagaggagaggtaggggaaggagaggggaaggcaggcgcaggagcgacaggacggagaaagagagaagaagtaaggtcaaggggcgggcggggagagaggtggagagacagaagacagcaagacgacgaaagacacaggaaggacggggacagtaaaagcaacgcgaagtaccggcgggcgtagaaagaggaggagagcgatacacgattgcagagtaagaccgacagaagagaaaagcaaggaaagagaacggcacgagggaggcagtggcacaagacgagtggagaagacgaacgaaagagggacgaagacccccggggacatcagagagcaagaaacgaag

SEQ ID NO: 369617 - DNA, 2522 bp, Homo sapiens
gatttgctacctccctggagctccctgacccggacgctctctgggccaatatggcagcgcccagcaacaagacagagctggcctggagtccgcggctggccgcgtgagtaggtccctcgccggctccctcggggcctccactgcagcgcagctgcccatagctctgaacagtccctggttcccagcccaccggaaccccggcagaggcccaccaaggctctggtgccctttgaggacctgtttgggcaggcgcctggtggggaacgggacaaggcgagcttcctgcagacggtgcagaaatttgcggagcacagcgtgcgtaagcggggccacattgacttcatctacctggccctgcgcaagatgcgggagtatggtgtcgagcgggacctggctgtgtacaaccagctgctcaacatcttccccaaggaggtcttccggcctcgcaacatcatccagcgcatcttcgtccactaccctcggcagcaggagtgtgggattgctgtcctggagcagatggagaaccacggtgtgatgcccaacaaggagacggagttcctgctgattcagatctttggacgcaaaagctaccccatgctcaagttggtgcgcctgaagctgtggttccctcgattcatgaacgtcaaccccttcccagtgccccgggacctgccccaggaccctgtggagctggccatgtttggcctgcggcacatggagcctgaccttagtgccagggtcaccatctaccaggttcctttgcccaaagactcaacaggtgcagcagatcccccccagccccacatcgtaggaatccagagtcccgatcagcaggccgccctggcccgccacaatccagcccggcctgtctttgttgagggccccttctccctgtggctccgcaacaagtgtgtgtattaccacatcctcagagctgacttgctgcccccggaggagagggaagtggaagagacgccggaggagtggaacctctactacccgatgcagctggacctggagtatgtgaggagtggctgggacaactacgagtttgacatcaatgaagtggaggaaggccctgtcttcgccatgtgcatggcgggtgctcatgaccaggcgacgatggctaagtggatccagggcctgcaggagaccaacccaaccctggcccagatccccgtggtcttccgcctcgccgggtccacccgggagctccagacatcctctgcagggctggaggagccgcccctgcccgaggaccaccaggaagaagacgacaacctgcagcgacagcagcagggccagagctagtctgagccggcgcgagggcacgggctgtggcccgaggaggcggtggactgaaggcatgagatgccctttgagtgtacagcaaatcaatgttttcctgcttggggctctcttccctcatctctagcagtatggcatcccctccccaggatctcgggctgccagcgatgggcaggcgagacccctccagaatctgcaggcgcctctggttctccgaattcaaataaaaaggggcgggagcgctgttggttgtgcgcaaaaaaaaaaaaaaaaaaataaaaaaaaacaaaaaaaaaaaaacaaaaaaaaaaacaaaaaagaacaaaacaacaaaaaagaagagagagagacaacacaacaacaaaagaaaacacacataaagaaagaccaacacaaaacaaaaacaaaacacacaacaaaaagaataaagaaaagaaagaagacgcgcaagaggaggagaggcgagagttttctataaaaagagggaaagaagggaaggaccaagacaccaaaagaacgaagacagcggacaacagaaacgagacaccggagagagcaacgggaggaaaaagagaagcataacagcaagtaggggggagctaaaacacaaaagaggagagcacacgcaaacgaccactgaaacaagcgctctgaagcagaagccaactaaagaggggagaaaagcaacagcaccaaagaagcgaagaacgtaacaaagggaatgaacaagcagaacaagacggtagaaaagatcggagcggacagaagaaaaaacaggaaccggggcgtgataaagagacgggagagtagtggtgacggggagagacggacaggtgtccgcgcagcggcggggagaaaaagtggtgaaaagagaggagaggtaggggaaggagaggggaaggcaggcgcaggagcgacaggacggagaaagagagaagaagtaaggtcaaggggcgggcggggagagaggtggagagacagaagacagcaagacgacgaaagacacaggaaggacggggacagtaaaagcaacgcgaagtaccggcgggcgtagaaagaggaggagagcgatacacgattgcagagtaagaccgacagaagagaaaagcaaggaaagagaacggcacgagggaggcagtggcacaagacgagtggagaagacgaacgaaagagggacgaagacccccggggacatcagagagcaagaaacgaag

SEQ ID NO: 369618 - DNA, 2736 bp, Homo sapiens
gatttgctacctccctggagctccctgacccggacgctctctgggccaatatggcagcgcccagcaacaagacagagctggcctggagtccgcggctggccgcgtgagtagagacagggtttctccatgttggtcaggctggtctcgaactcccgacctcaggtgatcagctggcctggacctcccaacgtgctgggattacacacgtgattgtctgacaagcagaggcatgagctgggtccaggccaccctactggcccgaggcctctgtagggcctggggaggcacctgcggggccgccctcacaggaacctccatctctcaggtccctcgccggctccctcggggcctccactgcagcgcagctgcccatagctctgaacagtccctggttcccagcccaccggaaccccggcagaggcccaccaaggctctggtgccctttgaggacctgtttgggcaggcgcctggtggggaacgggacaaggcgagcttcctgcagacggtgcagaaatttgcggagcacagcgtgcgtaagcggggccacattgacttcatctacctggccctgcgcaagatgcgggagtatggtgtcgagcgggacctggctgtgtacaaccagctgctcaacatcttccccaaggaggtcttccggcctcgcaacatcatccagcgcatcttcgtccactaccctcggcagcaggagtgtgggattgctgtcctggagcagatggagaaccacggtgtgatgcccaacaaggagacggagttcctgctgattcagatctttggacgcaaaagctaccccatgctcaagttggtgcgcctgaagctgtggttccctcgattcatgaacgtcaaccccttcccagtgccccgggacctgccccaggaccctgtggagctggccatgtttggcctgcggcacatggagcctgaccttagtgccagggtcaccatctaccaggttcctttgcccaaagactcaacaggtgcagcagatcccccccagccccacatcgtaggaatccagagtcccgatcagcaggccgccctggcccgccacaatccagcccggcctgtctttgttgagggccccttctccctgtggctccgcaacaagtgtgtgtattaccacatcctcagagctgacttgctgcccccggaggagagggaagtggaagagacgccggaggagtggaacctctactacccgatgcagctggacctggagtatgtgaggagtggctgggacaactacgagtttgacatcaatgaagtggaggaaggccctgtcttcgccatgtgcatggcgggtgctcatgaccaggcgacgatggctaagtggatccagggcctgcaggagaccaacccaaccctggcccagatccccgtggtcttccgcctcgccgggtccacccgggagctccagacatcctctgcagggctggaggagccgcccctgcccgaggaccaccaggaagaagacgacaacctgcagcgacagcagcagggccagagctagtctgagccggcgcgagggcacgggctgtggcccgaggaggcggtggactgaaggcatgagatgccctttgagtgtacagcaaatcaatgttttcctgcttggggctctcttccctcatctctagcagtatggcatcccctccccaggatctcgggctgccagcgatgggcaggcgagacccctccagaatctgcaggcgcctctggttctccgaattcaaataaaaaggggcgggagcgctgttggttgtgcgcaaaaaaaaaaaaaaaaaaataaaaaaaaacaaaaaaaaaaaaacaaaaaaaaaaacaaaaaagaacaaaacaacaaaaaagaagagagagagacaacacaacaacaaaagaaaacacacataaagaaagaccaacacaaaacaaaaacaaaacacacaacaaaaagaataaagaaaagaaagaagacgcgcaagaggaggagaggcgagagttttctataaaaagagggaaagaagggaaggaccaagacaccaaaagaacgaagacagcggacaacagaaacgagacaccggagagagcaacgggaggaaaaagagaagcataacagcaagtaggggggagctaaaacacaaaagaggagagcacacgcaaacgaccactgaaacaagcgctctgaagcagaagccaactaaagaggggagaaaagcaacagcaccaaagaagcgaagaacgtaacaaagggaatgaacaagcagaacaagacggtagaaaagatcggagcggacagaagaaaaaacaggaaccggggcgtgataaagagacgggagagtagtggtgacggggagagacggacaggtgtccgcgcagcggcggggagaaaaagtggtgaaaagagaggagaggtaggggaaggagaggggaaggcaggcgcaggagcgacaggacggagaaagagagaagaagtaaggtcaaggggcgggcggggagagaggtggagagacagaagacagcaagacgacgaaagacacaggaaggacggggacagtaaaagcaacgcgaagtaccggcgggcgtagaaagaggaggagagcgatacacgattgcagagtaagaccgacagaagagaaaagcaaggaaagagaacggcacgagggaggcagtggcacaagacgagtggagaagacgaacgaaagagggacgaagacccccggggacatcagagagcaagaaacgaag

SEQ ID NO: 369619 - DNA, 2693 bp, Homo sapiens
ggctggtacgcccggaagtatgggatgacagagctggctggagtcgcggctggccgcgtgagtagtggagacagggtttctccatgttggtcaggctggtctcgaactcccgacctcaggtgatcagctggcctggacctcccaacgtgctgggattacacacgtgattgtctgacaagcagaggcatgagctgggtccaggccaccctactggcccgaggcctctgtagggcctggggaggcacctgcggggccgccctcacaggaacctccatctctcaggtccctcgccggctccctcggggcctccactgcagcgcagctgcccatagctctgaacagtccctggttcccagcccaccggaaccccggcagaggcccaccaaggctctggtgccctttgaggacctgtttgggcaggcgcctggtggggaacgggacaaggcgagcttcctgcagacggtgcagaaatttgcggagcacagcgtgcgtaagcggggccacattgacttcatctacctggccctgcgcaagatgcgggagtatggtgtcgagcgggacctggctgtgtacaaccagctgctcaacatcttccccaaggaggtcttccggcctcgcaacatcatccagcgcatcttcgtccactaccctcggcagcaggagtgtgggattgctgtcctggagcagatggagaaccacggtgtgatgcccaacaaggagacggagttcctgctgattcagatctttggacgcaaaagctaccccatgctcaagttggtgcgcctgaagctgtggttccctcgattcatgaacgtcaaccccttcccagtgccccgggacctgccccaggaccctgtggagctggccatgtttggcctgcggcacatggagcctgaccttagtgccagggtcaccatctaccaggttcctttgcccaaagactcaacaggtgcagcagatcccccccagccccacatcgtaggaatccagagtcccgatcagcaggccgccctggcccgccacaatccagcccggcctgtctttgttgagggccccttctccctgtggctccgcaacaagtgtgtgtattaccacatcctcagagctgacttgctgcccccggaggagagggaagtggaagagacgccggaggagtggaacctctactacccgatgcagctggacctggagtatgtgaggagtggctgggacaactacgagtttgacatcaatgaagtggaggaaggccctgtcttcgccatgtgcatggcgggtgctcatgaccaggcgacgatggctaagtggatccagggcctgcaggagaccaacccaaccctggcccagatccccgtggtcttccgcctcgccgggtccacccgggagctccagacatcctctgcagggctggaggagccgcccctgcccgaggaccaccaggaagaagacgacaacctgcagcgacagcagcagggccagagctagtctgagccggcgcgagggcacgggctgtggcccgaggaggcggtggactgaaggcatgagatgccctttgagtgtacagcaaatcaatgttttcctgcttggggctctcttccctcatctctagcagtatggcatcccctccccaggatctcgggctgccagcgatgggcaggcgagacccctccagaatctgcaggcgcctctggttctccgaattcaaataaaaaggggcgggagcgctgttggttgtgcgcaaaaaaaaaaaaaaaaaaataaaaaaaaacaaaaaaaaaaaaacaaaaaaaaaaacaaaaaagaacaaaacaacaaaaaagaagagagagagacaacacaacaacaaaagaaaacacacataaagaaagaccaacacaaaacaaaaacaaaacacacaacaaaaagaataaagaaaagaaagaagacgcgcaagaggaggagaggcgagagttttctataaaaagagggaaagaagggaaggaccaagacaccaaaagaacgaagacagcggacaacagaaacgagacaccggagagagcaacgggaggaaaaagagaagcataacagcaagtaggggggagctaaaacacaaaagaggagagcacacgcaaacgaccactgaaacaagcgctctgaagcagaagccaactaaagaggggagaaaagcaacagcaccaaagaagcgaagaacgtaacaaagggaatgaacaagcagaacaagacggtagaaaagatcggagcggacagaagaaaaaacaggaaccggggcgtgataaagagacgggagagtagtggtgacggggagagacggacaggtgtccgcgcagcggcggggagaaaaagtggtgaaaagagaggagaggtaggggaaggagaggggaaggcaggcgcaggagcgacaggacggagaaagagagaagaagtaaggtcaaggggcgggcggggagagaggtggagagacagaagacagcaagacgacgaaagacacaggaaggacggggacagtaaaagcaacgcgaagtaccggcgggcgtagaaagaggaggagagcgatacacgattgcagagtaagaccgacagaagagaaaagcaaggaaagagaacggcacgagggaggcagtggcacaagacgagtggagaagacgaacgaaagagggacgaagacccccggggacatcagagagcaagaaacgaag

SEQ ID NO: 369620 - DNA, 2662 bp, Homo sapiens
gatttgctacctccctggagctccctgacccggacgctctctgggccaatatggcagcgcccagcaacaagacagagctggcctggagtccgcggctggccgcgtgagtaggtccctcgccggctccctcggggcctccactgcagcgcagctgcccatagctctgaacagtccctggttcccagcccaccggaaccccggcagaggcccaccaaggctctggtgccctttgaggacctgtttgggcaggcgcctggtggggaacgggacaaggcgagcttcctgcagacggtgcagaaatttgcggagcacagcgtgcgtaagcggggccacattgacttcatctacctggccctgcgcaagatgcgggagtatggtgtcgagcgggacctggctgtgtacaaccagctgctcaacatcttccccaaggaggtcttccggcctcgcaacatcatccagcgcatcttcgtccactaccctcggcagcaggagtgtgggattgctgtcctggagcagatggagaaccacggtgtgatgcccaacaaggagacggagttcctgctgattcagatctttggacgcaaaagctaccccatgctcaagttggtgcgcctgaagctgtggttccctcgattcatgaacgtcaaccccttcccagtgccccgggacctgccccaggaccctgtggagctggccatgtttggcctgcggcacatggagcctgaccttagtgccagggtcaccatctaccaggttcctttgcccaaagactcaacaggtgcagcagatcccccccagccccacatcgtaggtaagtccgagagcatgggggcagccaagtctctaaccttacccaggccctgccaggttctcgctgggcctaggctgggctccctgggcctctgggccgagtcccttgcagggcacagggcatgtatgtctccacaccaggaatccagagtcccgatcagcaggccgccctggcccgccacaatccagcccggcctgtctttgttgagggccccttctccctgtggctccgcaacaagtgtgtgtattaccacatcctcagagctgacttgctgcccccggaggagagggaagtggaagagacgccggaggagtggaacctctactacccgatgcagctggacctggagtatgtgaggagtggctgggacaactacgagtttgacatcaatgaagtggaggaaggccctgtcttcgccatgtgcatggcgggtgctcatgaccaggcgacgatggctaagtggatccagggcctgcaggagaccaacccaaccctggcccagatccccgtggtcttccgcctcgccgggtccacccgggagctccagacatcctctgcagggctggaggagccgcccctgcccgaggaccaccaggaagaagacgacaacctgcagcgacagcagcagggccagagctagtctgagccggcgcgagggcacgggctgtggcccgaggaggcggtggactgaaggcatgagatgccctttgagtgtacagcaaatcaatgttttcctgcttggggctctcttccctcatctctagcagtatggcatcccctccccaggatctcgggctgccagcgatgggcaggcgagacccctccagaatctgcaggcgcctctggttctccgaattcaaataaaaaggggcgggagcgctgttggttgtgcgcaaaaaaaaaaaaaaaaaaataaaaaaaaacaaaaaaaaaaaaacaaaaaaaaaaacaaaaaagaacaaaacaacaaaaaagaagagagagagacaacacaacaacaaaagaaaacacacataaagaaagaccaacacaaaacaaaaacaaaacacacaacaaaaagaataaagaaaagaaagaagacgcgcaagaggaggagaggcgagagttttctataaaaagagggaaagaagggaaggaccaagacaccaaaagaacgaagacagcggacaacagaaacgagacaccggagagagcaacgggaggaaaaagagaagcataacagcaagtaggggggagctaaaacacaaaagaggagagcacacgcaaacgaccactgaaacaagcgctctgaagcagaagccaactaaagaggggagaaaagcaacagcaccaaagaagcgaagaacgtaacaaagggaatgaacaagcagaacaagacggtagaaaagatcggagcggacagaagaaaaaacaggaaccggggcgtgataaagagacgggagagtagtggtgacggggagagacggacaggtgtccgcgcagcggcggggagaaaaagtggtgaaaagagaggagaggtaggggaaggagaggggaaggcaggcgcaggagcgacaggacggagaaagagagaagaagtaaggtcaaggggcgggcggggagagaggtggagagacagaagacagcaagacgacgaaagacacaggaaggacggggacagtaaaagcaacgcgaagtaccggcgggcgtagaaagaggaggagagcgatacacgattgcagagtaagaccgacagaagagaaaagcaaggaaagagaacggcacgagggaggcagtggcacaagacgagtggagaagacgaacgaaagagggacgaagacccccggggacatcagagagcaagaaacgaag

SEQ ID NO: 369621 - DNA, 2706 bp, Homo sapiens
gatttgctacctccctggagctccctgacccggacgctctctgggccaatatggcagcgcccagcaacaagacagagctggcctggagtccgcggctggccgcgtgagtaggtccctcgccggctccctcggggcctccactgcagcgcagctgcccatagctctgaacagtccctggttcccagcccaccggaaccccggcagaggcccaccaaggctctggtgccctttgaggacctgtttgggcaggcgcctggtggggaacgggacaaggcgagcttcctgcagacggtgcagaaatttgcggagcacagcgtgcgtaagcggggccacattgacttcatctacctggccctgcgcaagatgcgggagtatggtgtcgagcgggacctggctgtgtacaaccagctgctcaacatcttccccaaggaggtcttccggcctcgcaacatcatccagcgcatcttcgtccactaccctcggcagcaggagtgtgggattgctgtcctggagcagatggagaaccacggtgtgatgcccaacaaggagacggagttcctgctgattcagatctttggacgcaaaagctaccccatgctcaagttggtgcgcctgaagctgtggttccctcgattcatgaacgtcaaccccttcccagtgccccgggacctgccccaggaccctgtggagctggccatgtttggcctgcggcacatggagcctgaccttagtgccagggtcaccatctaccaggccccgtgcgctgcccctgacgccgcccgtctccctccccagaggttcctttgcccaaagactcaacaggtgcagcagatcccccccagccccacatcgtaggtaagtccgagagcatgggggcagccaagtctctaaccttacccaggccctgccaggttctcgctgggcctaggctgggctccctgggcctctgggccgagtcccttgcagggcacagggcatgtatgtctccacaccaggaatccagagtcccgatcagcaggccgccctggcccgccacaatccagcccggcctgtctttgttgagggccccttctccctgtggctccgcaacaagtgtgtgtattaccacatcctcagagctgacttgctgcccccggaggagagggaagtggaagagacgccggaggagtggaacctctactacccgatgcagctggacctggagtatgtgaggagtggctgggacaactacgagtttgacatcaatgaagtggaggaaggccctgtcttcgccatgtgcatggcgggtgctcatgaccaggcgacgatggctaagtggatccagggcctgcaggagaccaacccaaccctggcccagatccccgtggtcttccgcctcgccgggtccacccgggagctccagacatcctctgcagggctggaggagccgcccctgcccgaggaccaccaggaagaagacgacaacctgcagcgacagcagcagggccagagctagtctgagccggcgcgagggcacgggctgtggcccgaggaggcggtggactgaaggcatgagatgccctttgagtgtacagcaaatcaatgttttcctgcttggggctctcttccctcatctctagcagtatggcatcccctccccaggatctcgggctgccagcgatgggcaggcgagacccctccagaatctgcaggcgcctctggttctccgaattcaaataaaaaggggcgggagcgctgttggttgtgcgcaaaaaaaaaaaaaaaaaaataaaaaaaaacaaaaaaaaaaaaacaaaaaaaaaaacaaaaaagaacaaaacaacaaaaaagaagagagagagacaacacaacaacaaaagaaaacacacataaagaaagaccaacacaaaacaaaaacaaaacacacaacaaaaagaataaagaaaagaaagaagacgcgcaagaggaggagaggcgagagttttctataaaaagagggaaagaagggaaggaccaagacaccaaaagaacgaagacagcggacaacagaaacgagacaccggagagagcaacgggaggaaaaagagaagcataacagcaagtaggggggagctaaaacacaaaagaggagagcacacgcaaacgaccactgaaacaagcgctctgaagcagaagccaactaaagaggggagaaaagcaacagcaccaaagaagcgaagaacgtaacaaagggaatgaacaagcagaacaagacggtagaaaagatcggagcggacagaagaaaaaacaggaaccggggcgtgataaagagacgggagagtagtggtgacggggagagacggacaggtgtccgcgcagcggcggggagaaaaagtggtgaaaagagaggagaggtaggggaaggagaggggaaggcaggcgcaggagcgacaggacggagaaagagagaagaagtaaggtcaaggggcgggcggggagagaggtggagagacagaagacagcaagacgacgaaagacacaggaaggacggggacagtaaaagcaacgcgaagtaccggcgggcgtagaaagaggaggagagcgatacacgattgcagagtaagaccgacagaagagaaaagcaaggaaagagaacggcacgagggaggcagtggcacaagacgagtggagaagacgaacgaaagagggacgaagacccccggggacatcagagagcaagaaacgaag

SEQ ID NO: 369622 - DNA, 1999 bp, Homo sapiens
gatttgctacctccctggagctccctgacccggacgctctctgggccaatatggcagcgcccagcaacaagacagagctggcctggagtccgcggctggccgcgtgagtaggtgattgtctgacaagcagaggcatgagctgggtccaggccaccctactggcccgaggcctctgtagggcctggggaggcacctgcggggccgccctcacaggaacctccatctctcaggttcctttgcccaaagactcaacaggtgcagcagatcccccccagccccacatcgtaggaatccagagtcccgatcagcaggccgccctggcccgccacaatccagcccggcctgtctttgttgagggccccttctccctgtggctccgcaacaagtgtgtgtattaccacatcctcagagctgacttgctgcccccggaggagagggaagtggaagagacgccggaggagtggaacctctactacccgatgcagctggacctggagtatgtgaggagtggctgggacaactacgagtttgacatcaatgaagtggaggaaggccctgtcttcgccatgtgcatggcgggtgctcatgaccaggcgacgatggctaagtggatccagggcctgcaggagaccaacccaaccctggcccagatccccgtggtcttccgcctcgccgggtccacccgggagctccagacatcctctgcagggctggaggagccgcccctgcccgaggaccaccaggaagaagacgacaacctgcagcgacagcagcagggccagagctagtctgagccggcgcgagggcacgggctgtggcccgaggaggcggtggactgaaggcatgagatgccctttgagtgtacagcaaatcaatgttttcctgcttggggctctcttccctcatctctagcagtatggcatcccctccccaggatctcgggctgccagcgatgggcaggcgagacccctccagaatctgcaggcgcctctggttctccgaattcaaataaaaaggggcgggagcgctgttggttgtgcgcaaaaaaaaaaaaaaaaaaataaaaaaaaacaaaaaaaaaaaaacaaaaaaaaaaacaaaaaagaacaaaacaacaaaaaagaagagagagagacaacacaacaacaaaagaaaacacacataaagaaagaccaacacaaaacaaaaacaaaacacacaacaaaaagaataaagaaaagaaagaagacgcgcaagaggaggagaggcgagagttttctataaaaagagggaaagaagggaaggaccaagacaccaaaagaacgaagacagcggacaacagaaacgagacaccggagagagcaacgggaggaaaaagagaagcataacagcaagtaggggggagctaaaacacaaaagaggagagcacacgcaaacgaccactgaaacaagcgctctgaagcagaagccaactaaagaggggagaaaagcaacagcaccaaagaagcgaagaacgtaacaaagggaatgaacaagcagaacaagacggtagaaaagatcggagcggacagaagaaaaaacaggaaccggggcgtgataaagagacgggagagtagtggtgacggggagagacggacaggtgtccgcgcagcggcggggagaaaaagtggtgaaaagagaggagaggtaggggaaggagaggggaaggcaggcgcaggagcgacaggacggagaaagagagaagaagtaaggtcaaggggcgggcggggagagaggtggagagacagaagacagcaagacgacgaaagacacaggaaggacggggacagtaaaagcaacgcgaagtaccggcgggcgtagaaagaggaggagagcgatacacgattgcagagtaagaccgacagaagagaaaagcaaggaaagagaacggcacgagggaggcagtggcacaagacgagtggagaagacgaacgaaagagggacgaagacccccggggacatcagagagcaagaaacgaag

SEQ ID NO: 369623 - DNA, 1850 bp, Homo sapiens
gatttgctacctccctggagctccctgacccggacgctctctgggccaatatggcagcgcccagcaacaagacagagctggcctggagtccgcggctggccgcgtgagtaggtgattgtctgacaagcagaggcatgagctgggtccaggccaccctactggcccgaggcctctgtagggcctggggaggcacctgcggggccgccctcacaggaacctccatctctcaggttcctttgcccaaagactcaacaggtgcagcagatcccccccagccccacatcgtaggaagtggaagagacgccggaggagtggaacctctactacccgatgcagctggacctggagtatgtgaggagtggctgggacaactacgagtttgacatcaatgaagtggaggaaggccctgtcttcgccatgtgcatggcgggtgctcatgaccaggcgacgatggctaagtggatccagggcctgcaggagaccaacccaaccctggcccagatccccgtggtcttccgcctcgccgggtccacccgggagctccagacatcctctgcagggctggaggagccgcccctgcccgaggaccaccaggaagaagacgacaacctgcagcgacagcagcagggccagagctagtctgagccggcgcgagggcacgggctgtggcccgaggaggcggtggactgaaggcatgagatgccctttgagtgtacagcaaatcaatgttttcctgcttggggctctcttccctcatctctagcagtatggcatcccctccccaggatctcgggctgccagcgatgggcaggcgagacccctccagaatctgcaggcgcctctggttctccgaattcaaataaaaaggggcgggagcgctgttggttgtgcgcaaaaaaaaaaaaaaaaaaataaaaaaaaacaaaaaaaaaaaaacaaaaaaaaaaacaaaaaagaacaaaacaacaaaaaagaagagagagagacaacacaacaacaaaagaaaacacacataaagaaagaccaacacaaaacaaaaacaaaacacacaacaaaaagaataaagaaaagaaagaagacgcgcaagaggaggagaggcgagagttttctataaaaagagggaaagaagggaaggaccaagacaccaaaagaacgaagacagcggacaacagaaacgagacaccggagagagcaacgggaggaaaaagagaagcataacagcaagtaggggggagctaaaacacaaaagaggagagcacacgcaaacgaccactgaaacaagcgctctgaagcagaagccaactaaagaggggagaaaagcaacagcaccaaagaagcgaagaacgtaacaaagggaatgaacaagcagaacaagacggtagaaaagatcggagcggacagaagaaaaaacaggaaccggggcgtgataaagagacgggagagtagtggtgacggggagagacggacaggtgtccgcgcagcggcggggagaaaaagtggtgaaaagagaggagaggtaggggaaggagaggggaaggcaggcgcaggagcgacaggacggagaaagagagaagaagtaaggtcaaggggcgggcggggagagaggtggagagacagaagacagcaagacgacgaaagacacaggaaggacggggacagtaaaagcaacgcgaagtaccggcgggcgtagaaagaggaggagagcgatacacgattgcagagtaagaccgacagaagagaaaagcaaggaaagagaacggcacgagggaggcagtggcacaagacgagtggagaagacgaacgaaagagggacgaagacccccggggacatcagagagcaagaaacgaag

SEQ ID NO: 369624 - DNA, 1218 bp, Homo sapiens
aggcggtggactgaaggcatgaaatgccctttgagtgtacagcaaatcaatgttttcctgcttggggctttcttccctcatttcatgaccaggcgacgatggctaagtggatccagggcctgcaggagaccaacccaaccctggcccagatccccgtggtcttccgcctcgccgggtccacccgggagctccagaatctgcaggcgcctctggttctccgaattcaaataaaaaggggcgggagcgctgttggttgtgcgcaaaaaaaaaaaaaaaaaaataaaaaaaaacaaaaaaaaaaaaacaaaaaaaaaaacaaaaaagaacaaaacaacaaaaaagaagagagagagacaacacaacaacaaaagaaaacacacataaagaaagaccaacacaaaacaaaaacaaaacacacaacaaaaagaataaagaaaagaaagaagacgcgcaagaggaggagaggcgagagttttctataaaaagagggaaagaagggaaggaccaagacaccaaaagaacgaagacagcggacaacagaaacgagacaccggagagagcaacgggaggaaaaagagaagcataacagcaagtaggggggagctaaaacacaaaagaggagagcacacgcaaacgaccactgaaacaagcgctctgaagcagaagccaactaaagaggggagaaaagcaacagcaccaaagaagcgaagaacgtaacaaagggaatgaacaagcagaacaagacggtagaaaagatcggagcggacagaagaaaaaacaggaaccggggcgtgataaagagacgggagagtagtggtgacggggagagacggacaggtgtccgcgcagcggcggggagaaaaagtggtgaaaagagaggagaggtaggggaaggagaggggaaggcaggcgcaggagcgacaggacggagaaagagagaagaagtaaggtcaaggggcgggcggggagagaggtggagagacagaagacagcaagacgacgaaagacacaggaaggacggggacagtaaaagcaacgcgaagtaccggcgggcgtagaaagaggaggagagcgatacacgattgcagagtaagaccgacagaagagaaaagcaaggaaagagaacggcacgagggaggcagtggcacaagacgagtggagaagacgaacgaaagagggacgaagacccccggggacatcagagagcaagaaacgaag

SEQ ID NO: 369625 - DNA, 2641 bp, Homo sapiens
gatttgctacctccctggagctccctgacccggacgctctctgggccaatatggcagcgcccagcaacaagacagagctggcctggagtccgcggctggccgcgtgagtaggtgattgtctgacaagcagaggcatgagctgggtccaggccaccctactggcccgaggcctctgtagggcctggggaggcacctgcggggccgccctcacaggaacctccatctctcaggtccctcgccggctccctcggggcctccactgcagcgcagctgcccatagctctgaacagtccctggttcccagcccaccggaaccccggcagaggcccaccaaggctctggtgccctttgaggacctgtttgggcaggcgcctggtggggaacgggacaaggcgagcttcctgcagacggtgcagaaatttgcggagcacagcgtgcgtaagcggggccacattgacttcatctacctggccctgcgcaagatgcgggagtatggtgtcgagcgggacctggctgtgtacaaccagctgctcaacatcttccccaaggaggtcttccggcctcgcaacatcatccagcgcatcttcgtccactaccctcggcagcaggagtgtgggattgctgtcctggagcagatggagaaccacggtgtgatgcccaacaaggagacggagttcctgctgattcagatctttggacgcaaaagctaccccatgctcaagttggtgcgcctgaagctgtggttccctcgattcatgaacgtcaaccccttcccagtgccccgggacctgccccaggaccctgtggagctggccatgtttggcctgcggcacatggagcctgaccttagtgccagggtcaccatctaccaggttcctttgcccaaagactcaacaggtgcagcagatcccccccagccccacatcgtaggaatccagagtcccgatcagcaggccgccctggcccgccacaatccagcccggcctgtctttgttgagggccccttctccctgtggctccgcaacaagtgtgtgtattaccacatcctcagagctgacttgctgcccccggaggagagggaagtggaagagacgccggaggagtggaacctctactacccgatgcagctggacctggagtatgtgaggagtggctgggacaactacgagtttgacatcaatgaagtggaggaaggccctgtcttcgccatgtgcatggcgggtgctcatgaccaggcgacgatggctaagtggatccagggcctgcaggagaccaacccaaccctggcccagatccccgtggtcttccgcctcgccgggtccacccgggagctccagacatcctctgcagggctggaggagccgcccctgcccgaggaccaccaggaagaagacgacaacctgcagcgacagcagcagggccagagctagtctgagccggcgcgagggcacgggctgtggcccgaggaggcggtggactgaaggcatgagatgccctttgagtgtacagcaaatcaatgttttcctgcttggggctctcttccctcatctctagcagtatggcatcccctccccaggatctcgggctgccagcgatgggcaggcgagacccctccagaatctgcaggcgcctctggttctccgaattcaaataaaaaggggcgggagcgctgttggttgtgcgcaaaaaaaaaaaaaaaaaaataaaaaaaaacaaaaaaaaaaaaacaaaaaaaaaaacaaaaaagaacaaaacaacaaaaaagaagagagagagacaacacaacaacaaaagaaaacacacataaagaaagaccaacacaaaacaaaaacaaaacacacaacaaaaagaataaagaaaagaaagaagacgcgcaagaggaggagaggcgagagttttctataaaaagagggaaagaagggaaggaccaagacaccaaaagaacgaagacagcggacaacagaaacgagacaccggagagagcaacgggaggaaaaagagaagcataacagcaagtaggggggagctaaaacacaaaagaggagagcacacgcaaacgaccactgaaacaagcgctctgaagcagaagccaactaaagaggggagaaaagcaacagcaccaaagaagcgaagaacgtaacaaagggaatgaacaagcagaacaagacggtagaaaagatcggagcggacagaagaaaaaacaggaaccggggcgtgataaagagacgggagagtagtggtgacggggagagacggacaggtgtccgcgcagcggcggggagaaaaagtggtgaaaagagaggagaggtaggggaaggagaggggaaggcaggcgcaggagcgacaggacggagaaagagagaagaagtaaggtcaaggggcgggcggggagagaggtggagagacagaagacagcaagacgacgaaagacacaggaaggacggggacagtaaaagcaacgcgaagtaccggcgggcgtagaaagaggaggagagcgatacacgattgcagagtaagaccgacagaagagaaaagcaaggaaagagaacggcacgagggaggcagtggcacaagacgagtggagaagacgaacgaaagagggacgaagacccccggggacatcagagagcaagaaacgaag

SEQ ID NO: 369626 - DNA, 2492 bp, Homo sapiens
gatttgctacctccctggagctccctgacccggacgctctctgggccaatatggcagcgcccagcaacaagacagagctggcctggagtccgcggctggccgcgtgagtaggtgattgtctgacaagcagaggcatgagctgggtccaggccaccctactggcccgaggcctctgtagggcctggggaggcacctgcggggccgccctcacaggaacctccatctctcaggtccctcgccggctccctcggggcctccactgcagcgcagctgcccatagctctgaacagtccctggttcccagcccaccggaaccccggcagaggcccaccaaggctctggtgccctttgaggacctgtttgggcaggcgcctggtggggaacgggacaaggcgagcttcctgcagacggtgcagaaatttgcggagcacagcgtgcgtaagcggggccacattgacttcatctacctggccctgcgcaagatgcgggagtatggtgtcgagcgggacctggctgtgtacaaccagctgctcaacatcttccccaaggaggtcttccggcctcgcaacatcatccagcgcatcttcgtccactaccctcggcagcaggagtgtgggattgctgtcctggagcagatggagaaccacggtgtgatgcccaacaaggagacggagttcctgctgattcagatctttggacgcaaaagctaccccatgctcaagttggtgcgcctgaagctgtggttccctcgattcatgaacgtcaaccccttcccagtgccccgggacctgccccaggaccctgtggagctggccatgtttggcctgcggcacatggagcctgaccttagtgccagggtcaccatctaccaggttcctttgcccaaagactcaacaggtgcagcagatcccccccagccccacatcgtaggaagtggaagagacgccggaggagtggaacctctactacccgatgcagctggacctggagtatgtgaggagtggctgggacaactacgagtttgacatcaatgaagtggaggaaggccctgtcttcgccatgtgcatggcgggtgctcatgaccaggcgacgatggctaagtggatccagggcctgcaggagaccaacccaaccctggcccagatccccgtggtcttccgcctcgccgggtccacccgggagctccagacatcctctgcagggctggaggagccgcccctgcccgaggaccaccaggaagaagacgacaacctgcagcgacagcagcagggccagagctagtctgagccggcgcgagggcacgggctgtggcccgaggaggcggtggactgaaggcatgagatgccctttgagtgtacagcaaatcaatgttttcctgcttggggctctcttccctcatctctagcagtatggcatcccctccccaggatctcgggctgccagcgatgggcaggcgagacccctccagaatctgcaggcgcctctggttctccgaattcaaataaaaaggggcgggagcgctgttggttgtgcgcaaaaaaaaaaaaaaaaaaataaaaaaaaacaaaaaaaaaaaaacaaaaaaaaaaacaaaaaagaacaaaacaacaaaaaagaagagagagagacaacacaacaacaaaagaaaacacacataaagaaagaccaacacaaaacaaaaacaaaacacacaacaaaaagaataaagaaaagaaagaagacgcgcaagaggaggagaggcgagagttttctataaaaagagggaaagaagggaaggaccaagacaccaaaagaacgaagacagcggacaacagaaacgagacaccggagagagcaacgggaggaaaaagagaagcataacagcaagtaggggggagctaaaacacaaaagaggagagcacacgcaaacgaccactgaaacaagcgctctgaagcagaagccaactaaagaggggagaaaagcaacagcaccaaagaagcgaagaacgtaacaaagggaatgaacaagcagaacaagacggtagaaaagatcggagcggacagaagaaaaaacaggaaccggggcgtgataaagagacgggagagtagtggtgacggggagagacggacaggtgtccgcgcagcggcggggagaaaaagtggtgaaaagagaggagaggtaggggaaggagaggggaaggcaggcgcaggagcgacaggacggagaaagagagaagaagtaaggtcaaggggcgggcggggagagaggtggagagacagaagacagcaagacgacgaaagacacaggaaggacggggacagtaaaagcaacgcgaagtaccggcgggcgtagaaagaggaggagagcgatacacgattgcagagtaagaccgacagaagagaaaagcaaggaaagagaacggcacgagggaggcagtggcacaagacgagtggagaagacgaacgaaagagggacgaagacccccggggacatcagagagcaagaaacgaag

SEQ ID NO: 369627 - DNA, 2781 bp, Homo sapiens
gatttgctacctccctggagctccctgacccggacgctctctgggccaatatggcagcgcccagcaacaagacagagctggcctggagtccgcggctggccgcgtgagtaggtgattgtctgacaagcagaggcatgagctgggtccaggccaccctactggcccgaggcctctgtagggcctggggaggcacctgcggggccgccctcacaggaacctccatctctcaggtccctcgccggctccctcggggcctccactgcagcgcagctgcccatagctctgaacagtccctggttcccagcccaccggaaccccggcagaggcccaccaaggctctggtgccctttgaggacctgtttgggcaggcgcctggtggggaacgggacaaggcgagcttcctgcagacggtgcagaaatttgcggagcacagcgtgcgtaagcggggccacattgacttcatctacctggccctgcgcaagatgcgggagtatggtgtcgagcgggacctggctgtgtacaaccagctgctcaacatcttccccaaggaggtcttccggcctcgcaacatcatccagcgcatcttcgtccactaccctcggcagcaggagtgtgggattgctgtcctggagcagatggagaaccacggtgtgatgcccaacaaggagacggagttcctgctgattcagatctttggacgcaaaagctaccccatgctcaagttggtgcgcctgaagctgtggttccctcgattcatgaacgtcaaccccttcccagtgccccgggacctgccccaggaccctgtggagctggccatgtttggcctgcggcacatggagcctgaccttagtgccagggtcaccatctaccaggttcctttgcccaaagactcaacaggtgcagcagatcccccccagccccacatcgtaggtaagtccgagagcatgggggcagccaagtctctaaccttacccaggccctgccaggttctcgctgggcctaggctgggctccctgggcctctgggccgagtcccttgcagggcacagggcatgtatgtctccacaccaggaatccagagtcccgatcagcaggccgccctggcccgccacaatccagcccggcctgtctttgttgagggccccttctccctgtggctccgcaacaagtgtgtgtattaccacatcctcagagctgacttgctgcccccggaggagagggaagtggaagagacgccggaggagtggaacctctactacccgatgcagctggacctggagtatgtgaggagtggctgggacaactacgagtttgacatcaatgaagtggaggaaggccctgtcttcgccatgtgcatggcgggtgctcatgaccaggcgacgatggctaagtggatccagggcctgcaggagaccaacccaaccctggcccagatccccgtggtcttccgcctcgccgggtccacccgggagctccagacatcctctgcagggctggaggagccgcccctgcccgaggaccaccaggaagaagacgacaacctgcagcgacagcagcagggccagagctagtctgagccggcgcgagggcacgggctgtggcccgaggaggcggtggactgaaggcatgagatgccctttgagtgtacagcaaatcaatgttttcctgcttggggctctcttccctcatctctagcagtatggcatcccctccccaggatctcgggctgccagcgatgggcaggcgagacccctccagaatctgcaggcgcctctggttctccgaattcaaataaaaaggggcgggagcgctgttggttgtgcgcaaaaaaaaaaaaaaaaaaataaaaaaaaacaaaaaaaaaaaaacaaaaaaaaaaacaaaaaagaacaaaacaacaaaaaagaagagagagagacaacacaacaacaaaagaaaacacacataaagaaagaccaacacaaaacaaaaacaaaacacacaacaaaaagaataaagaaaagaaagaagacgcgcaagaggaggagaggcgagagttttctataaaaagagggaaagaagggaaggaccaagacaccaaaagaacgaagacagcggacaacagaaacgagacaccggagagagcaacgggaggaaaaagagaagcataacagcaagtaggggggagctaaaacacaaaagaggagagcacacgcaaacgaccactgaaacaagcgctctgaagcagaagccaactaaagaggggagaaaagcaacagcaccaaagaagcgaagaacgtaacaaagggaatgaacaagcagaacaagacggtagaaaagatcggagcggacagaagaaaaaacaggaaccggggcgtgataaagagacgggagagtagtggtgacggggagagacggacaggtgtccgcgcagcggcggggagaaaaagtggtgaaaagagaggagaggtaggggaaggagaggggaaggcaggcgcaggagcgacaggacggagaaagagagaagaagtaaggtcaaggggcgggcggggagagaggtggagagacagaagacagcaagacgacgaaagacacaggaaggacggggacagtaaaagcaacgcgaagtaccggcgggcgtagaaagaggaggagagcgatacacgattgcagagtaagaccgacagaagagaaaagcaaggaaagagaacggcacgagggaggcagtggcacaagacgagtggagaagacgaacgaaagagggacgaagacccccggggacatcagagagcaagaaacgaag

SEQ ID NO: 369628 - DNA, 1239 bp, Homo sapiens
gatttgctacctccctggagctccctgacccggacgctctctgggccaatatggcagcgcccagcaacaagacagagctggcctggagtccgcggctggccgcgtgagtaggtgattgtctgacaagcagaggcatgagctgggtccaggccaccctactggcccgaggcctctgtagggcctggggaggcacctgcggggccgccctcacaggaacctccatctctcaggtccctcgccggctccctcggggcctccactgcagcgcagctgcccatagctctgaacagtccctggttcccagcccaccggaaccccggcagaggcccaccaaggctctggtgccctttgaggacctgtttgggcaggcgcctggtggggaacgggacaaggcgagcttcctgcagacggtgcagaaatttgcggagcacagcgtgcgtaagcggggccacattgacttcatctacctggccctgcgcaagatgcgggagtatggtgtcgagcgggacctggctgtgtacaaccagctgctcaacatcttccccaaggaggtcttccggcctcgcaacatcatccagcgcatcttcgtccactaccctcggcagcaggagtgtgggattgctgtcctggagcagatggagaaccacggtgtgatgcccaacaaggagacggagttcctgctgattcagatctttggacgcaaaagctaccccatgctcaagttggtgcgcctgaagctgtggttccctcgattcatgaacgtcaaccccttcccagtgccccgggacctgccccaggaccctgtggagctggccatgtttggcctgcggcacatggagcctgaccttagtgccagggtcaccatctaccaggttcctttgcccaaagactcaacaggtgcagcagatcccccccagccccacatcgtaggaatccagagtcccgatcagcaggccgccctggcccgccacaatccagcccggcctgtctttgttgagggccccttctccctgtggctccgcaacaagtgtgtgtattaccacatcctcagagctgacttgctgcccccggaggagagggaagtggaagagacgccggaggagtggaacctctactacccgatgcagctggacctggagtatgtgaggagtggctgggacaactacgagtttgacatcaatgaagcttggagctgcccaattcatggatcactgctctaataaactcctaaatattttg

SEQ ID NO: 369629 - DNA, 2833 bp, Homo sapiens
gggtaggcgaacgcgaactgctgggctgcaggcgggcccttcaggacccggcagcgcgagagggcagccctggagggacccagctgcagggccaggcgccatgacctttcgtagtgggggcggggacgcgctgggaaaggccgcctgtcttgtgccagccgcctcacgcccccagtctcccattttgcagatgacctcgcgagaggtcacgccgcaagtcggcaaccgggcaggatttggaatccgcgtctgcctttttcccccaagagacccagaatcctggcagccggtttcaaagctgttgtgattgtctgacaagcagaggcatgagctgggtccaggccaccctactggcccgaggcctctgtagggcctggggaggcacctgcggggccgccctcacaggaacctccatctctcaggtccctcgccggctccctcggggcctccactgcagcgcagctgcccatagctctgaacagtccctggttcccagcccaccggaaccccggcagaggcccaccaaggctctggtgccctttgaggacctgtttgggcaggcgcctggtggggaacgggacaaggcgagcttcctgcagacggtgcagaaatttgcggagcacagcgtgcgtaagcggggccacattgacttcatctacctggccctgcgcaagatgcgggagtatggtgtcgagcgggacctggctgtgtacaaccagctgctcaacatcttccccaaggaggtcttccggcctcgcaacatcatccagcgcatcttcgtccactaccctcggcagcaggagtgtgggattgctgtcctggagcagatggagaaccacggtgtgatgcccaacaaggagacggagttcctgctgattcagatctttggacgcaaaagctaccccatgctcaagttggtgcgcctgaagctgtggttccctcgattcatgaacgtcaaccccttcccagtgccccgggacctgccccaggaccctgtggagctggccatgtttggcctgcggcacatggagcctgaccttagtgccagggtcaccatctaccaggttcctttgcccaaagactcaacaggtgcagcagatcccccccagccccacatcgtaggaatccagagtcccgatcagcaggccgccctggcccgccacaatccagcccggcctgtctttgttgagggccccttctccctgtggctccgcaacaagtgtgtgtattaccacatcctcagagctgacttgctgcccccggaggagagggaagtggaagagacgccggaggagtggaacctctactacccgatgcagctggacctggagtatgtgaggagtggctgggacaactacgagtttgacatcaatgaagtggaggaaggccctgtcttcgccatgtgcatggcgggtgctcatgaccaggcgacgatggctaagtggatccagggcctgcaggagaccaacccaaccctggcccagatccccgtggtcttccgcctcgccgggtccacccgggagctccagacatcctctgcagggctggaggagccgcccctgcccgaggaccaccaggaagaagacgacaacctgcagcgacagcagcagggccagagctagtctgagccggcgcgagggcacgggctgtggcccgaggaggcggtggactgaaggcatgagatgccctttgagtgtacagcaaatcaatgttttcctgcttggggctctcttccctcatctctagcagtatggcatcccctccccaggatctcgggctgccagcgatgggcaggcgagacccctccagaatctgcaggcgcctctggttctccgaattcaaataaaaaggggcgggagcgctgttggttgtgcgcaaaaaaaaaaaaaaaaaaataaaaaaaaacaaaaaaaaaaaaacaaaaaaaaaaacaaaaaagaacaaaacaacaaaaaagaagagagagagacaacacaacaacaaaagaaaacacacataaagaaagaccaacacaaaacaaaaacaaaacacacaacaaaaagaataaagaaaagaaagaagacgcgcaagaggaggagaggcgagagttttctataaaaagagggaaagaagggaaggaccaagacaccaaaagaacgaagacagcggacaacagaaacgagacaccggagagagcaacgggaggaaaaagagaagcataacagcaagtaggggggagctaaaacacaaaagaggagagcacacgcaaacgaccactgaaacaagcgctctgaagcagaagccaactaaagaggggagaaaagcaacagcaccaaagaagcgaagaacgtaacaaagggaatgaacaagcagaacaagacggtagaaaagatcggagcggacagaagaaaaaacaggaaccggggcgtgataaagagacgggagagtagtggtgacggggagagacggacaggtgtccgcgcagcggcggggagaaaaagtggtgaaaagagaggagaggtaggggaaggagaggggaaggcaggcgcaggagcgacaggacggagaaagagagaagaagtaaggtcaaggggcgggcggggagagaggtggagagacagaagacagcaagacgacgaaagacacaggaaggacggggacagtaaaagcaacgcgaagtaccggcgggcgtagaaagaggaggagagcgatacacgattgcagagtaagaccgacagaagagaaaagcaaggaaagagaacggcacgagggaggcagtggcacaagacgagtggagaagacgaacgaaagagggacgaagacccccggggacatcagagagcaagaaacgaag

SEQ ID NO: 369630 - DNA, 2714 bp, Homo sapiens
gggtaggcgaacgcgaactgctgggctgcaggcgggcccttcaggacccggcagcgcgagagggcagccctggagggacccagctgcagggccaggcgccatgacctttcgtagtgggggcggggacgcgctgggaaaggccgcctgtcttgtgccagccgcctcacgcccccagtctcccattttgcagatgacctcgcgagaggtcacgccgcaagtcggcaaccgggcaggatttggaatccgcgtctgcctttttcccccaagagacccagaatcctggcagccggtttcaaagctgttgtccctcgccggctccctcggggcctccactgcagcgcagctgcccatagctctgaacagtccctggttcccagcccaccggaaccccggcagaggcccaccaaggctctggtgccctttgaggacctgtttgggcaggcgcctggtggggaacgggacaaggcgagcttcctgcagacggtgcagaaatttgcggagcacagcgtgcgtaagcggggccacattgacttcatctacctggccctgcgcaagatgcgggagtatggtgtcgagcgggacctggctgtgtacaaccagctgctcaacatcttccccaaggaggtcttccggcctcgcaacatcatccagcgcatcttcgtccactaccctcggcagcaggagtgtgggattgctgtcctggagcagatggagaaccacggtgtgatgcccaacaaggagacggagttcctgctgattcagatctttggacgcaaaagctaccccatgctcaagttggtgcgcctgaagctgtggttccctcgattcatgaacgtcaaccccttcccagtgccccgggacctgccccaggaccctgtggagctggccatgtttggcctgcggcacatggagcctgaccttagtgccagggtcaccatctaccaggttcctttgcccaaagactcaacaggtgcagcagatcccccccagccccacatcgtaggaatccagagtcccgatcagcaggccgccctggcccgccacaatccagcccggcctgtctttgttgagggccccttctccctgtggctccgcaacaagtgtgtgtattaccacatcctcagagctgacttgctgcccccggaggagagggaagtggaagagacgccggaggagtggaacctctactacccgatgcagctggacctggagtatgtgaggagtggctgggacaactacgagtttgacatcaatgaagtggaggaaggccctgtcttcgccatgtgcatggcgggtgctcatgaccaggcgacgatggctaagtggatccagggcctgcaggagaccaacccaaccctggcccagatccccgtggtcttccgcctcgccgggtccacccgggagctccagacatcctctgcagggctggaggagccgcccctgcccgaggaccaccaggaagaagacgacaacctgcagcgacagcagcagggccagagctagtctgagccggcgcgagggcacgggctgtggcccgaggaggcggtggactgaaggcatgagatgccctttgagtgtacagcaaatcaatgttttcctgcttggggctctcttccctcatctctagcagtatggcatcccctccccaggatctcgggctgccagcgatgggcaggcgagacccctccagaatctgcaggcgcctctggttctccgaattcaaataaaaaggggcgggagcgctgttggttgtgcgcaaaaaaaaaaaaaaaaaaataaaaaaaaacaaaaaaaaaaaaacaaaaaaaaaaacaaaaaagaacaaaacaacaaaaaagaagagagagagacaacacaacaacaaaagaaaacacacataaagaaagaccaacacaaaacaaaaacaaaacacacaacaaaaagaataaagaaaagaaagaagacgcgcaagaggaggagaggcgagagttttctataaaaagagggaaagaagggaaggaccaagacaccaaaagaacgaagacagcggacaacagaaacgagacaccggagagagcaacgggaggaaaaagagaagcataacagcaagtaggggggagctaaaacacaaaagaggagagcacacgcaaacgaccactgaaacaagcgctctgaagcagaagccaactaaagaggggagaaaagcaacagcaccaaagaagcgaagaacgtaacaaagggaatgaacaagcagaacaagacggtagaaaagatcggagcggacagaagaaaaaacaggaaccggggcgtgataaagagacgggagagtagtggtgacggggagagacggacaggtgtccgcgcagcggcggggagaaaaagtggtgaaaagagaggagaggtaggggaaggagaggggaaggcaggcgcaggagcgacaggacggagaaagagagaagaagtaaggtcaaggggcgggcggggagagaggtggagagacagaagacagcaagacgacgaaagacacaggaaggacggggacagtaaaagcaacgcgaagtaccggcgggcgtagaaagaggaggagagcgatacacgattgcagagtaagaccgacagaagagaaaagcaaggaaagagaacggcacgagggaggcagtggcacaagacgagtggagaagacgaacgaaagagggacgaagacccccggggacatcagagagcaagaaacgaag

SEQ ID NO: 369631 - DNA, 2598 bp, Homo sapiens
gatttgctacctccctggagctccctgacccggacgctctctgggccaatatggcagcgcccagcaacaagacagagctggcctggagtccgcggctggccgcgtgagtaggtgattgtctgacaagcagaggcatgagctgggtccaggccaccctactggcccgaggcctctgtagggcctggggaggcacctgcggggccgccctcacaggaacctccatctctcaggtccctcgccggctccctcggggcctccactgcagcgcagctgcccatagctctgaacagtccctggttcccagcccaccggaaccccggcagaggcgcctggtggggaacgggacaaggcgagcttcctgcagacggtgcagaaatttgcggagcacagcgtgcgtaagcggggccacattgacttcatctacctggccctgcgcaagatgcgggagtatggtgtcgagcgggacctggctgtgtacaaccagctgctcaacatcttccccaaggaggtcttccggcctcgcaacatcatccagcgcatcttcgtccactaccctcggcagcaggagtgtgggattgctgtcctggagcagatggagaaccacggtgtgatgcccaacaaggagacggagttcctgctgattcagatctttggacgcaaaagctaccccatgctcaagttggtgcgcctgaagctgtggttccctcgattcatgaacgtcaaccccttcccagtgccccgggacctgccccaggaccctgtggagctggccatgtttggcctgcggcacatggagcctgaccttagtgccagggtcaccatctaccaggttcctttgcccaaagactcaacaggtgcagcagatcccccccagccccacatcgtaggaatccagagtcccgatcagcaggccgccctggcccgccacaatccagcccggcctgtctttgttgagggccccttctccctgtggctccgcaacaagtgtgtgtattaccacatcctcagagctgacttgctgcccccggaggagagggaagtggaagagacgccggaggagtggaacctctactacccgatgcagctggacctggagtatgtgaggagtggctgggacaactacgagtttgacatcaatgaagtggaggaaggccctgtcttcgccatgtgcatggcgggtgctcatgaccaggcgacgatggctaagtggatccagggcctgcaggagaccaacccaaccctggcccagatccccgtggtcttccgcctcgccgggtccacccgggagctccagacatcctctgcagggctggaggagccgcccctgcccgaggaccaccaggaagaagacgacaacctgcagcgacagcagcagggccagagctagtctgagccggcgcgagggcacgggctgtggcccgaggaggcggtggactgaaggcatgagatgccctttgagtgtacagcaaatcaatgttttcctgcttggggctctcttccctcatctctagcagtatggcatcccctccccaggatctcgggctgccagcgatgggcaggcgagacccctccagaatctgcaggcgcctctggttctccgaattcaaataaaaaggggcgggagcgctgttggttgtgcgcaaaaaaaaaaaaaaaaaaataaaaaaaaacaaaaaaaaaaaaacaaaaaaaaaaacaaaaaagaacaaaacaacaaaaaagaagagagagagacaacacaacaacaaaagaaaacacacataaagaaagaccaacacaaaacaaaaacaaaacacacaacaaaaagaataaagaaaagaaagaagacgcgcaagaggaggagaggcgagagttttctataaaaagagggaaagaagggaaggaccaagacaccaaaagaacgaagacagcggacaacagaaacgagacaccggagagagcaacgggaggaaaaagagaagcataacagcaagtaggggggagctaaaacacaaaagaggagagcacacgcaaacgaccactgaaacaagcgctctgaagcagaagccaactaaagaggggagaaaagcaacagcaccaaagaagcgaagaacgtaacaaagggaatgaacaagcagaacaagacggtagaaaagatcggagcggacagaagaaaaaacaggaaccggggcgtgataaagagacgggagagtagtggtgacggggagagacggacaggtgtccgcgcagcggcggggagaaaaagtggtgaaaagagaggagaggtaggggaaggagaggggaaggcaggcgcaggagcgacaggacggagaaagagagaagaagtaaggtcaaggggcgggcggggagagaggtggagagacagaagacagcaagacgacgaaagacacaggaaggacggggacagtaaaagcaacgcgaagtaccggcgggcgtagaaagaggaggagagcgatacacgattgcagagtaagaccgacagaagagaaaagcaaggaaagagaacggcacgagggaggcagtggcacaagacgagtggagaagacgaacgaaagagggacgaagacccccggggacatcagagagcaagaaacgaag

SEQ ID NO: 369632 - DNA, 2417 bp, Homo sapiens
gatttgctacctccctggagctccctgacccggacgctctctgggccaatatggcagcgcccagcaacaagacagagctggcctggagtccgcggctggccgcgtgagtaggtgattgtctgacaagcagaggcatgagctgggtccaggccaccctactggcccgaggcctctgtagggcctggggaggcacctgcggggccgccctcacaggaacctccatctctcaggtccctcgccggctccctcggggcctccactgcagcgcagctgcccatagctctgaacagtccctggttcccagcccaccggaaccccggcagaggcccaccaaggctctggtgccctttgaggacctgtttgggcaggcgcctggtggggaacgggacaaggcgagcttcctgcagacggtgcagaaatttgcggagcacagcgtgcgtaagcggggccacattgacttcatctacctggccctgcgcaagatgcgggagtatggtgtcgagcgggacctggctgtgtacaaccagctgctcaacatcttccccaaggaggtcttccggcctcgcaacatcatccagcgcatcttcgtccactaccctcggcagcaggagtgtgggattgctgtcctggagcagatggagaaccacggttcctttgcccaaagactcaacaggtgcagcagatcccccccagccccacatcgtaggaatccagagtcccgatcagcaggccgccctggcccgccacaatccagcccggcctgtctttgttgagggccccttctccctgtggctccgcaacaagtgtgtgtattaccacatcctcagagctgacttgctgcccccggaggagagggaagtggaagagacgccggaggagtggaacctctactacccgatgcagctggacctggagtatgtgaggagtggctgggacaactacgagtttgacatcaatgaagtggaggaaggccctgtcttcgccatgtgcatggcgggtgctcatgaccaggcgacgatggctaagtggatccagggcctgcaggagaccaacccaaccctggcccagatccccgtggtcttccgcctcgccgggtccacccgggagctccagacatcctctgcagggctggaggagccgcccctgcccgaggaccaccaggaagaagacgacaacctgcagcgacagcagcagggccagagctagtctgagccggcgcgagggcacgggctgtggcccgaggaggcggtggactgaaggcatgagatgccctttgagtgtacagcaaatcaatgttttcctgcttggggctctcttccctcatctctagcagtatggcatcccctccccaggatctcgggctgccagcgatgggcaggcgagacccctccagaatctgcaggcgcctctggttctccgaattcaaataaaaaggggcgggagcgctgttggttgtgcgcaaaaaaaaaaaaaaaaaaataaaaaaaaacaaaaaaaaaaaaacaaaaaaaaaaacaaaaaagaacaaaacaacaaaaaagaagagagagagacaacacaacaacaaaagaaaacacacataaagaaagaccaacacaaaacaaaaacaaaacacacaacaaaaagaataaagaaaagaaagaagacgcgcaagaggaggagaggcgagagttttctataaaaagagggaaagaagggaaggaccaagacaccaaaagaacgaagacagcggacaacagaaacgagacaccggagagagcaacgggaggaaaaagagaagcataacagcaagtaggggggagctaaaacacaaaagaggagagcacacgcaaacgaccactgaaacaagcgctctgaagcagaagccaactaaagaggggagaaaagcaacagcaccaaagaagcgaagaacgtaacaaagggaatgaacaagcagaacaagacggtagaaaagatcggagcggacagaagaaaaaacaggaaccggggcgtgataaagagacgggagagtagtggtgacggggagagacggacaggtgtccgcgcagcggcggggagaaaaagtggtgaaaagagaggagaggtaggggaaggagaggggaaggcaggcgcaggagcgacaggacggagaaagagagaagaagtaaggtcaaggggcgggcggggagagaggtggagagacagaagacagcaagacgacgaaagacacaggaaggacggggacagtaaaagcaacgcgaagtaccggcgggcgtagaaagaggaggagagcgatacacgattgcagagtaagaccgacagaagagaaaagcaaggaaagagaacggcacgagggaggcagtggcacaagacgagtggagaagacgaacgaaagagggacgaagacccccggggacatcagagagcaagaaacgaag

SEQ ID NO: 369633 - DNA, 1880 bp, Homo sapiens
gatttgctacctccctggagctccctgacccggacgctctctgggccaatatggcagcgcccagcaacaagacagagctggcctggagtccgcggctggccgcgtgagtaggttcctttgcccaaagactcaacaggtgcagcagatcccccccagccccacatcgtaggaatccagagtcccgatcagcaggccgccctggcccgccacaatccagcccggcctgtctttgttgagggccccttctccctgtggctccgcaacaagtgtgtgtattaccacatcctcagagctgacttgctgcccccggaggagagggaagtggaagagacgccggaggagtggaacctctactacccgatgcagctggacctggagtatgtgaggagtggctgggacaactacgagtttgacatcaatgaagtggaggaaggccctgtcttcgccatgtgcatggcgggtgctcatgaccaggcgacgatggctaagtggatccagggcctgcaggagaccaacccaaccctggcccagatccccgtggtcttccgcctcgccgggtccacccgggagctccagacatcctctgcagggctggaggagccgcccctgcccgaggaccaccaggaagaagacgacaacctgcagcgacagcagcagggccagagctagtctgagccggcgcgagggcacgggctgtggcccgaggaggcggtggactgaaggcatgagatgccctttgagtgtacagcaaatcaatgttttcctgcttggggctctcttccctcatctctagcagtatggcatcccctccccaggatctcgggctgccagcgatgggcaggcgagacccctccagaatctgcaggcgcctctggttctccgaattcaaataaaaaggggcgggagcgctgttggttgtgcgcaaaaaaaaaaaaaaaaaaataaaaaaaaacaaaaaaaaaaaaacaaaaaaaaaaacaaaaaagaacaaaacaacaaaaaagaagagagagagacaacacaacaacaaaagaaaacacacataaagaaagaccaacacaaaacaaaaacaaaacacacaacaaaaagaataaagaaaagaaagaagacgcgcaagaggaggagaggcgagagttttctataaaaagagggaaagaagggaaggaccaagacaccaaaagaacgaagacagcggacaacagaaacgagacaccggagagagcaacgggaggaaaaagagaagcataacagcaagtaggggggagctaaaacacaaaagaggagagcacacgcaaacgaccactgaaacaagcgctctgaagcagaagccaactaaagaggggagaaaagcaacagcaccaaagaagcgaagaacgtaacaaagggaatgaacaagcagaacaagacggtagaaaagatcggagcggacagaagaaaaaacaggaaccggggcgtgataaagagacgggagagtagtggtgacggggagagacggacaggtgtccgcgcagcggcggggagaaaaagtggtgaaaagagaggagaggtaggggaaggagaggggaaggcaggcgcaggagcgacaggacggagaaagagagaagaagtaaggtcaaggggcgggcggggagagaggtggagagacagaagacagcaagacgacgaaagacacaggaaggacggggacagtaaaagcaacgcgaagtaccggcgggcgtagaaagaggaggagagcgatacacgattgcagagtaagaccgacagaagagaaaagcaaggaaagagaacggcacgagggaggcagtggcacaagacgagtggagaagacgaacgaaagagggacgaagacccccggggacatcagagagcaagaaacgaag

SEQ ID NO: 369634 - DNA, 476 bp, Homo sapiens
cccaacagggagattcgctgtgttaagaactcgagctgttgctattattctaagagactgggtagccagtcaaagggttaaaacagcccttcctacaaggatttgaaaactctgtgctctgctcttcctcagcagacttctcgttgtgagtattggcatttatttctgattatgcacttcccctctttcttgaatgagttgggtgggctagctgagcccatcaaaggtatagctcatttgcttccttttccagggtttgccttcttcctgtgtctgggataattttcagttcatctcctttgtgcagtttctgagaaaggtttgtatgggcttagaggaaaatgatcgtgactaaagctcacagtcaccgctttggctccttttctataaaaggtggtttgatttgatctggcatgaaaaatattatcataattctcaaattcacagaaacgataagttcttgctctttcctgacc

SEQ ID NO: 369635 - DNA, 1080 bp, Homo sapiens
gcaaaccctgaaacagctttgcagaaaaaagggcagatagatggggtgagaactcccaagactgctgaaaatatacctgactttactggttgaattaagaaataagtaatacaagaaaaacacctaagaacagaatcatcagtcctttaatccattctgatgaccatattttcatgtctgctcttaggaccacccagccttctgggccctccccccatggccaatggaaaacctggcgaccctaagtcaggtgaggaggaaggggccctgatccttgtattaggtcgtagagaagacagcaagggaggggataaaacccaggaaggacttaaaaataaaagatcagggattccatccctaaatgaatggagagaagttgtatatttgctgatttaaaaactcaatgttgtaaaaatgtcacttcttcccaaattgataaacagatttcatgcattccaagtcagaacacccataatgtttttgtggaaatacacattattatagggaaatgcaaaatatcaaggcgactatcaagacaatcttgaagtgggagggcttactatgaatatcaagatttgtaagctgggcatggtggcacacgcctgtagtcccagttactcaggaggctgaggtgcgaggatcctttgagcccaggagtttttgaggccactctgggcaacatagtgagatcctgtctctaaatacaagaagaaaaaaaagacttactataaagctacaatagttacaacgatgcagtttggaaacaatgatagacataagtcaataggacttatgtcccgaagagtccaataacaggcccatacatgtgtggacacttcatttatgatgaagatggaactgaaaagttggtcttttcaataaatgatattggatcaattggatattcatgtgaaaaaaatggaatttcaccttgcactcataatcatatacaaagatctatttcaaatggactgtagatctaagtataaaaggtaagagaataattattctagaaagtaaatgtattttctaagagtagctaagagttcttaaacagacaagaaatgcacgtatacacac

SEQ ID NO: 369636 - DNA, 1114 bp, Homo sapiens
ggcggggcctactacctaggggagagggggcgtggacacgctgaggctatactacaaagccccgggcttgaccttagtggaaagccgagactgcgtccaggttgctggactacaccgggggcacggtcagaggtctttaggggagggcggcggtctgagagtcctgggtgccgacctgttgggacccaaattccttgtgggaacgatgataaggagcaggtttacagatcataagtgcaaaagcgggcgagaagggaaacccaagcgggacaaggacttttggggggaggtcaaagggcacgaagttgtgcctgcagctgttaccatagtaaccgaggaccggatgtggcgatcttacggtgcgacagtcctcttctcaggccctctggcccgagagcctgttgactctgtgacacactctgaggagctggttgtggtgttttccagcgagggaagaaaagagtaattttttcaaagcatttatagaaacgcagcaaagggaaggtgtgaggttgccgccatgcctggcagagacggagggaggcagttggctccggaatgcggccgccgcagatgttctccgcaaccttccggaagtggaatggcgggagcctcagcattgctgcccaccgaccccccggaagcggaaacagaatccccgcgtgccccttcctcactaccctccaaatcccgctgcagccattgccgcagacacgatgccgaaacgaaagaagcagaatcatcaccagccaccgacacagcagcagcccccgctgcccgagcgggaagagactggagatgaggaggatgggagtcccatcggtgaggggtctgggagggatgtgcacatgcctgtcaagcccgtccgggcaaggggctaggggctaataaggtgcgaaggagggggctgtaacggaaggaggaagggcgcacgcgctggggagggatggaagtggggctctcccaaatggagccttgaaccaggagttctcttactggaaccatcaacctcaatacggccccagacctttctggagaaggcgggggtggagagaataaagagctcttttgcgcagccgcagaacagtaggggaaaggggtagtagagatgttg

SEQ ID NO: 369637 - DNA, 2474 bp, Homo sapiens
ggcggggcctactacctaggggagagggggcgtggacacgctgaggctatactacaaagccccgggcttgaccttagtggaaagccgagactgcgtccaggttgctggactacaccgggggcacggtcagaggtctttaggggagggcggcggtctgagagtcctgggtgccgacctgttgggacccaaattccttgtgggaacgatgataaggagcaggtttacagatcataagtgcaaaagcgggcgagaagggaaacccaagcgggacaaggacttttggggggaggtcaaagggcacgaagttgtgcctgcagctgttaccatagtaaccgaggaccggatgtggcgatcttacggtgcgacagtcctcttctcaggccctctggcccgagagcctgttgactctgtgacacactctgaggagctggttgtggtgttttccagcgagggaagaaaagagtaattttttcaaagcatttatagaaacgcagcaaagggaaggtgtgaggttgccgccatgcctggcagagacggagggaggcagttggctccggaatgcggccgccgcagatgttctccgcaaccttccggaagtggaatggcgggagcctcagcattgctgcccaccgaccccccggaagcggaaacagaatccccgcgtgccccttcctcactaccctccaaatcccgctgcagccattgccgcagacacgatgccgaaacgaaagaagcagaatcatcaccagccaccgacacagcagcagcccccgctgcccgagcgggaagagactggagatgaggaggatgggagtcccatcgctcttcacagaggtcctccaggatcaaggggaccactgattccaccactgctgagtctcccacctcctccttggggtagaggcccaattcggagagggcttggccccaggtctagcccatatggtcgtggttggtggggagtcaatgcagaacctccttttccggggccaggccatgggggtcccaccaggggaagctttcacaaggaacagagaaaccctcgaaggctcaaaagctggtctcttatcaagaatacctgcccgcccaaggatgacccccaggttatggaagacaaatccgaccgccctgtctgccgacattttgccaaaaagggccactgtcgatatgaggacctctgtgccttctaccacccaggcgtcaatggacctcctctgtgagactgtgccttcccatccaggctggaaggagctctctgtgacctagcggccatttatttctctgtagccctatgatggctactgtgaggctcttctaacaccctcagtcagtgacacacccatcccatccaccacttcccccgtgtggggtccagagtggtgttgcatcactggtgcgcggcatacgcgctttcttctgatccagcctgtagagactcgccttcgggacccatctttgcttcctttcagttgcctcctggatcttctttcccgtcatcaaatgactgctgaacaggaaacctctttggtgctgtttcttgtgcatctgtccacctgttccccagtattgccctcaattcctgagagccctggagcggtttcctaccattcccttcttttagctgcttgttttaagtcctttttatgtgacattccctacccccaatgttgtcagctgcttgtgaaactcagccaggttgtctaacctggggtcaagtttgggtgactggtgcagagttacttcctaaaaggccactctccctgcctttggatttcatagtttctctgtcagtagcatgatccccaccgctatggtctatctatgatcaccgtgctttgtgaaactgtgcatccccttgtagcctttctcagtgtccgtggcatttttgtgacttcccagcactagaataagttttcctgccaaaatgagtgaggcgcttggtgccctctggactttcccacttcccaacatgggagaattgtgaactttccatcagactgcctccctggccctccccattcttctcctgttggttattctgagtctgacacagacccatgacatgtcttataaagcctccaatggctttatcctacctagatcccttccagcccattttaattagactatgtcattgtgaggccaccagtccattcatttgaattctgtgaatctccaccttgcctatctttgggtagaagctggacagtactgttgccctcttccaatcctcttcccctacatccctggcactggttgttttctgtgaaaacagcagtgaacaggttcagttttgaactggccctgaggaaatgggtcaggagttgtattggcaagagggaggggtgagagctgttggagaactgagaatgaggttttttttttttttttctttttaactttttttgtttttgttttttttttttttttttttggttttttttttttttgtgttttctgtgttttgtaaaatt

SEQ ID NO: 369638 - DNA, 1930 bp, Homo sapiens
ggcggggcctactacctaggggagagggggcgtggacacgctgaggctatactacaaagccccgggcttgaccttagtggaaagccgagactgcgtccaggttgctggactacaccgggggcacggtcagaggtctttaggggagggcggcggtctgagagtcctgggtgccgacctgttgggacccaaattccttgtgggaacgatgataaggagcaggtttacagatcataagtgcaaaagcgggcgagaagggaaacccaagcgggacaaggacttttggggggaggtcaaagggcacgaagttgtgcctgcagctgttaccatagtaaccgaggaccggatgtggcgatcttacggtgcgacagtcctcttctcaggccctctggcccgagagcctgttgactctgtgacacactctgaggagctggttgtggtgttttccagcgagggaagaaaagagtaattttttcaaagcatttatagaaacgcagcaaagggaaggtgtgaggttgccgccatgcctggcagagacggagggaggcagttggctccggaatgcggccgccgcagatgttctccgcaaccttccggaagtggaatggcgggagcctcagcattgctgcccaccgaccccccggaagcggaaacagaatccccgcgtgccccttcctcactaccctccaaatcccgctgcagccattgccgcagacacgatgccgaaacgaaagaagcagaatcatcaccagccaccgacacagcagcagcccccgctgcccgagcgggaagagactggagatgaggaggatgggagtcccatcgctcttcacagaggtcctccaggatcaaggggaccactgattccaccactgctgagtctcccacctcctccttggggtagaggcccaattcggagagggcttggccccaggtctagcccatatggtcgtggttggtggggagtcaatgcagaacctccttttccggggccaggccatgggggtcccaccaggggaagctttcacaaggaacagagaaaccctcgaaggctcaaaagctggtctcttatcaagaatacctgcccgcccaaggatgacccccaggttatggaagacaaatccgaccgccctgtctgccgacattttgccaaaaagggccactgtcgatatgaggacctctgtgccttctaccacccaggcgtcaatggacctcctctgtgagactgtgccttcccatccaggctggaaggagctctctgtgacctagcggccatttatttctctgtagccctatgatggctactgtgaggctcttctaacaccctcagtcagtgacacacccatcccatccaccacttcccccgtgtggggtccagagtggtgttgcatcactggtgcgcggcatacgcgctttcttctgatccagcctgtagagactcgccttcgggacccatctttgcttcctttcagttgcctcctggatcttctttcccgtcatcaaatgactgctgaacaggaaacctctttggtgctgtttcttgtgcatctgtccacctgttccccagtattgccctcaattcctgagagccctggagcggtttcctaccattcccttcttttagctgcttgttttaagtcctttttatgtgacattccctacccccaatgttgtcagctgcttgtgaaactcagccaggttgtctaacctggggtcaagtttgggtgactggtgcagagttacttcctaaaaggccactctccctgcctacattgagatgatccttacggaaaaggaacagattgttcctaaaccagaagaggaggttgcccagaagaaaaagatatcccagaagaaactgaagaaacaaaaacttatggcacgggagtaaattcagcattaaaataaatgtaattaaaaggaaaaaaaaaaa

SEQ ID NO: 369639 - DNA, 2691 bp, Homo sapiens
ggcggggcctactacctaggggagagggggcgtggacacgctgaggctatactacaaagccccgggcttgaccttagtggaaagccgagactgcgtccaggttgctggactacaccgggggcacggtcagaggtctttaggggagggcggcggtctgagagtcctgggtgccgacctgttgggacccaaattccttgtgggaacgatgataaggagcaggtttacagatcataagtgcaaaagcgggcgagaagggaaacccaagcgggacaaggacttttggggggaggtcaaagggcacgaagttgtgcctgcagctgttaccatagtaaccgaggaccggatgtggcgatcttacggtgcgacagtcctcttctcaggccctctggcccgagagcctgttgactctgtgacacactctgaggagctggttgtggtgttttccagcgagggaagaaaagagtaattttttcaaagcatttatagaaacgcagcaaagggaaggtgtgaggttgccgccatgcctggcagagacggagggaggcagttggctccggaatgcggccgccgcagatgttctccgcaaccttccggaagtggaatggcgggagcctcagcattgctgcccaccgaccccccggaagcggaaacagaatccccgcgtgccccttcctcactaccctccaaatcccgctgcagccattgccgcagacacgatgccgaaacgaaagaagcagaatcatcaccagccaccgacacagcagcagcccccgctgcccgagcgggaagagactggagatgaggaggatgggagtcccatcggaccacccagccttctgggccctccccccatggccaatggaaaacctggcgaccctaagtcagccccaaactggataccacccacatgtccatcatcagtagaatggataaataaattgttgtgtatgcatgcaatgggactacactgcaacgaaaatgaatgaactgctgctacaggcaacctggatgaatctcacaaacatgatgttgagcgaaaggagccagacataaaagaatgcagactctcttcacagaggtcctccaggatcaaggggaccactgattccaccactgctgagtctcccacctcctccttggggtagaggcccaattcggagagggcttggccccaggtctagcccatatggtcgtggttggtggggagtcaatgcagaacctccttttccggggccaggccatgggggtcccaccaggggaagctttcacaaggaacagagaaaccctcgaaggctcaaaagctggtctcttatcaagaatacctgcccgcccaaggatgacccccaggttatggaagacaaatccgaccgccctgtctgccgacattttgccaaaaagggccactgtcgatatgaggacctctgtgccttctaccacccaggcgtcaatggacctcctctgtgagactgtgccttcccatccaggctggaaggagctctctgtgacctagcggccatttatttctctgtagccctatgatggctactgtgaggctcttctaacaccctcagtcagtgacacacccatcccatccaccacttcccccgtgtggggtccagagtggtgttgcatcactggtgcgcggcatacgcgctttcttctgatccagcctgtagagactcgccttcgggacccatctttgcttcctttcagttgcctcctggatcttctttcccgtcatcaaatgactgctgaacaggaaacctctttggtgctgtttcttgtgcatctgtccacctgttccccagtattgccctcaattcctgagagccctggagcggtttcctaccattcccttcttttagctgcttgttttaagtcctttttatgtgacattccctacccccaatgttgtcagctgcttgtgaaactcagccaggttgtctaacctggggtcaagtttgggtgactggtgcagagttacttcctaaaaggccactctccctgcctttggatttcatagtttctctgtcagtagcatgatccccaccgctatggtctatctatgatcaccgtgctttgtgaaactgtgcatccccttgtagcctttctcagtgtccgtggcatttttgtgacttcccagcactagaataagttttcctgccaaaatgagtgaggcgcttggtgccctctggactttcccacttcccaacatgggagaattgtgaactttccatcagactgcctccctggccctccccattcttctcctgttggttattctgagtctgacacagacccatgacatgtcttataaagcctccaatggctttatcctacctagatcccttccagcccattttaattagactatgtcattgtgaggccaccagtccattcatttgaattctgtgaatctccaccttgcctatctttgggtagaagctggacagtactgttgccctcttccaatcctcttcccctacatccctggcactggttgttttctgtgaaaacagcagtgaacaggttcagttttgaactggccctgaggaaatgggtcaggagttgtattggcaagagggaggggtgagagctgttggagaactgagaatgaggttttttttttttttttctttttaactttttttatattagtaataaatgcagtggaaaccagcattttattta

SEQ ID NO: 369640 - DNA, 2339 bp, Homo sapiens
agatgagattggcatgggccaaccttaacgtggccccaccttaatgtcggtcccatgccgattgtaactattatgagtcctagttgacttgaagtggagaaggctacgaatttttttgatgtcattttgtgtaaggggcccagaactgctgcgaacagagtgggtgatagcgcctaagcatagtgttagagtttggattagtgggctattttctgctagggggtggaagcggatgagtaagaagattcctgctacaactatagtgcttgagtggagtagggctgagactgggatggggcctacttaatgttggtcccttcctcactaccctccaaatcccgctgcagccattgccgcagacacgatgccgaaacgaaagaagcagaatcatcaccagccaccgacacagcagcagcccccgctgcccgagcgggaagagactggagatgaggaggatgggagtcccatcggaccacccagccttctgggccctccccccatggccaatggaaaacctggcgaccctaagtcagccccaaactggataccacccacatgtccatcatcagtagaatggataaataaattgttgtgtatgcatgcaatgggactacactgcaacgaaaatgaatgaactgctgctacaggcaacctggatgaatctcacaaacatgatgttgagcgaaaggagccagacataaaagaatgcagactctcttcacagaggtcctccaggatcaaggggaccactgattccaccactgctgagtctcccacctcctccttggggtagaggcccaattcggagagggcttggccccaggtctagcccatatggtcgtggttggtggggagtcaatgcagaacctccttttccggggccaggccatgggggtcccaccaggggaagctttcacaaggaacagagaaaccctcgaaggctcaaaagctggtctcttatcaagaatacctgcccgcccaaggatgacccccaggttatggaagacaaatccgaccgccctgtctgccgacattttgccaaaaagggccactgtcgatatgaggacctctgtgccttctaccacccaggcgtcaatggacctcctctgtgagactgtgccttcccatccaggctggaaggagctctctgtgacctagcggccatttatttctctgtagccctatgatggctactgtgaggctcttctaacaccctcagtcagtgacacacccatcccatccaccacttcccccgtgtggggtccagagtggtgttgcatcactggtgcgcggcatacgcgctttcttctgatccagcctgtagagactcgccttcgggacccatctttgcttcctttcagttgcctcctggatcttctttcccgtcatcaaatgactgctgaacaggaaacctctttggtgctgtttcttgtgcatctgtccacctgttccccagtattgccctcaattcctgagagccctggagcggtttcctaccattcccttcttttagctgcttgttttaagtcctttttatgtgacattccctacccccaatgttgtcagctgcttgtgaaactcagccaggttgtctaacctggggtcaagtttgggtgactggtgcagagttacttcctaaaaggccactctccctgcctttggatttcatagtttctctgtcagtagcatgatccccaccgctatggtctatctatgatcaccgtgctttgtgaaactgtgcatccccttgtagcctttctcagtgtccgtggcatttttgtgacttcccagcactagaataagttttcctgccaaaatgagtgaggcgcttggtgccctctggactttcccacttcccaacatgggagaattgtgaactttccatcagactgcctccctggccctccccattcttctcctgttggttattctgagtctgacacagacccatgacatgtcttataaagcctccaatggctttatcctacctagatcccttccagcccattttaattagactatgtcattgtgaggccaccagtccattcatttgaattctgtgaatctccaccttgcctatctttgggtagaagctggacagtactgttgccctcttccaatcctcttcccctacatccctggcactggttgttttctgtgaaaacagcagtgaacaggttcagttttgaactggccctgaggaaatgggtcaggagttgtattggcaagagggaggggtgagagctgttggagaactgagaatgaggttttttttttttttttctttttaactttttttatattagtaataaatgcagtggaaaccagcattttattta

SEQ ID NO: 369641 - DNA, 1337 bp, Homo sapiens
ggcggggcctactacctaggggagagggggcgtggacacgctgaggctatactacaaagccccgggcttgaccttagtggaaagccgagactgcgtccaggttgctggactacaccgggggcacggtcagaggtctttaggggagggcggcggtctgagagtcctgggtgccgacctgttgggacccaaattccttgtgggaacgatgataaggagcaggtttacagatcataagtgcaaaagcgggcgagaagggaaacccaagcgggacaaggacttttggggggaggtcaaagggcacgaagttgtgcctgcagctgttaccatagtaaccgaggaccggatgtggcgatcttacggtgcgacagtcctcttctcaggccctctggcccgagagcctgttgactctgtgacacactctgaggagctggttgtggtgttttccagcgagggaagaaaagagtaattttttcaaagcatttatagaaacgcagcaaagggaaggtgtgaggttgccgccatgcctggcagagacggagggaggcagttggctccggaatgcggccgccgcagatgttctccgcaaccttccggaagtggaatggcgggagcctcagcattgctgcccaccgaccccccggaagcggaaacagaatccccgcgtgccccttcctcactaccctccaaatcccgctgcagccattgccgcagacacgatgccgaaacgaaagaagcagaatcatcaccagccaccgacacagcagcagcccccgctgcccgagcgggaagagactggagatgaggaggatgggagtcccatcggaccacccagccttctgggccctccccccatggccaatggaaaacctggcgaccctaagtcagccccaaactggataccacccacatgtccatcatcagtagaatggataaataaattgttgtgtatgcatgcaatgggactacactgcaacgaaaatgaatgaactgctgctacaggcaacctggatgaatctcacaaacatgatgttgagcgaaaggagccagacataaaagaatgcagactgtatgattccatttttgtgaagttcaaaaacaggcaaaaactaacctatggtgtcaggatagtggttacctttggggaggagggtgggtaatgggaaaaggggcacaaggggaggatcttttgaggtgctaataaggctttatctcttcacctggtggtggaaactcaagtgtgtctactttgtgagaactgggttgtgcacttaaaactggtgtgtctttatgtatgctgttcttcaataaaaaaaatttttttaatcacggttatcagg

SEQ ID NO: 369642 - DNA, 1715 bp, Homo sapiens
ggcggggcctactacctaggggagagggggcgtggacacgctgaggctatactacaaagccccgggcttgaccttagtggaaagccgagactgcgtccaggttgctggactacaccgggggcacggtcagaggtctttaggggagggcggcggtctgagagtcctgggtgccgacctgttgggacccaaattccttgtgggaacgatgataaggagcaggtttacagatcataagtgcaaaagcgggcgagaagggaaacccaagcgggacaaggacttttggggggaggtcaaagggcacgaagttgtgcctgcagctgttaccatagtaaccgaggaccggatgtggcgatcttacggtgcgacagtcctcttctcaggccctctggcccgagagcctgttgactctgtgacacactctgaggagctggttgtggtgttttccagcgagggaagaaaagagtaattttttcaaagcatttatagaaacgcagcaaagggaaggtgtgaggttgccgccatgcctggcagagacggagggaggcagttggctccggaatgcggccgccgcagatgttctccgcaaccttccggaagtggaatggcgggagcctcagcattgctgcccaccgaccccccggaagcggaaacagaatccccgcgtgccccttcctcactaccctccaaatcccgctgcagccattgccgcagacacgatgccgaaacgaaagaagcagaatcatcaccagccaccgacacagcagcagcccccgctgcccgagcgggaagagactggagatgaggaggatgggagtcccatcggaccacccagccttctgggccctccccccatggccaatggaaaacctggcgaccctaagtcaggtgaggaggaaggggccctgatccttgtattaggtcgtagagaagacagcaagggaggggataaaacccaggaaggacttaaaaataaaagatcagggattccatccctaaatgaatggagagaagttgtatatttgctgatttaaaaactcaatgttgtaaaaatgtcacttcttcccaaattgataaacagatttcatgcattccaagtcagaacacccataatgtttttgtggaaatacacattattatagggaaatgcaaaatatcaaggcgactatcaagacaatcttgaagtgggagggcttactatgaatatcaagatttgtaagctgggcatggtggcacacgcctgtagtcccagttactcaggaggctgaggtgcgaggatcctttgagcccaggagtttttgaggccactctgggcaacatagtgagatcctgtctctaaatacaagaagaaaaaaaagacttactataaagctacaatagttacaacgatgcagtttggaaacaatgatagacataagtcaataggacttatgtcccgaagagtccaataacaggcccatacatgtgtggacacttcatttatgatgaagatggaactgaaaagttggtcttttcaataaatgatattggatcaattggatattcatgtgaaaaaaatggaatttcaccttgcactcataatcatatacaaagatctatttcaaatggactgtagatctaagtataaaaggtaagagaataattattctagaaagtaaatgtattttctaagagtagctaagagttcttaaacagacaagaaatgcacgtatacacac

SEQ ID NO: 369643 - DNA, 1237 bp, Homo sapiens
ggcggggcctactacctaggggagagggggcgtggacacgctgaggctatactacaaagccccgggcttgaccttagtggaaagccgagactgcgtccaggttgctggactacaccgggggcacggtcagaggtctttaggggagggcggcggtctgagagtcctgggtgccgacctgttgggacccaaattccttgtgggaacgatgataaggagcaggtttacagatcataagtgcaaaagcgggcgagaagggaaacccaagcgggacaaggacttttggggggaggtcaaagggcacgaagttgtgcctgcagctgttaccatagtaaccgaggaccggatgtggcgatcttacggtgcgacagtcctcttctcaggccctctggcccgagagcctgttgactctgtgacacactctgaggagctggttgtggtgttttccagcgagggaagaaaagagtaattttttcaaagcatttatagaaacgcagcaaagggaaggtgtgaggttgccgccatgcctggcagagacggagggaggcagttggctccggaatgcggccgccgcagatgttctccgcaaccttccggaagtggaatggcgggagcctcagcattgctgcccaccgaccccccggaagcggaaacagaatccccgcgtgccccttcctcactaccctccaaatcccgctgcagccattgccgcagacacgatgccgaaacgaaagaagcagaatcatcaccagccaccgacacagcagcagcccccgctgcccgagcgggaagagactggagatgaggaggatgggagtcccatcggaccacccagccttctgggccctccccccatggccaatggaaaacctggcgaccctaagtcagccccaaactggataccacccacatgtccatcatcagtagaatggataaataaattgttgtgtatgcatgcaatgggactacactgcaacgaaaatgaatgaactgctgctacaggcaaaaactaacctatggtgtcaggatagtggttacctttggggaggagggtgggtaatgggaaaaggggcacaaggggaggatcttttgaggtgctaataaggctttatctcttcacctggtggtggaaactcaagtgtgtctactttgtgagaactgggttgtgcacttaaaactggtgtgtctttatgtatgctgttcttcaataaaaaaaatttttttaatcacggttatcagg

SEQ ID NO: 369644 - DNA, 2974 bp, Homo sapiens
ggcggggcctactacctaggggagagggggcgtggacacgctgaggctatactacaaagccccgggcttgaccttagtggaaagccgagactgcgtccaggttgctggactacaccgggggcacggtcagaggtctttaggggagggcggcggtctgagagtcctgggtgccgacctgttgggacccaaattccttgtgggaacgatgataaggagcaggtttacagatcataagtgcaaaagcgggcgagaagggaaacccaagcgggacaaggacttttggggggaggtcaaagggcacgaagttgtgcctgcagctgttaccatagtaaccgaggaccggatgtggcgatcttacggtgcgacagtcctcttctcaggccctctggcccgagagcctgttgactctgtgacacactctgaggagctggttgtggtgttttccagcgagggaagaaaagagtaattttttcaaagcatttatagaaacgcagcaaagggaaggtgtgaggttgccgccatgcctggcagagacggagggaggcagttggctccggaatgcggccgccgcagatgttctccgcaaccttccggaagtggaatggcgggagcctcagcattgctgcccaccgaccccccggaagcggaaacagaatccccgcgtgccccttcctcactaccctccaaatcccgctgcagccattgccgcagacacgatgccgaaacgaaagaagcagaatcatcaccagccaccgacacagcagcagcccccgctgcccgagcgggaagagactggagatgaggaggatgggagtcccatcggaccacccagccttctgggccctccccccatggccaatggaaaacctggcgaccctaagtcagctcttcacagaggtcctccaggatcaaggggaccactgattccaccactgctgagtctcccacctcctccttggggtagaggcccaattcggagagggcttggccccaggtctagcccatatggtcgtggttggtggggagtcaatgcagaacctccttttccggggccaggccatgggggtcccaccaggggaagctttcacaaggaacagagaaaccctcgaaggctcaaaagctggtctcttatcaagaatacctgcccgcccaaggatgacccccaggttatggaagacaaatccgaccgccctgtctgccgacattttgccaaaaagggccactgtcgatatgaggacctctgtgccttctaccacccaggcgtcaatggacctcctctgtgagactgtgccttcccatccaggctggaaggagctctctgtgacctagcggccatttatttctctgtagccctatgatggctactgtgaggctcttctaacaccctcagtcagtgacacacccatcccatccaccacttcccccgtgtggggtccagagtggtgttgcatcactggtgcgcggcatacgcgctttcttctgatccagcctgtagagactcgccttcgggacccatctttgcttcctttcagttgcctcctggatcttctttcccgtcatcaaatgactgctgaacaggaaacctctttggtgctgtttcttgtgcatctgtccacctgttccccagtattgccctcaattcctgagagccctggagcggtttcctaccattcccttcttttagctgcttgttttaagtcctttttatgtgacattccctacccccaatgttgtcagctgcttgtgaaactcagccaggttgtctaacctggggtcaagtttgggtgactggtgcagagttacttcctaaaaggccactctccctgcctttggatttcatagtttctctgtcagtagcatgatccccaccgctatggtctatctatgatcaccgtgctttgtgaaactgtgcatccccttgtagcctttctcagtgtccgtggcatttttgtgacttcccagcactagaataagttttcctgccaaaatgagtgaggcgcttggtgccctctggactttcccacttcccaacatgggagaattgtgaactttccatcagactgcctccctggccctccccattcttctcctgttggttattctgagtctgacacagacccatgacatgtcttataaagcctccaatggctttatcctacctagatcccttccagcccattttaattagactatgtcattgtgaggccaccagtccattcatttgaattctgtgaatctccaccttgcctatctttgggtagaagctggacagtactgttgccctcttccaatcctcttcccctacatccctggcactggttgttttctgtgaaaacagcagtgaacaggttcagttttgaactggccctgaggaaatgggtcaggagttgtattggcaagagggaggggtgagagctgttggagaactgagaatgaggttttttttttttttttctttttaactttttttatattagtaataaatgcagtggaaaccagcattttatttaatccctgtgttctagtcatctctggagttgcagatgaagctgttctcacctggtggagtcagcttattctttagttcatacacactagtgatggggaatgacaaagcttaaggttcttccaggctgaaaaaaaccaatggaggttccattagcctgtaggcatcaaccagaacaagctgccttatgttcaagggcaaagttttgtaagaaaaaggaaaggccaggtgtccgtggagttatttttaaatattttactttgcagagtttgtgtttatggagtggtaatgatgaaggagtctttcagcagcaatttgcagaatgcctgtgggccaggcaatataccaagcactagagataactgacagccaaagccaatggatttaaaatgtacagggaagacaggtttctcataatcacaaatagcatgtaaagttaaacctgtcaaaagtgctgggaagaagaca

SEQ ID NO: 369645 - DNA, 2447 bp, Homo sapiens
ggcggggcctactacctaggggagagggggcgtggacacgctgaggctatactacaaagccccgggcttgaccttagtggaaagccgagactgcgtccaggttgctggactacaccgggggcacggtcagaggtctttaggggagggcggcggtctgagagtcctgggtgccgacctgttgggacccaaattccttgtgggaacgatgataaggagcaggtttacagatcataagtgcaaaagcgggcgagaagggaaacccaagcgggacaaggacttttggggggaggtcaaagggcacgaagttgtgcctgcagctgttaccatagtaaccgaggaccggatgtggcgatcttacggtgcgacagtcctcttctcaggccctctggcccgagagcctgttgactctgtgacacactctgaggagctggttgtggtgttttccagcgagggaagaaaagagtaattttttcaaagcatttatagaaacgcagcaaagggaaggtgtgaggttgccgccatgcctggcagagacggagggaggcagttggctccggaatgcggccgccgcagatgttctccgcaaccttccggaagtggaatggcgggagcctcagcattgctgcccaccgaccccccggaagcggaaacagaatccccgcgtgccccttcctcactaccctccaaatcccgctgcagccattgccgcagacacgatgccgaaacgaaagaagcagaatcatcaccagccaccgacacagcagcagcccccgctgcccgagcgggaagagactggagatgaggaggatgggagtcccatcgctcttcacagaggtcctccaggatcaaggggaccactgattccaccactgctgagtctcccacctcctccttggggtagaggcccaattcggagagggcttggccccaggtctagcccatatggtcgtggttggtggggagtcaatgcagaacctccttttccggggccaggccatgggggtcccaccaggggaagctttcacaaggaacagagaaaccctcgaaggctcaaaagctggtctcttatcaagaatacctgcccgcccaaggatgacccccaggttatggaagacaaatccgaccgccctgtctgccgacattttgccaaaaagggccactgtcgatatgaggacctctgtgccttctaccacccaggcgtcaatggacctcctctgtgagactgtgccttcccatccaggctggaaggagctctctgtgacctagcggccatttatttctctgtagccctatgatggctactgtgaggctcttctaacaccctcagtcagtgacacacccatcccatccaccacttcccccgtgtggggtccagagtggtgttgcatcactggtgcgcggcatacgcgctttcttctgatccagcctgtagagactcgccttcgggacccatctttgcttcctttcagttgcctcctggatcttctttcccgtcatcaaatgactgctgaacaggaaacctctttggtgctgtttcttgtgcatctgtccacctgttccccagtattgccctcaattcctgagagccctggagcggtttcctaccattcccttcttttagctgcttgttttaagtcctttttatgtgacattccctacccccaatgttgtcagctgcttgtgaaactcagccaggttgtctaacctggggtcaagtttgggtgactggtgcagagttacttcctaaaaggccactctccctgcctttggatttcatagtttctctgtcagtagcatgatccccaccgctatggtctatctatgatcaccgtgctttgtgaaactgtgcatccccttgtagcctttctcagtgtccgtggcatttttgtgacttcccagcactagaataagttttcctgccaaaatgagtgaggcgcttggtgccctctggactttcccacttcccaacatgggagaattgtgaactttccatcagactgcctccctggccctccccattcttctcctgttggttattctgagtctgacacagacccatgacatgtcttataaagcctccaatggctttatcctacctagatcccttccagcccattttaattagactatgtcattgtgaggccaccagtccattcatttgaattctgtgaatctccaccttgcctatctttgggtagaagctggacagtactgttgccctcttccaatcctcttcccctacatccctggcactggttgttttctgtgaaaacagcagtgaacaggttcagttttgaactggccctgaggaaatgggtcaggagttgtattggcaagagggaggggtgagagctgttggagaactgagaatgaggttttttttttttttttctttttaactttttttatattagtaataaatgcagtggaaaccagcattttattta

SEQ ID NO: 369646 - DNA, 2628 bp, Homo sapiens
ggcggggcctactacctaggggagagggggcgtggacacgctgaggctatactacaaagccccgggcttgaccttagtggaaagccgagactgcgtccaggttgctggactacaccgggggcacggtcagaggtctttaggggagggcggcggtctgagagtcctgggtgccgacctgttgggacccaaattccttgtgggaacgatgataaggagcaggtttacagatcataagtgcaaaagcgggcgagaagggaaacccaagcgggacaaggacttttggggggaggtcaaagggcacgaagttgtgcctgcagctgttaccatagtaaccgaggaccggatgtggcgatcttacggtgcgacagtcctcttctcaggccctctggcccgagagcctgttgactctgtgacacactctgaggagctggttgtggtgttttccagcgagggaagaaaagagtaattttttcaaagcatttatagaaacgcagcaaagggaaggtgtgaggttgccgccatgcctggcagagacggagggaggcagttggctccggaatgcggccgccgcagatgttctccgcaaccttccggaagtggaatggcgggagcctcagcattgctgcccaccgaccccccggaagcggaaacagaatccccgcgtgccccttcctcactaccctccaaatcccgctgcagccattgccgcagacacgatgccgaaacgaaagaagcagaatcatcaccagccaccgacacagcagcagcccccgctgcccgagcgggaagagactggagatgaggaggatgggagtcccatcgccccaaactggataccacccacatgtccatcatcagtagaatggataaataaattgttgtgtatgcatgcaatgggactacactgcaacgaaaatgaatgaactgctgctacaggcaacctggatgaatctcacaaacatgatgttgagcgaaaggagccagacataaaagaatgcagactctcttcacagaggtcctccaggatcaaggggaccactgattccaccactgctgagtctcccacctcctccttggggtagaggcccaattcggagagggcttggccccaggtctagcccatatggtcgtggttggtggggagtcaatgcagaacctccttttccggggccaggccatgggggtcccaccaggggaagctttcacaaggaacagagaaaccctcgaaggctcaaaagctggtctcttatcaagaatacctgcccgcccaaggatgacccccaggttatggaagacaaatccgaccgccctgtctgccgacattttgccaaaaagggccactgtcgatatgaggacctctgtgccttctaccacccaggcgtcaatggacctcctctgtgagactgtgccttcccatccaggctggaaggagctctctgtgacctagcggccatttatttctctgtagccctatgatggctactgtgaggctcttctaacaccctcagtcagtgacacacccatcccatccaccacttcccccgtgtggggtccagagtggtgttgcatcactggtgcgcggcatacgcgctttcttctgatccagcctgtagagactcgccttcgggacccatctttgcttcctttcagttgcctcctggatcttctttcccgtcatcaaatgactgctgaacaggaaacctctttggtgctgtttcttgtgcatctgtccacctgttccccagtattgccctcaattcctgagagccctggagcggtttcctaccattcccttcttttagctgcttgttttaagtcctttttatgtgacattccctacccccaatgttgtcagctgcttgtgaaactcagccaggttgtctaacctggggtcaagtttgggtgactggtgcagagttacttcctaaaaggccactctccctgcctttggatttcatagtttctctgtcagtagcatgatccccaccgctatggtctatctatgatcaccgtgctttgtgaaactgtgcatccccttgtagcctttctcagtgtccgtggcatttttgtgacttcccagcactagaataagttttcctgccaaaatgagtgaggcgcttggtgccctctggactttcccacttcccaacatgggagaattgtgaactttccatcagactgcctccctggccctccccattcttctcctgttggttattctgagtctgacacagacccatgacatgtcttataaagcctccaatggctttatcctacctagatcccttccagcccattttaattagactatgtcattgtgaggccaccagtccattcatttgaattctgtgaatctccaccttgcctatctttgggtagaagctggacagtactgttgccctcttccaatcctcttcccctacatccctggcactggttgttttctgtgaaaacagcagtgaacaggttcagttttgaactggccctgaggaaatgggtcaggagttgtattggcaagagggaggggtgagagctgttggagaactgagaatgaggttttttttttttttttctttttaactttttttatattagtaataaatgcagtggaaaccagcattttattta

SEQ ID NO: 369647 - DNA, 1910 bp, Homo sapiens
taacagtattataagatagaattttttgcaggatgcgataggataggcccattaatgaggatctgctcagcaacaacgaagtcagtaatcatcgtatcactgattgcctgaatactgagagatagtcgtaatcgtaacagctagtcaccgacatctaagcaagctaacccccgctgcccgagcgggaagagactggagatgaggaggatgggagtcccatcggaccacccagccttctgggccctccccccatggccaatggaaaacctggcgaccctaagtcagctcttcacagaggtcctccaggatcaaggggaccactgattccaccactgctgagtctcccacctcctccttggggtagaggcccaattcggagagggcttggccccaggtctagcccatatggtcgtggttggtggggagtcaatgcagaacctccttttccggggccaggccatgggggtcccaccaggggaagctttcacaaggaacagagaaaccctcgaaggctcaaaagctggtctcttatcaagaatacctgcccgcccaaggatgacccccaggttatggaagacaaatccgaccgccctgtctgccgacattttgccaaaaagggccactgtcgatatgaggacctctgtgccttctaccacccaggcgtcaatggacctcctctgtgagactgtgccttcccatccaggctggaaggagctctctgtgacctagcggccatttatttctctgtagccctatgatggctactgtgaggctcttctaacaccctcagtcagtgacacacccatcccatccaccacttcccccgtgtggggtccagagtggtgttgcatcactggtgcgcggcatacgcgctttcttctgatccagcctgtagagactcgccttcgggacccatctttgcttcctttcagttgcctcctggatcttctttcccgtcatcaaatgactgctgaacaggaaacctctttggtgctgtttcttgtgcatctgtccacctgttccccagtattgccctcaattcctgagagccctggagcggtttcctaccattcccttcttttagctgcttgttttaagtcctttttatgtgacattccctacccccaatgttgtcagctgcttgtgaaactcagccaggttgtctaacctggggtcaagtttgggtgactggtgcagagttacttcctaaaaggccactctccctgcctttggatttcatagtttctctgtcagtagcatgatccccaccgctatggtctatctatgatcaccgtgctttgtgaaactgtgcatccccttgtagcctttctcagtgtccgtggcatttttgtgacttcccagcactagaataagttttcctgccaaaatgagtgaggcgcttggtgccctctggactttcccacttcccaacatgggagaattgtgaactttccatcagactgcctccctggccctccccattcttctcctgttggttattctgagtctgacacagacccatgacatgtcttataaagcctccaatggctttatcctacctagatcccttccagcccattttaattagactatgtcattgtgaggccaccagtccattcatttgaattctgtgaatctccaccttgcctatctttgggtagaagctggacagtactgttgccctcttccaatcctcttcccctacatccctggcactggttgttttctgtgaaaacagcagtgaacaggttcagttttgaactggccctgaggaaatgggtcaggagttgtattggcaagagggaggggtgagagctgttggagaactgagaatgaggttttttttttttttttctttttaactttttttatattagtaataaatgcagtggaaaccagcattttattta

SEQ ID NO: 369648 - DNA, 1274 bp, Homo sapiens
ggcggggcctactacctaggggagagggggcgtggacacgctgaggctatactacaaagccccgggcttgaccttagtggaaagccgagactgcgtccaggttgctggactacaccgggggcacggtcagaggtctttaggggagggcggcggtctgagagtcctgggtgccgacctgttgggacccaaattccttgtgggaacgatgataaggagcaggtttacagatcataagtgcaaaagcgggcgagaagggaaacccaagcgggacaaggacttttggggggaggtcaaagggcacgaagttgtgcctgcagctgttaccatagtaaccgaggaccggatgtggcgatcttacggtgcgacagtcctcttctcaggccctctggcccgagagcctgttgactctgtgacacactctgaggagctggttgtggtgttttccagcgagggaagaaaagagtaattttttcaaagcatttatagaaacgcagcaaagggaaggtgtgaggttgccgccatgcctggcagagacggagggaggcagttggctccggaatgcggccgccgcagatgttctccgcaaccttccggaagtggaatggcgggagcctcagcattgctgcccaccgaccccccggaagcggaaacagaatccccgcgtgccccttcctcactaccctccaaatcccgctgcagccattgccgcagacacgatgccgaaacgaaagaagcagaatcatcaccagccaccgacacagcagcagcccccgctgcccgagcgggaagagactggagatgaggaggatgggagtcccatcgccccaaactggataccacccacatgtccatcatcagtagaatggataaataaattgttgtgtatgcatgcaatgggactacactgcaacgaaaatgaatgaactgctgctacaggcaacctggatgaatctcacaaacatgatgttgagcgaaaggagccagacataaaagaatgcagactgtatgattccatttttgtgaagttcaaaaacaggcaaaaactaacctatggtgtcaggatagtggttacctttggggaggagggtgggtaatgggaaaaggggcacaaggggaggatcttttgaggtgctaataaggctttatctcttcacctggtggtggaaactcaagtgtgtctactttgtgagaactgggttgtgcacttaaaactggtgtgtctttatgtatgctgttcttcaataaaaaaaatttttttaatcacggttatcagg

SEQ ID NO: 369649 - DNA, 366 bp, Homo sapiens
gaagcggacgccagttccagactccctaggcctagaaatggagcacaggttcattgatcaagtattgtccacctgtcggaacgtggagcaagccaggtttgccagtgcatacaggaaatggctggttactttgagtcaatgaaagaggtgaattagtcctacaaggttccccttttagtgcaatattgctttcttttattatttacatagttgcatgaactgtttactattattggctaaccatatgttcttcgtctttaggttgaaagtccatagtaaatctttcattttatttattttgttaataactggcattcctgtggggataaaataatcgtatagttccttcctgctgaacagcgagtc

SEQ ID NO: 369650 - DNA, 4532 bp, Homo sapiens
aattctcgagctcgtcgaccggtcgacgagctcgagggtcgacgagctcgagggcgcgcgcccggcccccacccctcgcagcaccccgcgccccgcgccctcccagccgggtccagccggagccatggggccggagccgcagtgagcaccatggagctggcggccttgtgccgctgggggctcctcctcgccctcttgccccccggagccgcgagcacccaagtgtgcaccggcacagacatgaagctgcggctccctgccagtcccgagacccacctggacatgctccgccacctctaccagggctgccaggtggtgcagggaaacctggaactcacctacctgcccaccaatgccagcctgtccttcctgcaggatatccaggaggtgcagggctacgtgctcatcgctcacaaccaagtgaggcaggtcccactgcagaggctgcggattgtgcgaggcacccagctctttgaggacaactatgccctggccgtgctagacaatggagacccgctgaacaataccacccctgtcacaggggcctccccaggaggcctgcgggagctgcagcttcgaagcctcacagagatcttgaaaggaggggtcttgatccagcggaacccccagctctgctaccaggacacgattttgtggaaggacatcttccacaagaacaaccagctggctctcacactgatagacaccaaccgctctcgggcctgccacccctgttctccgatgtgtaagggctcccgctgctggggagagagttctgaggattgtcagagcctgacgcgcactgtctgtgccggtggctgtgcccgctgcaaggggccactgcccactgactgctgccatgagcagtgtgctgccggctgcacgggccccaagcactctgactgcctggcctgcctccacttcaaccacagtggcatctgtgagctgcactgcccagccctggtcacctacaacacagacacgtttgagtccatgcccaatcccgagggccggtatacattcggcgccagctgtgtgactgcctgtccctacaactacctttctacggacgtgggatcctgcaccctcgtctgccccctgcacaaccaagaggtgacagcagaggatggaacacagcggtgtgagaagtgcagcaagccctgtgcccgagtgtgctatggtctgggcatggagcacttgcgagaggtgagggcagttaccagtgccaatatccaggagtttgctggctgcaagaagatctttgggagcctggcatttctgccggagagctttgatggggacccagcctccaacactgccccgctccagccagagcagctccaagtgtttgagactctggaagagatcacaggttacctatacatctcagcatggccggacagcctgcctgacctcagcgtcttccagaacctgcaagtaatccggggacgaattctgcacaatggcgcctactcgctgaccctgcaagggctgggcatcagctggctggggctgcgctcactgagggaactgggcagtggactggccctcatccaccataacacccacctctgcttcgtgcacacggtgccctgggaccagctctttcggaacccgcaccaagctctgctccacactgccaaccggccagaggacgagtgtgtgggcgagggcctggcctgccaccagctgtgcgcccgagggcactgctggggtccagggcccacccagtgtgtcaactgcagccagttccttcggggccaggagtgcgtggaggaatgccgagtactgcaggggctccccagggagtatgtgaatgccaggcactgtttgccgtgccaccctgagtgtcagccccagaatggctcagtgacctgttttggaccggaggctgaccagtgtgtggcctgtgcccactataaggaccctcccttctgcgtggcccgctgccccagcggtgtgaaacctgacctctcctacatgcccatctggaagtttccagatgaggagggcgcatgccagccttgccccatcaactgcacccactcctgtgtggacctggatgacaagggctgccccgccgagcagagagccagccctctgacgtccatcatctctgcggtggttggcattctgctggtcgtggtcttgggggtggtctttgggatcctcatcaagcgacggcagcagaagatccggaagtacacgatgcggagactgctgcaggaaacggagctggtggagccgctgacacctagcggagcgatgcccaaccaggcgcagatgcggatcctgaaagagacggagctgaggaaggtgaaggtgcttggatctggcgcttttggcacagtctacaagggcatctggatccctgatggggagaatgtgaaaattccagtggccatcaaagtgttgagggaaaacacatcccccaaagccaacaaagaaatcttagacgaagcatacgtgatggctggtgtgggctccccatatgtctcccgccttctgggcatctgcctgacatccacggtgcagctggtgacacagcttatgccctatggctgcctcttagaccatgtccgggaaaaccgcggacgcctgggctcccaggacctgctgaactggtgtatgcagattgccaaggggatgagctacctggaggatgtgcggctcgtacacagggacttggccgctcggaacgtgctggtcaagagtcccaaccatgtcaaaattacagacttcgggctggctcggctgctggacattgacgagacagagtaccatgcagatgggggcaaggtgcccatcaagtggatggcgctggagtccattctccgccggcggttcacccaccagagtgatgtgtggagttatggtgtgactgtgtgggagctgatgacttttggggccaaaccttacgatgggatcccagcccgggagatccctgacctgctggaaaagggggagcggctgccccagccccccatctgcaccattgatgtctacatgatcatggtcaaatgttggatgattgactctgaatgtcggccaagattccgggagttggtgtctgaattctcccgcatggccagggacccccagcgctttgtggtcatccagaatgaggacttgggcccagccagtcccttggacagcaccttctaccgctcactgctggaggacgatgacatgggggacctggtggatgctgaggagtatctggtaccccagcagggcttcttctgtccagaccctgccccgggcgctgggggcatggtccaccacaggcaccgcagctcatctaccaggagtggcggtggggacctgacactagggctggagccctctgaagaggaggcccccaggtctccactggcaccctccgaaggggctggctccgatgtatttgatggtgacctgggaatgggggcagccaaggggctgcaaagcctccccacacatgaccccagccctctacagcggtacagtgaggaccccacagtacccctgccctctgagactgatggctacgttgcccccctgacctgcagcccccagcctgaatatgtgaaccagccagatgttcggccccagcccccttcgccccgagagggccctctgcctgctgcccgacctgctggtgccactctggaaaggcccaagactctctccccagggaagaatggggtcgtcaaagacgtttttgcctttgggggtgccgtggagaaccccgagtacttgacaccccagggaggagctgcccctcagccccaccctcctcctgccttcagcccagccttcgacaacctctattactgggaccaggacccaccagagcggggggctccacccagcaccttcaaagggacacctacggcagagaacccagagtacctgggtctggacgtgccagtgtgaaccagaaggccaagtccgcagaagccctgatgtgtcctcagggagcagggaaggcctgacttctgctggcatcaagaggtgggagggccctccgaccacttccaggggaacctgccatgccaggaacctgtcctaaggaaccttccttcctgcttgagttcccagatggctggaaggggtccagcctcgttggaagaggaacagcactggggagtctttgtggattctgaggccctgcccaatgagactctagggtccagtggatgccacagcccagcttggccctttccttccagatcctgggtactgaaagccttagggaagctggcctgagaggggaagcggccctaagggagtgtctaagaacaaaagcgacccattcagagactgtccctgaaacctagtactgccccccatgaggaaggaacagcaatggtgtcagtatccaggctttgtacagagtgcttttctgtttagtttttactttttttgttttgtttttttaaagatgaaataaagacccagggggagaatgggtgttgtatggggaggcaagtgtggggggtccttctccacacccactttgtccatttgcaaatatattttggaaaaca

SEQ ID NO: 369651 - DNA, 491 bp, Homo sapiens
ccgtcagtcgctcttgtggctgcctgcctacaactacctttctacggacgtgggatcctgcaccctcgtctgccccctgcacaaccaagaggtgacagcagaggatggaacacagcggtgtgaggagaggaagaaagaaaagcagcttcacagtcaaagatgggtttattttggagaacaagcctgagcggggcttctggctgagttaggtcaggagtgttctctcttacagactaagggtatgtaggggtttaggaaggggaatcttatcgcaggctcggaatgtttccctgtgaggcaaagttgagtgaggtgttagaatgtctctggtctgaaggaggttatcttgggcttgggatgtttctggtcagaggcggtttatgtcaggcttggagtgtttcgggtcatgctgacattagccattaggctgatgttgtggggctggttttaggcagtttttaatcacgggaacttaaaatggcaaggcttgt

SEQ ID NO: 369652 - DNA, 401 bp, Homo sapiens
tctagcctcgccagtgtcctagcctcgccagtgtcctagcctcgccagtgtcctagcctcgccagtggctgggggccttgcccaagatctccaagtactggggaaccccagggaggccctggggggtggcagtgttcctatttcagccccactctgcttccccctcccaggatatccaggaggtgcagggctacgtgctcatcgctcacaaccaagtgaggcaggtcccactgcagaggctgcggattgtgcgaggcacccagctctttgaggacaactatgccctggccgtgctagacaatggagaccaggaaagaccagaaggaagaggaggaagagagaggcaggagcaggcgtagggaagaaagaggacagaaataacaggtttcagagatgcccgc

SEQ ID NO: 369653 - DNA, 421 bp, Homo sapiens
ttagaggatccgggcgacttctctctccggggggagtggctgggaatcttcagaaagcttggatgaggagccagacatccagttctccagcttcagggttgggggagatcgggaagctggattcagatctgagagccctttgacgaccagatcattcttatttagaacgaactaattcctaaggccactcaccagaatggggttatttcctccttgtgagtgaggagagtggtgggtagggtgggggaaagacgaggcagggtctactgtgggactcattttccttgccttggctatgccagaggagctcactgacctaaggagtagctgtccagaaagcccacccagccagcacagccaccctggcggtgcaaaggctgggctgaccggacttctgtgccccccacattcccagactgga

SEQ ID NO: 369654 - DNA, 5061 bp, Homo sapiens
  misc_feature (32)..(33): n is a, c, g, or t
  misc_feature (5061)..(5061): n is a, c, g, or t
aaggggaggtaaccctggcccctttggtcggnnccccgggcagccgcgcgccccttcccacggggccctttactgcgccgcgcgcccggcccccacccctcgcagcaccccgcgccccgcgccctcccagccgggtccagccggagccatggggccggagccgcagtgagcaccatggagctggcggccttgtgccgctgggggctcctcctcgccctcttgccccccggagccgcgagcacccaagtgtgcaccggcacagacatgaagctgcggctccctgccagtcccgagacccacctggacatgctccgccacctctaccagggctgccaggtggtgcagggaaacctggaactcacctacctgcccaccaatgccagcctgtccttcctgcaggatatccaggaggtgcagggctacgtgctcatcgctcacaaccaagtgaggcaggtcccactgcagaggctgcggattgtgcgaggcacccagctctttgaggacaactatgccctggccgtgctagacaatggagacccgctgaacaataccacccctgtcacaggggcctccccaggaggcctgcgggagctgcagcttcgaagcctcacagagatcttgaaaggaggggtcttgatccagcggaacccccagctctgctaccaggacacgattttgtggaaggacatcttccacaagaacaaccagctggctctcacactgatagacaccaaccgctctcgggcctgccacccctgttctccgatgtgtaagggctcccgctgctggggagagagttctgaggattgtcagagcctgacgcgcactgtctgtgccggtggctgtgcccgctgcaaggggccactgcccactgactgctgccatgagcagtgtgctgccggctgcacgggccccaagcactctgactgcctggcctgcctccacttcaaccacagtggcatctgtgagctgcactgcccagccctggtcacctacaacacagacacgtttgagtccatgcccaatcccgagggccggtatacattcggcgccagctgtgtgactgcctgtccctacaactacctttctacggacgtgggatcctgcaccctcgtctgccccctgcacaaccaagaggtgacagcagaggatggaacacagcggtgtgagaagtgcagcaagccctgtgcccgagtgtgctatggtctgggcatggagcacttgcgagaggtgagggcagttaccagtgccaatatccaggagtttgctggctgcaagaagatctttgggagcctggcatttctgccggagagctttgatggggacccagcctccaacactgccccgctccagccagagcagctccaagtgtttgagactctggaagagatcacaggttacctatacatctcagcatggccggacagcctgcctgacctcagcgtcttccagaacctgcaagtaatccggggacgaattctgcacaatggcgcctactcgctgaccctgcaagggctgggcatcagctggctggggctgcgctcactgagggaactgggcagtggactggccctcatccaccataacacccacctctgcttcgtgcacacggtgccctgggaccagctctttcggaacccgcaccaagctctgctccacactgccaaccggccagaggacgagtgtgtgggcgagggcctggcctgccaccagctgtgcgcccgagggcactgctggggtccagggcccacccagtgtgtcaactgcagccagttccttcggggccaggagtgcgtggaggaatgccgagtactgcaggggctccccagggagtatgtgaatgccaggcactgtttgccgtgccaccctgagtgtcagccccagaatggctcagtgacctgttttggaccggaggctgaccagtgtgtggcctgtgcccactataaggaccctcccttctgcgtggcccgctgccccagcggtgtgaaacctgacctctcctacatgcccatctggaagtttccagatgaggagggcgcatgccagccttgccccatcaactgcacccactcctgtgtggacctggatgacaagggctgccccgccgagcagagagccagccctctgacgtccatcatctctgcggtggttggcattctgctggtcgtggtcttgggggtggtctttgggatcctcatcaagcgacggcagcagaagatccggaagtacacgatgcggagactgctgcaggaaacggagctggtggagccgctgacacctagcggagcgatgcccaaccaggcgcagatgcggatcctgaaagagacggagctgaggaaggtgaaggtgcttggatctggcgcttttggcacagtctacaagggcatctggatccctgatggggagaatgtgaaaattccagtggccatcaaagtgttgagggaaaacacatcccccaaagccaacaaagaaatcttagacgaagcatacgtgatggctggtgtgggctccccatatgtctcccgccttctgggcatctgcctgacatccacggtgcagctggtgacacagcttatgccctatggctgcctcttagaccatgtccgggaaaaccgcggacgcctgggctcccaggacctgctgaactggtgtatgcagattgccaaggggatgagctacctggaggatgtgcggctcgtacacagggacttggccgctcggaacgtgctggtcaagagtcccaaccatgtcaaaattacagacttcgggctggctcggctgctggacattgacgagacagagtaccatgcagatgggggcaaggtgcccatcaagtggatggcgctggagtccattctccgccggcggttcacccaccagagtgatgtgtggagttatggtgtgactgtgtgggagctgatgacttttggggccaaaccttacgatgggatcccagcccgggagatccctgacctgctggaaaagggggagcggctgccccagccccccatctgcaccattgatgtctacatgatcatggtcaaatgttggatgattgactctgaatgtcggccaagattccgggagttggtgtctgaattctcccgcatggccagggacccccagcgctttgtggtcatccagaatgaggacttgggcccagccagtcccttggacagcaccttctaccgctcactgctggaggacgatgacatgggggacctggtggatgctgaggagtatctggtaccccagcagggcttcttctgtccagaccctgccccgggcgctgggggcatggtccaccacaggcaccgcagctcatctaccaggagtggcggtggggacctgacactagggctggagccctctgaagaggaggcccccaggtctccactggcaccctccgaaggggctggctccgatgtatttgatggtgacctgggaatgggggcagccaaggggctgcaaagcctccccacacatgaccccagccctctacagcggtacagtgaggaccccacagtacccctgccctctgagactgatggctacgttgcccccctgacctgcagcccccagcctgaatatgtgaaccagccagatgttcggccccagcccccttcgccccgagagggccctctgcctgctgcccgacctgctggtgccactctggaaaggcccaagactctctccccagggaagaatggggtcgtcaaagacgtttttgcctttgggggtgccgtggagaaccccgagtacttgacaccccagggaggagctgcccctcagccccaccctcctcctgccttcagcccagccttcgacaacctctattactgggaccaggacccaccagagcggggggctccacccagcaccttcaaagggacacctacggcagagaacccagagtacctgggtctggacgtgccagtgtgaaccagaaggccaagtccgcagaagccctgatgtgtcctcagggagcagggaaggcctgacttctgctggcatcaagaggtgggagggccctccgaccacttccaggggaacctgccatgccaggaacctgtcctaaggaaccttccttcctgcttgagttcccagatggctggaaggggtccagcctcgttggaagaggaacagcactggggagtctttgtggattctgaggccctgcccaatgagactctagggtccagtggatgccacagcccagcttggccctttccttccagatcctgggtactgaaagccttagggaagctggcctgagaggggaagcggccctaagggagtgtctaagaacaaaagcgacccattcagagactgtccctgaaacctagtactgccccccatgaggaaggaacagcaatggtgtcagtatccaggctttgtacagagtgcttttctgtttagtttttactttttttgttttgtttttttaaagatgaaataaagacccagggggagaatgggtgttgtatggggaggcaagtgtggggggtccttctccacacccactttgtccatttgcaaatatattttggaaaacaaaaaaaaaaaaaaaaaaaaaaaaaaaaaaaaaaaaaaaaaaaaaaaaaaaaaaaaaaagacacacaaagaaacaaaaaacaacaaaatgcaaaaacaatagaaaaaagaaagagaaggggggcgcgggcccgaaactaaacaaatcaccaacggggaggggagcacccgaaatgcggactcccaccgacgccttttgtagaaacgaaaggggtgcccacaagaagggaagagttatatataaaaagagcgggcggggggggaccgataaaaaaaagcagggtgagggaagaaaacaacagtcgctagggatgactattatgtggaagaaacaccacaattgtggtgggggaaaaatggggaaacgacacccaccggaggaatgtatgagggggggaggaataaacaacgggagtgatggctggtcaaaccagacaatatgtgatcaggagacgaaatgacatggtaattattgtataagtagtcggggtgtgtgtatgacatgan

SEQ ID NO: 369655 - DNA, 5027 bp, Homo sapiens
  misc_feature (32)..(33): n is a, c, g, or t
aaggggaggtaaccctggcccctttggtcggnnccccgggcagccgcgcgccccttcccacggggccctttactgcgccgcgcgcccggcccccacccctcgcagcaccccgcgccccgcgccctcccagccgggtccagccggagccatggggccggagccgcagtgagcaccatggagctggcggccttgtgccgctgggggctcctcctcgccctcttgccccccggagccgcgagcacccaagtgtgcaccggcacagacatgaagctgcggctccctgccagtcccgagacccacctggacatgctccgccacctctaccagggctgccaggtggtgcagggaaacctggaactcacctacctgcccaccaatgccagcctgtccttcctgcaggatatccaggaggtgcagggctacgtgctcatcgctcacaaccaagtgaggcaggtcccactgcagaggctgcggattgtgcgaggcacccagctctttgaggacaactatgccctggccgtgctagacaatggagacccgctgaacaataccacccctgtcacaggggcctccccaggaggcctgcgggagctgcagcttcgaagcctcacagagatcttgaaaggaggggtcttgatccagcggaacccccagctctgctaccaggacacgattttgtggaaggacatcttccacaagaacaaccagctggctctcacactgatagacaccaaccgctctcgggcctgccacccctgttctccgatgtgtaagggctcccgctgctggggagagagttctgaggattgtcagagcctgacgcgcactgtctgtgccggtggctgtgcccgctgcaaggggccactgcccactgactgctgccatgagcagtgtgctgccggctgcacgggccccaagcactctgactgcctggcctgcctccacttcaaccacagtggcatctgtgagctgcactgcccagccctggtcacctacaacacagacacgtttgagtccatgcccaatcccgagggccggtatacattcggcgccagctgtgtgactgcctgtccctacaactacctttctacggacgtgggatcctgcaccctcgtctgccccctgcacaaccaagaggtgacagcagaggatggaacacagcggtgtgagaagtgcagcaagccctgtgcccgagtgtgctatggtctgggcatggagcacttgcgagaggtgagggcagttaccagtgccaatatccaggagtttgctggctgcaagaagatctttgggagcctggcatttctgccggagagctttgatggggacccagcctccaacactgccccgctccagccagagcagctccaagtgtttgagactctggaagagatcacaggttacctatacatctcagcatggccggacagcctgcctgacctcagcgtcttccagaacctgcaagtaatccggggacgaattctgcacaatggcgcctactcgctgaccctgcaagggctgggcatcagctggctggggctgcgctcactgagggaactgggcagtggactggccctcatccaccataacacccacctctgcttcgtgcacacggtgccctgggaccagctctttcggaacccgcaccaagctctgctccacactgccaaccggccagaggacgagtgtgtgggcgagggcctggcctgccaccagctgtgcgcccgagggcactgctggggtccagggcccacccagtgtgtcaactgcagccagttccttcggggccaggagtgcgtggaggaatgccgagtactgcaggggctccccagggagtatgtgaatgccaggcactgtttgccgtgccaccctgagtgtcagccccagaatggctcagtgacctgttttggaccggaggctgaccagtgtgtggcctgtgcccactataaggaccctcccttctgcgtggcccgctgccccagcggtgtgaaacctgacctctcctacatgcccatctggaagtttccagatgaggagggcgcatgccagccttgccccatcaactgcacccactcctgtgtggacctggatgacaagggctgccccgccgagcagagagccagccctctgacgtccatcatctctgcggtggttggcattctgctggtcgtggtcttgggggtggtctttgggatcctcatcaagcgacggcagcagaagatccggaagtacacgatgcggagactgctgcaggaaacggagctggtggagccgctgacacctagcggagcgatgcccaaccaggcgcagatgcggatcctgaaagagacggagctgaggaaggtgaaggtgcttggatctggcgcttttggcacagtctacaagggcatctggatccctgatggggagaatgtgaaaattccagtggccatcaaagtgttgagggaaaacacatcccccaaagccaacaaagaaatcttagacgaagcatacgtgatggctggtgtgggctccccatatgtctcccgccttctgggcatctgcctgacatccacggtgcagctggtgacacagcttatgccctatggctgcctcttagaccatgtccgggaaaaccgcggacgcctgggctcccaggacctgctgaactggtgtatgcagattgccaaggggatgagctacctggaggatgtgcggctcgtacacagggacttggccgctcggaacgtgctggtcaagagtcccaaccatgtcaaaattacagacttcgggctggctcggctgctggacattgacgagacagagtaccatgcagatgggggcaaggtgcccatcaagtggatggcgctggagtccattctccgccggcggttcacccaccagagtgatgtgtggagttatggtgtgactgtgtgggagctgatgacttttggggccaaaccttacgatgggatcccagcccgggagatccctgacctgctggaaaagggggagcggctgccccagccccccatctgcaccattgatgtctacatgatcatggtcaaatgttggatgattgactctgaatgtcggccaagattccgggagttggtgtctgaattctcccgcatggccagggacccccagcgctttgtggtcatccagaatgaggacttgggcccagccagtcccttggacagcaccttctaccgctcactgctggaggacgatgacatgggggacctggtggatgctgaggagtatctggtaccccagcagggcttcttctgtccagaccctgccccgggcgctgggggcatggtccaccacaggcaccgcagctcatctaccaggagtggcggtggggacctgacactagggctggagccctctgaagaggaggcccccaggtctccactggcaccctccgaaggggctggctccgatgtatttgatggtgacctgggaatgggggcagccaaggggctgcaaagcctccccacacatgaccccagccctctacagcggtacagtgaggaccccacagtacccctgccctctgagactgatggctacgttgcccccctgacctgcagcccccagcctgaatatgtgaaccagccagatgttcggccccagcccccttcgccccgagagggccctctgcctgctgcccgacctgctggtgccactctggaaaggcccaagactctctccccagggaagaatggggtcgtcaaagacgtttttgcctttgggggtgccgtggagaaccccgagtacttgacaccccagggaggagctgcccctcagccccaccctcctcctgccttcagcccagccttcgacaacctctattactgggaccaggacccaccagagcggggggctccacccagcaccttcaaagggacacctacggcagagaacccagagtacctgggtctggacgtgccagtgtgaaccagaaggccaagtccgcagaagccctgatgtgtcctcagggagcagggaaggcctgacttctgctggcatcaagaggtgggagggccctccgaccacttccaggggaacctgccatgccaggaacctgtcctaaggaaccttccttcctgcttgagttcccagatggctggaaggggtccagcctcgttggaagaggaacagcactggggagtctttgtggattctgaggccctgcccaatgagactctagggtccagtggatgccacagcccagcttggccctttccttccagatcctgggtactgaaagccttagggaagctggcctgagaggggaagcggccctaagggagtgtctaagaacaaaagcgacccattcagagactgtccctgaaacctagtactgccccccatgaggaaggaacagcaatggtgtcagtatccaggctttgtacagagtgcttttctgtttagtttttactttttttgttttgtttttttaaagatgaaataaagacccagggggagaatgggtgttgtatggggaggcaagtgtggggggtccttctccacacccactttgtccatttgcaaatatattttggaaaacagctaggcaccggcctatgtctgggggtggctctgtgccatcccttcctgctcaccttacactcaattcctcttttcctggagggagtggctgggaatcttcagaaagcttggatgaggagccagacatccagttctccagcttcagggttgggggagatcgggaagctggattcagatctgagagccctttgacgaccagatcattcttatttagaacgaactaattcctaaggccactcaccagaatggggttatttcctccttgtgagtgaggagagtggtgggtagggtgggggaaagacgaggcagggtctactgtgggactcattttccttgccttggctatgccagaggagctcactgacctaaggagtagctgtccagaaagcccacccagccagcacagccaccctggcggtgcaaaggctgggctgaccggacttctgtgccccccacattcccagactgga

SEQ ID NO: 369656 - DNA, 4806 bp, Homo sapiens
aattctcgagctcgtcgaccggtcgacgagctcgagggtcgacgagctcgagggcgcgcgcccggcccccacccctcgcagcaccccgcgccccgcgccctcccagccgggtccagccggagccatggggccggagccgcagtgagcaccatggagctggcggccttgtgccgctgggggctcctcctcgccctcttgccccccggagccgcgagcacccaagtgtgcaccggcacagacatgaagctgcggctccctgccagtcccgagacccacctggacatgctccgccacctctaccagggctgccaggtggtgcagggaaacctggaactcacctacctgcccaccaatgccagcctgtccttcctgcaggatatccaggaggtgcagggctacgtgctcatcgctcacaaccaagtgaggcaggtcccactgcagaggctgcggattgtgcgaggcacccagctctttgaggacaactatgccctggccgtgctagacaatggagacccgctgaacaataccacccctgtcacaggggcctccccaggaggcctgcgggagctgcagcttcgaagcctcacagagatcttgaaaggaggggtcttgatccagcggaacccccagctctgctaccaggacacgattttgtggaaggacatcttccacaagaacaaccagctggctctcacactgatagacaccaaccgctctcgggcctgccacccctgttctccgatgtgtaagggctcccgctgctggggagagagttctgaggattgtcagagcctgacgcgcactgtctgtgccggtggctgtgcccgctgcaaggggccactgcccactgactgctgccatgagcagtgtgctgccggctgcacgggccccaagcactctgactgcctggcctgcctccacttcaaccacagtggcatctgtgagctgcactgcccagccctggtcacctacaacacagacacgtttgagtccatgcccaatcccgagggccggtatacattcggcgccagctgtgtgactgcctgtccctacaactacctttctacggacgtgggatcctgcaccctcgtctgccccctgcacaaccaagaggtgacagcagaggatggaacacagcggtgtgagaagtgcagcaagccctgtgcccgaggtacccactcactgcccccgaggccagctgcagttcctgtccctctgcgcatgcagcctggcccagcccaccctgtcctatccttcctcagaccctcttgggacctagtctctgccttctactctctacccctggcccccctcagccctacaagtgtccctatatcccctgtcagtgtggggaggggcccggaccctgatgctcatgtggctgttgacctgtcccggtatgaaggctgagacggccccttccccacccacccccacctcctcagtgtgctatggtctgggcatggagcacttgcgagaggtgagggcagttaccagtgccaatatccaggagtttgctggctgcaagaagatctttgggagcctggcatttctgccggagagctttgatggggacccagcctccaacactgccccgctccagccagagcagctccaagtgtttgagactctggaagagatcacaggttacctatacatctcagcatggccggacagcctgcctgacctcagcgtcttccagaacctgcaagtaatccggggacgaattctgcacaatggcgcctactcgctgaccctgcaagggctgggcatcagctggctggggctgcgctcactgagggaactgggcagtggactggccctcatccaccataacacccacctctgcttcgtgcacacggtgccctgggaccagctctttcggaacccgcaccaagctctgctccacactgccaaccggccagaggacgagtgtgtgggcgagggcctggcctgccaccagctgtgcgcccgagggcactgctggggtccagggcccacccagtgtgtcaactgcagccagttccttcggggccaggagtgcgtggaggaatgccgagtactgcaggggctccccagggagtatgtgaatgccaggcactgtttgccgtgccaccctgagtgtcagccccagaatggctcagtgacctgttttggaccggaggctgaccagtgtgtggcctgtgcccactataaggaccctcccttctgcgtggcccgctgccccagcggtgtgaaacctgacctctcctacatgcccatctggaagtttccagatgaggagggcgcatgccagccttgccccatcaactgcacccactcctgtgtggacctggatgacaagggctgccccgccgagcagagagccagccctctgacgtccatcatctctgcggtggttggcattctgctggtcgtggtcttgggggtggtctttgggatcctcatcaagcgacggcagcagaagatccggaagtacacgatgcggagactgctgcaggaaacggagctggtggagccgctgacacctagcggagcgatgcccaaccaggcgcagatgcggatcctgaaagagacggagctgaggaaggtgaaggtgcttggatctggcgcttttggcacagtctacaagggcatctggatccctgatggggagaatgtgaaaattccagtggccatcaaagtgttgagggaaaacacatcccccaaagccaacaaagaaatcttagacgaagcatacgtgatggctggtgtgggctccccatatgtctcccgccttctgggcatctgcctgacatccacggtgcagctggtgacacagcttatgccctatggctgcctcttagaccatgtccgggaaaaccgcggacgcctgggctcccaggacctgctgaactggtgtatgcagattgccaaggggatgagctacctggaggatgtgcggctcgtacacagggacttggccgctcggaacgtgctggtcaagagtcccaaccatgtcaaaattacagacttcgggctggctcggctgctggacattgacgagacagagtaccatgcagatgggggcaaggtgcccatcaagtggatggcgctggagtccattctccgccggcggttcacccaccagagtgatgtgtggagttatggtgtgactgtgtgggagctgatgacttttggggccaaaccttacgatgggatcccagcccgggagatccctgacctgctggaaaagggggagcggctgccccagccccccatctgcaccattgatgtctacatgatcatggtcaaatgttggatgattgactctgaatgtcggccaagattccgggagttggtgtctgaattctcccgcatggccagggacccccagcgctttgtggtcatccagaatgaggacttgggcccagccagtcccttggacagcaccttctaccgctcactgctggaggacgatgacatgggggacctggtggatgctgaggagtatctggtaccccagcagggcttcttctgtccagaccctgccccgggcgctgggggcatggtccaccacaggcaccgcagctcatctaccaggagtggcggtggggacctgacactagggctggagccctctgaagaggaggcccccaggtctccactggcaccctccgaaggggctggctccgatgtatttgatggtgacctgggaatgggggcagccaaggggctgcaaagcctccccacacatgaccccagccctctacagcggtacagtgaggaccccacagtacccctgccctctgagactgatggctacgttgcccccctgacctgcagcccccagcctgaatatgtgaaccagccagatgttcggccccagcccccttcgccccgagagggccctctgcctgctgcccgacctgctggtgccactctggaaaggcccaagactctctccccagggaagaatggggtcgtcaaagacgtttttgcctttgggggtgccgtggagaaccccgagtacttgacaccccagggaggagctgcccctcagccccaccctcctcctgccttcagcccagccttcgacaacctctattactgggaccaggacccaccagagcggggggctccacccagcaccttcaaagggacacctacggcagagaacccagagtacctgggtctggacgtgccagtgtgaaccagaaggccaagtccgcagaagccctgatgtgtcctcagggagcagggaaggcctgacttctgctggcatcaagaggtgggagggccctccgaccacttccaggggaacctgccatgccaggaacctgtcctaaggaaccttccttcctgcttgagttcccagatggctggaaggggtccagcctcgttggaagaggaacagcactggggagtctttgtggattctgaggccctgcccaatgagactctagggtccagtggatgccacagcccagcttggccctttccttccagatcctgggtactgaaagccttagggaagctggcctgagaggggaagcggccctaagggagtgtctaagaacaaaagcgacccattcagagactgtccctgaaacctagtactgccccccatgaggaaggaacagcaatggtgtcagtatccaggctttgtacagagtgcttttctgtttagtttttactttttttgttttgtttttttaaagatgaaataaagacccagggggagaatgggtgttgtatggggaggcaagtgtggggggtccttctccacacccactttgtccatttgcaaatatattttggaaaaca

SEQ ID NO: 369657 - DNA, 4314 bp, Homo sapiens
atcagctcggtacctgtcgatctttcaactgcggctccctgccagtcccgagacccacctggacatgctccgccacctctaccagggctgccaggtggtgcagggaaacctggaactcacctacctgcccaccaatgccagcctgtccttcctgcaggatatccaggaggtgcagggctacgtgctcatcgctcacaaccaagtgaggcaggtcccactgcagaggctgcggattgtgcgaggcacccagctctttgaggacaactatgccctggccgtgctagacaatggagacccgctgaacaataccacccctgtcacaggggcctccccaggaggcctgcgggagctgcagcttcgaagcctcacagagatcttgaaaggaggggtcttgatccagcggaacccccagctctgctaccaggacacgattttgtggaaggacatcttccacaagaacaaccagctggctctcacactgatagacaccaaccgctctcgggcctgccacccctgttctccgatgtgtaagggctcccgctgctggggagagagttctgaggattgtcagagcctgacgcgcactgtctgtgccggtggctgtgcccgctgcaaggggccactgcccactgactgctgccatgagcagtgtgctgccggctgcacgggccccaagcactctgactgcctggcctgcctccacttcaaccacagtggcatctgtgagctgcactgcccagccctggtcacctacaacacagacacgtttgagtccatgcccaatcccgagggccggtatacattcggcgccagctgtgtgactgcctgtccctacaactacctttctacggacgtgggatcctgcaccctcgtctgccccctgcacaaccaagaggtgacagcagaggatggaacacagcggtgtgagaagtgcagcaagccctgtgcccgagtgtgctatggtctgggcatggagcacttgcgagaggtgagggcagttaccagtgccaatatccaggagtttgctggctgcaagaagatctttgggagcctggcatttctgccggagagctttgatggggacccagcctccaacactgccccgctccagccagagcagctccaagtgtttgagactctggaagagatcacaggttacctatacatctcagcatggccggacagcctgcctgacctcagcgtcttccagaacctgcaagtaatccggggacgaattctgcacaatggcgcctactcgctgaccctgcaagggctgggcatcagctggctggggctgcgctcactgagggaactgggcagtggactggccctcatccaccataacacccacctctgcttcgtgcacacggtgccctgggaccagctctttcggaacccgcaccaagctctgctccacactgccaaccggccagaggacgagtgtgtgggcgagggcctggcctgccaccagctgtgcgcccgagggcactgctggggtccagggcccacccagtgtgtcaactgcagccagttccttcggggccaggagtgcgtggaggaatgccgagtactgcaggggctccccagggagtatgtgaatgccaggcactgtttgccgtgccaccctgagtgtcagccccagaatggctcagtgacctgttttggaccggaggctgaccagtgtgtggcctgtgcccactataaggaccctcccttctgcgtggcccgctgccccagcggtgtgaaacctgacctctcctacatgcccatctggaagtttccagatgaggagggcgcatgccagccttgccccatcaactgcacccactcctgtgtggacctggatgacaagggctgccccgccgagcagagagccagccctctgacgtccatcatctctgcggtggttggcattctgctggtcgtggtcttgggggtggtctttgggatcctcatcaagcgacggcagcagaagatccggaagtacacgatgcggagactgctgcaggaaacggagctggtggagccgctgacacctagcggagcgatgcccaaccaggcgcagatgcggatcctgaaagagacggagctgaggaaggtgaaggtgcttggatctggcgcttttggcacagtctacaagggcatctggatccctgatggggagaatgtgaaaattccagtggccatcaaagtgttgagggaaaacacatcccccaaagccaacaaagaaatcttagacgaagcatacgtgatggctggtgtgggctccccatatgtctcccgccttctgggcatctgcctgacatccacggtgcagctggtgacacagcttatgccctatggctgcctcttagaccatgtccgggaaaaccgcggacgcctgggctcccaggacctgctgaactggtgtatgcagattgccaaggggatgagctacctggaggatgtgcggctcgtacacagggacttggccgctcggaacgtgctggtcaagagtcccaaccatgtcaaaattacagacttcgggctggctcggctgctggacattgacgagacagagtaccatgcagatgggggcaaggtgcccatcaagtggatggcgctggagtccattctccgccggcggttcacccaccagagtgatgtgtggagttatggtgtgactgtgtgggagctgatgacttttggggccaaaccttacgatgggatcccagcccgggagatccctgacctgctggaaaagggggagcggctgccccagccccccatctgcaccattgatgtctacatgatcatggtcaaatgttggatgattgactctgaatgtcggccaagattccgggagttggtgtctgaattctcccgcatggccagggacccccagcgctttgtggtcatccagaatgaggacttgggcccagccagtcccttggacagcaccttctaccgctcactgctggaggacgatgacatgggggacctggtggatgctgaggagtatctggtaccccagcagggcttcttctgtccagaccctgccccgggcgctgggggcatggtccaccacaggcaccgcagctcatctaccaggagtggcggtggggacctgacactagggctggagccctctgaagaggaggcccccaggtctccactggcaccctccgaaggggctggctccgatgtatttgatggtgacctgggaatgggggcagccaaggggctgcaaagcctccccacacatgaccccagccctctacagcggtacagtgaggaccccacagtacccctgccctctgagactgatggctacgttgcccccctgacctgcagcccccagcctgaatatgtgaaccagccagatgttcggccccagcccccttcgccccgagagggccctctgcctgctgcccgacctgctggtgccactctggaaaggcccaagactctctccccagggaagaatggggtcgtcaaagacgtttttgcctttgggggtgccgtggagaaccccgagtacttgacaccccagggaggagctgcccctcagccccaccctcctcctgccttcagcccagccttcgacaacctctattactgggaccaggacccaccagagcggggggctccacccagcaccttcaaagggacacctacggcagagaacccagagtacctgggtctggacgtgccagtgtgaaccagaaggccaagtccgcagaagccctgatgtgtcctcagggagcagggaaggcctgacttctgctggcatcaagaggtgggagggccctccgaccacttccaggggaacctgccatgccaggaacctgtcctaaggaaccttccttcctgcttgagttcccagatggctggaaggggtccagcctcgttggaagaggaacagcactggggagtctttgtggattctgaggccctgcccaatgagactctagggtccagtggatgccacagcccagcttggccctttccttccagatcctgggtactgaaagccttagggaagctggcctgagaggggaagcggccctaagggagtgtctaagaacaaaagcgacccattcagagactgtccctgaaacctagtactgccccccatgaggaaggaacagcaatggtgtcagtatccaggctttgtacagagtgcttttctgtttagtttttactttttttgttttgtttttttaaagatgaaataaagacccagggggagaatgggtgttgtatggggaggcaagtgtggggggtccttctccacacccactttgtccatttgcaaatatattttggaaaaca

SEQ ID NO: 369658 - DNA, 4327 bp, Homo sapiens
tctagcctcgccagtgtcctagcctcgccagtgtcctagcctcgccagtgtcctagcctcgccagtggctgggggccttgcccaagatctccaagtactggggaaccccagggaggccctggggggtggcagtgttcctatttcagccccactctgcttccccctcccaggatatccaggaggtgcagggctacgtgctcatcgctcacaaccaagtgaggcaggtcccactgcagaggctgcggattgtgcgaggcacccagctctttgaggacaactatgccctggccgtgctagacaatggagacccgctgaacaataccacccctgtcacaggggcctccccaggaggcctgcgggagctgcagcttcgaagcctcacagagatcttgaaaggaggggtcttgatccagcggaacccccagctctgctaccaggacacgattttgtggaaggacatcttccacaagaacaaccagctggctctcacactgatagacaccaaccgctctcgggcctgccacccctgttctccgatgtgtaagggctcccgctgctggggagagagttctgaggattgtcagagcctgacgcgcactgtctgtgccggtggctgtgcccgctgcaaggggccactgcccactgactgctgccatgagcagtgtgctgccggctgcacgggccccaagcactctgactgcctggcctgcctccacttcaaccacagtggcatctgtgagctgcactgcccagccctggtcacctacaacacagacacgtttgagtccatgcccaatcccgagggccggtatacattcggcgccagctgtgtgactgcctgtccctacaactacctttctacggacgtgggatcctgcaccctcgtctgccccctgcacaaccaagaggtgacagcagaggatggaacacagcggtgtgagaagtgcagcaagccctgtgcccgagtgtgctatggtctgggcatggagcacttgcgagaggtgagggcagttaccagtgccaatatccaggagtttgctggctgcaagaagatctttgggagcctggcatttctgccggagagctttgatggggacccagcctccaacactgccccgctccagccagagcagctccaagtgtttgagactctggaagagatcacaggttacctatacatctcagcatggccggacagcctgcctgacctcagcgtcttccagaacctgcaagtaatccggggacgaattctgcacaatggcgcctactcgctgaccctgcaagggctgggcatcagctggctggggctgcgctcactgagggaactgggcagtggactggccctcatccaccataacacccacctctgcttcgtgcacacggtgccctgggaccagctctttcggaacccgcaccaagctctgctccacactgccaaccggccagaggacgagtgtgtgggcgagggcctggcctgccaccagctgtgcgcccgagggcactgctggggtccagggcccacccagtgtgtcaactgcagccagttccttcggggccaggagtgcgtggaggaatgccgagtactgcaggggctccccagggagtatgtgaatgccaggcactgtttgccgtgccaccctgagtgtcagccccagaatggctcagtgacctgttttggaccggaggctgaccagtgtgtggcctgtgcccactataaggaccctcccttctgcgtggcccgctgccccagcggtgtgaaacctgacctctcctacatgcccatctggaagtttccagatgaggagggcgcatgccagccttgccccatcaactgcacccactcctgtgtggacctggatgacaagggctgccccgccgagcagagagccagccctctgacgtccatcatctctgcggtggttggcattctgctggtcgtggtcttgggggtggtctttgggatcctcatcaagcgacggcagcagaagatccggaagtacacgatgcggagactgctgcaggaaacggagctggtggagccgctgacacctagcggagcgatgcccaaccaggcgcagatgcggatcctgaaagagacggagctgaggaaggtgaaggtgcttggatctggcgcttttggcacagtctacaagggcatctggatccctgatggggagaatgtgaaaattccagtggccatcaaagtgttgagggaaaacacatcccccaaagccaacaaagaaatcttagacgaagcatacgtgatggctggtgtgggctccccatatgtctcccgccttctgggcatctgcctgacatccacggtgcagctggtgacacagcttatgccctatggctgcctcttagaccatgtccgggaaaaccgcggacgcctgggctcccaggacctgctgaactggtgtatgcagattgccaaggggatgagctacctggaggatgtgcggctcgtacacagggacttggccgctcggaacgtgctggtcaagagtcccaaccatgtcaaaattacagacttcgggctggctcggctgctggacattgacgagacagagtaccatgcagatgggggcaaggtgcccatcaagtggatggcgctggagtccattctccgccggcggttcacccaccagagtgatgtgtggagttatggtgtgactgtgtgggagctgatgacttttggggccaaaccttacgatgggatcccagcccgggagatccctgacctgctggaaaagggggagcggctgccccagccccccatctgcaccattgatgtctacatgatcatggtcaaatgttggatgattgactctgaatgtcggccaagattccgggagttggtgtctgaattctcccgcatggccagggacccccagcgctttgtggtcatccagaatgaggacttgggcccagccagtcccttggacagcaccttctaccgctcactgctggaggacgatgacatgggggacctggtggatgctgaggagtatctggtaccccagcagggcttcttctgtccagaccctgccccgggcgctgggggcatggtccaccacaggcaccgcagctcatctaccaggagtggcggtggggacctgacactagggctggagccctctgaagaggaggcccccaggtctccactggcaccctccgaaggggctggctccgatgtatttgatggtgacctgggaatgggggcagccaaggggctgcaaagcctccccacacatgaccccagccctctacagcggtacagtgaggaccccacagtacccctgccctctgagactgatggctacgttgcccccctgacctgcagcccccagcctgaatatgtgaaccagccagatgttcggccccagcccccttcgccccgagagggccctctgcctgctgcccgacctgctggtgccactctggaaaggcccaagactctctccccagggaagaatggggtcgtcaaagacgtttttgcctttgggggtgccgtggagaaccccgagtacttgacaccccagggaggagctgcccctcagccccaccctcctcctgccttcagcccagccttcgacaacctctattactgggaccaggacccaccagagcggggggctccacccagcaccttcaaagggacacctacggcagagaacccagagtacctgggtctggacgtgccagtgtgaaccagaaggccaagtccgcagaagccctgatgtgtcctcagggagcagggaaggcctgacttctgctggcatcaagaggtgggagggccctccgaccacttccaggggaacctgccatgccaggaacctgtcctaaggaaccttccttcctgcttgagttcccagatggctggaaggggtccagcctcgttggaagaggaacagcactggggagtctttgtggattctgaggccctgcccaatgagactctagggtccagtggatgccacagcccagcttggccctttccttccagatcctgggtactgaaagccttagggaagctggcctgagaggggaagcggccctaagggagtgtctaagaacaaaagcgacccattcagagactgtccctgaaacctagtactgccccccatgaggaaggaacagcaatggtgtcagtatccaggctttgtacagagtgcttttctgtttagtttttactttttttgttttgtttttttaaagatgaaataaagacccagggggagaatgggtgttgtatggggaggcaagtgtggggggtccttctccacacccactttgtccatttgcaaatatattttggaaaaca

SEQ ID NO: 369659 - DNA, 4559 bp, Homo sapiens
  misc_feature (18)..(18): n is a, c, g, or t
  misc_feature (74)..(74): n is a, c, g, or t
  misc_feature (108)..(108): n is a, c, g, or t
aaacttcatcaaggtacntaaggttgtaaggttctcggggggtagcggcttgcacacctcttgaagggcttcanccgggcccctggctccttcaggctggctgccttnatccgcttatccaatgattggataacggatgaggggagtctgggtgccaggtgctttgcccgcatggcccatttcagtcacgctgcagtcctgtcaggaaaaaatcagtgttattctcattctacatatgagaaaactgaggcttgcagatataagggccaaaagttacacagctagtgagtgatggggctgagtttcagactccacagtctcttaaccaccaagcagcatgcccagagtagaggtgagaaggaaggagagagctgcggtccacatgagcatctggacctagcatggacaactcactcctccctggctctcgctttgttcttgttgcgggtgtggtggtggtgggactcaaagacggtaaagatagctttctctcctccctggggaatctgggggttgtttaaaaggcctgctcctcttttagaaggcaggagggccccaagggaagcagaaggtgacagaaggggaaagggtcctctgatcattgctcaccccacagagatcttgaaaggaggggtcttgatccagcggaacccccagctctgctaccaggacacgattttgtggaaggacatcttccacaagaacaaccagctggctctcacactgatagacaccaaccgctctcgggcctgccacccctgttctccgatgtgtaagggctcccgctgctggggagagagttctgaggattgtcagagcctgacgcgcactgtctgtgccggtggctgtgcccgctgcaaggggccactgcccactgactgctgccatgagcagtgtgctgccggctgcacgggccccaagcactctgactgcctggcctgcctccacttcaaccacagtggcatctgtgagctgcactgcccagccctggtcacctacaacacagacacgtttgagtccatgcccaatcccgagggccggtatacattcggcgccagctgtgtgactgcctgtccctacaactacctttctacggacgtgggatcctgcaccctcgtctgccccctgcacaaccaagaggtgacagcagaggatggaacacagcggtgtgagaagtgcagcaagccctgtgcccgagtgtgctatggtctgggcatggagcacttgcgagaggtgagggcagttaccagtgccaatatccaggagtttgctggctgcaagaagatctttgggagcctggcatttctgccggagagctttgatggggacccagcctccaacactgccccgctccagccagagcagctccaagtgtttgagactctggaagagatcacaggttacctatacatctcagcatggccggacagcctgcctgacctcagcgtcttccagaacctgcaagtaatccggggacgaattctgcacaatggcgcctactcgctgaccctgcaagggctgggcatcagctggctggggctgcgctcactgagggaactgggcagtggactggccctcatccaccataacacccacctctgcttcgtgcacacggtgccctgggaccagctctttcggaacccgcaccaagctctgctccacactgccaaccggccagaggacgagtgtgtgggcgagggcctggcctgccaccagctgtgcgcccgagggcactgctggggtccagggcccacccagtgtgtcaactgcagccagttccttcggggccaggagtgcgtggaggaatgccgagtactgcaggggctccccagggagtatgtgaatgccaggcactgtttgccgtgccaccctgagtgtcagccccagaatggctcagtgacctgttttggaccggaggctgaccagtgtgtggcctgtgcccactataaggaccctcccttctgcgtggcccgctgccccagcggtgtgaaacctgacctctcctacatgcccatctggaagtttccagatgaggagggcgcatgccagccttgccccatcaactgcacccactcctgtgtggacctggatgacaagggctgccccgccgagcagagagccagccctctgacgtccatcatctctgcggtggttggcattctgctggtcgtggtcttgggggtggtctttgggatcctcatcaagcgacggcagcagaagatccggaagtacacgatgcggagactgctgcaggaaacggagctggtggagccgctgacacctagcggagcgatgcccaaccaggcgcagatgcggatcctgaaagagacggagctgaggaaggtgaaggtgcttggatctggcgcttttggcacagtctacaagggcatctggatccctgatggggagaatgtgaaaattccagtggccatcaaagtgttgagggaaaacacatcccccaaagccaacaaagaaatcttagacgaagcatacgtgatggctggtgtgggctccccatatgtctcccgccttctgggcatctgcctgacatccacggtgcagctggtgacacagcttatgccctatggctgcctcttagaccatgtccgggaaaaccgcggacgcctgggctcccaggacctgctgaactggtgtatgcagattgccaaggggatgagctacctggaggatgtgcggctcgtacacagggacttggccgctcggaacgtgctggtcaagagtcccaaccatgtcaaaattacagacttcgggctggctcggctgctggacattgacgagacagagtaccatgcagatgggggcaaggtgcccatcaagtggatggcgctggagtccattctccgccggcggttcacccaccagagtgatgtgtggagttatggtgtgactgtgtgggagctgatgacttttggggccaaaccttacgatgggatcccagcccgggagatccctgacctgctggaaaagggggagcggctgccccagccccccatctgcaccattgatgtctacatgatcatggtcaaatgttggatgattgactctgaatgtcggccaagattccgggagttggtgtctgaattctcccgcatggccagggacccccagcgctttgtggtcatccagaatgaggacttgggcccagccagtcccttggacagcaccttctaccgctcactgctggaggacgatgacatgggggacctggtggatgctgaggagtatctggtaccccagcagggcttcttctgtccagaccctgccccgggcgctgggggcatggtccaccacaggcaccgcagctcatctaccaggagtggcggtggggacctgacactagggctggagccctctgaagaggaggcccccaggtctccactggcaccctccgaaggggctggctccgatgtatttgatggtgacctgggaatgggggcagccaaggggctgcaaagcctccccacacatgaccccagccctctacagcggtacagtgaggaccccacagtacccctgccctctgagactgatggctacgttgcccccctgacctgcagcccccagcctgaatatgtgaaccagccagatgttcggccccagcccccttcgccccgagagggccctctgcctgctgcccgacctgctggtgccactctggaaaggcccaagactctctccccagggaagaatggggtcgtcaaagacgtttttgcctttgggggtgccgtggagaaccccgagtacttgacaccccagggaggagctgcccctcagccccaccctcctcctgccttcagcccagccttcgacaacctctattactgggaccaggacccaccagagcggggggctccacccagcaccttcaaagggacacctacggcagagaacccagagtacctgggtctggacgtgccagtgtgaaccagaaggccaagtccgcagaagccctgatgtgtcctcagggagcagggaaggcctgacttctgctggcatcaagaggtgggagggccctccgaccacttccaggggaacctgccatgccaggaacctgtcctaaggaaccttccttcctgcttgagttcccagatggctggaaggggtccagcctcgttggaagaggaacagcactggggagtctttgtggattctgaggccctgcccaatgagactctagggtccagtggatgccacagcccagcttggccctttccttccagatcctgggtactgaaagccttagggaagctggcctgagaggggaagcggccctaagggagtgtctaagaacaaaagcgacccattcagagactgtccctgaaacctagtactgccccccatgaggaaggaacagcaatggtgtcagtatccaggctttgtacagagtgcttttctgtttagtttttactttttttgttttgtttttttaaagatgaaataaagacccagggggagaatgggtgttgtatggggaggcaagtgtggggggtccttctccacacccactttgtccatttgcaaatatattttggaaaaca

SEQ ID NO: 369660 - DNA, 4051 bp, Homo sapiens
cagggaaggaggctttgccagcctccttccctgtgcctcttcatctctggggttctctgtcttgtctccctctgcttataggttgtgcctctggtttgggggcctctcagcctgtctgggtccctcccttgctgtgcagttggcctcgtggcctctgctgctgtttgtgcctctctctgttattaacccgtcctctcgctgttagacatctctctcactgcctgtctctggttctgtcctcaggccacccctgttctccgatgtgtaagggctcccgctgctggggagagagttctgaggattgtcagagcctgacgcgcactgtctgtgccggtggctgtgcccgctgcaaggggccactgcccactgactgctgccatgagcagtgtgctgccggctgcacgggccccaagcactctgactgcctggcctgcctccacttcaaccacagtggcatctgtgagctgcactgcccagccctggtcacctacaacacagacacgtttgagtccatgcccaatcccgagggccggtatacattcggcgccagctgtgtgactgcctgtccctacaactacctttctacggacgtgggatcctgcaccctcgtctgccccctgcacaaccaagaggtgacagcagaggatggaacacagcggtgtgagaagtgcagcaagccctgtgcccgagtgtgctatggtctgggcatggagcacttgcgagaggtgagggcagttaccagtgccaatatccaggagtttgctggctgcaagaagatctttgggagcctggcatttctgccggagagctttgatggggacccagcctccaacactgccccgctccagccagagcagctccaagtgtttgagactctggaagagatcacaggttacctatacatctcagcatggccggacagcctgcctgacctcagcgtcttccagaacctgcaagtaatccggggacgaattctgcacaatggcgcctactcgctgaccctgcaagggctgggcatcagctggctggggctgcgctcactgagggaactgggcagtggactggccctcatccaccataacacccacctctgcttcgtgcacacggtgccctgggaccagctctttcggaacccgcaccaagctctgctccacactgccaaccggccagaggacgagtgtgtgggcgagggcctggcctgccaccagctgtgcgcccgagggcactgctggggtccagggcccacccagtgtgtcaactgcagccagttccttcggggccaggagtgcgtggaggaatgccgagtactgcaggggctccccagggagtatgtgaatgccaggcactgtttgccgtgccaccctgagtgtcagccccagaatggctcagtgacctgttttggaccggaggctgaccagtgtgtggcctgtgcccactataaggaccctcccttctgcgtggcccgctgccccagcggtgtgaaacctgacctctcctacatgcccatctggaagtttccagatgaggagggcgcatgccagccttgccccatcaactgcacccactcctgtgtggacctggatgacaagggctgccccgccgagcagagagccagccctctgacgtccatcatctctgcggtggttggcattctgctggtcgtggtcttgggggtggtctttgggatcctcatcaagcgacggcagcagaagatccggaagtacacgatgcggagactgctgcaggaaacggagctggtggagccgctgacacctagcggagcgatgcccaaccaggcgcagatgcggatcctgaaagagacggagctgaggaaggtgaaggtgcttggatctggcgcttttggcacagtctacaagggcatctggatccctgatggggagaatgtgaaaattccagtggccatcaaagtgttgagggaaaacacatcccccaaagccaacaaagaaatcttagacgaagcatacgtgatggctggtgtgggctccccatatgtctcccgccttctgggcatctgcctgacatccacggtgcagctggtgacacagcttatgccctatggctgcctcttagaccatgtccgggaaaaccgcggacgcctgggctcccaggacctgctgaactggtgtatgcagattgccaaggggatgagctacctggaggatgtgcggctcgtacacagggacttggccgctcggaacgtgctggtcaagagtcccaaccatgtcaaaattacagacttcgggctggctcggctgctggacattgacgagacagagtaccatgcagatgggggcaaggtgcccatcaagtggatggcgctggagtccattctccgccggcggttcacccaccagagtgatgtgtggagttatggtgtgactgtgtgggagctgatgacttttggggccaaaccttacgatgggatcccagcccgggagatccctgacctgctggaaaagggggagcggctgccccagccccccatctgcaccattgatgtctacatgatcatggtcaaatgttggatgattgactctgaatgtcggccaagattccgggagttggtgtctgaattctcccgcatggccagggacccccagcgctttgtggtcatccagaatgaggacttgggcccagccagtcccttggacagcaccttctaccgctcactgctggaggacgatgacatgggggacctggtggatgctgaggagtatctggtaccccagcagggcttcttctgtccagaccctgccccgggcgctgggggcatggtccaccacaggcaccgcagctcatctaccaggagtggcggtggggacctgacactagggctggagccctctgaagaggaggcccccaggtctccactggcaccctccgaaggggctggctccgatgtatttgatggtgacctgggaatgggggcagccaaggggctgcaaagcctccccacacatgaccccagccctctacagcggtacagtgaggaccccacagtacccctgccctctgagactgatggctacgttgcccccctgacctgcagcccccagcctgaatatgtgaaccagccagatgttcggccccagcccccttcgccccgagagggccctctgcctgctgcccgacctgctggtgccactctggaaaggcccaagactctctccccagggaagaatggggtcgtcaaagacgtttttgcctttgggggtgccgtggagaaccccgagtacttgacaccccagggaggagctgcccctcagccccaccctcctcctgccttcagcccagccttcgacaacctctattactgggaccaggacccaccagagcggggggctccacccagcaccttcaaagggacacctacggcagagaacccagagtacctgggtctggacgtgccagtgtgaaccagaaggccaagtccgcagaagccctgatgtgtcctcagggagcagggaaggcctgacttctgctggcatcaagaggtgggagggccctccgaccacttccaggggaacctgccatgccaggaacctgtcctaaggaaccttccttcctgcttgagttcccagatggctggaaggggtccagcctcgttggaagaggaacagcactggggagtctttgtggattctgaggccctgcccaatgagactctagggtccagtggatgccacagcccagcttggccctttccttccagatcctgggtactgaaagccttagggaagctggcctgagaggggaagcggccctaagggagtgtctaagaacaaaagcgacccattcagagactgtccctgaaacctagtactgccccccatgaggaaggaacagcaatggtgtcagtatccaggctttgtacagagtgcttttctgtttagtttttactttttttgttttgtttttttaaagatgaaataaagacccagggggagaatgggtgttgtatggggaggcaagtgtggggggtccttctccacacccactttgtccatttgcaaatatattttggaaaaca

SEQ ID NO: 369661 - DNA, 3337 bp, Homo sapiens
agcaggctggagtgcagtggtacgatcttggctcactgcaacctctgcctcctggattcaagcaattctcctgcctcagtctcctgagtagctgggactacagggacccagcctccaacactgccccgctccagccagagcagctccaagtgtttgagactctggaagagatcacaggttacctatacatctcagcatggccggacagcctgcctgacctcagcgtcttccagaacctgcaagtaatccggggacgaattctgcacaatggcgcctactcgctgaccctgcaagggctgggcatcagctggctggggctgcgctcactgagggaactgggcagtggactggccctcatccaccataacacccacctctgcttcgtgcacacggtgccctgggaccagctctttcggaacccgcaccaagctctgctccacactgccaaccggccagaggacgagtgtgtgggcgagggcctggcctgccaccagctgtgcgcccgagggcactgctggggtccagggcccacccagtgtgtcaactgcagccagttccttcggggccaggagtgcgtggaggaatgccgagtactgcaggggctccccagggagtatgtgaatgccaggcactgtttgccgtgccaccctgagtgtcagccccagaatggctcagtgacctgttttggaccggaggctgaccagtgtgtggcctgtgcccactataaggaccctcccttctgcgtggcccgctgccccagcggtgtgaaacctgacctctcctacatgcccatctggaagtttccagatgaggagggcgcatgccagccttgccccatcaactgcacccactcctgtgtggacctggatgacaagggctgccccgccgagcagagagccagccctctgacgtccatcatctctgcggtggttggcattctgctggtcgtggtcttgggggtggtctttgggatcctcatcaagcgacggcagcagaagatccggaagtacacgatgcggagactgctgcaggaaacggagctggtggagccgctgacacctagcggagcgatgcccaaccaggcgcagatgcggatcctgaaagagacggagctgaggaaggtgaaggtgcttggatctggcgcttttggcacagtctacaagggcatctggatccctgatggggagaatgtgaaaattccagtggccatcaaagtgttgagggaaaacacatcccccaaagccaacaaagaaatcttagacgaagcatacgtgatggctggtgtgggctccccatatgtctcccgccttctgggcatctgcctgacatccacggtgcagctggtgacacagcttatgccctatggctgcctcttagaccatgtccgggaaaaccgcggacgcctgggctcccaggacctgctgaactggtgtatgcagattgccaaggggatgagctacctggaggatgtgcggctcgtacacagggacttggccgctcggaacgtgctggtcaagagtcccaaccatgtcaaaattacagacttcgggctggctcggctgctggacattgacgagacagagtaccatgcagatgggggcaaggtgcccatcaagtggatggcgctggagtccattctccgccggcggttcacccaccagagtgatgtgtggagttatggtgtgactgtgtgggagctgatgacttttggggccaaaccttacgatgggatcccagcccgggagatccctgacctgctggaaaagggggagcggctgccccagccccccatctgcaccattgatgtctacatgatcatggtcaaatgttggatgattgactctgaatgtcggccaagattccgggagttggtgtctgaattctcccgcatggccagggacccccagcgctttgtggtcatccagaatgaggacttgggcccagccagtcccttggacagcaccttctaccgctcactgctggaggacgatgacatgggggacctggtggatgctgaggagtatctggtaccccagcagggcttcttctgtccagaccctgccccgggcgctgggggcatggtccaccacaggcaccgcagctcatctaccaggagtggcggtggggacctgacactagggctggagccctctgaagaggaggcccccaggtctccactggcaccctccgaaggggctggctccgatgtatttgatggtgacctgggaatgggggcagccaaggggctgcaaagcctccccacacatgaccccagccctctacagcggtacagtgaggaccccacagtacccctgccctctgagactgatggctacgttgcccccctgacctgcagcccccagcctgaatatgtgaaccagccagatgttcggccccagcccccttcgccccgagagggccctctgcctgctgcccgacctgctggtgccactctggaaaggcccaagactctctccccagggaagaatggggtcgtcaaagacgtttttgcctttgggggtgccgtggagaaccccgagtacttgacaccccagggaggagctgcccctcagccccaccctcctcctgccttcagcccagccttcgacaacctctattactgggaccaggacccaccagagcggggggctccacccagcaccttcaaagggacacctacggcagagaacccagagtacctgggtctggacgtgccagtgtgaaccagaaggccaagtccgcagaagccctgatgtgtcctcagggagcagggaaggcctgacttctgctggcatcaagaggtgggagggccctccgaccacttccaggggaacctgccatgccaggaacctgtcctaaggaaccttccttcctgcttgagttcccagatggctggaaggggtccagcctcgttggaagaggaacagcactggggagtctttgtggattctgaggccctgcccaatgagactctagggtccagtggatgccacagcccagcttggccctttccttccagatcctgggtactgaaagccttagggaagctggcctgagaggggaagcggccctaagggagtgtctaagaacaaaagcgacccattcagagactgtccctgaaacctagtactgccccccatgaggaaggaacagcaatggtgtcagtatccaggctttgtacagagtgcttttctgtttagtttttactttttttgttttgtttttttaaagatgaaataaagacccagggggagaatgggtgttgtatggggaggcaagtgtggggggtccttctccacacccactttgtccatttgcaaatatattttggaaaaca

SEQ ID NO: 369662 - DNA, 3320 bp, Homo sapiens
  misc_feature (41)..(41): n is a, c, g, or t
taccctgaaaattccagtggccatcaaagtgttgagggaanacacatcccccaaagccaacaaagaaatcttagacgaagcatacgtgatggctggtgtgggctccccatatgtctcccgccttctgggcatctgcctgacatccacggtgcagctggtgacacagcttatgccctatggctgcctcttagaccatgtccgggaaaaccgcggacgcctgggctcccaggacctgctgaactgctggattcagacccagctcctgcttccaaccttggttttttattcctaaaatgggtattgtaataatacctaccttgctggggtgtggcaagaatgaaattaaacagggcttggcacagtgaagcacgggaaaggctttctacagagcagtgactgttgttactcgctgttacaccttaggtaatgcgttttcctctctgggtgcctcccattttctggctcaagtccctgcccaggatcaagcttggaggagggccccgagggaggggccacagagactgggtgaagagcaagggtgtttgtcccaggagcatggcgaaaattgctgctgggtggccttgggaagcacaaaggggacccaactaagggcctgatcctactgcctgggggtgtcagtgccagccccccacaaatcttttctgccccccccaggaggctgaccagtgtgtggcctgtgcccactataaggaccctcccttctgcgtggcccgctgccccagcggtgtgaaacctgacctctcctacatgcccatctggaagtttccagatgaggagggcgcatgccagccttgccccatcaactgcacccactcctgtgtggacctggatgacaagggctgccccgccgagcagagagccagccctctgacgtccatcatctctgcggtggttggcattctgctggtcgtggtcttgggggtggtctttgggatcctcatcaagcgacggcagcagaagatccggaagtacacgatgcggagactgctgcaggaaacggagctggtggagccgctgacacctagcggagcgatgcccaaccaggcgcagatgcggatcctgaaagagacggagctgaggaaggtgaaggtgcttggatctggcgcttttggcacagtctacaagggcatctggatccctgatggggagaatgtgaaaattccagtggccatcaaagtgttgagggaaaacacatcccccaaagccaacaaagaaatcttagacgaagcatacgtgatggctggtgtgggctccccatatgtctcccgccttctgggcatctgcctgacatccacggtgcagctggtgacacagcttatgccctatggctgcctcttagaccatgtccgggaaaaccgcggacgcctgggctcccaggacctgctgaactggtgtatgcagattgccaaggggatgagctacctggaggatgtgcggctcgtacacagggacttggccgctcggaacgtgctggtcaagagtcccaaccatgtcaaaattacagacttcgggctggctcggctgctggacattgacgagacagagtaccatgcagatgggggcaaggtgcccatcaagtggatggcgctggagtccattctccgccggcggttcacccaccagagtgatgtgtggagttatggtgtgactgtgtgggagctgatgacttttggggccaaaccttacgatgggatcccagcccgggagatccctgacctgctggaaaagggggagcggctgccccagccccccatctgcaccattgatgtctacatgatcatggtcaaatgttggatgattgactctgaatgtcggccaagattccgggagttggtgtctgaattctcccgcatggccagggacccccagcgctttgtggtcatccagaatgaggacttgggcccagccagtcccttggacagcaccttctaccgctcactgctggaggacgatgacatgggggacctggtggatgctgaggagtatctggtaccccagcagggcttcttctgtccagaccctgccccgggcgctgggggcatggtccaccacaggcaccgcagctcatctaccaggagtggcggtggggacctgacactagggctggagccctctgaagaggaggcccccaggtctccactggcaccctccgaaggggctggctccgatgtatttgatggtgacctgggaatgggggcagccaaggggctgcaaagcctccccacacatgaccccagccctctacagcggtacagtgaggaccccacagtacccctgccctctgagactgatggctacgttgcccccctgacctgcagcccccagcctgaatatgtgaaccagccagatgttcggccccagcccccttcgccccgagagggccctctgcctgctgcccgacctgctggtgccactctggaaaggcccaagactctctccccagggaagaatggggtcgtcaaagacgtttttgcctttgggggtgccgtggagaaccccgagtacttgacaccccagggaggagctgcccctcagccccaccctcctcctgccttcagcccagccttcgacaacctctattactgggaccaggacccaccagagcggggggctccacccagcaccttcaaagggacacctacggcagagaacccagagtacctgggtctggacgtgccagtgtgaaccagaaggccaagtccgcagaagccctgatgtgtcctcagggagcagggaaggcctgacttctgctggcatcaagaggtgggagggccctccgaccacttccaggggaacctgccatgccaggaacctgtcctaaggaaccttccttcctgcttgagttcccagatggctggaaggggtccagcctcgttggaagaggaacagcactggggagtctttgtggattctgaggccctgcccaatgagactctagggtccagtggatgccacagcccagcttggccctttccttccagatcctgggtactgaaagccttagggaagctggcctgagaggggaagcggccctaagggagtgtctaagaacaaaagcgacccattcagagactgtccctgaaacctagtactgccccccatgaggaaggaacagcaatggtgtcagtatccaggctttgtacagagtgcttttctgtttagtttttactttttttgttttgtttttttaaagatgaaataaagacccagggggagaatgggtgttgtatggggaggcaagtgtggggggtccttctccacacccactttgtccatttgcaaatatattttggaaaaca

SEQ ID NO: 369663 - DNA, 2689 bp, Homo sapiens
cgagtacggtagcgaggctgggtcgccgtacgtgttttggaggggaggctgaccagtgtgtggcctgtgcccactataaggaccctcccttctgcgtggcccgctgccccagcggtgtgaaacctgacctctcctacatgcccatctggaagtttccagatgaggagggcgcatgccagccttgccccatcaactgcacccactcctgtgtggacctggatgacaagggctgccccgccgagcagagagccagccctctgacgtccatcatctctgcggtggttggcattctgctggtcgtggtcttgggggtggtctttgggatcctcatcaagcgacggcagcagaagatccggaagtacacgatgcggagactgctgcaggaaacggagctggtggagccgctgacacctagcggagcgatgcccaaccaggcgcagatgcggatcctgaaagagacggagctgaggaaggtgaaggtgcttggatctggcgcttttggcacagtctacaagggcatctggatccctgatggggagaatgtgaaaattccagtggccatcaaagtgttgagggaaaacacatcccccaaagccaacaaagaaatcttagacgaagcatacgtgatggctggtgtgggctccccatatgtctcccgccttctgggcatctgcctgacatccacggtgcagctggtgacacagcttatgccctatggctgcctcttagaccatgtccgggaaaaccgcggacgcctgggctcccaggacctgctgaactggtgtatgcagattgccaaggggatgagctacctggaggatgtgcggctcgtacacagggacttggccgctcggaacgtgctggtcaagagtcccaaccatgtcaaaattacagacttcgggctggctcggctgctggacattgacgagacagagtaccatgcagatgggggcaaggtgcccatcaagtggatggcgctggagtccattctccgccggcggttcacccaccagagtgatgtgtggagttatggtgtgactgtgtgggagctgatgacttttggggccaaaccttacgatgggatcccagcccgggagatccctgacctgctggaaaagggggagcggctgccccagccccccatctgcaccattgatgtctacatgatcatggtcaaatgttggatgattgactctgaatgtcggccaagattccgggagttggtgtctgaattctcccgcatggccagggacccccagcgctttgtggtcatccagaatgaggacttgggcccagccagtcccttggacagcaccttctaccgctcactgctggaggacgatgacatgggggacctggtggatgctgaggagtatctggtaccccagcagggcttcttctgtccagaccctgccccgggcgctgggggcatggtccaccacaggcaccgcagctcatctaccaggagtggcggtggggacctgacactagggctggagccctctgaagaggaggcccccaggtctccactggcaccctccgaaggggctggctccgatgtatttgatggtgacctgggaatgggggcagccaaggggctgcaaagcctccccacacatgaccccagccctctacagcggtacagtgaggaccccacagtacccctgccctctgagactgatggctacgttgcccccctgacctgcagcccccagcctgaatatgtgaaccagccagatgttcggccccagcccccttcgccccgagagggccctctgcctgctgcccgacctgctggtgccactctggaaaggcccaagactctctccccagggaagaatggggtcgtcaaagacgtttttgcctttgggggtgccgtggagaaccccgagtacttgacaccccagggaggagctgcccctcagccccaccctcctcctgccttcagcccagccttcgacaacctctattactgggaccaggacccaccagagcggggggctccacccagcaccttcaaagggacacctacggcagagaacccagagtacctgggtctggacgtgccagtgtgaaccagaaggccaagtccgcagaagccctgatgtgtcctcagggagcagggaaggcctgacttctgctggcatcaagaggtgggagggccctccgaccacttccaggggaacctgccatgccaggaacctgtcctaaggaaccttccttcctgcttgagttcccagatggctggaaggggtccagcctcgttggaagaggaacagcactggggagtctttgtggattctgaggccctgcccaatgagactctagggtccagtggatgccacagcccagcttggccctttccttccagatcctgggtactgaaagccttagggaagctggcctgagaggggaagcggccctaagggagtgtctaagaacaaaagcgacccattcagagactgtccctgaaacctagtactgccccccatgaggaaggaacagcaatggtgtcagtatccaggctttgtacagagtgcttttctgtttagtttttactttttttgttttgtttttttaaagatgaaataaagacccagggggagaatgggtgttgtatggggaggcaagtgtggggggtccttctccacacccactttgtccatttgcaaatatattttggaaaaca

SEQ ID NO: 369664 - DNA, 5360 bp, Homo sapiens
attctactctccgctgaagtccacacagtttaaattaaagttcccggatttttgtgggcgcctgccccgcccctcgtccccctgctgtgtccatatatcgaggcgatagggttaagggaaggcggacgcctgatgggttaatgagcaaactgaagtgttttccatgatcttttttgagtcgcaattgaagtaccacctcccgagggtgattgcttccccatgcggggtagaacctttgctgtcctgttcaccactctacctccagcacagaatttggcttatgcctactcaatgtgaagatgatgaggatgaaaacctttgtgatgatccacttccacttaatgaatggttcctcgtctcctcttccttggaccaaaagtcagaggcaagaatgccctcattcataccccagtggtctatacctccagcagcaagtcgagtgagcaagtgatgtcctgaaaggcccagtggatcagtggaatgaagcgggcaggaagacttagtgctcctgaaacaaggaatccagaatccaggagaaggatggctcagtggggctttcaagggacaagtatgggggttgaaggggtcactgtccctataccaaatccgaaaatattgtgaccaggaaccattctgtccaactcttctatttcaggtggcaaagcaaagctatattcaagaccacatgcaaagctactccctgagcaaagagtcacagataaaacgggggcaccagtagaatggccaggacaaacgcagtgcagcacagagactcagaccctggcagccatgcctgcgcaggcagtgatgagagtgacatgtactgttgtggacatgcacaaaagtgagtgtgcaccggcacagacatgaagctgcggctccctgccagtcccgagacccacctggacatgctccgccacctctaccagggctgccaggtggtgcagggaaacctggaactcacctacctgcccaccaatgccagcctgtccttcctgcaggatatccaggaggtgcagggctacgtgctcatcgctcacaaccaagtgaggcaggtcccactgcagaggctgcggattgtgcgaggcacccagctctttgaggacaactatgccctggccgtgctagacaatggagacccgctgaacaataccacccctgtcacaggggcctccccaggaggcctgcgggagctgcagcttcgaagcctcacagagatcttgaaaggaggggtcttgatccagcggaacccccagctctgctaccaggacacgattttgtggaaggacatcttccacaagaacaaccagctggctctcacactgatagacaccaaccgctctcgggcctgccacccctgttctccgatgtgtaagggctcccgctgctggggagagagttctgaggattgtcagagcctgacgcgcactgtctgtgccggtggctgtgcccgctgcaaggggccactgcccactgactgctgccatgagcagtgtgctgccggctgcacgggccccaagcactctgactgcctggcctgcctccacttcaaccacagtggcatctgtgagctgcactgcccagccctggtcacctacaacacagacacgtttgagtccatgcccaatcccgagggccggtatacattcggcgccagctgtgtgactgcctgtccctacaactacctttctacggacgtgggatcctgcaccctcgtctgccccctgcacaaccaagaggtgacagcagaggatggaacacagcggtgtgagaagtgcagcaagccctgtgcccgagtgtgctatggtctgggcatggagcacttgcgagaggtgagggcagttaccagtgccaatatccaggagtttgctggctgcaagaagatctttgggagcctggcatttctgccggagagctttgatggggacccagcctccaacactgccccgctccagccagagcagctccaagtgtttgagactctggaagagatcacaggttacctatacatctcagcatggccggacagcctgcctgacctcagcgtcttccagaacctgcaagtaatccggggacgaattctgcacaatggcgcctactcgctgaccctgcaagggctgggcatcagctggctggggctgcgctcactgagggaactgggcagtggactggccctcatccaccataacacccacctctgcttcgtgcacacggtgccctgggaccagctctttcggaacccgcaccaagctctgctccacactgccaaccggccagaggacgagtgtgtgggcgagggcctggcctgccaccagctgtgcgcccgagggcactgctggggtccagggcccacccagtgtgtcaactgcagccagttccttcggggccaggagtgcgtggaggaatgccgagtactgcaggggctccccagggagtatgtgaatgccaggcactgtttgccgtgccaccctgagtgtcagccccagaatggctcagtgacctgttttggaccggaggctgaccagtgtgtggcctgtgcccactataaggaccctcccttctgcgtggcccgctgccccagcggtgtgaaacctgacctctcctacatgcccatctggaagtttccagatgaggagggcgcatgccagccttgccccatcaactgcacccactcctgtgtggacctggatgacaagggctgccccgccgagcagagagccagccctctgacgtccatcatctctgcggtggttggcattctgctggtcgtggtcttgggggtggtctttgggatcctcatcaagcgacggcagcagaagatccggaagtacacgatgcggagactgctgcaggaaacggagctggtggagccgctgacacctagcggagcgatgcccaaccaggcgcagatgcggatcctgaaagagacggagctgaggaaggtgaaggtgcttggatctggcgcttttggcacagtctacaagggcatctggatccctgatggggagaatgtgaaaattccagtggccatcaaagtgttgagggaaaacacatcccccaaagccaacaaagaaatcttagacgaagcatacgtgatggctggtgtgggctccccatatgtctcccgccttctgggcatctgcctgacatccacggtgcagctggtgacacagcttatgccctatggctgcctcttagaccatgtccgggaaaaccgcggacgcctgggctcccaggacctgctgaactggtgtatgcagattgccaaggggatgagctacctggaggatgtgcggctcgtacacagggacttggccgctcggaacgtgctggtcaagagtcccaaccatgtcaaaattacagacttcgggctggctcggctgctggacattgacgagacagagtaccatgcagatgggggcaaggtgcccatcaagtggatggcgctggagtccattctccgccggcggttcacccaccagagtgatgtgtggagttatggtgtgactgtgtgggagctgatgacttttggggccaaaccttacgatgggatcccagcccgggagatccctgacctgctggaaaagggggagcggctgccccagccccccatctgcaccattgatgtctacatgatcatggtcaaatgttggatgattgactctgaatgtcggccaagattccgggagttggtgtctgaattctcccgcatggccagggacccccagcgctttgtggtcatccagaatgaggacttgggcccagccagtcccttggacagcaccttctaccgctcactgctggaggacgatgacatgggggacctggtggatgctgaggagtatctggtaccccagcagggcttcttctgtccagaccctgccccgggcgctgggggcatggtccaccacaggcaccgcagctcatctaccaggagtggcggtggggacctgacactagggctggagccctctgaagaggaggcccccaggtctccactggcaccctccgaaggggctggctccgatgtatttgatggtgacctgggaatgggggcagccaaggggctgcaaagcctccccacacatgaccccagccctctacagcggtacagtgaggaccccacagtacccctgccctctgagactgatggctacgttgcccccctgacctgcagcccccagcctgaatatgtgaaccagccagatgttcggccccagcccccttcgccccgagagggccctctgcctgctgcccgacctgctggtgccactctggaaaggcccaagactctctccccagggaagaatggggtcgtcaaagacgtttttgcctttgggggtgccgtggagaaccccgagtacttgacaccccagggaggagctgcccctcagccccaccctcctcctgccttcagcccagccttcgacaacctctattactgggaccaggacccaccagagcggggggctccacccagcaccttcaaagggacacctacggcagagaacccagagtacctgggtctggacgtgccagtgtgaaccagaaggccaagtccgcagaagccctgatgtgtcctcagggagcagggaaggcctgacttctgctggcatcaagaggtgggagggccctccgaccacttccaggggaacctgccatgccaggaacctgtcctaaggaaccttccttcctgcttgagttcccagatggctggaaggggtccagcctcgttggaagaggaacagcactggggagtctttgtggattctgaggccctgcccaatgagactctagggtccagtggatgccacagcccagcttggccctttccttccagatcctgggtactgaaagccttagggaagctggcctgagaggggaagcggccctaagggagtgtctaagaacaaaagcgacccattcagagactgtccctgaaacctagtactgccccccatgaggaaggaacagcaatggtgcctctgtgacaccccctgacctatggaagggaactcatgttggccggacattttaccatgtgccaggcactgcgggcactttacataaagcagccaatgtcagaactagaaagcgggagagctgggattcagagcacagactgacccagcaggtgttctgcgagcctcacctgtgcccccgaggcgcgactcgatctcgatgcccggatactgctccttcacagcactggccagctccaggtaggtcgcctcgaagccgcagggttcacagtactccaccacgatgcggaccccactgcccggctcgacctcctcgggagggggcgctacggacgtctgccccggctccccgctcatcgcggccggctccgctcgggc

SEQ ID NO: 369665 - DNA, 1907 bp, Homo sapiens
gggtgcttcccattccaggggatgagctacctggaggatgtgcggctcgtacacagggacttggccgctcggaacgtgctggtcaagagtcccaaccatgtcaaaattacagacttcgggctggctcggctgctggacattgacgagacagagtaccatgcagatgggggcaaggtgcccatcaagtggatggcgctggagtccattctccgccggcggttcacccaccagagtgatgtgtggagttatggtgtgactgtgtgggagctgatgacttttggggccaaaccttacgatgggatcccagcccgggagatccctgacctgctggaaaagggggagcggctgccccagccccccatctgcaccattgatgtctacatgatcatggtcaaatgttggatgattgactctgaatgtcggccaagattccgggagttggtgtctgaattctcccgcatggccagggacccccagcgctttgtggtcatccagaatgaggacttgggcccagccagtcccttggacagcaccttctaccgctcactgctggaggacgatgacatgggggacctggtggatgctgaggagtatctggtaccccagcagggcttcttctgtccagaccctgccccgggcgctgggggcatggtccaccacaggcaccgcagctcatctaccaggagtggcggtggggacctgacactagggctggagccctctgaagaggaggcccccaggtctccactggcaccctccgaaggggctggctccgatgtatttgatggtgacctgggaatgggggcagccaaggggctgcaaagcctccccacacatgaccccagccctctacagcggtacagtgaggaccccacagtacccctgccctctgagactgatggctacgttgcccccctgacctgcagcccccagcctgaatatgtgaaccagccagatgttcggccccagcccccttcgccccgagagggccctctgcctgctgcccgacctgctggtgccactctggaaaggcccaagactctctccccagggaagaatggggtcgtcaaagacgtttttgcctttgggggtgccgtggagaaccccgagtacttgacaccccagggaggagctgcccctcagccccaccctcctcctgccttcagcccagccttcgacaacctctattactgggaccaggacccaccagagcggggggctccacccagcaccttcaaagggacacctacggcagagaacccagagtacctgggtctggacgtgccagtgtgaaccagaaggccaagtccgcagaagccctgatgtgtcctcagggagcagggaaggcctgacttctgctggcatcaagaggtgggagggccctccgaccacttccaggggaacctgccatgccaggaacctgtcctaaggaaccttccttcctgcttgagttcccagatggctggaaggggtccagcctcgttggaagaggaacagcactggggagtctttgtggattctgaggccctgcccaatgagactctagggtccagtggatgccacagcccagcttggccctttccttccagatcctgggtactgaaagccttagggaagctggcctgagaggggaagcggccctaagggagtgtctaagaacaaaagcgacccattcagagactgtccctgaaacctagtactgccccccatgaggaaggaacagcaatggtgtcagtatccaggctttgtacagagtgcttttctgtttagtttttactttttttgttttgtttttttaaagatgaaataaagacccagggggagaatgggtgttgtatggggaggcaagtgtggggggtccttctccacacccactttgtccatttgcaaatatattttggaaaaca

SEQ ID NO: 369666 - DNA, 1814 bp, Homo sapiens
ccccagagtctggtgctacttctctaccacctgagggctttgggctgtcccttgggactgtctagaccagactggagggggagtgggaggggagaggcagcaagcacacagggcctgggactagcatgctgacctccctcctgccccaggttggatgattgactctgaatgtcggccaagattccgggagttggtgtctgaattctcccgcatggccagggacccccagcgctttgtggtcatccaggtactgggcctctgtgccccatccctgcctgtggctaagagcaccctcctgcagagggtgggaaggagagatgagtccagtatgccaggcccctcacggaaggctgcatgctgggctggggaggggccaccatcctgcctctccttcctccacagaatgaggacttgggcccagccagtcccttggacagcaccttctaccgctcactgctggaggacgatgacatgggggacctggtggatgctgaggagtatctggtaccccagcagggcttcttctgtccagaccctgccccgggcgctgggggcatggtccaccacaggcaccgcagctcatctaccaggagtggcggtggggacctgacactagggctggagccctctgaagaggaggcccccaggtctccactggcaccctccgaaggggctggctccgatgtatttgatggtgacctgggaatgggggcagccaaggggctgcaaagcctccccacacatgaccccagccctctacagcggtacagtgaggaccccacagtacccctgccctctgagactgatggctacgttgcccccctgacctgcagcccccagcctgaatatgtgaaccagccagatgttcggccccagcccccttcgccccgagagggccctctgcctgctgcccgacctgctggtgccactctggaaaggcccaagactctctccccagggaagaatggggtcgtcaaagacgtttttgcctttgggggtgccgtggagaaccccgagtacttgacaccccagggaggagctgcccctcagccccaccctcctcctgccttcagcccagccttcgacaacctctattactgggaccaggacccaccagagcggggggctccacccagcaccttcaaagggacacctacggcagagaacccagagtacctgggtctggacgtgccagtgtgaaccagaaggccaagtccgcagaagccctgatgtgtcctcagggagcagggaaggcctgacttctgctggcatcaagaggtgggagggccctccgaccacttccaggggaacctgccatgccaggaacctgtcctaaggaaccttccttcctgcttgagttcccagatggctggaaggggtccagcctcgttggaagaggaacagcactggggagtctttgtggattctgaggccctgcccaatgagactctagggtccagtggatgccacagcccagcttggccctttccttccagatcctgggtactgaaagccttagggaagctggcctgagaggggaagcggccctaagggagtgtctaagaacaaaagcgacccattcagagactgtccctgaaacctagtactgccccccatgaggaaggaacagcaatggtgtcagtatccaggctttgtacagagtgcttttctgtttagtttttactttttttgttttgtttttttaaagatgaaataaagacccagggggagaatgggtgttgtatggggaggcaagtgtggggggtccttctccacacccactttgtccatttgcaaatatattttggaaaaca

SEQ ID NO: 369667 - DNA, 4210 bp, Homo sapiens
attctactctccgctgaagtccacacagtttaaattaaagttcccggatttttgtgggcgcctgccccgcccctcgtccccctgctgtgtccatatatcgaggcgatagggttaagggaaggcggacgcctgatgggttaatgagcaaactgaagtgttttccatgatcttttttgagtcgcaattgaagtaccacctcccgagggtgattgcttccccatgcggggtagaacctttgctgtcctgttcaccactctacctccagcacagaatttggcttatgcctactcaatgtgaagatgatgaggatgaaaacctttgtgatgatccacttccacttaatgaatggttcctcgtctcctcttccttggaccaaaagtcagaggcaagaatgccctcattcataccccagtggtctatacctccagcagcaagtcgagtgagcaagtgatgtcctgaaaggcccagtggatcagtggaatgaagcgggcaggaagacttagtgctcctgaaacaaggaatccagaatccaggagaaggatggctcagtggggctttcaagggacaagtatgggggttgaaggggtcactgtccctataccaaatccgaaaatattgtgaccaggaaccattctgtccaactcttctatttcaggtggcaaagcaaagctatattcaagaccacatgcaaagctactccctgagcaaagagtcacagataaaacgggggcaccagtagaatggccaggacaaacgcagtgcagcacagagactcagaccctggcagccatgcctgcgcaggcagtgatgagagtgacatgtactgttgtggacatgcacaaaagtgagtgtgcaccggcacagacatgaagctgcggctccctgccagtcccgagacccacctggacatgctccgccacctctaccagggctgccaggtggtgcagggaaacctggaactcacctacctgcccaccaatgccagcctgtccttcctgcaggatatccaggaggtgcagggctacgtgctcatcgctcacaaccaagtgaggcaggtcccactgcagaggctgcggattgtgcgaggcacccagctctttgaggacaactatgccctggccgtgctagacaatggagacccgctgaacaataccacccctgtcacaggggcctccccaggaggcctgcgggagctgcagcttcgaagcctcacagagatcttgaaaggaggggtcttgatccagcggaacccccagctctgctaccaggacacgattttgtggaaggacatcttccacaagaacaaccagctggctctcacactgatagacaccaaccgctctcgggcctgccacccctgttctccgatgtgtaagggctcccgctgctggggagagagttctgaggattgtcagagcctgacgcgcactgtctgtgccggtggctgtgcccgctgcaaggggccactgcccactgactgctgccatgagcagtgtgctgccggctgcacgggccccaagcactctgactgcctggcctgcctccacttcaaccacagtggcatctgtgagctgcactgcccagccctggtcacctacaacacagacacgtttgagtccatgcccaatcccgagggccggtatacattcggcgccagctgtgtgactgcctgtccctacaactacctttctacggacgtgggatcctgcaccctcgtctgccccctgcacaaccaagaggtgacagcagaggatggaacacagcggtgtgagaagtgcagcaagccctgtgcccgagtgtgctatggtctgggcatggagcacttgcgagaggtgagggcagttaccagtgccaatatccaggagtttgctggctgcaagaagatctttgggagcctggcatttctgccggagagctttgatggggacccagcctccaacactgccccgctccagccagagcagctccaagtgtttgagactctggaagagatcacaggttacctatacatctcagcatggccggacagcctgcctgacctcagcgtcttccagaacctgcaagtaatccggggacgaattctgcacaatggcgcctactcgctgaccctgcaagggctgggcatcagctggctggggctgcgctcactgagggaactgggcagtggactggccctcatccaccataacacccacctctgcttcgtgcacacggtgccctgggaccagctctttcggaacccgcaccaagctctgctccacactgccaaccggccagaggacgagtgtgtgggcgagggcctggcctgccaccagctgtgcgcccgagggcactgctggggtccagggcccacccagtgtgtcaactgcagccagttccttcggggccaggagtgcgtggaggaatgccgagtactgcaggggctccccagggagtatgtgaatgccaggcactgtttgccgtgccaccctgagtgtcagccccagaatggctcagtgacctgttttggaccggaggctgaccagtgtgtggcctgtgcccactataaggaccctcccttctgcgtggcccgctgccccagcggtgtgaaacctgacctctcctacatgcccatctggaagtttccagatgaggagggcgcatgccagccttgccccatcaactgcacccactcctgtgtggacctggatgacaagggctgccccgccgagcagagagccagccctctgacgtccatcatctctgcggtggttggcattctgctggtcgtggtcttgggggtggtctttgggatcctcatcaagcgacggcagcagaagatccggaagtacacgatgcggagactgctgcaggaaacggagctggtggagccgctgacacctagcggagcgatgcccaaccaggcgcagatgcggatcctgaaagagacggagctgaggaaggtgaaggtgcttggatctggcgcttttggcacagtctacaagggcatctggatccctgatggggagaatgtgaaaattccagtggccatcaaagtgttgagggaaaacacatcccccaaagccaacaaagaaatcttagacgaagcatacgtgatggctggtgtgggctccccatatgtctcccgccttctgggcatctgcctgacatccacggtgcagctggtgacacagcttatgccctatggctgcctcttagaccatgtccgggaaaaccgcggacgcctgggctcccaggacctgctgaactggtgtatgcagattgccaaggggatgagctacctggaggatgtgcggctcgtacacagggacttggccgctcggaacgtgctggtcaagagtcccaaccatgtcaaaattacagacttcgggctggctcggctgctggacattgacgagacagagtaccatgcagatgggggcaaggtgcccatcaagtggatggcgctggagtccattctccgccggcggttcacccaccagagtgatgtgtggagttatggtgtgactgtgtgggagctgatgacttttggggccaaaccttacgatgggatcccagcccgggagatccctgacctgctggaaaagggggagcggctgccccagccccccatctgcaccattgatgtctacatgatcatggtcaaatgttggatgattgactctgaatgtcggccaagattccgggagttggtgtctgaattctcccgcatggccagggacccccagcgctttgtggtcatccagaatgaggacttgggcccagccagtcccttggacagcaccttctaccgctcactgctggaggacgatgacatgggggacctggtggatgctgaggagtatctggtaccccagcagggcttcttctgtccagacccctttccttccagatcctgggtactgaaagccttagggaagctggcctgagaggggaagcggccctaagggagtgtctaagaacaaaagcgacccattcagagactgtccctgaaacctagtactgccccccatgaggaaggaacagcaatggtgtcagtatccaggctttgtacagagtgcttttctgtttagtttttactttttttgttttgtttttttaaagatgaaataaagacccagggggagaatgggtgttgtatggggaggcaagtgtggggggtccttctccacacccactttgtccatttgcaaatatattttggaaaaca

SEQ ID NO: 369668 - DNA, 1108 bp, Homo sapiens
tctagaggatccttgtcgacttctgctctgcgttgaccgaccccagccctctacagcggtacagtgaggaccccacagtacccctgccctctgagactgatggctacgttgcccccctgacctgcagcccccagcctgaatatgtgaaccagccagatgttcggccccagcccccttcgccccgagagggccctctgcctgctgcccgacctgctggtgccactctggaaaggcccaagactctctccccagggaagaatggggtcgtcaaagacgtttttgcctttgggggtgccgtggagaaccccgagtacttgacaccccagggaggagctgcccctcagccccaccctcctcctgccttcagcccagccttcgacaacctctattactgggaccaggacccaccagagcggggggctccacccagcaccttcaaagggacacctacggcagagaacccagagtacctgggtctggacgtgccagtgtgaaccagaaggccaagtccgcagaagccctgatgtgtcctcagggagcagggaaggcctgacttctgctggcatcaagaggtgggagggccctccgaccacttccaggggaacctgccatgccaggaacctgtcctaaggaaccttccttcctgcttgagttcccagatggctggaaggggtccagcctcgttggaagaggaacagcactggggagtctttgtggattctgaggccctgcccaatgagactctagggtccagtggatgccacagcccagcttggccctttccttccagatcctgggtactgaaagccttagggaagctggcctgagaggggaagcggccctaagggagtgtctaagaacaaaagcgacccattcagagactgtccctgaaacctagtactgccccccatgaggaaggaacagcaatggtgtcagtatccaggctttgtacagagtgcttttctgtttagtttttactttttttgttttgtttttttaaagatgaaataaagacccagggggagaatgggtgttgtatggggaggcaagtgtggggggtccttctccacacccactttgtccatttgcaaatatattttggaaaaca

SEQ ID NO: 369669 - DNA, 3699 bp, Homo sapiens
attctactctccgctgaagtccacacagtttaaattaaagttcccggatttttgtgggcgcctgccccgcccctcgtccccctgctgtgtccatatatcgaggcgatagggttaagggaaggcggacgcctgatgggttaatgagcaaactgaagtgttttccatgatcttttttgagtcgcaattgaagtaccacctcccgagggtgattgcttccccatgcggggtagaacctttgctgtcctgttcaccactctacctccagcacagaatttggcttatgcctactcaatgtgaagatgatgaggatgaaaacctttgtgatgatccacttccacttaatgaatggttcctcgtctcctcttccttggaccaaaagtcagaggcaagaatgccctcattcataccccagtggtctatacctccagcagcaagtcgagtgagcaagtgatgtcctgaaaggcccagtggatcagtggaatgaagcgggcaggaagacttagtgctcctgaaacaaggaatccagaatccaggagaaggatggctcagtggggctttcaagggacaagtatgggggttgaaggggtcactgtccctataccaaatccgaaaatattgtgaccaggaaccattctgtccaactcttctatttcaggtggcaaagcaaagctatattcaagaccacatgcaaagctactccctgagcaaagagtcacagataaaacgggggcaccagtagaatggccaggacaaacgcagtgcagcacagagactcagaccctggcagccatgcctgcgcaggcagtgatgagagtgacatgtactgttgtggacatgcacaaaagtgagtgtgcaccggcacagacatgaagctgcggctccctgccagtcccgagacccacctggacatgctccgccacctctaccagggctgccaggtggtgcagggaaacctggaactcacctacctgcccaccaatgccagcctgtccttcctgcaggatatccaggaggtgcagggctacgtgctcatcgctcacaaccaagtgaggcaggtcccactgcagaggctgcggattgtgcgaggcacccagctctttgaggacaactatgccctggccgtgctagacaatggagacccgctgaacaataccacccctgtcacaggggcctccccaggaggcctgcgggagctgcagcttcgaagcctcacagagatcttgaaaggaggggtcttgatccagcggaacccccagctctgctaccaggacacgattttgtggaaggacatcttccacaagaacaaccagctggctctcacactgatagacaccaaccgctctcgggcctgccacccctgttctccgatgtgtaagggctcccgctgctggggagagagttctgaggattgtcagagcctgacgcgcactgtctgtgccggtggctgtgcccgctgcaaggggccactgcccactgactgctgccatgagcagtgtgctgccggctgcacgggccccaagcactctgactgcctggcctgcctccacttcaaccacagtggcatctgtgagctgcactgcccagccctggtcacctacaacacagacacgtttgagtccatgcccaatcccgagggccggtatacattcggcgccagctgtgtgactgcctgtccctacaactacctttctacggacgtgggatcctgcaccctcgtctgccccctgcacaaccaagaggtgacagcagaggatggaacacagcggtgtgagaagtgcagcaagccctgtgcccgagtgtgctatggtctgggcatggagcacttgcgagaggtgagggcagttaccagtgccaatatccaggagtttgctggctgcaagaagatctttgggagcctggcatttctgccggagagctttgatggggacccagcctccaacactgccccgctccagccagagcagctccaagtgtttgagactctggaagagatcacaggttacctatacatctcagcatggccggacagcctgcctgacctcagcgtcttccagaacctgcaagtaatccggggacgaattctgcacaatggcgcctactcgctgaccctgcaagggctgggcatcagctggctggggctgcgctcactgagggaactgggcagtggactggccctcatccaccataacacccacctctgcttcgtgcacacggtgccctgggaccagctctttcggaacccgcaccaagctctgctccacactgccaaccggccagaggacgagtgtgtgggcgagggcctggcctgccaccagctgtgcgcccgagggcactgctggggtccagggcccacccagtgtgtcaactgcagccagttccttcggggccaggagtgcgtggaggaatgccgagtactgcaggggctccccagggagtatgtgaatgccaggcactgtttgccgtgccaccctgagtgtcagccccagaatggctcagtgacctgttttggaccggaggctgaccagtgtgtggcctgtgcccactataaggaccctcccttctgcgtggcccgctgccccagcggtgtgaaacctgacctctcctacatgcccatctggaagtttccagatgaggagggcgcatgccagccttgccccatcaactgcacccactcctgtgtggacctggatgacaagggctgccccgccgagcagagagccagccctctgacgtccatcatctctgcggtggttggcattctgctggtcgtggtcttgggggtggtctttgggatcctcatcaagcgacggcagcagaagatccggaagtacacgatgcggagactgctgcaggaaacggagctggtggagccgctgacacctagcggagcgatgcccaaccaggcgcagatgcggatcctgaaagagacggagctgaggaaggtgaaggtgcttggatctggcgcttttggcacagtctacaagggcatctggatccctgatggggagaatgtgaaaattccagtggccatcaaagtgttgagggaaaacacatcccccaaagccaacaaagaaatcttagacgaagcatacgtgatggctggtgtgggctccccatatgtctcccgccttctgggcatctgcctgacatccacggtgcagctggtgacacagcttatgccctatggctgcctcttagaccatgtccgggaaaaccgcggacgcctgggctcccaggacctgctgaactggtgtatgcagattgccaaggggatgagctacctggaggatgtgcggctcgtacacagggacttggccgctcggaacgtgctggtcaagagtcccaaccatgtcaaaattacagacttcgggctggctcggctgctggacattgacgagacagagtaccatgcagatgggggcaaggtgcccatcaagtggatggcgctggagtccattctccgccggcggttcacccaccagagtgatgtgtggagttatggtgtgactgtgtgggagctgatgacttttggggccaaaccttacgatgggatcccagcccgggagatccctgacctgctggaaaagggggagcggctgccccagccccccatctgcaccattgatgtctacatgatcatggtcaaattggatgattgactctgaatgtgcagccagccatagtgggatcgctctagat

SEQ ID NO: 369670 - DNA, 3693 bp, Homo sapiens
attctactctccgctgaagtccacacagtttaaattaaagttcccggatttttgtgggcgcctgccccgcccctcgtccccctgctgtgtccatatatcgaggcgatagggttaagggaaggcggacgcctgatgggttaatgagcaaactgaagtgttttccatgatcttttttgagtcgcaattgaagtaccacctcccgagggtgattgcttccccatgcggggtagaacctttgctgtcctgttcaccactctacctccagcacagaatttggcttatgcctactcaatgtgaagatgatgaggatgaaaacctttgtgatgatccacttccacttaatgaatggttcctcgtctcctcttccttggaccaaaagtcagaggcaagaatgccctcattcataccccagtggtctatacctccagcagcaagtcgagtgagcaagtgatgtcctgaaaggcccagtggatcagtggaatgaagcgggcaggaagacttagtgctcctgaaacaaggaatccagaatccaggagaaggatggctcagtggggctttcaagggacaagtatgggggttgaaggggtcactgtccctataccaaatccgaaaatattgtgaccaggaaccattctgtccaactcttctatttcaggtggcaaagcaaagctatattcaagaccacatgcaaagctactccctgagcaaagagtcacagataaaacgggggcaccagtagaatggccaggacaaacgcagtgcagcacagagactcagaccctggcagccatgcctgcgcaggcagtgatgagagtgacatgtactgttgtggacatgcacaaaagtgagtgtgcaccggcacagacatgaagctgcggctccctgccagtcccgagacccacctggacatgctccgccacctctaccagggctgccaggtggtgcagggaaacctggaactcacctacctgcccaccaatgccagcctgtccttcctgcaggatatccaggaggtgcagggctacgtgctcatcgctcacaaccaagtgaggcaggtcccactgcagaggctgcggattgtgcgaggcacccagctctttgaggacaactatgccctggccgtgctagacaatggagacccgctgaacaataccacccctgtcacaggggcctccccaggaggcctgcgggagctgcagcttcgaagcctcacagagatcttgaaaggaggggtcttgatccagcggaacccccagctctgctaccaggacacgattttgtggaaggacatcttccacaagaacaaccagctggctctcacactgatagacaccaaccgctctcgggcctgccacccctgttctccgatgtgtaagggctcccgctgctggggagagagttctgaggattgtcagagcctgacgcgcactgtctgtgccggtggctgtgcccgctgcaaggggccactgcccactgactgctgccatgagcagtgtgctgccggctgcacgggccccaagcactctgactgcctggcctgcctccacttcaaccacagtggcatctgtgagctgcactgcccagccctggtcacctacaacacagacacgtttgagtccatgcccaatcccgagggccggtatacattcggcgccagctgtgtgactgcctgtccctacaactacctttctacggacgtgggatcctgcaccctcgtctgccccctgcacaaccaagaggtgacagcagaggatggaacacagcggtgtgagaagtgcagcaagccctgtgcccgagtgtgctatggtctgggcatggagcacttgcgagaggtgagggcagttaccagtgccaatatccaggagtttgctggctgcaagaagatctttgggagcctggcatttctgccggagagctttgatggggacccagcctccaacactgccccgctccagccagagcagctccaagtgtttgagactctggaagagatcacaggttacctatacatctcagcatggccggacagcctgcctgacctcagcgtcttccagaacctgcaagtaatccggggacgaattctgcacaatggcgcctactcgctgaccctgcaagggctgggcatcagctggctggggctgcgctcactgagggaactgggcagtggactggccctcatccaccataacacccacctctgcttcgtgcacacggtgccctgggaccagctctttcggaacccgcaccaagctctgctccacactgccaaccggccagaggacgagtgtgtgggcgagggcctggcctgccaccagctgtgcgcccgagggcactgctggggtccagggcccacccagtgtgtcaactgcagccagttccttcggggccaggagtgcgtggaggaatgccgagtactgcaggggctccccagggagtatgtgaatgccaggcactgtttgccgtgccaccctgagtgtcagccccagaatggctcagtgacctgttttggaccggaggctgaccagtgtgtggcctgtgcccactataaggaccctcccttctgcgtggcccgctgccccagcggtgtgaaacctgacctctcctacatgcccatctggaagtttccagatgaggagggcgcatgccagccttgccccatcaactgcacccactcctgtgtggacctggatgacaagggctgccccgccgagcagagagccagccctctgacgtccatcatctctgcggtggttggcattctgctggtcgtggtcttgggggtggtctttgggatcctcatcaagcgacggcagcagaagatccggaagtacacgatgcggagactgctgcaggaaacggagctggtggagccgctgacacctagcggagcgatgcccaaccaggcgcagatgcggatcctgaaagagacggagctgaggaaggtgaaggtgcttggatctggcgcttttggcacagtctacaagggcatctggatccctgatggggagaatgtgaaaattccagtggccatcaaagtgttgagggaaaacacatcccccaaagccaacaaagaaatcttagacgaagcatacgtgatggctggtgtgggctccccatatgtctcccgccttctgggcatctgcctgacatccacggtgcagctggtgacacagcttatgccctatggctgcctcttagaccatgtccgggaaaaccgcggacgcctgggctcccaggacctgctgaactggtgtatgcagattgccaaggggatgagctacctggaggatgtgcggctcgtacacagggacttggccgctcggaacgtgctggtcaagagtcccaaccatgtcaaaattacagacttcgggctggctcggctgctggacattgacgagacagagtaccatgcagatgggggcaaggtgcccatcaagtggatggcgctggagtccattctccgccggcggttcacccaccagagtgatgtgtggagttatggtgtgactgtgtgggagctgatgacttagcccatgagctggtgaccagcaagattgcactacggaaggacctggataacgctgaggaaaaggcagatgctctgaataaggagctgctgatgaccaaacagaatttgattgatgcagaagaagagaaaagacggctggaagaagagtctgctcagttaaaaga

SEQ ID NO: 369671 - DNA, 932 bp, Homo sapiens
caacgcatgtgccgctcccaacgatgtgccgctcccaacgcatgtgccgctcccaacgcatgtactctctccccagggaagaatggggtcgtcaaagacgtttttgcctttgggggtgccgtggagaaccccgagtacttgacaccccagggaggagctgcccctcagccccaccctcctcctgccttcagcccagccttcgacaacctctattactgggaccaggacccaccagagcggggggctccacccagcaccttcaaagggacacctacggcagagaacccagagtacctgggtctggacgtgccagtgtgaaccagaaggccaagtccgcagaagccctgatgtgtcctcagggagcagggaaggcctgacttctgctggcatcaagaggtgggagggccctccgaccacttccaggggaacctgccatgccaggaacctgtcctaaggaaccttccttcctgcttgagttcccagatggctggaaggggtccagcctcgttggaagaggaacagcactggggagtctttgtggattctgaggccctgcccaatgagactctagggtccagtggatgccacagcccagcttggccctttccttccagatcctgggtactgaaagccttagggaagctggcctgagaggggaagcggccctaagggagtgtctaagaacaaaagcgacccattcagagactgtccctgaaacctagtactgccccccatgaggaaggaacagcaatggtgtcagtatccaggctttgtacagagtgcttttctgtttagtttttactttttttgttttgtttttttaaagatgaaataaagacccagggggagaatgggtgttgtatggggaggcaagtgtggggggtccttctccacacccactttgtccatttgcaaatatattttggaaaaca

SEQ ID NO: 369672 - DNA, 3427 bp, Homo sapiens
attctactctccgctgaagtccacacagtttaaattaaagttcccggatttttgtgggcgcctgccccgcccctcgtccccctgctgtgtccatatatcgaggcgatagggttaagggaaggcggacgcctgatgggttaatgagcaaactgaagtgttttccatgatcttttttgagtcgcaattgaagtaccacctcccgagggtgattgcttccccatgcggggtagaacctttgctgtcctgttcaccactctacctccagcacagaatttggcttatgcctactcaatgtgaagatgatgaggatgaaaacctttgtgatgatccacttccacttaatgaatggttcctcgtctcctcttccttggaccaaaagtcagaggcaagaatgccctcattcataccccagtggtctatacctccagcagcaagtcgagtgagcaagtgatgtcctgaaaggcccagtggatcagtggaatgaagcgggcaggaagacttagtgctcctgaaacaaggaatccagaatccaggagaaggatggctcagtggggctttcaagggacaagtatgggggttgaaggggtcactgtccctataccaaatccgaaaatattgtgaccaggaaccattctgtccaactcttctatttcaggtggcaaagcaaagctatattcaagaccacatgcaaagctactccctgagcaaagagtcacagataaaacgggggcaccagtagaatggccaggacaaacgcagtgcagcacagagactcagaccctggcagccatgcctgcgcaggcagtgatgagagtgacatgtactgttgtggacatgcacaaaagtgagtgtgcaccggcacagacatgaagctgcggctccctgccagtcccgagacccacctggacatgctccgccacctctaccagggctgccaggtggtgcagggaaacctggaactcacctacctgcccaccaatgccagcctgtccttcctgcaggatatccaggaggtgcagggctacgtgctcatcgctcacaaccaagtgaggcaggtcccactgcagaggctgcggattgtgcgaggcacccagctctttgaggacaactatgccctggccgtgctagacaatggagacccgctgaacaataccacccctgtcacaggggcctccccaggaggcctgcgggagctgcagcttcgaagcctcacagagatcttgaaaggaggggtcttgatccagcggaacccccagctctgctaccaggacacgattttgtggaaggacatcttccacaagaacaaccagctggctctcacactgatagacaccaaccgctctcgggcctgccacccctgttctccgatgtgtaagggctcccgctgctggggagagagttctgaggattgtcagagcctgacgcgcactgtctgtgccggtggctgtgcccgctgcaaggggccactgcccactgactgctgccatgagcagtgtgctgccggctgcacgggccccaagcactctgactgcctggcctgcctccacttcaaccacagtggcatctgtgagctgcactgcccagccctggtcacctacaacacagacacgtttgagtccatgcccaatcccgagggccggtatacattcggcgccagctgtgtgactgcctgtccctacaactacctttctacggacgtgggatcctgcaccctcgtctgccccctgcacaaccaagaggtgacagcagaggatggaacacagcggtgtgagaagtgcagcaagccctgtgcccgagtgtgctatggtctgggcatggagcacttgcgagaggtgagggcagttaccagtgccaatatccaggagtttgctggctgcaagaagatctttgggagcctggcatttctgccggagagctttgatggggacccagcctccaacactgccccgctccagccagagcagctccaagtgtttgagactctggaagagatcacaggttacctatacatctcagcatggccggacagcctgcctgacctcagcgtcttccagaacctgcaagtaatccggggacgaattctgcacaatggcgcctactcgctgaccctgcaagggctgggcatcagctggctggggctgcgctcactgagggaactgggcagtggactggccctcatccaccataacacccacctctgcttcgtgcacacggtgccctgggaccagctctttcggaacccgcaccaagctctgctccacactgccaaccggccagaggacgagtgtgtgggcgagggcctggcctgccaccagctgtgcgcccgagggcactgctggggtccagggcccacccagtgtgtcaactgcagccagttccttcggggccaggagtgcgtggaggaatgccgagtactgcaggggctccccagggagtatgtgaatgccaggcactgtttgccgtgccaccctgagtgtcagccccagaatggctcagtgacctgttttggaccggaggctgaccagtgtgtggcctgtgcccactataaggaccctcccttctgcgtggcccgctgccccagcggtgtgaaacctgacctctcctacatgcccatctggaagtttccagatgaggagggcgcatgccagccttgccccatcaactgcacccactcctgtgtggacctggatgacaagggctgccccgccgagcagagagccaggttggcctggaccccaggatgtacccttcattgcccttcactcccccactggatgctgggtggtcactgctgtagggaggggaccccctgacatatgtcccttcccacccactcttccactgtggaacctcctgtcattttccacttcaccaagtgacagaggacctgctcagatgctgaggggaggggactgcaaggaaagatggctaggaaacccagtccctccacaccctagagtaacttgatgccttgtgagggacacaggcaaagttcaattccttggaagtcaagggagactgagaagagtacagctgcagcactgagggagtgatgaattcttaactggggatggtgggaggcttcgagtgggaggtggcatttgagctaggctttgagagaggagcaggtattgcacttgcatttaggtagaaagcattggggtgcaaggtgacactggagggggaggcatcaggaaatccaggatgtcttcaaagttctggtgtcgggggctgttgagtaagcacaggaataagggggtcaagttagagtcagggtggggtctgacctggatgccataggacctgatccccaagccacagggtgggacttgactgggcagtggggacctttggaaaggactttggggagaccaacctgtagtcttgcctatagcaacatccggcccgggtggagcatgtgtacccg

SEQ ID NO: 369673 - DNA, 2526 bp, Homo sapiens
attctactctccgctgaagtccacacagtttaaattaaagttcccggatttttgtgggcgcctgccccgcccctcgtccccctgctgtgtccatatatcgaggcgatagggttaagggaaggcggacgcctgatgggttaatgagcaaactgaagtgttttccatgatcttttttgagtcgcaattgaagtaccacctcccgagggtgattgcttccccatgcggggtagaacctttgctgtcctgttcaccactctacctccagcacagaatttggcttatgcctactcaatgtgaagatgatgaggatgaaaacctttgtgatgatccacttccacttaatgaatggttcctcgtctcctcttccttggaccaaaagtcagaggcaagaatgccctcattcataccccagtggtctatacctccagcagcaagtcgagtgagcaagtgatgtcctgaaaggcccagtggatcagtggaatgaagcgggcaggaagacttagtgctcctgaaacaaggaatccagaatccaggagaaggatggctcagtggggctttcaagggacaagtatgggggttgaaggggtcactgtccctataccaaatccgaaaatattgtgaccaggaaccattctgtccaactcttctatttcaggtggcaaagcaaagctatattcaagaccacatgcaaagctactccctgagcaaagagtcacagataaaacgggggcaccagtagaatggccaggacaaacgcagtgcagcacagagactcagaccctggcagccatgcctgcgcaggcagtgatgagagtgacatgtactgttgtggacatgcacaaaagtgagtgtgcaccggcacagacatgaagctgcggctccctgccagtcccgagacccacctggacatgctccgccacctctaccagggctgccaggtggtgcagggaaacctggaactcacctacctgcccaccaatgccagcctgtccttcctgcaggatatccaggaggtgcagggctacgtgctcatcgctcacaaccaagtgaggcaggtcccactgcagaggctgcggattgtgcgaggcacccagctctttgaggacaactatgccctggccgtgctagacaatggagacccgctgaacaataccacccctgtcacaggggcctccccaggaggcctgcgggagctgcagcttcgaagcctcacagagatcttgaaaggaggggtcttgatccagcggaacccccagctctgctaccaggacacgattttgtggaaggacatcttccacaagaacaaccagctggctctcacactgatagacaccaaccgctctcgggcctgccacccctgttctccgatgtgtaagggctcccgctgctggggagagagttctgaggattgtcagagcctgacgcgcactgtctgtgccggtggctgtgcccgctgcaaggggccactgcccactgactgctgccatgagcagtgtgctgccggctgcacgggccccaagcactctgactgcctggcctgcctccacttcaaccacagtggcatctgtgagctgcactgcccagccctggtcacctacaacacagacacgtttgagtccatgcccaatcccgagggccggtatacattcggcgccagctgtgtgactgcctgtccctacaactacctttctacggacgtgggatcctgcaccctcgtctgccccctgcacaaccaagaggtgacagcagaggatggaacacagcggtgtgagaagtgcagcaagccctgtgcccgagtgtgctatggtctgggcatggagcacttgcgagaggtgagggcagttaccagtgccaatatccaggagtttgctggctgcaagaagatctttgggagcctggcatttctgccggagagctttgatggggacccagcctccaacactgccccgctccagccagagcagctccaagtgtttgagactctggaagagatcacaggttacctatacatctcagcatggccggacagcctgcctgacctcagcgtcttccagaacctgcaagtaatccggggacgaattctgcacaatggcgcctactcgctgaccctgcaagggctgggcatcagctggctggggctgcgctcactgagggaactgggcagtggactggccctcatccaccataacacccacctctgcttcgtgcacacggtgccctgggaccagctctttcggaacccgcaccaagctctgctccacactgccaaccggccagaggacgagtgtggtaagacagggagcccagtgtgcgcactccccatctgccagcacacagcagtgcccagggggccctggcagcagcgttcttggacttgtgcagactgcccgtctctgtgcacccttcttgactcagcacagctctggctggcttggcctcttggcatggcttctctagctgggtcctacctgccttggcatccttccctccccctctgtttctgaaatctcagaactcttcctctcc

SEQ ID NO: 369674 - DNA, 314 bp, Homo sapiens
tcatcagctcggcccatttatgcgtgctaagggggatgctcttaaggttatcgtgtaagcatgcaagcttgcgcattcgagcgactgtctcatgacgtctatggtactgccccccatgaggaaggaacagcaatggtgtcagtatccaggctttgtacagagtgcttttctgtttagtttttactttttttgttttgtttttttaaagatgaaataaagacccagggggagaatgggtgttgtatggggaggcaagtgtggggggtccttctccacacccactttgtccatttgcaaatatattttggaaaaca

SEQ ID NO: 369675 - DNA, 467 bp, Homo sapiens
gtatgtgcctctgctttgtgcccaatgtgctctaccccccaggatgcaaggggtgggcaccctgcctggtactgccctattgcccctggcacaccagggcaaaacagcacagtgaaagccagccacctgtccccccaggcctgcctccacttcaaccacagtggcatctgtgagctgcactgcccagccctggtcacctacaacacagacacgtttgagtccatgcccaatcccgagggccggtatacattcggcgccagctgtgtgactgcctgtccctgtgagtgccagggagaaacacagttttctcattttggtggggaggtttgtttctgtaaatgggagcatatggggagcactgtctgcatcttgctttgagagctggtcatgacagttcctgccgagctgccttgttctttcaacagctgtggagcaggtggcagtaaggagaggcagctaagagccca

SEQ ID NO: 369676 - DNA, 271 bp, Homo sapiens
gagcccagtgtgcgcactccccatctgccagcacacagcagtgcccagggggccctggcagcagcgttcttggacttgtgcagactgcccgtctctgtgcacccttcttgactcagcacagctctggctggcttggcctcttggcatggcttctctagctgggtcctacctgccttggcatccttccctccccctctgtttctgaaatctcagaactcttcctctccctacatcggccccacctgtccccacccctccagcccacagccat

SEQ ID NO: 369677 - DNA, 514 bp, Homo sapiens
  misc_feature (513)..(513): n is a, c, g, or t
caacgcatgtgccgctcccaacgatgtgccgctcccaacgcatgtgccgctcccaacgcatgtgccgctcccaacgcatgtgccgctcccaacgcatgtgccgctcccaacgcatgtgccgctcccaggacctgctgaactggtgtatgcagattgccaaggggatgagctacctggaggatgtgcggctcgtacacagggacttggccgctcggaacgtgctggtcaagagtcccaaccatgtcaaaattacagacttcgggctggctcggctgctggacattgacgagacagagtaccatgcagatgggggcaaggtgcccatcaagtggatggcgctggagtccattctccgccggcggttcacccaccagagtgatgtgtggagttatggtgtgactgtgtgggagctgatgacttttggggccaaaccttacgatgggatcccagcccgggagatccctgacctgctggaaaagggggagcggcacatgcgttgggggatcctctagng

SEQ ID NO: 369678 - DNA, 4556 bp, Homo sapiens
  misc_feature (32)..(33): n is a, c, g, or t
aaggggaggtaaccctggcccctttggtcggnnccccgggcagccgcgcgccccttcccacggggccctttactgcgccgcgcgcccggcccccacccctcgcagcaccccgcgccccgcgccctcccagccgggtccagccggagccatggggccggagccgcagtgagcaccatggagctggcggccttgtgccgctgggggctcctcctcgccctcttgccccccggagccgcgagcacccaagtgtgcaccggcacagacatgaagctgcggctccctgccagtcccgagacccacctggacatgctccgccacctctaccagggctgccaggtggtgcagggaaacctggaactcacctacctgcccaccaatgccagcctgtccttcctgcaggatatccaggaggtgcagggctacgtgctcatcgctcacaaccaagtgaggcaggtcccactgcagaggctgcggattgtgcgaggcacccagctctttgaggacaactatgccctggccgtgctagacaatggagacccgctgaacaataccacccctgtcacaggggcctccccaggaggcctgcgggagctgcagcttcgaagcctcacagagatcttgaaaggaggggtcttgatccagcggaacccccagctctgctaccaggacacgattttgtggaaggacatcttccacaagaacaaccagctggctctcacactgatagacaccaaccgctctcgggcctgccacccctgttctccgatgtgtaagggctcccgctgctggggagagagttctgaggattgtcagagcctgacgcgcactgtctgtgccggtggctgtgcccgctgcaaggggccactgcccactgactgctgccatgagcagtgtgctgccggctgcacgggccccaagcactctgactgcctggcctgcctccacttcaaccacagtggcatctgtgagctgcactgcccagccctggtcacctacaacacagacacgtttgagtccatgcccaatcccgagggccggtatacattcggcgccagctgtgtgactgcctgtccctacaactacctttctacggacgtgggatcctgcaccctcgtctgccccctgcacaaccaagaggtgacagcagaggatggaacacagcggtgtgagaagtgcagcaagccctgtgcccgagtgtgctatggtctgggcatggagcacttgcgagaggtgagggcagttaccagtgccaatatccaggagtttgctggctgcaagaagatctttgggagcctggcatttctgccggagagctttgatggggacccagcctccaacactgccccgctccagccagagcagctccaagtgtttgagactctggaagagatcacaggttacctatacatctcagcatggccggacagcctgcctgacctcagcgtcttccagaacctgcaagtaatccggggacgaattctgcacaatggcgcctactcgctgaccctgcaagggctgggcatcagctggctggggctgcgctcactgagggaactgggcagtggactggccctcatccaccataacacccacctctgcttcgtgcacacggtgccctgggaccagctctttcggaacccgcaccaagctctgctccacactgccaaccggccagaggacgagtgtgtgggcgagggcctggcctgccaccagctgtgcgcccgagggcactgctggggtccagggcccacccagtgtgtcaactgcagccagttccttcggggccaggagtgcgtggaggaatgccgagtactgcaggggctccccagggagtatgtgaatgccaggcactgtttgccgtgccaccctgagtgtcagccccagaatggctcagtgacctgttttggaccggaggctgaccagtgtgtggcctgtgcccactataaggaccctcccttctgcgtggcccgctgccccagcggtgtgaaacctgacctctcctacatgcccatctggaagtttccagatgaggagggcgcatgccagccttgccccatcaactgcacccactcctgtgtggacctggatgacaagggctgccccgccgagcagagagccagccctctgacgtccatcatctctgcggtggttggcattctgctggtcgtggtcttgggggtggtctttgggatcctcatcaagcgacggcagcagaagatccggaagtacacgatgcggagactgctgcaggaaacggagctggtggagccgctgacacctagcggagcgatgcccaaccaggcgcagatgcggatcctgaaagagacggagctgaggaaggtgaaggtgcttggatctggcgcttttggcacagtctacaagggcatctggatccctgatggggagaatgtgaaaattccagtggccatcaaagtgttgagggaaaacacatcccccaaagccaacaaagaaatcttagacgaagcatacgtgatggctggtgtgggctccccatatgtctcccgccttctgggcatctgcctgacatccacggtgcagctggtgacacagcttatgccctatggctgcctcttagaccatgtccgggaaaaccgcggacgcctgggctcccaggacctgctgaactggtgtatgcagattgccaaggggatgagctacctggaggatgtgcggctcgtacacagggacttggccgctcggaacgtgctggtcaagagtcccaaccatgtcaaaattacagacttcgggctggctcggctgctggacattgacgagacagagtaccatgcagatgggggcaaggtgcccatcaagtggatggcgctggagtccattctccgccggcggttcacccaccagagtgatgtgtggagttatggtgtgactgtgtgggagctgatgacttttggggccaaaccttacgatgggatcccagcccgggagatccctgacctgctggaaaagggggagcggctgccccagccccccatctgcaccattgatgtctacatgatcatggtcaaatgttggatgattgactctgaatgtcggccaagattccgggagttggtgtctgaattctcccgcatggccagggacccccagcgctttgtggtcatccagaatgaggacttgggcccagccagtcccttggacagcaccttctaccgctcactgctggaggacgatgacatgggggacctggtggatgctgaggagtatctggtaccccagcagggcttcttctgtccagaccctgccccgggcgctgggggcatggtccaccacaggcaccgcagctcatctaccaggagtggcggtggggacctgacactagggctggagccctctgaagaggaggcccccaggtctccactggcaccctccgaaggggctggctccgatgtatttgatggtgacctgggaatgggggcagccaaggggctgcaaagcctccccacacatgaccccagccctctacagcggtacagtgaggaccccacagtacccctgccctctgagactgatggctacgttgcccccctgacctgcagcccccagcctgaatatgtgaaccagccagatgttcggccccagcccccttcgccccgagagggccctctgcctgctgcccgacctgctggtgccactctggaaaggcccaagactctctccccagggaagaatggggtcgtcaaagacgtttttgcctttgggggtgccgtggagaaccccgagtacttgacaccccagggaggagctgcccctcagccccaccctcctcctgccttcagcccagccttcgacaacctctattactgggaccaggacccaccagagcggggggctccacccagcaccttcaaagggacacctacggcagagaacccagagtacctgggtctggacgtgccagtgtgaaccagaaggccaagtccgcagaagccctgatgtgtcctcagggagcagggaaggcctgacttctgctggcatcaagaggtgggagggccctccgaccacttccaggggaacctgccatgccaggaacctgtcctaaggaaccttccttcctgcttgagttcccagatggctggaaggggtccagcctcgttggaagaggaacagcactggggagtctttgtggattctgaggccctgcccaatgagactctagggtccagtggatgccacagcccagcttggccctttccttccagatcctgggtactgaaagccttagggaagctggcctgagaggggaagcggccctaagggagtgtctaagaacaaaagcgacccattcagagactgtccctgaaacctagtactgccccccatgaggaaggaacagcaatggtgtcagtatccaggctttgtacagagtgcttttctgtttagtttttactttttttgttttgtttttttaaagatgaaataaagacccagggggagaatgggtgttgtatggggaggcaagtgtggggggtccttctccacacccactttgtccatttgcaaatatattttggaaaaca

SEQ ID NO: 369679 - DNA, 5158 bp, Homo sapiens
attctactctccgctgaagtccacacagtttaaattaaagttcccggatttttgtgggcgcctgccccgcccctcgtccccctgctgtgtccatatatcgaggcgatagggttaagggaaggcggacgcctgatgggttaatgagcaaactgaagtgttttccatgatcttttttgagtcgcaattgaagtaccacctcccgagggtgattgcttccccatgcggggtagaacctttgctgtcctgttcaccactctacctccagcacagaatttggcttatgcctactcaatgtgaagatgatgaggatgaaaacctttgtgatgatccacttccacttaatgaatggttcctcgtctcctcttccttggaccaaaagtcagaggcaagaatgccctcattcataccccagtggtctatacctccagcagcaagtcgagtgagcaagtgatgtcctgaaaggcccagtggatcagtggaatgaagcgggcaggaagacttagtgctcctgaaacaaggaatccagaatccaggagaaggatggctcagtggggctttcaagggacaagtatgggggttgaaggggtcactgtccctataccaaatccgaaaatattgtgaccaggaaccattctgtccaactcttctatttcaggtggcaaagcaaagctatattcaagaccacatgcaaagctactccctgagcaaagagtcacagataaaacgggggcaccagtagaatggccaggacaaacgcagtgcagcacagagactcagaccctggcagccatgcctgcgcaggcagtgatgagagtgacatgtactgttgtggacatgcacaaaagtgagtgtgcaccggcacagacatgaagctgcggctccctgccagtcccgagacccacctggacatgctccgccacctctaccagggctgccaggtggtgcagggaaacctggaactcacctacctgcccaccaatgccagcctgtccttcctgcaggatatccaggaggtgcagggctacgtgctcatcgctcacaaccaagtgaggcaggtcccactgcagaggctgcggattgtgcgaggcacccagctctttgaggacaactatgccctggccgtgctagacaatggagacccgctgaacaataccacccctgtcacaggggcctccccaggaggcctgcgggagctgcagcttcgaagcctcacagagatcttgaaaggaggggtcttgatccagcggaacccccagctctgctaccaggacacgattttgtggaaggacatcttccacaagaacaaccagctggctctcacactgatagacaccaaccgctctcgggcctgccacccctgttctccgatgtgtaagggctcccgctgctggggagagagttctgaggattgtcagagcctgacgcgcactgtctgtgccggtggctgtgcccgctgcaaggggccactgcccactgactgctgccatgagcagtgtgctgccggctgcacgggccccaagcactctgactgcctggcctgcctccacttcaaccacagtggcatctgtgagctgcactgcccagccctggtcacctacaacacagacacgtttgagtccatgcccaatcccgagggccggtatacattcggcgccagctgtgtgactgcctgtccctacaactacctttctacggacgtgggatcctgcaccctcgtctgccccctgcacaaccaagaggtgacagcagaggatggaacacagcggtgtgagaagtgcagcaagccctgtgcccgagtgtgctatggtctgggcatggagcacttgcgagaggtgagggcagttaccagtgccaatatccaggagtttgctggctgcaagaagatctttgggagcctggcatttctgccggagagctttgatggggacccagcctccaacactgccccgctccagccagagcagctccaagtgtttgagactctggaagagatcacaggttacctatacatctcagcatggccggacagcctgcctgacctcagcgtcttccagaacctgcaagtaatccggggacgaattctgcacaatggcgcctactcgctgaccctgcaagggctgggcatcagctggctggggctgcgctcactgagggaactgggcagtggactggccctcatccaccataacacccacctctgcttcgtgcacacggtgccctgggaccagctctttcggaacccgcaccaagctctgctccacactgccaaccggccagaggacgagtgtgtgggcgagggcctggcctgccaccagctgtgcgcccgagggcactgctggggtccagggcccacccagtgtgtcaactgcagccagttccttcggggccaggagtgcgtggaggaatgccgagtactgcaggggctccccagggagtatgtgaatgccaggcactgtttgccgtgccaccctgagtgtcagccccagaatggctcagtgacctgttttggaccggaggctgaccagtgtgtggcctgtgcccactataaggaccctcccttctgcgtggcccgctgccccagcggtgtgaaacctgacctctcctacatgcccatctggaagtttccagatgaggagggcgcatgccagccttgccccatcaactgcacccactcctgtgtggacctggatgacaagggctgccccgccgagcagagagccagccctctgacgtccatcatctctgcggtggttggcattctgctggtcgtggtcttgggggtggtctttgggatcctcatcaagcgacggcagcagaagatccggaagtacacgatgcggagactgctgcaggaaacggagctggtggagccgctgacacctagcggagcgatgcccaaccaggcgcagatgcggatcctgaaagagacggagctgaggaaggtgaaggtgcttggatctggcgcttttggcacagtctacaagggcatctggatccctgatggggagaatgtgaaaattccagtggccatcaaagtgttgagggaaaacacatcccccaaagccaacaaagaaatcttagacgaagcatacgtgatggctggtgtgggctccccatatgtctcccgccttctgggcatctgcctgacatccacggtgcagctggtgacacagcttatgccctatggctgcctcttagaccatgtccgggaaaaccgcggacgcctgggctcccaggacctgctgaactggtgtatgcagattgccaaggggatgagctacctggaggatgtgcggctcgtacacagggacttggccgctcggaacgtgctggtcaagagtcccaaccatgtcaaaattacagacttcgggctggctcggctgctggacattgacgagacagagtaccatgcagatgggggcaaggtgcccatcaagtggatggcgctggagtccattctccgccggcggttcacccaccagagtgatgtgtggagttatggtgtgactgtgtgggagctgatgacttttggggccaaaccttacgatgggatcccagcccgggagatccctgacctgctggaaaagggggagcggctgccccagccccccatctgcaccattgatgtctacatgatcatggtcaaatgttggatgattgactctgaatgtcggccaagattccgggagttggtgtctgaattctcccgcatggccagggacccccagcgctttgtggtcatccagaatgaggacttgggcccagccagtcccttggacagcaccttctaccgctcactgctggaggacgatgacatgggggacctggtggatgctgaggagtatctggtaccccagcagggcttcttctgtccagaccctgccccgggcgctgggggcatggtccaccacaggcaccgcagctcatctaccaggagtggcggtggggacctgacactagggctggagccctctgaagaggaggcccccaggtctccactggcaccctccgaaggggctggctccgatgtatttgatggtgacctgggaatgggggcagccaaggggctgcaaagcctccccacacatgaccccagccctctacagcggtacagtgaggaccccacagtacccctgccctctgagactgatggctacgttgcccccctgacctgcagcccccagcctgaatatgtgaaccagccagatgttcggccccagcccccttcgccccgagagggccctctgcctgctgcccgacctgctggtgccactctggaaaggcccaagactctctccccagggaagaatggggtcgtcaaagacgtttttgcctttgggggtgccgtggagaaccccgagtacttgacaccccagggaggagctgcccctcagccccaccctcctcctgccttcagcccagccttcgacaacctctattactgggaccaggacccaccagagcggggggctccacccagcaccttcaaagggacacctacggcagagaacccagagtacctgggtctggacgtgccagtgtgaaccagaaggccaagtccgcagaagccctgatgtgtcctcagggagcagggaaggcctgacttctgctggcatcaagaggtgggagggccctccgaccacttccaggggaacctgccatgccaggaacctgtcctaaggaaccttccttcctgcttgagttcccagatggctggaaggggtccagcctcgttggaagaggaacagcactggggagtctttgtggattctgaggccctgcccaatgagactctagggtccagtggatgccacagcccagcttggccctttccttccagatcctgggtactgaaagccttagggaagctggcctgagaggggaagcggccctaagggagtgtctaagaacaaaagcgacccattcagagactgtccctgaaacctagtactgccccccatgaggaaggaacagcaatggtgtcagtatccaggctttgtacagagtgcttttctgtttagtttttactttttttgttttgtttttttaaagatgaaataaagacccagggggagaatgggtgttgtatggggaggcaagtgtggggggtccttctccacacccactttgtccatttgcaaatatattttggaaaaca

SEQ ID NO: 369680 - DNA, 4851 bp, Homo sapiens
attctactctccgctgaagtccacacagtttaaattaaagttcccggatttttgtgggcgcctgccccgcccctcgtccccctgctgtgtccatatatcgaggcgatagggttaagggaaggcggacgcctgatgggttaatgagcaaactgaagtgttttccatgatcttttttgagtcgcaattgaagtaccacctcccgagggtgattgcttccccatgcggggtagaacctttgctgtcctgttcaccactctacctccagcacagaatttggcttatgcctactcaatgtgaagatgatgaggatgaaaacctttgtgatgatccacttccacttaatgaatggtggcaaagcaaagctatattcaagaccacatgcaaagctactccctgagcaaagagtcacagataaaacgggggcaccagtagaatggccaggacaaacgcagtgcagcacagagactcagaccctggcagccatgcctgcgcaggcagtgatgagagtgacatgtactgttgtggacatgcacaaaagtgagtgtgcaccggcacagacatgaagctgcggctccctgccagtcccgagacccacctggacatgctccgccacctctaccagggctgccaggtggtgcagggaaacctggaactcacctacctgcccaccaatgccagcctgtccttcctgcaggatatccaggaggtgcagggctacgtgctcatcgctcacaaccaagtgaggcaggtcccactgcagaggctgcggattgtgcgaggcacccagctctttgaggacaactatgccctggccgtgctagacaatggagacccgctgaacaataccacccctgtcacaggggcctccccaggaggcctgcgggagctgcagcttcgaagcctcacagagatcttgaaaggaggggtcttgatccagcggaacccccagctctgctaccaggacacgattttgtggaaggacatcttccacaagaacaaccagctggctctcacactgatagacaccaaccgctctcgggcctgccacccctgttctccgatgtgtaagggctcccgctgctggggagagagttctgaggattgtcagagcctgacgcgcactgtctgtgccggtggctgtgcccgctgcaaggggccactgcccactgactgctgccatgagcagtgtgctgccggctgcacgggccccaagcactctgactgcctggcctgcctccacttcaaccacagtggcatctgtgagctgcactgcccagccctggtcacctacaacacagacacgtttgagtccatgcccaatcccgagggccggtatacattcggcgccagctgtgtgactgcctgtccctacaactacctttctacggacgtgggatcctgcaccctcgtctgccccctgcacaaccaagaggtgacagcagaggatggaacacagcggtgtgagaagtgcagcaagccctgtgcccgagtgtgctatggtctgggcatggagcacttgcgagaggtgagggcagttaccagtgccaatatccaggagtttgctggctgcaagaagatctttgggagcctggcatttctgccggagagctttgatggggacccagcctccaacactgccccgctccagccagagcagctccaagtgtttgagactctggaagagatcacaggttacctatacatctcagcatggccggacagcctgcctgacctcagcgtcttccagaacctgcaagtaatccggggacgaattctgcacaatggcgcctactcgctgaccctgcaagggctgggcatcagctggctggggctgcgctcactgagggaactgggcagtggactggccctcatccaccataacacccacctctgcttcgtgcacacggtgccctgggaccagctctttcggaacccgcaccaagctctgctccacactgccaaccggccagaggacgagtgtgtgggcgagggcctggcctgccaccagctgtgcgcccgagggcactgctggggtccagggcccacccagtgtgtcaactgcagccagttccttcggggccaggagtgcgtggaggaatgccgagtactgcaggggctccccagggagtatgtgaatgccaggcactgtttgccgtgccaccctgagtgtcagccccagaatggctcagtgacctgttttggaccggaggctgaccagtgtgtggcctgtgcccactataaggaccctcccttctgcgtggcccgctgccccagcggtgtgaaacctgacctctcctacatgcccatctggaagtttccagatgaggagggcgcatgccagccttgccccatcaactgcacccactcctgtgtggacctggatgacaagggctgccccgccgagcagagagccagccctctgacgtccatcatctctgcggtggttggcattctgctggtcgtggtcttgggggtggtctttgggatcctcatcaagcgacggcagcagaagatccggaagtacacgatgcggagactgctgcaggaaacggagctggtggagccgctgacacctagcggagcgatgcccaaccaggcgcagatgcggatcctgaaagagacggagctgaggaaggtgaaggtgcttggatctggcgcttttggcacagtctacaagggcatctggatccctgatggggagaatgtgaaaattccagtggccatcaaagtgttgagggaaaacacatcccccaaagccaacaaagaaatcttagacgaagcatacgtgatggctggtgtgggctccccatatgtctcccgccttctgggcatctgcctgacatccacggtgcagctggtgacacagcttatgccctatggctgcctcttagaccatgtccgggaaaaccgcggacgcctgggctcccaggacctgctgaactggtgtatgcagattgccaaggggatgagctacctggaggatgtgcggctcgtacacagggacttggccgctcggaacgtgctggtcaagagtcccaaccatgtcaaaattacagacttcgggctggctcggctgctggacattgacgagacagagtaccatgcagatgggggcaaggtgcccatcaagtggatggcgctggagtccattctccgccggcggttcacccaccagagtgatgtgtggagttatggtgtgactgtgtgggagctgatgacttttggggccaaaccttacgatgggatcccagcccgggagatccctgacctgctggaaaagggggagcggctgccccagccccccatctgcaccattgatgtctacatgatcatggtcaaatgttggatgattgactctgaatgtcggccaagattccgggagttggtgtctgaattctcccgcatggccagggacccccagcgctttgtggtcatccagaatgaggacttgggcccagccagtcccttggacagcaccttctaccgctcactgctggaggacgatgacatgggggacctggtggatgctgaggagtatctggtaccccagcagggcttcttctgtccagaccctgccccgggcgctgggggcatggtccaccacaggcaccgcagctcatctaccaggagtggcggtggggacctgacactagggctggagccctctgaagaggaggcccccaggtctccactggcaccctccgaaggggctggctccgatgtatttgatggtgacctgggaatgggggcagccaaggggctgcaaagcctccccacacatgaccccagccctctacagcggtacagtgaggaccccacagtacccctgccctctgagactgatggctacgttgcccccctgacctgcagcccccagcctgaatatgtgaaccagccagatgttcggccccagcccccttcgccccgagagggccctctgcctgctgcccgacctgctggtgccactctggaaaggcccaagactctctccccagggaagaatggggtcgtcaaagacgtttttgcctttgggggtgccgtggagaaccccgagtacttgacaccccagggaggagctgcccctcagccccaccctcctcctgccttcagcccagccttcgacaacctctattactgggaccaggacccaccagagcggggggctccacccagcaccttcaaagggacacctacggcagagaacccagagtacctgggtctggacgtgccagtgtgaaccagaaggccaagtccgcagaagccctgatgtgtcctcagggagcagggaaggcctgacttctgctggcatcaagaggtgggagggccctccgaccacttccaggggaacctgccatgccaggaacctgtcctaaggaaccttccttcctgcttgagttcccagatggctggaaggggtccagcctcgttggaagaggaacagcactggggagtctttgtggattctgaggccctgcccaatgagactctagggtccagtggatgccacagcccagcttggccctttccttccagatcctgggtactgaaagccttagggaagctggcctgagaggggaagcggccctaagggagtgtctaagaacaaaagcgacccattcagagactgtccctgaaacctagtactgccccccatgaggaaggaacagcaatggtgtcagtatccaggctttgtacagagtgcttttctgtttagtttttactttttttgttttgtttttttaaagatgaaataaagacccagggggagaatgggtgttgtatggggaggcaagtgtggggggtccttctccacacccactttgtccatttgcaaatatattttggaaaaca

SEQ ID NO: 369681 - DNA, 4400 bp, Homo sapiens
  misc_feature (6)..(6): n is a, c, g, or t
  misc_feature (22)..(22): n is a, c, g, or t
  misc_feature (38)..(38): n is a, c, g, or t
aaaaantcaaatgtcttgttgnggacatgcaaaaaatnaaatacttcaaagattccagaagatatgccccgggggtcctggaagccacaagtgtgcaccggcacagacatgaagctgcggctccctgccagtcccgagacccacctggacatgctccgccacctctaccagggctgccaggtggtgcagggaaacctggaactcacctacctgcccaccaatgccagcctgtccttcctgcaggatatccaggaggtgcagggctacgtgctcatcgctcacaaccaagtgaggcaggtcccactgcagaggctgcggattgtgcgaggcacccagctctttgaggacaactatgccctggccgtgctagacaatggagacccgctgaacaataccacccctgtcacaggggcctccccaggaggcctgcgggagctgcagcttcgaagcctcacagagatcttgaaaggaggggtcttgatccagcggaacccccagctctgctaccaggacacgattttgtggaaggacatcttccacaagaacaaccagctggctctcacactgatagacaccaaccgctctcgggcctgccacccctgttctccgatgtgtaagggctcccgctgctggggagagagttctgaggattgtcagagcctgacgcgcactgtctgtgccggtggctgtgcccgctgcaaggggccactgcccactgactgctgccatgagcagtgtgctgccggctgcacgggccccaagcactctgactgcctggcctgcctccacttcaaccacagtggcatctgtgagctgcactgcccagccctggtcacctacaacacagacacgtttgagtccatgcccaatcccgagggccggtatacattcggcgccagctgtgtgactgcctgtccctacaactacctttctacggacgtgggatcctgcaccctcgtctgccccctgcacaaccaagaggtgacagcagaggatggaacacagcggtgtgagaagtgcagcaagccctgtgcccgagtgtgctatggtctgggcatggagcacttgcgagaggtgagggcagttaccagtgccaatatccaggagtttgctggctgcaagaagatctttgggagcctggcatttctgccggagagctttgatggggacccagcctccaacactgccccgctccagccagagcagctccaagtgtttgagactctggaagagatcacaggttacctatacatctcagcatggccggacagcctgcctgacctcagcgtcttccagaacctgcaagtaatccggggacgaattctgcacaatggcgcctactcgctgaccctgcaagggctgggcatcagctggctggggctgcgctcactgagggaactgggcagtggactggccctcatccaccataacacccacctctgcttcgtgcacacggtgccctgggaccagctctttcggaacccgcaccaagctctgctccacactgccaaccggccagaggacgagtgtgtgggcgagggcctggcctgccaccagctgtgcgcccgagggcactgctggggtccagggcccacccagtgtgtcaactgcagccagttccttcggggccaggagtgcgtggaggaatgccgagtactgcaggggctccccagggagtatgtgaatgccaggcactgtttgccgtgccaccctgagtgtcagccccagaatggctcagtgacctgttttggaccggaggctgaccagtgtgtggcctgtgcccactataaggaccctcccttctgcgtggcccgctgccccagcggtgtgaaacctgacctctcctacatgcccatctggaagtttccagatgaggagggcgcatgccagccttgccccatcaactgcacccactcctgtgtggacctggatgacaagggctgccccgccgagcagagagccagccctctgacgtccatcatctctgcggtggttggcattctgctggtcgtggtcttgggggtggtctttgggatcctcatcaagcgacggcagcagaagatccggaagtacacgatgcggagactgctgcaggaaacggagctggtggagccgctgacacctagcggagcgatgcccaaccaggcgcagatgcggatcctgaaagagacggagctgaggaaggtgaaggtgcttggatctggcgcttttggcacagtctacaagggcatctggatccctgatggggagaatgtgaaaattccagtggccatcaaagtgttgagggaaaacacatcccccaaagccaacaaagaaatcttagacgaagcatacgtgatggctggtgtgggctccccatatgtctcccgccttctgggcatctgcctgacatccacggtgcagctggtgacacagcttatgccctatggctgcctcttagaccatgtccgggaaaaccgcggacgcctgggctcccaggacctgctgaactggtgtatgcagattgccaaggggatgagctacctggaggatgtgcggctcgtacacagggacttggccgctcggaacgtgctggtcaagagtcccaaccatgtcaaaattacagacttcgggctggctcggctgctggacattgacgagacagagtaccatgcagatgggggcaaggtgcccatcaagtggatggcgctggagtccattctccgccggcggttcacccaccagagtgatgtgtggagttatggtgtgactgtgtgggagctgatgacttttggggccaaaccttacgatgggatcccagcccgggagatccctgacctgctggaaaagggggagcggctgccccagccccccatctgcaccattgatgtctacatgatcatggtcaaatgttggatgattgactctgaatgtcggccaagattccgggagttggtgtctgaattctcccgcatggccagggacccccagcgctttgtggtcatccagaatgaggacttgggcccagccagtcccttggacagcaccttctaccgctcactgctggaggacgatgacatgggggacctggtggatgctgaggagtatctggtaccccagcagggcttcttctgtccagaccctgccccgggcgctgggggcatggtccaccacaggcaccgcagctcatctaccaggagtggcggtggggacctgacactagggctggagccctctgaagaggaggcccccaggtctccactggcaccctccgaaggggctggctccgatgtatttgatggtgacctgggaatgggggcagccaaggggctgcaaagcctccccacacatgaccccagccctctacagcggtacagtgaggaccccacagtacccctgccctctgagactgatggctacgttgcccccctgacctgcagcccccagcctgaatatgtgaaccagccagatgttcggccccagcccccttcgccccgagagggccctctgcctgctgcccgacctgctggtgccactctggaaaggcccaagactctctccccagggaagaatggggtcgtcaaagacgtttttgcctttgggggtgccgtggagaaccccgagtacttgacaccccagggaggagctgcccctcagccccaccctcctcctgccttcagcccagccttcgacaacctctattactgggaccaggacccaccagagcggggggctccacccagcaccttcaaagggacacctacggcagagaacccagagtacctgggtctggacgtgccagtgtgaaccagaaggccaagtccgcagaagccctgatgtgtcctcagggagcagggaaggcctgacttctgctggcatcaagaggtgggagggccctccgaccacttccaggggaacctgccatgccaggaacctgtcctaaggaaccttccttcctgcttgagttcccagatggctggaaggggtccagcctcgttggaagaggaacagcactggggagtctttgtggattctgaggccctgcccaatgagactctagggtccagtggatgccacagcccagcttggccctttccttccagatcctgggtactgaaagccttagggaagctggcctgagaggggaagcggccctaagggagtgtctaagaacaaaagcgacccattcagagactgtccctgaaacctagtactgccccccatgaggaaggaacagcaatggtgtcagtatccaggctttgtacagagtgcttttctgtttagtttttactttttttgttttgtttttttaaagatgaaataaagacccagggggagaatgggtgttgtatggggaggcaagtgtggggggtccttctccacacccactttgtccatttgcaaatatattttggaaaaca

SEQ ID NO: 369682 - DNA, 5280 bp, Homo sapiens
attctactctccgctgaagtccacacagtttaaattaaagttcccggatttttgtgggcgcctgccccgcccctcgtccccctgctgtgtccatatatcgaggcgatagggttaagggaaggcggacgcctgatgggttaatgagcaaactgaagtgttttccatgatcttttttgagtcgcaattgaagtaccacctcccgagggtgattgcttccccatgcggggtagaacctttgctgtcctgttcaccactctacctccagcacagaatttggcttatgcctactcaatgtgaagatgatgaggatgaaaacctttgtgatgatccacttccacttaatgaatggttcctcgtctcctcttccttggaccaaaagtcagaggcaagaatgccctcattcataccccagtggtctatacctccagcagcaagtcgagtgagcaagtgatgtcctgaaaggcccagtggatcagtggaatgaagcgggcaggaagacttagtgctcctgaaacaaggaatccagaatccaggagaaggatggctcagtggggctttcaagggacaagtatgggggttgaaggggtcactgtccctataccaaatccgaaaatattgtgaccaggaaccattctgtccaactcttctatttcaggtggcaaagcaaagctatattcaagaccacatgcaaagctactccctgagcaaagagtcacagataaaacgggggcaccagtagaatggccaggacaaacgcagtgcagcacagagactcagaccctggcagccatgcctgcgcaggcagtgatgagagtgacatgtactgttgtggacatgcacaaaagtgagtgtgcaccggcacagacatgaagctgcggctccctgccagtcccgagacccacctggacatgctccgccacctctaccagggctgccaggtggtgcagggaaacctggaactcacctacctgcccaccaatgccagcctgtccttcctgcaggatatccaggaggtgcagggctacgtgctcatcgctcacaaccaagtgaggcaggtcccactgcagaggctgcggattgtgcgaggcacccagctctttgaggacaactatgccctggccgtgctagacaatggagacccgctgaacaataccacccctgtcacaggggcctccccaggaggcctgcgggagctgcagcttcgaagcctcacagagatcttgaaaggaggggtcttgatccagcggaacccccagctctgctaccaggacacgattttgtggaaggacatcttccacaagaacaaccagctggctctcacactgatagacaccaaccgctctcgggcctgccacccctgttctccgatgtgtaagggctcccgctgctggggagagagttctgaggattgtcagagcctgacgcgcactgtctgtgccggtggctgtgcccgctgcaaggggccactgcccactgactgctgccatgagcagtgtgctgccggctgcacgggccccaagcactctgactgcctggcctgcctccacttcaaccacagtggcatctgtgagctgcactgcccagccctggtcacctacaacacagacacgtttgagtccatgcccaatcccgagggccggtatacattcggcgccagctgtgtgactgcctgtccctacaactacctttctacggacgtgggatcctgcaccctcgtctgccccctgcacaaccaagaggtgacagcagaggatggaacacagcggtgtgagaagtgcagcaagccctgtgcccgagtgtgctatggtctgggcatggagcacttgcgagaggtgagggcagttaccagtgccaatatccaggagtttgctggctgcaagaagatctttgggagcctggcatttctgccggagagctttgatggggacccagcctccaacactgccccgctccagccagagcagctccaagtgtttgagactctggaagagatcacaggttacctatacatctcagcatggccggacagcctgcctgacctcagcgtcttccagaacctgcaagtaatccggggacgaattctgcacaatggcgcctactcgctgaccctgcaagggctgggcatcagctggctggggctgcgctcactgagggaactgggcagtggactggccctcatccaccataacacccacctctgcttcgtgcacacggtgccctgggaccagctctttcggaacccgcaccaagctctgctccacactgccaaccggccagaggacgagtgtgtgggcgagggcctggcctgccaccagctgtgcgcccgagggcactgctggggtccagggcccacccagtgtgtcaactgcagccagttccttcggggccaggagtgcgtggaggaatgccgagtactgcaggggctccccagggagtatgtgaatgccaggcactgtttgccgtgccaccctgagtgtcagccccagaatggctcagtgacctgttttggaccggaggctgaccagtgtgtggcctgtgcccactataaggaccctcccttctgcgtggcccgctgccccagcggtgtgaaacctgacctctcctacatgcccatctggaagtttccagatgaggagggcgcatgccagccttgccccatcaactgcacccactcctgtgtggacctggatgacaagggctgccccgccgagcagagagccagccctctgacgtccatcatctctgcggtggttggcattctgctggtcgtggtcttgggggtggtctttgggatcctcatcaagcgacggcagcagaagatccggaagtacacgatgcggagactgctgcaggaaacggagctggtggagccgctgacacctagcggagcgatgcccaaccaggcgcagatgcggatcctgaaagagacggagctgaggaaggtgaaggtgcttggatctggcgcttttggcacagtctacaagggcatctggatccctgatggggagaatgtgaaaattccagtggccatcaaagtgttgagggaaaacacatcccccaaagccaacaaagaaatcttagacgaagcatacgtgatggctggtgtgggctccccatatgtctcccgccttctgggcatctgcctgacatccacggtgcagctggtgacacagcttatgccctatggctgcctcttagaccatgtccgggaaaaccgcggacgcctgggctcccaggacctgctgaactggtgtatgcagattgccaaggggatgagctacctggaggatgtgcggctcgtacacagggacttggccgctcggaacgtgctggtcaagagtcccaaccatgtcaaaattacagacttcgggctggctcggctgctggacattgacgagacagagtaccatgcagatgggggcaaggttaggtgaaggaccaaggagcagaggaggctgggtggagtggtgtctagcccatgggagaactctgagtggccacctccccacaacacacagttggaggacttcctcttctgccctcccaggtgcccatcaagtggatggcgctggagtccattctccgccggcggttcacccaccagagtgatgtgtggagttatggtgtgactgtgtgggagctgatgacttttggggccaaaccttacgatgggatcccagcccgggagatccctgacctgctggaaaagggggagcggctgccccagccccccatctgcaccattgatgtctacatgatcatggtcaaatgttggatgattgactctgaatgtcggccaagattccgggagttggtgtctgaattctcccgcatggccagggacccccagcgctttgtggtcatccagaatgaggacttgggcccagccagtcccttggacagcaccttctaccgctcactgctggaggacgatgacatgggggacctggtggatgctgaggagtatctggtaccccagcagggcttcttctgtccagaccctgccccgggcgctgggggcatggtccaccacaggcaccgcagctcatctaccaggagtggcggtggggacctgacactagggctggagccctctgaagaggaggcccccaggtctccactggcaccctccgaaggggctggctccgatgtatttgatggtgacctgggaatgggggcagccaaggggctgcaaagcctccccacacatgaccccagccctctacagcggtacagtgaggaccccacagtacccctgccctctgagactgatggctacgttgcccccctgacctgcagcccccagcctgaatatgtgaaccagccagatgttcggccccagcccccttcgccccgagagggccctctgcctgctgcccgacctgctggtgccactctggaaaggcccaagactctctccccagggaagaatggggtcgtcaaagacgtttttgcctttgggggtgccgtggagaaccccgagtacttgacaccccagggaggagctgcccctcagccccaccctcctcctgccttcagcccagccttcgacaacctctattactgggaccaggacccaccagagcggggggctccacccagcaccttcaaagggacacctacggcagagaacccagagtacctgggtctggacgtgccagtgtgaaccagaaggccaagtccgcagaagccctgatgtgtcctcagggagcagggaaggcctgacttctgctggcatcaagaggtgggagggccctccgaccacttccaggggaacctgccatgccaggaacctgtcctaaggaaccttccttcctgcttgagttcccagatggctggaaggggtccagcctcgttggaagaggaacagcactggggagtctttgtggattctgaggccctgcccaatgagactctagggtccagtggatgccacagcccagcttggccctttccttccagatcctgggtactgaaagccttagggaagctggcctgagaggggaagcggccctaagggagtgtctaagaacaaaagcgacccattcagagactgtccctgaaacctagtactgccccccatgaggaaggaacagcaatggtgtcagtatccaggctttgtacagagtgcttttctgtttagtttttactttttttgttttgtttttttaaagatgaaataaagacccagggggagaatgggtgttgtatggggaggcaagtgtggggggtccttctccacacccactttgtccatttgcaaatatattttggaaaaca

SEQ ID NO: 369683 - DNA, 3175 bp, Homo sapiens
agcggccgctcgcgatctagaactagtctggggacccagcctccaacctgcctgacctcagcgtcttccagaacctgcaagtaatccggggacgaattctgcacaatggcgcctactcgctgaccctgcaagggctgggcatcagctggctggggctgcgctcactgagggaactgggcagtggactggccctcatccaccataacacccacctctgcttcgtgcacacggtgccctgggaccagctctttcggaacccgcaccaagctctgctccacactgccaaccggccagaggacgagtgtgtgggcgagggcctggcctgccaccagctgtgcgcccgagggcactgctggggtccagggcccacccagtgtgtcaactgcagccagttccttcggggccaggagtgcgtggaggaatgccgagtactgcaggggctccccagggagtatgtgaatgccaggcactgtttgccgtgccaccctgagtgtcagccccagaatggctcagtgacctgttttggaccggaggctgaccagtgtgtggcctgtgcccactataaggaccctcccttctgcgtggcccgctgccccagcggtgtgaaacctgacctctcctacatgcccatctggaagtttccagatgaggagggcgcatgccagccttgccccatcaactgcacccactcctgtgtggacctggatgacaagggctgccccgccgagcagagagccagccctctgacgtccatcatctctgcggtggttggcattctgctggtcgtggtcttgggggtggtctttgggatcctcatcaagcgacggcagcagaagatccggaagtacacgatgcggagactgctgcaggaaacggagctggtggagccgctgacacctagcggagcgatgcccaaccaggcgcagatgcggatcctgaaagagacggagctgaggaaggtgaaggtgcttggatctggcgcttttggcacagtctacaagggcatctggatccctgatggggagaatgtgaaaattccagtggccatcaaagtgttgagggaaaacacatcccccaaagccaacaaagaaatcttagacgaagcatacgtgatggctggtgtgggctccccatatgtctcccgccttctgggcatctgcctgacatccacggtgcagctggtgacacagcttatgccctatggctgcctcttagaccatgtccgggaaaaccgcggacgcctgggctcccaggacctgctgaactggtgtatgcagattgccaaggggatgagctacctggaggatgtgcggctcgtacacagggacttggccgctcggaacgtgctggtcaagagtcccaaccatgtcaaaattacagacttcgggctggctcggctgctggacattgacgagacagagtaccatgcagatgggggcaaggtgcccatcaagtggatggcgctggagtccattctccgccggcggttcacccaccagagtgatgtgtggagttatggtgtgactgtgtgggagctgatgacttttggggccaaaccttacgatgggatcccagcccgggagatccctgacctgctggaaaagggggagcggctgccccagccccccatctgcaccattgatgtctacatgatcatggtcaaatgttggatgattgactctgaatgtcggccaagattccgggagttggtgtctgaattctcccgcatggccagggacccccagcgctttgtggtcatccagaatgaggacttgggcccagccagtcccttggacagcaccttctaccgctcactgctggaggacgatgacatgggggacctggtggatgctgaggagtatctggtaccccagcagggcttcttctgtccagaccctgccccgggcgctgggggcatggtccaccacaggcaccgcagctcatctaccaggagtggcggtggggacctgacactagggctggagccctctgaagaggaggcccccaggtctccactggcaccctccgaaggggctggctccgatgtatttgatggtgacctgggaatgggggcagccaaggggctgcaaagcctccccacacatgaccccagccctctacagcggtacagtgaggaccccacagtacccctgccctctgagactgatggctacgttgcccccctgacctgcagcccccagcctgaatatgtgaaccagccagatgttcggccccagcccccttcgccccgagagggccctctgcctgctgcccgacctgctggtgccactctggaaaggcccaagactctctccccagggaagaatggggtcgtcaaagacgtttttgcctttgggggtgccgtggagaaccccgagtacttgacaccccagggaggagctgcccctcagccccaccctcctcctgccttcagcccagccttcgacaacctctattactgggaccaggacccaccagagcggggggctccacccagcaccttcaaagggacacctacggcagagaacccagagtacctgggtctggacgtgccagtgtgaaccagaaggccaagtccgcagaagccctgatgtgtcctcagggagcagggaaggcctgacttctgctggcatcaagaggtgggagggccctccgaccacttccaggggaacctgccatgccaggaacctgtcctaaggaaccttccttcctgcttgagttcccagatggctggaaggggtccagcctcgttggaagaggaacagcactggggagtctttgtggattctgaggccctgcccaatgagactctagggtccagtggatgccacagcccagcttggccctttccttccagatcctgggtactgaaagccttagggaagctggcctgagaggggaagcggccctaagggagtgtctaagaacaaaagcgacccattcagagactgtccctgaaacctagtactgccccccatgaggaaggaacagcaatggtgtcagtatccaggctttgtacagagtgcttttctgtttagtttttactttttttgttttgtttttttaaagatgaaataaagacccagggggagaatgggtgttgtatggggaggcaagtgtggggggtccttctccacacccactttgtccatttgcaaatatattttggaaaaca

SEQ ID NO: 369684 - DNA, 4718 bp, Homo sapiens
attctactctccgctgaagtccacacagtttaaattaaagttcccggatttttgtgggcgcctgccccgcccctcgtccccctgctgtgtccatatatcgaggcgatagggttaagggaaggcggacgcctgatgggttaatgagcaaactgaagtgttttccatgatcttttttgagtcgcaattgaagtaccacctcccgagggtgattgcttccccatgcggggtagaacctttgctgtcctgttcaccactctacctccagcacagaatttggcttatgcctactcaatgtgaagatgatgaggatgaaaacctttgtgatgatccacttccacttaatgaatggttcctcgtctcctcttccttggaccaaaagtcagaggcaagaatgccctcattcataccccagtggtctatacctccagcagcaagtcgagtgagcaagtgatgtcctgaaaggcccagtggatcagtggaatgaagcgggcaggaagacttagtgctcctgaaacaaggaatccagaatccaggagaaggatggctcagtggggctttcaagggacaagtatgggggttgaaggggtcactgtccctataccaaatccgaaaatattgtgaccaggaaccattctgtccaactcttctatttcaggtggcaaagcaaagctatattcaagaccacatgcaaagctactccctgagcaaagagtcacagataaaacgggggcaccagtagaatggccaggacaaacgcagtgcagcacagagactcagaccctggcagccatgcctgcgcaggcagtgatgagagtgacatgtactgttgtggacatgcacaaaagtgagtgtgcaccggcacagacatgaagctgcggctccctgccagtcccgagacccacctggacatgctccgccacctctaccagggctgccaggtggtgcagggaaacctggaactcacctacctgcccaccaatgccagcctgtccttcctgcaggatatccaggaggtgcagggctacgtgctcatcgctcacaaccaagtgaggcaggtcccactgcagaggctgcggattgtgcgaggcacccagctctttgaggacaactatgccctggccgtgctagacaatggagacccgctgaacaataccacccctgtcacaggggcctccccaggaggcctgcgggagctgcagcttcgaagcctcacagagatcttgaaaggaggggtcttgatccagcggaacccccagctctgctaccaggacacgattttgtggaaggacatcttccacaagaacaaccagctggctctcacactgatagacaccaaccgctctcgggcctgccacccctgttctccgatgtgtaagggctcccgctgctggggagagagttctgaggattgtcagagcctgacgcgcactgtctgtgccggtggctgtgcccgctgcaaggggccactgcccactgactgctgccatgagcagtgtgctgccggctgcacgggccccaagcactctgactgcctggcctgcctccacttcaaccacagtggcatctgtgagctgcactgcccagccctggtcacctacaacacagacacgtttgagtccatgcccaatcccgagggccggtatacattcggcgccagctgtgtgactgcctgtccctacaactacctttctacggacgtgggatcctgcaccctcgtctgccccctgcacaaccaagaggtgacagcagaggatggaacacagcggtgtgagaagtgcagcaagccctgtgcccgagtgtgctatggtctgggcatggagcacttgcgagaggtgagggcagttaccagtgccaatatccaggagtttgctggctgcaagaagatctttgggagcctggcatttctgccggagagctttgatggggacccagcctccaacactgccccgctccagccagagcagctccaagtgtttgagactctggaagagatcacaggttacctatacatctcagcatggccggacagcctgcctgacctcagcgtcttccagaacctgcaagtaatccggggacgaattctgcacaatggcgcctactcgctgaccctgcaagggctgggcatcagctggctggggctgcgctcactgagggaactgggcagtggactggccctcatccaccataacacccacctctgcttcgtgcacacggtgccctgggaccagctctttcggaacccgcaccaagctctgctccacactgccaaccggccagaggacgagtgtgtgggcgagggcctggcctgccaccagctgtgcgcccgagggcactgctggggtccagggcccacccagtgtgtcaactgcagccagttccttcggggccaggagtgcgtggaggaatgccgagtactgcaggggctccccagggagtatgtgaatgccaggcactgtttgccgtgccaccctgagtgtcagccccagaatggctcagtgacctgttttggaccggaggctgaccagtgtgtggcctgtgcccactataaggaccctcccttctgcgtggcccgctgccccagcggtgtgaaacctgacctctcctacatgcccatctggaagtttccagatgaggagggcgcatgccagccttgccccatcaactgcacccactcctgtgtggacctggatgacaagggctgccccgccgagcagagagccagccctctgacgtccatcatctctgcggtggttggcattctgctggtcgtggtcttgggggtggtctttgggatcctcatcaagcgacggcagcagaagatccggaagtacacgatgcggagactgctgcaggaaacggagctggtggagccgctgacacctagcggagcgatgcccaaccaggcgcagatgcggatcctgaaagagacggagctgaggaaggtgaaggtgcttggatctggcgcttttggcacagtctacaagggcatctggatccctgatggggagaatgtgaaaattccagtggccatcaaagtgttgagggaaaacacatcccccaaagccaacaaagaaatcttagacgaagcatacgtgatggctggtgtgggctccccatatgtctcccgccttctgggcatctgcctgacatccacggtgcagctggtgacacagcttatgccctatggctgcctcttagaccatgtccgggaaaaccgcggacgcctgggctcccaggacctgctgaactggtgtatgcagattgccaaggggatgagctacctggaggatgtgcggctcgtacacagggacttggccgctcggaacgtgctggtcaagagtcccaaccatgtcaaaattacagacttcgggctggctcggctgctggacattgacgagacagagtaccatgcagatgggggcaaggtgcccatcaagtggatggcgctggagtccattctccgccggcggttcacccaccagagtgatgtgtggagttatggtgtgactgtgtgggagctgatgacttttggggccaaaccttacgatgggatcccagcccgggagatccctgacctgctggaaaagggggagcggctgccccagccccccatctgcaccattgatgtctacatgatcatggtcaaatgaccccagccctctacagcggtacagtgaggaccccacagtacccctgccctctgagactgatggctacgttgcccccctgacctgcagcccccagcctgaatatgtgaaccagccagatgttcggccccagcccccttcgccccgagagggccctctgcctgctgcccgacctgctggtgccactctggaaaggcccaagactctctccccagggaagaatggggtcgtcaaagacgtttttgcctttgggggtgccgtggagaaccccgagtacttgacaccccagggaggagctgcccctcagccccaccctcctcctgccttcagcccagccttcgacaacctctattactgggaccaggacccaccagagcggggggctccacccagcaccttcaaagggacacctacggcagagaacccagagtacctgggtctggacgtgccagtgtgaaccagaaggccaagtccgcagaagccctgatgtgtcctcagggagcagggaaggcctgacttctgctggcatcaagaggtgggagggccctccgaccacttccaggggaacctgccatgccaggaacctgtcctaaggaaccttccttcctgcttgagttcccagatggctggaaggggtccagcctcgttggaagaggaacagcactggggagtctttgtggattctgaggccctgcccaatgagactctagggtccagtggatgccacagcccagcttggccctttccttccagatcctgggtactgaaagccttagggaagctggcctgagaggggaagcggccctaagggagtgtctaagaacaaaagcgacccattcagagactgtccctgaaacctagtactgccccccatgaggaaggaacagcaatggtgtcagtatccaggctttgtacagagtgcttttctgtttagtttttactttttttgttttgtttttttaaagatgaaataaagacccagggggagaatgggtgttgtatggggaggcaagtgtggggggtccttctccacacccactttgtccatttgcaaatatattttggaaaaca

SEQ ID NO: 369685 - DNA, 5475 bp, Homo sapiens
attctactctccgctgaagtccacacagtttaaattaaagttcccggatttttgtgggcgcctgccccgcccctcgtccccctgctgtgtccatatatcgaggcgatagggttaagggaaggcggacgcctgatgggttaatgagcaaactgaagtgttttccatgatcttttttgagtcgcaattgaagtaccacctcccgagggtgattgcttccccatgcggggtagaacctttgctgtcctgttcaccactctacctccagcacagaatttggcttatgcctactcaatgtgaagatgatgaggatgaaaacctttgtgatgatccacttccacttaatgaatggttcctcgtctcctcttccttggaccaaaagtcagaggcaagaatgccctcattcataccccagtggtctatacctccagcagcaagtcgagtgagcaagtgatgtcctgaaaggcccagtggatcagtggaatgaagcgggcaggaagacttagtgctcctgaaacaaggaatccagaatccaggagaaggatggctcagtggggctttcaagggacaagtatgggggttgaaggggtcactgtccctataccaaatccgaaaatattgtgaccaggaaccattctgtccaactcttctatttcaggtggcaaagcaaagctatattcaagaccacatgcaaagctactccctgagcaaagagtcacagataaaacgggggcaccagtagaatggccaggacaaacgcagtgcagcacagagactcagaccctggcagccatgcctgcgcaggcagtgatgagagtgacatgtactgttgtggacatgcacaaaagtgagtgtgcaccggcacagacatgaagctgcggctccctgccagtcccgagacccacctggacatgctccgccacctctaccagggctgccaggtggtgcagggaaacctggaactcacctacctgcccaccaatgccagcctgtccttcctgcaggatatccaggaggtgcagggctacgtgctcatcgctcacaaccaagtgaggcaggtcccactgcagaggctgcggattgtgcgaggcacccagctctttgaggacaactatgccctggccgtgctagacaatggagacccgctgaacaataccacccctgtcacaggggcctccccaggaggcctgcgggagctgcagcttcgaagcctcacagagatcttgaaaggaggggtcttgatccagcggaacccccagctctgctaccaggacacgattttgtggaaggacatcttccacaagaacaaccagctggctctcacactgatagacaccaaccgctctcgggcctgccacccctgttctccgatgtgtaagggctcccgctgctggggagagagttctgaggattgtcagagcctgacgcgcactgtctgtgccggtggctgtgcccgctgcaaggggccactgcccactgactgctgccatgagcagtgtgctgccggctgcacgggccccaagcactctgactgcctggcctgcctccacttcaaccacagtggcatctgtgagctgcactgcccagccctggtcacctacaacacagacacgtttgagtccatgcccaatcccgagggccggtatacattcggcgccagctgtgtgactgcctgtccctacaactacctttctacggacgtgggatcctgcaccctcgtctgccccctgcacaaccaagaggtgacagcagaggatggaacacagcggtgtgagaagtgcagcaagccctgtgcccgagtgtgctatggtctgggcatggagcacttgcgagaggtgagggcagttaccagtgccaatatccaggagtttgctggctgcaagaagatctttgggagcctggcatttctgccggagagctttgatggggacccagcctccaacactgccccgctccagccagagcagctccaagtgtttgagactctggaagagatcacaggttacctatacatctcagcatggccggacagcctgcctgacctcagcgtcttccagaacctgcaagtaatccggggacgaattctgcacaatggcgcctactcgctgaccctgcaagggctgggcatcagctggctggggctgcgctcactgagggaactgggcagtggactggccctcatccaccataacacccacctctgcttcgtgcacacggtgccctgggaccagctctttcggaacccgcaccaagctctgctccacactgccaaccggccagaggacgagtgtgtgggcgagggcctggcctgccaccagctgtgcgcccgagggcactgctggggtccagggcccacccagtgtgtcaactgcagccagttccttcggggccaggagtgcgtggaggaatgccgagtactgcaggggctccccagggagtatgtgaatgccaggcactgtttgccgtgccaccctgagtgtcagccccagaatggctcagtgacctgttttggaccggaggctgaccagtgtgtggcctgtgcccactataaggaccctcccttctgcgtggcccgctgccccagcggtgtgaaacctgacctctcctacatgcccatctggaagtttccagatgaggagggcgcatgccagccttgccccatcaactgcacccactcctgtgtggacctggatgacaagggctgccccgccgagcagagagccagccctctgacgtccatcatctctgcggtggttggcattctgctggtcgtggtcttgggggtggtctttgggatcctcatcaagcgacggcagcagaagatccggaagtacacgatgcggagactgctgcaggaaacggagctggtggagccgctgacacctagcggagcgatgcccaaccaggcgcagatgcggatcctgaaagagacggagctgaggaaggtgaaggtgcttggatctggcgcttttggcacagtctacaagggcatctggatccctgatggggagaatgtgaaaattccagtggccatcaaagtgttgagggaaaacacatcccccaaagccaacaaagaaatcttagacgaagcatacgtgatggctggtgtgggctccccatatgtctcccgccttctgggcatctgcctgacatccacggtgcagctggtgacacagcttatgccctatggctgcctcttagaccatgtccgggaaaaccgcggacgcctgggctcccaggacctgctgaactggtgtatgcagattgccaaggggatgagctacctggaggatgtgcggctcgtacacagggacttggccgctcggaacgtgctggtcaagagtcccaaccatgtcaaaattacagacttcgggctggctcggctgctggacattgacgagacagagtaccatgcagatgggggcaaggtgcccatcaagtggatggcgctggagtccattctccgccggcggttcacccaccagagtgatgtgtggagttatggtgtgactgtgtgggagctgatgacttttggggccaaaccttacgatgggatcccagcccgggagatccctgacctgctggaaaagggggagcggctgccccagccccccatctgcaccattgatgtctacatgatcatggtcaaatgttggatgattgactctgaatgtcggccaagattccgggagttggtgtctgaattctcccgcatggccagggacccccagcgctttgtggtcatccagaatgaggacttgggcccagccagtcccttggacagcaccttctaccgctcactgctggaggacgatgacatgggggacctggtggatgctgaggagtatctggtaccccagcagggcttcttctgtccagaccctgccccgggcgctgggggcatggtccaccacaggcaccgcagctcatctaccaggagtggcggtggggacctgacactagggctggagccctctgaagaggaggcccccaggtctccactggcaccctccgaaggggctggctccgatgtatttgatggtgacctgggaatgggggcagccaaggggctgcaaagcctccccacacatgaccccagccctctacagcggtacagtgaggaccccacagtacccctgccctctgagactgatggctacgttgcccccctgacctgcagcccccagcctgaatatgtgaaccagccagatgttcggccccagcccccttcgccccgagagggccctctgcctgctgcccgacctgctggtgccactctggaaaggcccaagactctctccccagggaagaatggggtcgtcaaagacgtttttgcctttgggggtgccgtggagaaccccgagtacttgacaccccagggaggagctgcccctcagccccaccctcctcctgccttcagcccagccttcgacaacctctattactgggaccaggacccaccagagcggggggctccacccagcaccttcaaagggacacctacggcagagaacccagagtacctgggtctggacgtgccagtgtgaaccagaaggccaagtccgcagaagccctgatgtgtcctcagggagcagggaaggcctgacttctgctggcatcaagaggtgggagggccctccgaccacttccaggggaacctgccatgccaggaacctgtcctaaggaaccttccttcctgcttgagttcccagatggctggaaggggtccagcctcgttggaagaggaacagcactggggagtctttgtggattctgaggccctgcccaatgagactctagggtccagtggatgccacagcccagcttggccctttccttccagatcctgggtactgaaagccttagggaagctggcctgagaggggaagcggccctaagggagtgtctaagaacaaaagcgacccattcagagactgtccctgaaacctagtactgccccccatgaggaaggaacagcaatggtgcctctgtgacaccccctgacctatggaagggaactcatgttggccggacattttaccatgtgccaggcactgcgggcactttacataaagcagccaatgtcagaactagaaagcgggagagctgggattcagagcacagactgacccagcaggtgttctgcgagcctcacctgtgcccccgaggcgcgactcgatctcgatgcccggatactgctccttcacagcactggccagctccaggtaggtcgcctcgaagccgcagggttcactggggagtcaagagatggggctgggctggggattcgggggtggggcctcccgtggacccacctccgtccggcccgcgggaccagggtgcgggtcctccagccggggccgctcaccagtactccaccacgatgcggaccccactgcccggctcgacctcctcgggagggggcgctacggacgtctgccccggctccccgctcatcgcggccggctccgctcgggc

SEQ ID NO: 369686 - DNA, 2482 bp, Homo sapiens
ctctggcgtgatggcccattaaacgatagagtcaagaggtctctaatgcaaaaggccattgagtctcactcacctccttgcttgcttcattctcctcagctacactggctttgagggccagtttttacattgggacctggtagcccacaccacctgttcttgaactcctgacctcatgatccgcccgcctcggcctcccaaagtgctgggattacaggtgtgagccaccgtgcccggcctaatctttgtatttttagtagagacagggtttcaccatgttgtccaggctggtactttgagccttcacaggctgtgggccatggctgtggtttgtgatggttgggaggctgtgtggtgtttgggggtgtgtggtctcccataccctctcagcgtacccttgtccccaggaagcatacgtgatggctggtgtgggctccccatatgtctcccgccttctgggcatctgcctgacatccacggtgcagctggtgacacagcttatgccctatggctgcctcttagaccatgtccgggaaaaccgcggacgcctgggctcccaggacctgctgaactggtgtatgcagattgccaaggggatgagctacctggaggatgtgcggctcgtacacagggacttggccgctcggaacgtgctggtcaagagtcccaaccatgtcaaaattacagacttcgggctggctcggctgctggacattgacgagacagagtaccatgcagatgggggcaaggtgcccatcaagtggatggcgctggagtccattctccgccggcggttcacccaccagagtgatgtgtggagttatggtgtgactgtgtgggagctgatgacttttggggccaaaccttacgatgggatcccagcccgggagatccctgacctgctggaaaagggggagcggctgccccagccccccatctgcaccattgatgtctacatgatcatggtcaaatgttggatgattgactctgaatgtcggccaagattccgggagttggtgtctgaattctcccgcatggccagggacccccagcgctttgtggtcatccagaatgaggacttgggcccagccagtcccttggacagcaccttctaccgctcactgctggaggacgatgacatgggggacctggtggatgctgaggagtatctggtaccccagcagggcttcttctgtccagaccctgccccgggcgctgggggcatggtccaccacaggcaccgcagctcatctaccaggagtggcggtggggacctgacactagggctggagccctctgaagaggaggcccccaggtctccactggcaccctccgaaggggctggctccgatgtatttgatggtgacctgggaatgggggcagccaaggggctgcaaagcctccccacacatgaccccagccctctacagcggtacagtgaggaccccacagtacccctgccctctgagactgatggctacgttgcccccctgacctgcagcccccagcctgaatatgtgaaccagccagatgttcggccccagcccccttcgccccgagagggccctctgcctgctgcccgacctgctggtgccactctggaaaggcccaagactctctccccagggaagaatggggtcgtcaaagacgtttttgcctttgggggtgccgtggagaaccccgagtacttgacaccccagggaggagctgcccctcagccccaccctcctcctgccttcagcccagccttcgacaacctctattactgggaccaggacccaccagagcggggggctccacccagcaccttcaaagggacacctacggcagagaacccagagtacctgggtctggacgtgccagtgtgaaccagaaggccaagtccgcagaagccctgatgtgtcctcagggagcagggaaggcctgacttctgctggcatcaagaggtgggagggccctccgaccacttccaggggaacctgccatgccaggaacctgtcctaaggaaccttccttcctgcttgagttcccagatggctggaaggggtccagcctcgttggaagaggaacagcactggggagtctttgtggattctgaggccctgcccaatgagactctagggtccagtggatgccacagcccagcttggccctttccttccagatcctgggtactgaaagccttagggaagctggcctgagaggggaagcggccctaagggagtgtctaagaacaaaagcgacccattcagagactgtccctgaaacctagtactgccccccatgaggaaggaacagcaatggtgtcagtatccaggctttgtacagagtgcttttctgtttagtttttactttttttgttttgtttttttaaagatgaaataaagacccagggggagaatgggtgttgtatggggaggcaagtgtggggggtccttctccacacccactttgtccatttgcaaatatattttggaaaaca

SEQ ID NO: 369687 - DNA, 1758 bp, Homo sapiens
gcgtcggttcctggcagatgggggagtgcccatcaagtggatggcgctggagtccattctccgccggcggttcacccaccagagtgatgtgtggagttatggtgtgactgtgtgggagctgatgacttttggggccaaaccttacgatgggatcccagcccgggagatccctgacctgctggaaaagggggagcggctgccccagccccccatctgcaccattgatgtctacatgatcatggtcaaatgttggatgattgactctgaatgtcggccaagattccgggagttggtgtctgaattctcccgcatggccagggacccccagcgctttgtggtcatccagaatgaggacttgggcccagccagtcccttggacagcaccttctaccgctcactgctggaggacgatgacatgggggacctggtggatgctgaggagtatctggtaccccagcagggcttcttctgtccagaccctgccccgggcgctgggggcatggtccaccacaggcaccgcagctcatctaccaggagtggcggtggggacctgacactagggctggagccctctgaagaggaggcccccaggtctccactggcaccctccgaaggggctggctccgatgtatttgatggtgacctgggaatgggggcagccaaggggctgcaaagcctccccacacatgaccccagccctctacagcggtacagtgaggaccccacagtacccctgccctctgagactgatggctacgttgcccccctgacctgcagcccccagcctgaatatgtgaaccagccagatgttcggccccagcccccttcgccccgagagggccctctgcctgctgcccgacctgctggtgccactctggaaaggcccaagactctctccccagggaagaatggggtcgtcaaagacgtttttgcctttgggggtgccgtggagaaccccgagtacttgacaccccagggaggagctgcccctcagccccaccctcctcctgccttcagcccagccttcgacaacctctattactgggaccaggacccaccagagcggggggctccacccagcaccttcaaagggacacctacggcagagaacccagagtacctgggtctggacgtgccagtgtgaaccagaaggccaagtccgcagaagccctgatgtgtcctcagggagcagggaaggcctgacttctgctggcatcaagaggtgggagggccctccgaccacttccaggggaacctgccatgccaggaacctgtcctaaggaaccttccttcctgcttgagttcccagatggctggaaggggtccagcctcgttggaagaggaacagcactggggagtctttgtggattctgaggccctgcccaatgagactctagggtccagtggatgccacagcccagcttggccctttccttccagatcctgggtactgaaagccttagggaagctggcctgagaggggaagcggccctaagggagtgtctaagaacaaaagcgacccattcagagactgtccctgaaacctagtactgccccccatgaggaaggaacagcaatggtgtcagtatccaggctttgtacagagtgcttttctgtttagtttttactttttttgttttgtttttttaaagatgaaataaagacccagggggagaatgggtgttgtatggggaggcaagtgtggggggtccttctccacacccactttgtccatttgcaaatatattttggaaaaca

SEQ ID NO: 369688 - DNA, 4232 bp, Homo sapiens
attctactctccgctgaagtccacacagtttaaattaaagttcccggatttttgtgggcgcctgccccgcccctcgtccccctgctgtgtccatatatcgaggcgatagggttaagggaaggcggacgcctgatgggttaatgagcaaactgaagtgttttccatgatcttttttgagtcgcaattgaagtaccacctcccgagggtgattgcttccccatgcggggtagaacctttgctgtcctgttcaccactctacctccagcacagaatttggcttatgcctactcaatgtgaagatgatgaggatgaaaacctttgtgatgatccacttccacttaatgaatggttcctcgtctcctcttccttggaccaaaagtcagaggcaagaatgccctcattcataccccagtggtctatacctccagcagcaagtcgagtgagcaagtgatgtcctgaaaggcccagtggatcagtggaatgaagcgggcaggaagacttagtgctcctgaaacaaggaatccagaatccaggagaaggatggctcagtggggctttcaagggacaagtatgggggttgaaggggtcactgtccctataccaaatccgaaaatattgtgaccaggaaccattctgtccaactcttctatttcaggtggcaaagcaaagctatattcaagaccacatgcaaagctactccctgagcaaagagtcacagataaaacgggggcaccagtagaatggccaggacaaacgcagtgcagcacagagactcagaccctggcagccatgcctgcgcaggcagtgatgagagtgacatgtactgttgtggacatgcacaaaagtgagtgtgcaccggcacagacatgaagctgcggctccctgccagtcccgagacccacctggacatgctccgccacctctaccagggctgccaggtggtgcagggaaacctggaactcacctacctgcccaccaatgccagcctgtccttcctgcaggatatccaggaggtgcagggctacgtgctcatcgctcacaaccaagtgaggcaggtcccactgcagaggctgcggattgtgcgaggcacccagctctttgaggacaactatgccctggccgtgctagacaatggagacccgctgaacaataccacccctgtcacaggggcctccccaggaggcctgcgggagctgcagcttcgaagcctcacagagatcttgaaaggaggggtcttgatccagcggaacccccagctctgctaccaggacacgattttgtggaaggacatcttccacaagaacaaccagctggctctcacactgatagacaccaaccgctctcgggcctgccacccctgttctccgatgtgtaagggctcccgctgctggggagagagttctgaggattgtcagagcctgacgcgcactgtctgtgccggtggctgtgcccgctgcaaggggccactgcccactgactgctgccatgagcagtgtgctgccggctgcacgggccccaagcactctgactgcctggcctgcctccacttcaaccacagtggcatctgtgagctgcactgcccagccctggtcacctacaacacagacacgtttgagtccatgcccaatcccgagggccggtatacattcggcgccagctgtgtgactgcctgtccctacaactacctttctacggacgtgggatcctgcaccctcgtctgccccctgcacaaccaagaggtgacagcagaggatggaacacagcggtgtgagaagtgcagcaagccctgtgcccgagtgtgctatggtctgggcatggagcacttgcgagaggtgagggcagttaccagtgccaatatccaggagtttgctggctgcaagaagatctttgggagcctggcatttctgccggagagctttgatggggacccagcctccaacactgccccgctccagccagagcagctccaagtgtttgagactctggaagagatcacaggttacctatacatctcagcatggccggacagcctgcctgacctcagcgtcttccagaacctgcaagtaatccggggacgaattctgcacaatggcgcctactcgctgaccctgcaagggctgggcatcagctggctggggctgcgctcactgagggaactgggcagtggactggccctcatccaccataacacccacctctgcttcgtgcacacggtgccctgggaccagctctttcggaacccgcaccaagctctgctccacactgccaaccggccagaggacgagtgtgtgggcgagggcctggcctgccaccagctgtgcgcccgagggcactgctggggtccagggcccacccagtgtgtcaactgcagccagttccttcggggccaggagtgcgtggaggaatgccgagtactgcaggggctccccagggagtatgtgaatgccaggcactgtttgccgtgccaccctgagtgtcagccccagaatggctcagtgacctgttttggaccggaggctgaccagtgtgtggcctgtgcccactataaggaccctcccttctgcgtggcccgctgccccagcggtgtgaaacctgacctctcctacatgcccatctggaagtttccagatgaggagggcgcatgccagccttgccccatcaactgcacccactcctgtgtggacctggatgacaagggctgccccgccgagcagagagccagccctctgacgtccatcatctctgcggtggttggcattctgctggtcgtggtcttgggggtggtctttgggatcctcatcaagcgacggcagcagaagatccggaagtacacgatgcggagactgctgcaggaaacggagctggtggagccgctgacacctagcggagcgatgcccaaccaggcgcagatgcggatcctgaaagagacggagctgaggaaggtgaaggtgcttggatctggcgcttttggcacagtctacaagggcatctggatccctgatggggagaatgtgaaaattccagtggccatcaaagtgttgagggaaaacacatcccccaaagccaacaaagaaatcttagacgaagcatacgtgatggctggtgtgggctccccatatgtctcccgccttctgggcatctgcctgacatccacggtgcagctggtgacacagcttatgccctatggctgcctcttagaccatgtccgggaaaaccgcggacgcctgggctcccaggacctgctgaactggtgtatgcagattgccaaggggatgagctacctggaggatgtgcggctcgtacacagggacttggccgctcggaacgtgctggtcaagagtcccaaccatgtcaaaattacagacttcgggctggctcggctgctggacattgacgagacagagtaccatgcagatgggggcaaggtgcccatcaagtggatggcgctggagtccattctccgccggcggttcacccaccagagtgatgtgtggagttatggtgtgactgtgtgggagctgatgacttttggggccaaaccttacgatgggatcccagcccgggagatccctgacctgctggaaaagggggagcggctgccccagccccccatctgcaccattgatgtctacatgatcatggtcaaatgttggatgattgactctgaatgtcggccaagattccgggagttggtgtctgaattctcccgcatggccagggacccccagcgctttgtggtcatccagaatgaggacttgggcccagccagtcccttggacagcaccttctaccgctcactgctggaggacgatgacatgggggacctggtggatgctgaggagtatctggtaccccagcagggcttcttctgtccagaccctgccccgggcgctgggggcatggtccaccacaggcaccgcagctcatctaccaggagtggcggtggggacctgacactagggctggagccctctgaagaggaggcccccaggtctccactggcaccctccgaaggggctggctccgatgtatttgatggtgacctgggaatgggggcagccaaggggctgcaaagcctccccacacatgaccccagccctctacagcggtacagtgaggaccccacagagagagcgtcgtcattcttgcaacggaagggccggttgggagggcacacgaaccgggcacactcctcggggttctactgagttgtccccaacagagagagcgtc

SEQ ID NO: 369689 - DNA, 3755 bp, Homo sapiens
attctactctccgctgaagtccacacagtttaaattaaagttcccggatttttgtgggcgcctgccccgcccctcgtccccctgctgtgtccatatatcgaggcgatagggttaagggaaggcggacgcctgatgggttaatgagcaaactgaagtgttttccatgatcttttttgagtcgcaattgaagtaccacctcccgagggtgattgcttccccatgcggggtagaacctttgctgtcctgttcaccactctacctccagcacagaatttggcttatgcctactcaatgtgaagatgatgaggatgaaaacctttgtgatgatccacttccacttaatgaatggttcctcgtctcctcttccttggaccaaaagtcagaggcaagaatgccctcattcataccccagtggtctatacctccagcagcaagtcgagtgagcaagtgatgtcctgaaaggcccagtggatcagtggaatgaagcgggcaggaagacttagtgctcctgaaacaaggaatccagaatccaggagaaggatggctcagtggggctttcaagggacaagtatgggggttgaaggggtcactgtccctataccaaatccgaaaatattgtgaccaggaaccattctgtccaactcttctatttcaggtggcaaagcaaagctatattcaagaccacatgcaaagctactccctgagcaaagagtcacagataaaacgggggcaccagtagaatggccaggacaaacgcagtgcagcacagagactcagaccctggcagccatgcctgcgcaggcagtgatgagagtgacatgtactgttgtggacatgcacaaaagtgagtgtgcaccggcacagacatgaagctgcggctccctgccagtcccgagacccacctggacatgctccgccacctctaccagggctgccaggtggtgcagggaaacctggaactcacctacctgcccaccaatgccagcctgtccttcctgcaggatatccaggaggtgcagggctacgtgctcatcgctcacaaccaagtgaggcaggtcccactgcagaggctgcggattgtgcgaggcacccagctctttgaggacaactatgccctggccgtgctagacaatggagacccgctgaacaataccacccctgtcacaggggcctccccaggaggcctgcgggagctgcagcttcgaagcctcacagagatcttgaaaggaggggtcttgatccagcggaacccccagctctgctaccaggacacgattttgtggaaggacatcttccacaagaacaaccagctggctctcacactgatagacaccaaccgctctcgggcctgccacccctgttctccgatgtgtaagggctcccgctgctggggagagagttctgaggattgtcagagcctgacgcgcactgtctgtgccggtggctgtgcccgctgcaaggggccactgcccactgactgctgccatgagcagtgtgctgccggctgcacgggccccaagcactctgactgcctggcctgcctccacttcaaccacagtggcatctgtgagctgcactgcccagccctggtcacctacaacacagacacgtttgagtccatgcccaatcccgagggccggtatacattcggcgccagctgtgtgactgcctgtccctacaactacctttctacggacgtgggatcctgcaccctcgtctgccccctgcacaaccaagaggtgacagcagaggatggaacacagcggtgtgagaagtgcagcaagccctgtgcccgagtgtgctatggtctgggcatggagcacttgcgagaggtgagggcagttaccagtgccaatatccaggagtttgctggctgcaagaagatctttgggagcctggcatttctgccggagagctttgatggggacccagcctccaacactgccccgctccagccagagcagctccaagtgtttgagactctggaagagatcacaggttacctatacatctcagcatggccggacagcctgcctgacctcagcgtcttccagaacctgcaagtaatccggggacgaattctgcacaatggcgcctactcgctgaccctgcaagggctgggcatcagctggctggggctgcgctcactgagggaactgggcagtggactggccctcatccaccataacacccacctctgcttcgtgcacacggtgccctgggaccagctctttcggaacccgcaccaagctctgctccacactgccaaccggccagaggacgagtgtgtgggcgagggcctggcctgccaccagctgtgcgcccgagggcactgctggggtccagggcccacccagtgtgtcaactgcagccagttccttcggggccaggagtgcgtggaggaatgccgagtactgcaggggctccccagggagtatgtgaatgccaggcactgtttgccgtgccaccctgagtgtcagccccagaatggctcagtgacctgttttggaccggaggctgaccagtgtgtggcctgtgcccactataaggaccctcccttctgcgtggcccgctgccccagcggtgtgaaacctgacctctcctacatgcccatctggaagtttccagatgaggagggcgcatgccagccttgccccatcaactgcacccactcctgtgtggacctggatgacaagggctgccccgccgagcagagagccagccctctgacgtccatcatctctgcggtggttggcattctgctggtcgtggtcttgggggtggtctttgggatcctcatcaagcgacggcagcagaagatccggaagtacacgatgcggagactgctgcaggaaacggagctggtggagccgctgacacctagcggagcgatgcccaaccaggcgcagatgcggatcctgaaagagacggagctgaggaaggtgaaggtgcttggatctggcgcttttggcacagtctacaagggcatctggatccctgatggggagaatgtgaaaattccagtggccatcaaagtgttgagggaaaacacatcccccaaagccaacaaagaaatcttagacgaagcatacgtgatggctggtgtgggctccccatatgtctcccgccttctgggcatctgcctgacatccacggtgcagctggtgacacagcttatgccctatggctgcctcttagaccatgtccgggaaaaccgcggacgcctgggctcccaggacctgctgaactggtgtatgcagattgccaaggggatgagctacctggaggatgtgcggctcgtacacagggacttggccgctcggaacgtgctggtcaagagtcccaaccatgtcaaaattacagacttcgggctggctcggctgctggacattgacgagacagagtaccatgcagatgggggcaaggtgcccatcaagtggatggcgctggagtccattctccgccggcggttcacccaccagagtgatgtgtggagttatggtgtgactgtgtgggagctgatgacttttggggccaaaccttacgatgggatcccagcccgggagatccctgacctgctggaaaagggggagcggctgccccagccccccatctgcaccattgatgtctacatgatcatggtcaaataagcatacgtgatggctggtgtgggctccccagccctgaaaccagtgtcaccagcctctccaccaaacaacaacctacaaacagcacaggactcacccaagcctagg

SEQ ID NO: 369690 - DNA, 3622 bp, Homo sapiens
  misc_feature (3621)..(3621): n is a, c, g, or t
attctactctccgctgaagtccacacagtttaaattaaagttcccggatttttgtgggcgcctgccccgcccctcgtccccctgctgtgtccatatatcgaggcgatagggttaagggaaggcggacgcctgatgggttaatgagcaaactgaagtgttttccatgatcttttttgagtcgcaattgaagtaccacctcccgagggtgattgcttccccatgcggggtagaacctttgctgtcctgttcaccactctacctccagcacagaatttggcttatgcctactcaatgtgaagatgatgaggatgaaaacctttgtgatgatccacttccacttaatgaatggttcctcgtctcctcttccttggaccaaaagtcagaggcaagaatgccctcattcataccccagtggtctatacctccagcagcaagtcgagtgagcaagtgatgtcctgaaaggcccagtggatcagtggaatgaagcgggcaggaagacttagtgctcctgaaacaaggaatccagaatccaggagaaggatggctcagtggggctttcaagggacaagtatgggggttgaaggggtcactgtccctataccaaatccgaaaatattgtgaccaggaaccattctgtccaactcttctatttcaggtggcaaagcaaagctatattcaagaccacatgcaaagctactccctgagcaaagagtcacagataaaacgggggcaccagtagaatggccaggacaaacgcagtgcagcacagagactcagaccctggcagccatgcctgcgcaggcagtgatgagagtgacatgtactgttgtggacatgcacaaaagtgagtgtgcaccggcacagacatgaagctgcggctccctgccagtcccgagacccacctggacatgctccgccacctctaccagggctgccaggtggtgcagggaaacctggaactcacctacctgcccaccaatgccagcctgtccttcctgcaggatatccaggaggtgcagggctacgtgctcatcgctcacaaccaagtgaggcaggtcccactgcagaggctgcggattgtgcgaggcacccagctctttgaggacaactatgccctggccgtgctagacaatggagacccgctgaacaataccacccctgtcacaggggcctccccaggaggcctgcgggagctgcagcttcgaagcctcacagagatcttgaaaggaggggtcttgatccagcggaacccccagctctgctaccaggacacgattttgtggaaggacatcttccacaagaacaaccagctggctctcacactgatagacaccaaccgctctcgggcctgccacccctgttctccgatgtgtaagggctcccgctgctggggagagagttctgaggattgtcagagcctgacgcgcactgtctgtgccggtggctgtgcccgctgcaaggggccactgcccactgactgctgccatgagcagtgtgctgccggctgcacgggccccaagcactctgactgcctggcctgcctccacttcaaccacagtggcatctgtgagctgcactgcccagccctggtcacctacaacacagacacgtttgagtccatgcccaatcccgagggccggtatacattcggcgccagctgtgtgactgcctgtccctacaactacctttctacggacgtgggatcctgcaccctcgtctgccccctgcacaaccaagaggtgacagcagaggatggaacacagcggtgtgagaagtgcagcaagccctgtgcccgagtgtgctatggtctgggcatggagcacttgcgagaggtgagggcagttaccagtgccaatatccaggagtttgctggctgcaagaagatctttgggagcctggcatttctgccggagagctttgatggggacccagcctccaacactgccccgctccagccagagcagctccaagtgtttgagactctggaagagatcacaggttacctatacatctcagcatggccggacagcctgcctgacctcagcgtcttccagaacctgcaagtaatccggggacgaattctgcacaatggcgcctactcgctgaccctgcaagggctgggcatcagctggctggggctgcgctcactgagggaactgggcagtggactggccctcatccaccataacacccacctctgcttcgtgcacacggtgccctgggaccagctctttcggaacccgcaccaagctctgctccacactgccaaccggccagaggacgagtgtgtgggcgagggcctggcctgccaccagctgtgcgcccgagggcactgctggggtccagggcccacccagtgtgtcaactgcagccagttccttcggggccaggagtgcgtggaggaatgccgagtactgcaggggctccccagggagtatgtgaatgccaggcactgtttgccgtgccaccctgagtgtcagccccagaatggctcagtgacctgttttggaccggaggctgaccagtgtgtggcctgtgcccactataaggaccctcccttctgcgtggcccgctgccccagcggtgtgaaacctgacctctcctacatgcccatctggaagtttccagatgaggagggcgcatgccagccttgccccatcaactgcacccactcctgtgtggacctggatgacaagggctgccccgccgagcagagagccagccctctgacgtccatcatctctgcggtggttggcattctgctggtcgtggtcttgggggtggtctttgggatcctcatcaagcgacggcagcagaagatccggaagtacacgatgcggagactgctgcaggaaacggagctggtggagccgctgacacctagcggagcgatgcccaaccaggcgcagatgcggatcctgaaagagacggagctgaggaaggtgaaggtgcttggatctggcgcttttggcacagtctacaagggcatctggatccctgatggggagaatgtgaaaattccagtggccatcaaagtgttgagggaaaacacatcccccaaagccaacaaagaaatcttagacgaagcatacgtgatggctggtgtgggctccccatatgtctcccgccttctgggcatctgcctgacatccacggtgcagctggtgacacagcttatgccctatggctgcctcttagaccatgtccgggaaaaccgcggacgcctgggctcccaggacctgctgaactggtgtatgcagattgccaaggggatgagctacctggaggatgtgcggctcgtacacagggacttggccgctcggaacgtgctggtcaagagtcccaaccatgtcaaaattacagacttcgggctggctcggctgctggacattgacgagacagagtaccatgcagatgggggcaaggtgcccatcaagtggatggcgctggagtccattctccgccggcggttcacccaccagagtgatgtgtggagttatggtgtgactgtgtgggagctgatgacttttggggccaaaccttacgatgggatcccagcccgggagatccctgacctgctggaaaagggggagcggcacatgcgttgggggatcctctagng

SEQ ID NO: 369691 - DNA, 793 bp, Homo sapiens
gggtgtcaattactcggggttctccacggccccaccctcctcctgccttcagcccagccttcgacaacctctattactgggaccaggacccaccagagcggggggctccacccagcaccttcaaagggacacctacggcagagaacccagagtacctgggtctggacgtgccagtgtgaaccagaaggccaagtccgcagaagccctgatgtgtcctcagggagcagggaaggcctgacttctgctggcatcaagaggtgggagggccctccgaccacttccaggggaacctgccatgccaggaacctgtcctaaggaaccttccttcctgcttgagttcccagatggctggaaggggtccagcctcgttggaagaggaacagcactggggagtctttgtggattctgaggccctgcccaatgagactctagggtccagtggatgccacagcccagcttggccctttccttccagatcctgggtactgaaagccttagggaagctggcctgagaggggaagcggccctaagggagtgtctaagaacaaaagcgacccattcagagactgtccctgaaacctagtactgccccccatgaggaaggaacagcaatggtgtcagtatccaggctttgtacagagtgcttttctgtttagtttttactttttttgttttgtttttttaaagatgaaataaagacccagggggagaatgggtgttgtatggggaggcaagtgtggggggtccttctccacacccactttgtccatttgcaaatatattttggaaaaca

SEQ ID NO: 369692 - DNA, 2842 bp, Homo sapiens
attctactctccgctgaagtccacacagtttaaattaaagttcccggatttttgtgggcgcctgccccgcccctcgtccccctgctgtgtccatatatcgaggcgatagggttaagggaaggcggacgcctgatgggttaatgagcaaactgaagtgttttccatgatcttttttgagtcgcaattgaagtaccacctcccgagggtgattgcttccccatgcggggtagaacctttgctgtcctgttcaccactctacctccagcacagaatttggcttatgcctactcaatgtgaagatgatgaggatgaaaacctttgtgatgatccacttccacttaatgaatggttcctcgtctcctcttccttggaccaaaagtcagaggcaagaatgccctcattcataccccagtggtctatacctccagcagcaagtcgagtgagcaagtgatgtcctgaaaggcccagtggatcagtggaatgaagcgggcaggaagacttagtgctcctgaaacaaggaatccagaatccaggagaaggatggctcagtggggctttcaagggacaagtatgggggttgaaggggtcactgtccctataccaaatccgaaaatattgtgaccaggaaccattctgtccaactcttctatttcaggtggcaaagcaaagctatattcaagaccacatgcaaagctactccctgagcaaagagtcacagataaaacgggggcaccagtagaatggccaggacaaacgcagtgcagcacagagactcagaccctggcagccatgcctgcgcaggcagtgatgagagtgacatgtactgttgtggacatgcacaaaagtgagtgtgcaccggcacagacatgaagctgcggctccctgccagtcccgagacccacctggacatgctccgccacctctaccagggctgccaggtggtgcagggaaacctggaactcacctacctgcccaccaatgccagcctgtccttcctgcaggatatccaggaggtgcagggctacgtgctcatcgctcacaaccaagtgaggcaggtcccactgcagaggctgcggattgtgcgaggcacccagctctttgaggacaactatgccctggccgtgctagacaatggagacccgctgaacaataccacccctgtcacaggggcctccccaggaggcctgcgggagctgcagcttcgaagcctcacagagatcttgaaaggaggggtcttgatccagcggaacccccagctctgctaccaggacacgattttgtggaaggacatcttccacaagaacaaccagctggctctcacactgatagacaccaaccgctctcgggcctgccacccctgttctccgatgtgtaagggctcccgctgctggggagagagttctgaggattgtcagagcctgacgcgcactgtctgtgccggtggctgtgcccgctgcaaggggccactgcccactgactgctgccatgagcagtgtgctgccggctgcacgggccccaagcactctgactgcctggcctgcctccacttcaaccacagtggcatctgtgagctgcactgcccagccctggtcacctacaacacagacacgtttgagtccatgcccaatcccgagggccggtatacattcggcgccagctgtgtgactgcctgtccctacaactacctttctacggacgtgggatcctgcaccctcgtctgccccctgcacaaccaagaggtgacagcagaggatggaacacagcggtgtgagaagtgcagcaagccctgtgcccgagtgtgctatggtctgggcatggagcacttgcgagaggtgagggcagttaccagtgccaatatccaggagtttgctggctgcaagaagatctttgggagcctggcatttctgccggagagctttgatggggacccagcctccaacactgccccgctccagccagagcagctccaagtgtttgagactctggaagagatcacaggttacctatacatctcagcatggccggacagcctgcctgacctcagcgtcttccagaacctgcaagtaatccggggacgaattctgcacaatggcgcctactcgctgaccctgcaagggctgggcatcagctggctggggctgcgctcactgagggaactgggcagtggactggccctcatccaccataacacccacctctgcttcgtgcacacggtgccctgggaccagctctttcggaacccgcaccaagctctgctccacactgccaaccggccagaggacgagtgtgtgggcgagggcctggcctgccaccagctgtgcgcccgagggcactgctggggtccagggcccacccagtgtgtcaactgcagccagttccttcggggccaggagtgcgtggaggaatgccgagtactgcaggggctccccagggagtatgtgaatgccaggcactgtttgccgtgccaccctgagtgtcagccccagaatggctcagtgacctgttttggaccggaggctgaccagtgtgtggcctgtgcccactataaggaccctcccttctgcgtggcccgctgccccagcggtgtgaaacctgacctctcctacatgcccatctggaagtttccagatgaggagggcgcatgccagccttgccccatcaactgcacccactcgtgagtccaacggtcttttctgcagaaaggaggactttcctttcaggggtctttctggggctcttactataaaaggggaccaactctccctttgtcatatcttgtttctgatgacaaaaataacacattgttaaaattgtaaaattaaaacatgaaatataaattaat

SEQ ID NO: 369693 - DNA, 2006 bp, Homo sapiens
attctactctccgctgaagtccacacagtttaaattaaagttcccggatttttgtgggcgcctgccccgcccctcgtccccctgctgtgtccatatatcgaggcgatagggttaagggaaggcggacgcctgatgggttaatgagcaaactgaagtgttttccatgatcttttttgagtcgcaattgaagtaccacctcccgagggtgattgcttccccatgcggggtagaacctttgctgtcctgttcaccactctacctccagcacagaatttggcttatgcctactcaatgtgaagatgatgaggatgaaaacctttgtgatgatccacttccacttaatgaatggttcctcgtctcctcttccttggaccaaaagtcagaggcaagaatgccctcattcataccccagtggtctatacctccagcagcaagtcgagtgagcaagtgatgtcctgaaaggcccagtggatcagtggaatgaagcgggcaggaagacttagtgctcctgaaacaaggaatccagaatccaggagaaggatggctcagtggggctttcaagggacaagtatgggggttgaaggggtcactgtccctataccaaatccgaaaatattgtgaccaggaaccattctgtccaactcttctatttcaggtggcaaagcaaagctatattcaagaccacatgcaaagctactccctgagcaaagagtcacagataaaacgggggcaccagtagaatggccaggacaaacgcagtgcagcacagagactcagaccctggcagccatgcctgcgcaggcagtgatgagagtgacatgtactgttgtggacatgcacaaaagtgagtgtgcaccggcacagacatgaagctgcggctccctgccagtcccgagacccacctggacatgctccgccacctctaccagggctgccaggtggtgcagggaaacctggaactcacctacctgcccaccaatgccagcctgtccttcctgcaggatatccaggaggtgcagggctacgtgctcatcgctcacaaccaagtgaggcaggtcccactgcagaggctgcggattgtgcgaggcacccagctctttgaggacaactatgccctggccgtgctagacaatggagacccgctgaacaataccacccctgtcacaggggcctccccaggaggcctgcgggagctgcagcttcgaagcctcacagagatcttgaaaggaggggtcttgatccagcggaacccccagctctgctaccaggacacgattttgtggaaggacatcttccacaagaacaaccagctggctctcacactgatagacaccaaccgctctcgggcctgccacccctgttctccgatgtgtaagggctcccgctgctggggagagagttctgaggattgtcagagcctgacgcgcactgtctgtgccggtggctgtgcccgctgcaaggggccactgcccactgactgctgccatgagcagtgtgctgccggctgcacgggccccaagcactctgactgcctggcctgcctccacttcaaccacagtggcatctgtgagctgcactgcccagccctggtcacctacaacacagacacgtttgagtccatgcccaatcccgagggccggtatacattcggcgccagctgtgtgactgcctgtccctgtgagtgccagggagaaacacagttttctcattttggtggggaggtttgtttctgtaaatgggagcatatggggagcactgtctgcatcttgctttgagagctggtcatgacagttcctgccgagctgccttgttctttcaacagctgtggagcaggtggcagtaaggagaggcagctaagagcccagacttgggagccagactgcctgggtttgaaacccagctctatcaattagtaggcacgtgaccctcttgctgtgcctcagtttcctcatcagtaaaatgggggcaagaatagtcccaactgcataagatggttataacatttg

SEQ ID NO: 369694 - DNA, 873 bp, Homo sapiens
gccctgacggcgctcccgggagcagccggtgcgcggcggcggcacgaccccctgcgcctccgaggcagacgagcccatcgggagaaggcgaggcagggaagtgcctaaaccaacgggataggattcaaaactaggtgacaaactcatgagaaatccaacctggctgaatgtctgagaggctgctactgtatcaacatcacaagataaagcactctggtatcacctgcccatatcctccttagtgtcacccaagacatttgactctgatgtggttaattgataacttttcttgctccactttacaatgttttgtttcctacatcttattaccttgggacacaaaagtggcagagttgttgagagctgatgacaataaaaaggagaacactagaggaaatgagacaggaaagaaagccaaagctgattttccaactctatgctgactccaacctgcagaaaaagctgaatatagaaatcttcttccatatatgatgaagtcactccacttacgacataacacacaaaggaatcacctggctttttttttttaacccagaagagttgtgctggggaccatgccccatcccgctgatacagatcctgaatggaataatcaggaatggcacagtgcaggtgtcaatatcaaagtaaggccgcagaatttttgagaggaccctccaaatactgagaacttctgttgcactcgaaacagtctcctggatttctatatttttatgtgaagggctcttattgatgtcccccagaatccagactcagacctatttctccaaaaaggtccaattgggttgctacatagtagcaagggtttatcttcatgctcacctagcattccaggcccccattacttcaaaa

SEQ ID NO: 369695 - DNA, 854 bp, Homo sapiens
gccctgacggcgctcccgggagcagccggtgcgcggcggcggcacgaccccctgcgcctccgaggcagacgagcccatcgggagaagaaaccaacgggataggattcaaaactaggtgacaaactcatgagaaatccaacctggctgaatgtctgagaggctgctactgtatcaacatcacaagataaagcactctggtatcacctgcccatatcctccttagtgtcacccaagacatttgactctgatgtggttaattgataacttttcttgctccactttacaatgttttgtttcctacatcttattaccttgggacacaaaagtggcagagttgttgagagctgatgacaataaaaaggagaacactagaggaaatgagacaggaaagaaagccaaagctgattttccaactctatgctgactccaacctgcagaaaaagctgaatatagaaatcttcttccatatatgatgaagtcactccacttacgacataacacacaaaggaatcacctggctttttttttttaacccagaagagttgtgctggggaccatgccccatcccgctgatacagatcctgaatggaataatcaggaatggcacagtgcaggtgtcaatatcaaagtaaggccgcagaatttttgagaggaccctccaaatactgagaacttctgttgcactcgaaacagtctcctggatttctatatttttatgtgaagggctcttattgatgtcccccagaatccagactcagacctatttctccaaaaaggtccaattgggttgctacatagtagcaagggtttatcttcatgctcacctagcattccaggcccccattacttcaaaa

SEQ ID NO: 369696 - DNA, 2257 bp, Homo sapiens
gaattgattctcggcctcctgtccccttctttagcgcgcccttggctctcggatctcccttgtgctgtttctcaagcctgcccgtgtccccccggctttgttttatttgtgggagtacctccgccgcctgttttggtgccccgcgttcttcccttgggaccccccttgttgcaccgtgtttctactgttcctatctggtgcccccgcgtctacaccgagttggggttttcgcaaccctttttgtggtgcccataggcgcgccgatgagttttttttttttttctttttcttttttttactttttatcaaagaagtttatttgcatgtaaataaacaggttattttgtaatgtttcgggaaaaaaatcccacaacagatttcatctactttcaaaaaaatgaaaaaccccaaagtatttacaaaacggccatatgcacagaaaaccaaatttgaaagatttttttaaaaaaagaccctccccagctgctcctgatgtacatttttaaactcaaaatttaaagctcagttcttatagctgagcatgtttcccaatctagcttctgagatgttaagtacttcctgcccctccaaaactaactcaaggatagaaatgtatggggggcaggggaggaggggagaaggaaaaaaaaatgagattgcccaaggattgtgaataatgtttcgtatactgacatctttaagtgactcaactgtggatactgtatgactcactggctccctgaaagggcttctgagaattcatgatattgctgcacttaattttctgatctaggcctgaagaaagaaaatctttcaagagtcaccaacctcaagcctggttttggcaattatatcctgcgttgtttgtccccaccaccccaccccccacccgctaaaatacttctgttttaagacacattgatattgaacctgaaatctttatgtacatcagagcaggttatgaccaagaacccctaatgttaagtcaaaagacagaagaggaatcaggtcaaactgagaatacataagacaccagcagcagaagataggtagaagttgacttcatgtccttgccttcttttgaaacagaagaatgagtacacctagacaggagggaggtgtcccaggcttggtttattctgcctcttctcctccaccctgtggagaaatgcagtgctccctggttctcaggcagggtgaagcagtttagccccggctccctgttaagcaagttcagatgctgggtcagtgtgggggtgagcccatcgacaattcaggggcttatccttcatccagatcctaactcgggattctttgatctgggatgaagacagaaagagagaaaagcttcccagtttactcattttggtatttgttggccctgcatgggggagctgagcccatgatactattcagtacattccccctaagattctccccactcagaaccaattttaaaaaccacataaatttttttttttttcctgcagaaaccaacgggataggattcaaaactaggtgacaaactcatgagaaatccaacctggctgaatgtctgagaggctgctactgtatcaacatcacaagataaagcactctggtatcacctgcccatatcctccttagtgtcacccaagacatttgactctgatgtggttaattgataacttttcttgctccactttacaatgttttgtttcctacatcttattaccttgggacacaaaagtggcagagttgttgagagctgatgacaataaaaaggagaacactagaggaaatgagacaggaaagaaagccaaagctgattttccaactctatgctgactccaacctgcagaaaaagctgaatatagaaatcttcttccatatatgatgaagtcactccacttacgacataacacacaaaggaatcacctggctttttttttttaacccagaagagttgtgctggggaccatgccccatcccgctgatacagatcctgaatggaataatcaggaatggcacagtgcaggtgtcaatatcaaagtaaggccgcagaatttttgagaggaccctccaaatactgagaacttctgttgcactcgaaacagtctcctggatttctatatttttatgtgaagggctcttattgatgtcccccagaatccagactcagacctatttctccaaaaaggtccaattgggttgctacatagtagcaagggtttatcttcatgctcacctagcattccaggcccccattacttcaaaa

SEQ ID NO: 369697 - DNA, 387 bp, Homo sapiens
ttcagttctaagcttctacaatctatgacatttcttgtgaccctgtctggaggagactgctgggagttccctggaaggctgctgactggctgggcactgagcaaacccgagggtgcctcagcaaccaggctccaatgccaggcatccaggcatggcaggcagccactggctgcaggttagtgtgaccctctcggagattcgtgctgccctcctgccagggaaatggctcaagttgtcacgacagagcatgaccctgagatagaagctggggggtggtgcccccgtgcaatgagctttgcttgtttgtgcaggcttccttggagcctcacgtagccaggctcagctgctctgccaccctttaggctgctgggtagccagagtaaggag

SEQ ID NO: 369698 - DNA, 424 bp, Homo sapiens
ctccatcttctaggatacaaaagtgcttctcccatagttgagaaaaatagtaactatttttaccaaaaacacctgtttcagaagcctcttaacaccacaatctccacgagcttaatgtgctaagaatggtttaaagaatctcctgctattatttaggttgatttcctattcttaaaataatgatggaataaaacaccctgtatcattcatgtctgtgtatgaactttccattctaattagtaagatttttggagtcagaaacaaagtaactcactaaattacctaaaaatatagtataaaatcagggagaaaaggtttccccttatttgtctccttttctaggatttagccacatacttcgtggacatgagtacgtgacttcattggcagctgctctatcgtgcgtacagagagtaagttgcat

SEQ ID NO: 369699 - DNA, 209 bp, Homo sapiens
tcagctaagtcaagagatgatgtcttaaaagcaggacaaaagaagattattacctcttttgttcttgaaaaagatattgcaaacactggataccatgtttagtaagtacattgaggtatagttgactgtgcatatttagaatgtacggtttaataagtattgacgtgtgcacatgtgcatacccgtgaaaacgccacggtcaaggcaat

SEQ ID NO: 369700 - DNA, 288 bp, Homo sapiens
tgctcctctgggcgcatcactcctgtttgcaagcatcttaggaaagataaagggctaggcttctgtgaggctcctctgagtccggacaaccgtgcactgtctggtttcagcgagacccctgtccattcacgtataaggaggtttctgctccactcacaggatcctgagctgcacttacctgtgagagtcttcaaacttttaaaccttgccagtcaggacttttgctattgcaaatagaaaacccaactcaacctgcttaagcagaaaataaatttattgattcaagtt

SEQ ID NO: 369701 - DNA, 1561 bp, Homo sapiens
agagggcccccaggtctcctgctggagcctccacgcagggggcctgtggggatggccagggctcagcccagcacctgagcgcccctcccaccagctgctctgccagaccgcatgctccgccccctgcaaacgaccgtggggagagcagcttgaaaacgcgcctggccctgagctgtcaccaccgacactctccaggctccggacacgatgcaggccatcaagtgtgtggtggtgggagatggggccgtgggcaagacctgccttctcatcagctacaccaccaacgcctttcccggagagtacatccccaccgtgtttgacaactattcagccaatgtgatggtggacagcaagccagtgaacctggggctgtgggacactgctgggcaggaggactacgaccgtctccggccgctctcctatccacagacggacgtcttcctcatctgcttctccctcgtcagcccagcctcttatgagaacgtccgcgccaagtggttcccagaagtgcggcaccactgccccagcacacccatcatcctggtgggcaccaagctggacctgcgggacgacaaggacaccatcgagaaactgaaggagaagaagctggctcccatcacctacccgcagggcctggcactggccaaggagattgactcggtgaaatacctggagtgctcagctctcacccagagaggcctgaaaaccgtgttcgacgaggccatccgggccgtgctgtgccctcagcccacgcggcagcagaagcgcgcctgcagcctcctctaggggttgcaccccagcgctcccacctagatgggtctgatcctccaggatccccacccaaagcctgatggcaccccggctggccatgctgtcccctccctgtggcgtttcttagcagatggctgcagagcttcgttgatggtcttttctgtactggaggcctcctgaggccaggaacgtgcaaatttgcaggtgctgcatcccaagcccctcatgctcctgccttcctgagggccagaggggagccccaggacccattaagccacccccgtgttcctgccgtcagtgccaactgccgcatgtggaagcatctacccgttcactccagtcccaccccacgcctgactcccctctggaaactgcaggccagatggttgctgccacaacttgtgtaccttcagggatggggctcttactccctcctgaggccagctgctctaatatcgatggtcctgcttgccagagagttcctctacccagcaaaaatgagtgtctcagaagtgtgctcctctggcctcagttctcctcttttggaacaacataaaacaaatttaattttctacgcctctggggatatctgctcagccaatggaaaatctgggttcaaccagcccctgccatttcttaagactttctgctccactcacaggatcctgagctgcacttacctgtgagagtcttcaaacttttaaaccttgccagtcaggacttttgctattgcaaatagaaaacccaactcaacctgcttaagcagaaaataaatttattgattcaagtt

SEQ ID NO: 369702 - DNA, 1627 bp, Homo sapiens
agagggcccccaggtctcctgctggagcctccacgcagggggcctgtggggatggccagggctcagcccagcacctgagcgcccctcccaccagctgctctgccagaccgcatgctccgccccctgcaaacgaccgtggggagagcagcttgagtaagttccccttccgtttcctcctgccccaccaccgctgctcctcagcaggcgcctcaccagcctccacaccccttgcgcccgcagaaacgcgcctggccctgagctgtcaccaccgacactctccaggctccggacacgatgcaggccatcaaggccgtgggcaagacctgccttctcatcagctacaccaccaacgcctttcccggagagtacatccccaccgtgtttgacaactattcagccaatgtgatggtggacagcaagccagtgaacctggggctgtgggacactgctgggcaggaggactacgaccgtctccggccgctctcctatccacagacggacgtcttcctcatctgcttctccctcgtcagcccagcctcttatgagaacgtccgcgccaagtggttcccagaagtgcggcaccactgccccagcacacccatcatcctggtgggcaccaagctggacctgcgggacgacaaggacaccatcgagaaactgaaggagaagaagctggctcccatcacctacccgcagggcctggcactggccaaggagattgactcggtgaaatacctggagtgctcagctctcacccagagaggcctgaaaaccgtgttcgacgaggccatccgggccgtgctgtgccctcagcccacgcggcagcagaagcgcgcctgcagcctcctctaggggttgcaccccagcgctcccacctagatgggtctgatcctccaggatccccacccaaagcctgatggcaccccggctggccatgctgtcccctccctgtggcgtttcttagcagatggctgcagagcttcgttgatggtcttttctgtactggaggcctcctgaggccaggaacgtgcaaatttgcaggtgctgcatcccaagcccctcatgctcctgccttcctgagggccagaggggagccccaggacccattaagccacccccgtgttcctgccgtcagtgccaactgccgcatgtggaagcatctacccgttcactccagtcccaccccacgcctgactcccctctggaaactgcaggccagatggttgctgccacaacttgtgtaccttcagggatggggctcttactccctcctgaggccagctgctctaatatcgatggtcctgcttgccagagagttcctctacccagcaaaaatgagtgtctcagaagtgtgctcctctggcctcagttctcctcttttggaacaacataaaacaaatttaattttctacgcctctggggatatctgctcagccaatggaaaatctgggttcaaccagcccctgccatttcttaagactttctgctccactcacaggatcctgagctgcacttacctgtgagagtcttcaaacttttaaaccttgccagtcaggacttttgctattgcaaatagaaaacccaactcaacctgcttaagcagaaaataaatttattgattcaagtt

SEQ ID NO: 369703 - DNA, 1303 bp, Homo sapiens
gccagccccgagtgtgatttcaatagggggcttggcgtgtagatgtatccctgggcgtttgacaactattcagccaatgtgatggtggacagcaagccagtgaacctggggctgtgggacactgctgggcaggaggactacgaccgtctccggccgctctcctatccacagacggacgtcttcctcatctgcttctccctcgtcagcccagcctcttatgagaacgtccgcgccaagtggttcccagaagtgcggcaccactgccccagcacacccatcatcctggtgggcaccaagctggacctgcgggacgacaaggacaccatcgagaaactgaaggagaagaagctggctcccatcacctacccgcagggcctggcactggccaaggagattgactcggtgaaatacctggagtgctcagctctcacccagagaggcctgaaaaccgtgttcgacgaggccatccgggccgtgctgtgccctcagcccacgcggcagcagaagcgcgcctgcagcctcctctaggggttgcaccccagcgctcccacctagatgggtctgatcctccaggatccccacccaaagcctgatggcaccccggctggccatgctgtcccctccctgtggcgtttcttagcagatggctgcagagcttcgttgatggtcttttctgtactggaggcctcctgaggccaggaacgtgcaaatttgcaggtgctgcatcccaagcccctcatgctcctgccttcctgagggccagaggggagccccaggacccattaagccacccccgtgttcctgccgtcagtgccaactgccgcatgtggaagcatctacccgttcactccagtcccaccccacgcctgactcccctctggaaactgcaggccagatggttgctgccacaacttgtgtaccttcagggatggggctcttactccctcctgaggccagctgctctaatatcgatggtcctgcttgccagagagttcctctacccagcaaaaatgagtgtctcagaagtgtgctcctctggcctcagttctcctcttttggaacaacataaaacaaatttaattttctacgcctctggggatatctgctcagccaatggaaaatctgggttcaaccagcccctgccatttcttaagactttctgctccactcacaggatcctgagctgcacttacctgtgagagtcttcaaacttttaaaccttgccagtcaggacttttgctattgcaaatagaaaacccaactcaacctgcttaagcagaaaataaatttattgattcaagtt

SEQ ID NO: 369704 - DNA, 1580 bp, Homo sapiens
agagggcccccaggtctcctgctggagcctccacgcagggggcctgtggggatggccagggctcagcccagcacctgagcgcccctcccaccagctgctctgccagaccgcatgctccgccccctgcaaacgaccgtggggagagcagcttgagtaagttccccttccgtttcctcctgccccaccaccgctgctcctcagcaggcgcctcaccagcctccacaccccttgcgcccgcagaaacgcgcctggccctgagctgtcaccaccgacactctccaggctccggacacgatgcaggccatcaagtgtgtggtggtgggagatggggccgtgggcaagacctgccttctcatcagctacaccaccaacgcctttcccggagagtacatccccaccgtgtttgacaactattcagccaatgtgatggtggacagcaagccagtgaacctggggctgtgggacactgctgggcaggaggactacgaccgtctccggccgctctcctatccacagacggacgtcttcctcatctgcttctccctcgtcagcccagcctcttatgagaacgtccgcgccaagtggttcccagaagtgcggcaccactgccccagcacacccatcatcctggtgggcaccaagctggacctgcgggacgacaaggacaccatcgagaaactgaaggagaagaagctggctcccatcacctacccgcagggcctggcactggccaaggagattgactcggtgaaatacctggagtgctcagctctcacccagagaggcctgaaaaccgtgttcgacgaggccatccgggccgtgctgtgccctcagcccacgcggcagcagaagcgcgcctgcagcctcctctaggggttgcaccccagcgctcccacctagatgggtctgatcctccaggatccccacccaaagcctgatggcaccccggctggccatgctgtcccctccctgtggcgtttcttagcagatggctgcagagcttcgttgatggtcttttctgtactggaggcctcctgaggccaggaacgtgcaaatttgcaggtgctgcatcccaagcccctcatgctcctgccttcctgagggccagaggggagccccaggacccattaagccacccccgtgttcctgccgtcagtgccaatgcaggccagatggttgctgccacaacttgtgtaccttcagggatggggctcttactccctcctgaggccagctgctctaatatcgatggtcctgcttgccagagagttcctctacccagcaaaaatgagtgtctcagaagtgtgctcctctggcctcagttctcctcttttggaacaacataaaacaaatttaattttctacgcctctggggatatctgctcagccaatggaaaatctgggttcaaccagcccctgccatttcttaagactttctgctccactcacaggatcctgagctgcacttacctgtgagagtcttcaaacttttaaaccttgccagtcaggacttttgctattgcaaatagaaaacccaactcaacctgcttaagcagaaaataaatttattgattcaagtt

SEQ ID NO: 369705 - DNA, 1272 bp, Homo sapiens
agagggcccccaggtctcctgctggagcctccacgcagggggcctgtggggatggccagggctcagcccagcacctgagcgcccctcccaccagctgctctgccagaccgcatgctccgccccctgcaaacgaccgtggggagagcagcttgagtaagttccccttccgtttcctcctgccccaccaccgctgctcctcagcaggcgcctcaccagcctccacaccccttgcgcccgcagaaacgcgcctggccctgagctgtcaccaccgacactctccaggctccggacacgatgcaggccatcaagtgtgtggtggtgggagatggggccgtgggcaagacctgccttctcatcagctacaccaccaacgcctttcccggagagtacatccccaccgtgtttgacaactattcagccaatgtgatggtggacagcaagccagtgaacctggggctgtgggacactgctgggcaggaggactacgaccgtctccggccgctctcctatccacagacggacgtcttcctcatctgcttctccctcgtcagcccagcctcttatgagaacgtccgcgccaagtggttcccagaagtgcggcaccactgccccagcacacccatcatcctggtgggcaccaagctggacctgcgggacgacaaggacaccatcgagaaactgaaggagaagaagctggctcccatcacctacccgcagggcctggcactggccaaggagattgactcggtgaaatacctggagtgctcagctctcacccagagaggcctgaaaaccgtgttcgacgaggccatccgggccgtgctgtgccctcagcccacgcggcagcagaagcgcgcctgcagcctcctctaggggttgcaccccagcgctcccacctagatgggtctgatcctccaggatccccacccaaagcctgatggcaccccggctggccatgctgtcccctccctgtggcgtttcttagcagatggctgcagagcttcgttgatggtcttttctgtactggaggcctcctgaggccaggaacgtgcaaatttgcaggtgctgcatcccaagcccctcatgctcctgccttcctgagggccagaggggagccccaggacccttaagcacccggttctgcgtcgtgcactgcgctgtggagatctaccgtcctcagtccaccagctgattcccttggaaatgggccatgtgcgcccctggtcctcggggggggcttcccctgggcgggccaatgaggcccgcggagcc

SEQ ID NO: 369706 - DNA, 343 bp, Homo sapiens
tcagctcggacccactttcagagtagagagagttcctctacccagcaaaaatgagtgtctcagaagtgtgctcctctggcctcagttctcctcttttggaacaacataaaacaaatttaattttctacgcctctggggatatctgctcagccaatggaaaatctgggttcaaccagcccctgccatttcttaagactttctgctccactcacaggatcctgagctgcacttacctgtgagagtcttcaaacttttaaaccttgccagtcaggacttttgctattgcaaatagaaaacccaactcaacctgcttaagcagaaaataaatttattgattcaagtt

SEQ ID NO: 369707 - DNA, 916 bp, Homo sapiens
agagggcccccaggtctcctgctggagcctccacgcagggggcctgtggggatggccagggctcagcccagcacctgagcgcccctcccaccagctgctctgccagaccgcatgctccgccccctgcaaacgaccgtggggagagcagcttgagtaagttccccttccgtttcctcctgccccaccaccgctgctcctcagcaggcgcctcaccagcctccacaccccttgcgcccgcagaaacgcgcctggccctgagctgtcaccaccgacactctccaggctccggacacgatgcaggccatcaagtgtgtggtggtgggagatggggccgtgggcaagacctgccttctcatcagctacaccaccaacgcctttcccggagagtacatccccaccgtgtttgacaactattcagccaatgtgatggtggacagcaagccagtgaacctggggctgtgggacactgctgggcaggaggactacgaccgtctccggccgctctcctatccacagacggtgtgctgctcccacctgccttgcagtcctgacctttgctgtctctgttccctctgcttgggatgcccttccagccagctcagcctgggaaaccctacctctccccttaaggcccagctcagggagtctgcctgccttgcatgtcccaggcagagaagggcttcctcttgcactccctcagccctgcattggttcccggtcctcaatgtgcccatcttcccaccccattgcctcctgggctctggcaccccctgtttccagtggtggggcaggtggattctgcacagggccccaggaggcagcccagcatggtgagccctgggagtgctgggggaggggagaggtggaggatgcctgcaggtggctgctgggtcctcgcccttcctccagggtatgc

SEQ ID NO: 369708 - DNA, 1648 bp, Homo sapiens
agagggcccccaggtctcctgctggagcctccacgcagggggcctgtggggatggccagggctcagcccagcacctgagcgcccctcccaccagctgctctgccagaccgcatgctccgccccctgcaaacgaccgtggggagagcagcttgagtaagttccccttccgtttcctcctgccccaccaccgctgctcctcagcaggcgcctcaccagcctccacaccccttgcgcccgcagaaacgcgcctggccctgagctgtcaccaccgacactctccaggctccggacacgatgcaggccatcaagtgtgtggtggtgggagatggggccgtgggcaagacctgccttctcatcagctacaccaccaacgcctttcccggagagtacatccccaccgtgtttgacaactattcagccaatgtgatggtggacagcaagccagtgaacctggggctgtgggacactgctgggcaggaggactacgaccgtctccggccgctctcctatccacagacggacgtcttcctcatctgcttctccctcgtcagcccagcctcttatgagaacgtccgcgccaagtggttcccagaagtgcggcaccactgccccagcacacccatcatcctggtgggcaccaagctggacctgcgggacgacaaggacaccatcgagaaactgaaggagaagaagctggctcccatcacctacccgcagggcctggcactggccaaggagattgactcggtgaaatacctggagtgctcagctctcacccagagaggcctgaaaaccgtgttcgacgaggccatccgggccgtgctgtgccctcagcccacgcggcagcagaagcgcgcctgcagcctcctctaggggttgcaccccagcgctcccacctagatgggtctgatcctccaggatccccacccaaagcctgatggcaccccggctggccatgctgtcccctccctgtggcgtttcttagcagatggctgcagagcttcgttgatggtcttttctgtactggaggcctcctgaggccaggaacgtgcaaatttgcaggtgctgcatcccaagcccctcatgctcctgccttcctgagggccagaggggagccccaggacccattaagccacccccgtgttcctgccgtcagtgccaactgccgcatgtggaagcatctacccgttcactccagtcccaccccacgcctgactcccctctggaaactgcaggccagatggttgctgccacaacttgtgtaccttcagggatggggctcttactccctcctgaggccagctgctctaatatcgatggtcctgcttgccagagagttcctctacccagcaaaaatgagtgtctcagaagtgtgctcctctggcctcagttctcctcttttggaacaacataaaacaaatttaattttctacgcctctggggatatctgctcagccaatggaaaatctgggttcaaccagcccctgccatttcttaagactttctgctccactcacaggatcctgagctgcacttacctgtgagagtcttcaaacttttaaaccttgccagtcaggacttttgctattgcaaatagaaaacccaactcaacctgcttaagcagaaaataaatttattgattcaagtt

SEQ ID NO: 369709 - DNA, 1780 bp, Homo sapiens
  misc_feature (1650)..(1650): n is a, c, g, or t
agagggcccccaggtctcctgctggagcctccacgcagggggcctgtggggatggccagggctcagcccagcacctgagcgcccctcccaccagctgctctgccagaccgcatgctccgccccctgcaaacgaccgtggggagagcagcttgagtaagttccccttccgtttcctcctgccccaccaccgctgctcctcagcaggcgcctcaccagcctccacaccccttgcgcccgcagaaacgcgcctggccctgagctgtcaccaccgacactctccaggctccggacacgatgcaggccatcaagtgtgtggtggtgggagatggggccgtgggcaagacctgccttctcatcagctacaccaccaacgcctttcccggagagtacatccccaccgtgtttgacaactattcagccaatgtgatggtggacagcaagccagtgaacctggggctgtgggacactgctgggcaggaggactacgaccgtctccggccgctctcctatccacagacggacgtcttcctcatctgcttctccctcgtcagcccagcctcttatgagaacgtccgcgccaagtggttcccagaagtgcggcaccactgccccagcacacccatcatcctggtgggcaccaagctggacctgcgggacgacaaggacaccatcgagaaactgaaggagaagaagctggctcccatcacctacccgcagggcctggcactggccaaggagattgactcggtgaaatacctggagtgctcagctctcacccagagaggcctgaaaaccgtgttcgacgaggccatccgggccgtgctgtgccctcagcccacgcggcagcagaagcgcgcctgcagcctcctctaggggttgcaccccagcgctcccacctagatgggtctgatcctccaggatccccacccaaagcctgatggcaccccggctggccatgctgtcccctccctgtggcgtttcttagcagatggctgcagagcttcgttgatggtcttttctgtactggaggcctcctgaggccaggaacgtgcaaatttgcaggtgctgcatcccaagcccctcatgctcctgccttcctgagggccagaggggagccccaggacccattaagccacccccgtgttcctgccgtcagtgccaactgccgcatgtggaagcatctacccgttcactccagtcccaccccacgcctgactcccctctggaaactgcaggccagatggttgctgccacaacttgtgtaccttcagggatggggctcttactccctcctgaggccagctgctctaatatcgatggtcctgcttgccagagagttcctctacccagcaaaaatgagtgtctcagaagtgtgctcctctggcctcagttctcctcttttggaacaacataaaacaaatttaattttctacgcctctggggatatctgctcagccaatggaaaatctgggttcaaccagcccctgccatttcttaagactttctgctccactcacaggatcctgagctgcacttacctgtgagagtcttcaaacttttaaaccttgccagtcaggacttttgctattgcaaatagaaaacccaactcaacctgcttaagcagaaaataaatttattgattcaagttcncaaacaacaaatccagcacacatcgaaagcaaacaagaacacaatcacacaacaagggggggggcgccaaaaaaattccccgcggggcgcccatattagccacccccgttttttttaaaagagcgggcca

SEQ ID NO: 369710 - DNA, 1572 bp, Homo sapiens
agagggcccccaggtctcctgctggagcctccacgcagggggcctgtggggatggccagggctcagcccagcacctgagcgcccctcccaccagctgctctgccagaccgcatgctccgccccctgcaaacgaccgtggggagagcagcttgagtaagttccccttccgtttcctcctgccccaccaccgctgctcctcagcaggcgcctcaccagcctccacaccccttgcgcccgcagaaacgcgcctggccctgagctgtcaccaccgacactctccaggctccggacacgatgcaggccatcaagtgtgtggtggtgggagatggggccgtgggcaagacctgccttctcatcagctacaccaccaacgcctttcccggagagtacatccccaccgtgtttgacaactattcagccaatgtgatggtggacagcaagccagtgaacctggggctgtgggacactgctgggcaggaggactacgaccgtctccggccgctctcctatccacagacggacgtcttcctcatctgcttctccctcgtcagcccagcctcttatgagaacgtccgcgccaagtggttcccagaagtgcggcaccactgccccagcacacccatcatcctggtgggcaccaagctggacctgcgggacgacaaggacaccatcgagaaactgaaggagaagaagctggctcccatcacctacccgcagggcctggcactggccaaggagattgactcggtgaaatacctggagtgctcagctctcacccagagaggcctgaaaaccgtgttcgacgaggccatccgggccgtgctgtgccctcagcccacgcggcagcagaagcgcgcctgcagcctcctctaggggttgcaccccagcgctcccacctagatgggtctgatcctccaggatccccacccaaagcctgatggcaccccggctggccatgctgtcccctccctgtggcgtttcttagcagatggctgcagagcttcgttgatggtcttttctgtactggaggcctcctgaggccaggaacccattaagccacccccgtgttcctgccgtcagtgccaactgccgcatgtggaagcatctacccgttcactccagtcccaccccacgcctgactcccctctggaaactgcaggccagatggttgctgccacaacttgtgtaccttcagggatggggctcttactccctcctgaggccagctgctctaatatcgatggtcctgcttgccagagagttcctctacccagcaaaaatgagtgtctcagaagtgtgctcctctggcctcagttctcctcttttggaacaacataaaacaaatttaattttctacgcctctggggatatctgctcagccaatggaaaatctgggttcaaccagcccctgccatttcttaagactttctgctccactcacaggatcctgagctgcacttacctgtgagagtcttcaaacttttaaaccttgccagtcaggacttttgctattgcaaatagaaaacccaactcaacctgcttaagcagaaaataaatttattgattcaagtt

SEQ ID NO: 369711 - DNA, 1180 bp, Homo sapiens
tggcaacttgctgcctctcctctccctacaccctcacactccctctgatccccgcacagcctcgcgccccctcttgacccatacaaccttgtgtccccccacccacctgcccagtggttcccagaagtgcggcaccactgccccagcacacccatcatcctggtgggcaccaagctggacctgcgggacgacaaggacaccatcgagaaactgaaggagaagaagctggctcccatcacctacccgcagggcctggcactggccaaggagattgactcggtgaaatacctggagtgctcagctctcacccagagaggcctgaaaaccgtgttcgacgaggccatccgggccgtgctgtgccctcagcccacgcggcagcagaagcgcgcctgcagcctcctctaggggttgcaccccagcgctcccacctagatgggtctgatcctccaggatccccacccaaagcctgatggcaccccggctggccatgctgtcccctccctgtggcgtttcttagcagatggctgcagagcttcgttgatggtcttttctgtactggaggcctcctgaggccaggaacgtgcaaatttgcaggtgctgcatcccaagcccctcatgctcctgccttcctgagggccagaggggagccccaggacccattaagccacccccgtgttcctgccgtcagtgccaactgccgcatgtggaagcatctacccgttcactccagtcccaccccacgcctgactcccctctggaaactgcaggccagatggttgctgccacaacttgtgtaccttcagggatggggctcttactccctcctgaggccagctgctctaatatcgatggtcctgcttgccagagagttcctctacccagcaaaaatgagtgtctcagaagtgtgctcctctggcctcagttctcctcttttggaacaacataaaacaaatttaattttctacgcctctggggatatctgctcagccaatggaaaatctgggttcaaccagcccctgccatttcttaagactttctgctccactcacaggatcctgagctgcacttacctgtgagagtcttcaaacttttaaaccttgccagtcaggacttttgctattgcaaatagaaaacccaactcaacctgcttaagcagaaaataaatttattgattcaagtt

SEQ ID NO: 369712 - DNA, 1087 bp, Homo sapiens
agagggcccccaggtctcctgctggagcctccacgcagggggcctgtggggatggccagggctcagcccagcacctgagcgcccctcccaccagctgctctgccagaccgcatgctccgccccctgcaaacgaccgtggggagagcagcttgagtaagttccccttccgtttcctcctgccccaccaccgctgctcctcagcaggcgcctcaccagcctccacaccccttgcgcccgcagaaacgcgcctggccctgagctgtcaccaccgacactctccaggctccggacacgatgcaggccatcaagtgtgtggtggtgggagatggggccgtgggcaagacctgccttctcatcagctacaccaccaacgcctttcccggagagtacatccccaccgtgtttgacaactattcagccaatgtgatggtggacagcaagccagtgaacctggggctgtgggacactgctgggcaggaggactacgaccgtctccggccgctctcctatccacagacggacgtcttcctcatctgcttctccctcgtcagcccagcctcttatgagaacgtccgcgccaagtggttcccagaagtgcggcaccactgccccagcacacccatcatcctggtgggcaccaagctggacctgcgggacgacaaggacaccatcgagaaactgaaggagaagaagctggctcccatcacctacccgcagggcctggcactggccaaggagattgactcggtgaaatacctggagtgctcagctctcacccagagaggcctgaaaaccgtgttcgacgaggccatccgggccgtgctgtgccctcagcccacgcggcagcagaagcgcgcctgcagcctcctctaggggttgcaccccagcgctcccacctagatgggtctgatccgccgccgccccaggcccgcgggctgctgacagagatacgcgccgtggtgcgcacggagcccttcacgggacgctacagcctgtgccgggccgggagctgggcagggggaaattagcagtggtgagaaaatgtataaagatagattctgggaaagaatttgctgcaaagttcatg

SEQ ID NO: 369713 - DNA, 2336 bp, Homo sapiens
cgcccttctgacccaccccgctaggtagtcccacacggcggccctcggctcccgggccccgccccggcctcctgcatttgcccgaggccccctccccagcactggccacaccccagggtagccccgcccccagagctcctcccccagcggccggggtagggtggcggctggcccagccgggcccccgctgccctctgccctgggcgcttggtcggagcgggctgggcaaagcgggacagggcgagcgcggcggcccgggggctcggaggcgaagatggcgtccggcaggcgcgccccgcgcaccgggctgctggagctgcgcgccggggcgggctcgggggccggcggcgagcgatggcagcgggtgctgctgagtctggcggaggacgtgctgaccgtgagccccgccgacggcgaccctggtcccgagcccggcgctccgcgggagcaggagcccgcgcagctcaacggcgccgcggagccgggcgccgggcccccgcagctgccagaggcgctactgctccagcggcgccgcgtgacggtgcgcaaggccgacgccggtgggctgggcatcagcatcaaaggcggccgggagaacaagatgcctattctcatttccaagatcttcaagggattggcagctgaccagacagaggccctttttgtgggggatgccatcctgtctgtgaatggggaagacttgtcctctgctacccatgatgaggcggtgcaggtcctcaagaagacaggcaaggaggtggtgctggaggtcaagtatatgaaggacgtctcaccgtatttcaagaactctactggtgggacctcggtcggctgggactcacctcctgcctcaccccttcagcggcagccttcctcccctggccccacaccccggaacttcagcgaggccaaacacatgtccttgaagatggcatatgtctcgaagaggtgcacccccaatgacccggagcccaggtatctggagatctgctcggcagatggtcaagacaccctcttcctgagggccaaggatgaggctagtgcgaggtcgtgggcgactgccatccaagcccaggtcaatactctgacgccgcgggtcaaggatgagctgcaggcactgttggcagccaccagcacagctgggagccaggacatcaagcagattggctggctaactgagcagctgcccagtgggggcacagcccccaccctggccctgctaactgaaaaggaactgctcctctacttgtctctccccgagacccgcgaggccctgagccggccagcccgtactgccccactcatcgccaccagactggtgcactcaggcccctccaagggctcagtgccctacgatgcagagctctcttttgccctgcgcacgggcacgcgtcacggtgtggacactcacctgttcagcgtggagtcaccgcaggagctggctgcctggacccgccagcttgtggatggctgtcaccgggccgccgagggtgtgcaggaggtgtctacagcctgcacgtggaatgggcgtccctgcagcctgtctgtgcacatcgacaagggcttcacactgtgggcggctgagccaggtgcagcccgagctgtgctcctgcgacagcccttcgagaagctgcagatgtcttcagatgacggtgccagtctccttttcctggattttggaggtgctgaaggcgagatccagctggacctgcactcgtgtcccaaaaccatagtcttcatcatccactccttcctgtcggccaaagtcacccgcctcgggctgttggcctagaagtcgccggatgcactagccctgaagaggggtgtccatgacatggcctgagctgggcctccaccgactgcctgctcacccctgggctgagggaagggagaggagaggaacaagggcctccgaaaccccaaccctgagggagactggattggtcttggggcccaggacccagacgcaggacagagtggactctgcctgtgatggggtggccttcctgctgcccccctccaccagtgccttttgcagagagatattttgtgtacacagaagccattccgagtctgggacctgcccctgtgcggatcctgaccccagccaacagctgagctgccgggcctcctcgaggcccctaagccacccccagaggtcccatctgaagctggagtaccctggggtcagcagcaagagaaagaagaggagattttctgtttgtttttcccctcagccctgccaccgtggggagtctggtttttctcttcatcctgtctctctcctccttactcttggataaataaacagcctgtgagcacacaggcagcccggc

SEQ ID NO: 369714 - DNA, 1004 bp, Homo sapiens
  misc_feature (513)..(513): n is a, c, g, or t
  misc_feature (851)..(851): n is a, c, g, or t
cgcccttctgacccaccccgctaggtagtcccacacggcggccctcggctcccgggccccgccccggcctcctgcatttgcccgaggccccctccccagcactggccacaccccagggtagccccgcccccagagctcctcccccagcggccggggtagggtggcggctggcccagccgggcccccgctgccctctgccctgggcgcttggtcggagcgggctgggcaaagcgggacagggcgagcgcggcggcccgggggctcggaggcgaagatggcgtccggcaggcgcgccccgcgcaccgggctgctggagctgcgcgccggggcgggctcgggggccggcggcgagcgatggcagcgggtgctgctgagtctggcggaggacgtgctgaccgtgagccccgccgacggcgaccctggtcccgagcccggcgctccgcgggagcaggagcccgcgcagctcaacggcgccgcggactcagagcggccaatcccgcgcgtagcaatgantaggcgctgacaactgccatcaagcgcgcacttaatcgaagactgcgatgatcaacggcgaaaatgctaaagagacatgcgacgatcaaccggggcaataatgagatggaacgacgcaagaacgatcagaagccgattcaggtgacaaaataaaattggggcggaccagagcagaaatccctaatcaacatgatggaaggtggcactatacaaaaatgaaattgaattaatcggatgccacagttaactccgaatacagtgtatttgatcggttactcactaccagaatacatgccgagaagttaagggctgacaggtcacaaaagggttgaacgtgnacgcgctcggactcaccgctaatcgcaagccggggatttagccgctatcctggcgaatactcatgcgatcgatccaaaccccagtctcgactggcatgccgctccagactccagtatcccagttgtagccgcaaactgagcacgattgcaggc

SEQ ID NO: 369715 - DNA, 2871 bp, Homo sapiens
cgcccttctgacccaccccgctaggtagtcccacacggcggccctcggctcccgggccccgccccggcctcctgcatttgcccgaggccccctccccagcactggccacaccccagggtagccccgcccccagagctcctcccccagcggccggggtagggtggcggctggcccagccgggcccccgctgccctctgccctgggcgcttggtcggagcgggctgggcaaagcgggacagggcgagcgcggcggcccgggggctcggaggcgaagatggcgtccggcaggcgcgccccgcgcaccgggctgctggagctgcgcgccggggcgggctcgggggccggcggcgagcgatggcagcgggtgctgctgagtctggcggaggacgtgctgaccgtgagccccgccgacggcgaccctggtcccgagcccggcgctccgcgggagcaggagcccgcgcagctcaacggcgccgcggagccgggcgccgggcccccgcagctgccagaggcgctactgctccagcggcgccgcgtgacggtgcgcaaggccgacgccggtgggctgggcatcagcatcaaaggcggccgggagaacaagatgcctattctcatttccaagatcttcaagggattggcagctgaccagacagaggccctttttgtgggggatgccatcctgtctgtgaatggggaagacttgtcctctgctacccatgatgaggcggtgcaggtcctcaagaagacaggcaaggaggtggtgctggaggtcaagtatatgaaggacgtctcaccgtatttcaagaactctactggtgggacctcggtcggctgggactcacctcctgcctcaccccttcagcggcagccttcctcccctggccccacaccccggaacttcagcgaggccaaacacatgtccttgaagatggcatatgtctcgaagaggtgcacccccaatgacccggagcccaggtatctggagatctgctcggcagatggtcaagacaccctcttcctgagggccaaggatgaggctagtgcgaggtcgtgggcgactgccatccaagcccaggtcaatactctgacgccgcgggtcaaggatgagctgcaggcactgttggcagccaccagcacagctgggagccaggacatcaagcagattggctggctaactgagcagctgcccagtgggggcacagcccccaccctggccctgctaactgaaaaggaactgctcctctacttgtctctccccgagacccgcgaggccctgagccggccagcccgtactgccccactcatcgccaccagactggtgcactcaggcccctccaagggctcagtgccctacgatgcagagctctcttttgccctgcgcacgggcacgcgtcacggtgtggacactcacctgttcagcgtggagtcaccgcaggagctggctgcctggacccgccagcttgtggatggctgtcaccgggccgccgagggtgtgcaggaggtgtctacagcctgcacgtggaatgggcgtccctgcagcctgtctgtgcacatcgacaagggcttcacactgtgggcggctgagccaggtgcagcccgagctgtgctcctgcgacagcccttcgagaagctgcagatgtcttcagatgacggtgccagtctccttttcctggattttggaggtgctgaaggcgagatccagctggacctgcactcgtgtcccaaaaccatagtcttcatcatccactccttcctgtcggccaaagtcacccgcctcgggctgttggcctagaagtcgccggatgcactagccctgaagaggggtgtccatgacatggcctgagctgggcctccaccgactgcctgctcacccctgggctgagggaagggagaggagaggaacaagggcctccgaaaccccaaccctgagggagactggattggtcttggggcccaggacccagacgcaggacagagtggactctgcctgtgatggggtggccttcctgctgcccccctccaccagtgccttttgcagagagatattttgtgtacacagaagccattccgagtctgggacctgcccctgtgcggatcctgaccccagccaacagctgagctgccgggcctcctcgaggcccctaagccacccccagaggtcccatctgaagctggagtaccctggggtcagcagcaagagaaagaagaggagattttctgtttgtttttcccctcagccctgccaccgtggggagtctggtttttctcttcatcctgtctctctcctccttactcttggataaataaacagcctgtgagcacacaggcagcccggcccagtgtatgtggtctgtgccttggcctttgggtcctggggtggcccctgcagtcccaagatggaccagaccaaggactagggcacctttccctggagaagaacagacctttactacatgggccaaagacagtgtattggttatctattgttgtgtgacaaattatccaaaatttgcagcttaaaatgacaaatattcattatctcttaggttctgtgggtcagaaatttgagaggggctaagctgggctgttcttgtctcagggtcgctcatgaggttgcagtcaagttgtcggctagggctgcagtcatctgaaggcttgactggggctggaggatccattccaatactgctcatgcacatggctgtgggtaggaggtctcagttcctcaccatgtagggctaaccctagagctgctgcttgagttttctcatgatatggcagttggctttccccacagtgagacagaagagagggcaaggaggaagccacaaacagtgcctcttatgacccggtcttggaagccttacactg

SEQ ID NO: 369716 - DNA, 2368 bp, Homo sapiens
cgcccttctgacccaccccgctaggtagtcccacacggcggccctcggctcccgggccccgccccggcctcctgcatttgcccgaggccccctccccagcactggccacaccccagggtagccccgcccccagagctcctcccccagcggccggggtagggtggcggctggcccagccgggcccccgctgccctctgccctgggcgcttggtcggagcgggctgggcaaagcgggacagggcgagcgcggcggcccgggggctcggaggcgaagatggcgtccggcaggcgcgccccgcgcaccgggctgctggagctgcgcgccggggcgggctcgggggccggcggcgagcgatggcagcgggtgctgctgagtctggcggaggacgtgctgaccgtgagccccgccgacggcgaccctggtcccgagcccggcgctccgcgggagcaggagcccgcgcagctcaacggcgccgcggagccgggcgccgggcccccgcagctgccagaggcgctactgctccagcggcgccgcgtgacggtgcgcaaggccgacgccggtgggctgggcatcagcatcaaaggcggccgggagaacaagatgcctattctcatttccaagatcttcaagggattggcagctgaccagacagaggccctttttgtgggggatgccatcctgtctgtgaatggggaagacttgtcctctgctacccatgatgaggcggtgcaggtcctcaagaagacaggcaaggaggtggtgctggaggtcaagtatatgaaggacgtctcaccgtatttcaagaactctactggtgggacctcggtcggctgggactcacctcctgcctcaccccttcagcggcagccttcctcccctggccccacaccccggaacttcagcgaggccaaacacatgtccttgaagatggcatatgtctcgaagaggtgcacccccaatgacccggagcccaggtatctggagatctgctcggcagatggtcaagacaccctcttcctgagggccaaggatgaggctagtgcgaggtcgtgggcgactgccatccaagcccaggtcaatactctgacgccgcgggtcaaggatgagctgcaggcactgttggcagccaccagcacagctgggagccaggacatcaagcagattggctggctaactgagcagctgcccagtgggggcacagcccccaccctggccctgctaactgaaaaggaactgctcctctacttgtctctccccgagacccgcgaggccctgagccggccagcccgtactgccccactcatcgccaccagactggtgcactcaggcccctccaagggctcagtgccctacgatgcagagctctcttttgccctgcgcacgggcacgcgtcacggtgtggacactcacctgttcagcgtggagtcaccgcaggagctggctgcctggacccgccagcttgtggatggctgtcaccgggccgccgagggtgtgcaggaggtgtctacaggtgtgctgggaggatctgggagtgtccctctgcctgcacgtggaatgggcgtccctgcagcctgtctgtgcacatcgacaagggcttcacactgtgggcggctgagccaggtgcagcccgagctgtgctcctgcgacagcccttcgagaagctgcagatgtcttcagatgacggtgccagtctccttttcctggattttggaggtgctgaaggcgagatccagctggacctgcactcgtgtcccaaaaccatagtcttcatcatccactccttcctgtcggccaaagtcacccgcctcgggctgttggcctagaagtcgccggatgcactagccctgaagaggggtgtccatgacatggcctgagctgggcctccaccgactgcctgctcacccctgggctgagggaagggagaggagaggaacaagggcctccgaaaccccaaccctgagggagactggattggtcttggggcccaggacccagacgcaggacagagtggactctgcctgtgatggggtggccttcctgctgcccccctccaccagtgccttttgcagagagatattttgtgtacacagaagccattccgagtctgggacctgcccctgtgcggatcctgaccccagccaacagctgagctgccgggcctcctcgaggcccctaagccacccccagaggtcccatctgaagctggagtaccctggggtcagcagcaagagaaagaagaggagattttctgtttgtttttcccctcagccctgccaccgtggggagtctggtttttctcttcatcctgtctctctcctccttactcttggataaataaacagcctgtgagcacacaggcagcccggc

SEQ ID NO: 369717 - DNA, 2289 bp, Homo sapiens
cgcccttctgacccaccccgctaggtagtcccacacggcggccctcggctcccgggccccgccccggcctcctgcatttgcccgaggccccctccccagcactggccacaccccagggtagccccgcccccagagctcctcccccagcggccggggtagggtggcggctggcccagccgggcccccgctgccctctgccctgggcgcttggtcggagcgggctgggcaaagcgggacagggcgagcgcggcggcccgggggctcggaggcgaagatggcgtccggcaggcgcgccccgcgcaccgggctgctggagctgcgcgccggggcgggctcgggggccggcggcgagcgatggcagcgggtgctgctgagtctggcggaggacgtgctgaccgtgagccccgccgacggcgaccctggtcccgagcccggcgctccgcgggagcaggagcccgcgcagctcaacggcgccgcggagccgggcgccgggcccccgcagctgccagaggcgctactgctccagcggcgccgcgtgacggtgcgcaaggccgacgccggtgggctgggcatcagcatcaaaggcggccgggagaacaagatgcctattctcatttccaagatcttcaagggattggcagctgaccagacagaggccctttttgtgggggatgccatcctgtctgtgaatggggaagacttgtcctctgctacccatgatgaggcggtgcaggtcctcaagaagacaggcaaggaggtggtgctggaggtcaagtatatgaaggacgtctcaccgtatttcaagaactctactggtgggacctcggtcggctgggactcacctcctgcctcaccccttcagcggcagccttcctcccctggccccacaccccggaacttcagcgaggccaaacacatgtccttgaagatggcatatgtctcgaagaggtgcacccccaatgacccggagcccaggtatctggagatctgctcggcagatggtcaagacaccctcttcctgagggccaaggatgaggctagtgcgaggtcgtgggcgactgccatccaagcccaggtcaatactctgacgccgcgggtcaaggatgagctgcaggcactgttggcagccaccagcacagctgggagccaggacatcaagcagattggctggctaactgagcagctgcccagtgggggcacagcccccaccctggccctgctaactgaaaaggaactgctcctctacttgtctctccccgagacccgcgaggccctgagccggccagcccgtactgccccactcatcgccaccagactggtgcactcaggcccctccaagggctcagtgccctacgatgcagagctctcttttgccctgcgcacgggcacgcgtcacggtgtggacactcacctgttcagcgtggagtcaccgcaggagctggctgcctggacccgccagcttgtggatggctgtcaccgggccgccgagggtgtgcaggaggtgtctacagcctgcacgtggaatgggcgtccctgcagcctgtctgtcccgagctgtgctcctgcgacagcccttcgagaagctgcagatgtcttcagatgacggtgccagtctccttttcctggattttggaggtgctgaaggcgagatccagctggacctgcactcgtgtcccaaaaccatagtcttcatcatccactccttcctgtcggccaaagtcacccgcctcgggctgttggcctagaagtcgccggatgcactagccctgaagaggggtgtccatgacatggcctgagctgggcctccaccgactgcctgctcacccctgggctgagggaagggagaggagaggaacaagggcctccgaaaccccaaccctgagggagactggattggtcttggggcccaggacccagacgcaggacagagtggactctgcctgtgatggggtggccttcctgctgcccccctccaccagtgccttttgcagagagatattttgtgtacacagaagccattccgagtctgggacctgcccctgtgcggatcctgaccccagccaacagctgagctgccgggcctcctcgaggcccctaagccacccccagaggtcccatctgaagctggagtaccctggggtcagcagcaagagaaagaagaggagattttctgtttgtttttcccctcagccctgccaccgtggggagtctggtttttctcttcatcctgtctctctcctccttactcttggataaataaacagcctgtgagcacacaggcagcccggc

SEQ ID NO: 369718 - DNA, 1049 bp, Homo sapiens
aaccttacggcttaggtacgaggcctgactggtgcactcaggcccctccaagggctcagtgccctacgatgcagagctctcttttgccctgcgcacgggcacgcgtcacggtgtggacactcacctgttcagcgtggagtcaccgcaggagctggctgcctggacccgccagcttgtggatggctgtcaccgggccgccgagggtgtgcaggaggtgtctacagcctgcacgtggaatgggcgtccctgcagcctgtctgtgcacatcgacaagggcttcacactgtgggcggctgagccaggtgcagcccgagctgtgctcctgcgacagcccttcgagaagctgcagatgtcttcagatgacggtgccagtctccttttcctggattttggaggtgctgaaggcgagatccagctggacctgcactcgtgtcccaaaaccatagtcttcatcatccactccttcctgtcggccaaagtcacccgcctcgggctgttggcctagaagtcgccggatgcactagccctgaagaggggtgtccatgacatggcctgagctgggcctccaccgactgcctgctcacccctgggctgagggaagggagaggagaggaacaagggcctccgaaaccccaaccctgagggagactggattggtcttggggcccaggacccagacgcaggacagagtggactctgcctgtgatggggtggccttcctgctgcccccctccaccagtgccttttgcagagagatattttgtgtacacagaagccattccgagtctgggacctgcccctgtgcggatcctgaccccagccaacagctgagctgccgggcctcctcgaggcccctaagccacccccagaggtcccatctgaagctggagtaccctggggtcagcagcaagagaaagaagaggagattttctgtttgtttttcccctcagccctgccaccgtggggagtctggtttttctcttcatcctgtctctctcctccttactcttggataaataaacagcctgtgagcacacaggcagcccggc

SEQ ID NO: 369719 - DNA, 1322 bp, Homo sapiens
tgagccgtgcagataatcagggaagcatgtataggcagagggaagagcatatgcaaaggtgctgaggcaggcatgtgctaggtgtgtgtgatgacaccagtatagccagagccaagggagtgacggggagggtggcaggagatgtctcctgctgagtcaatcagtgccccctggcaagtcctgtcctgttaggtggtaaaggatttacagggtttcttcccaggtcactggcccctttgcccagaactatttgcctccggcctgaggcctcatgctcagccctctgcccccaacccccagactggtgcactcaggcccctccaagggctcagtgccctacgatgcagagctctcttttgccctgcgcacgggcacgcgtcacggtgtggacactcacctgttcagcgtggagtcaccgcaggagctggctgcctggacccgccagcttgtggatggctgtcaccgggccgccgagggtgtgcaggaggtgtctacagcctgcacgtggaatgggcgtccctgcagcctgtctgtgcacatcgacaagggcttcacactgtgggcggctgagccaggtgcagcccgagctgtgctcctgcgacagcccttcgagaagctgcagatgtcttcagatgacggtgccagtctccttttcctggattttggaggtgctgaaggcgagatccagctggacctgcactcgtgtcccaaaaccatagtcttcatcatccactccttcctgtcggccaaagtcacccgcctcgggctgttggcctagaagtcgccggatgcactagccctgaagaggggtgtccatgacatggcctgagctgggcctccaccgactgcctgctcacccctgggctgagggaagggagaggagaggaacaagggcctccgaaaccccaaccctgagggagactggattggtcttggggcccaggacccagacgcaggacagagtggactctgcctgtgatggggtggccttcctgctgcccccctccaccagtgccttttgcagagagatattttgtgtacacagaagccattccgagtctgggacctgcccctgtgcggatcctgaccccagccaacagctgagctgccgggcctcctcgaggcccctaagccacccccagaggtcccatctgaagctggagtaccctggggtcagcagcaagagaaagaagaggagattttctgtttgtttttcccctcagccctgccaccgtggggagtctggtttttctcttcatcctgtctctctcctccttactcttggataaataaacagcctgtgagcacacaggcagcccggc

SEQ ID NO: 369720 - DNA, 304 bp, Homo sapiens
gctccccctttctacttgtgctgctggaagtgggactggaagtgggtgtaggtcctctgagggtgggggtgatgactctctgcagggtgggtgtactggtgccacgacaaacagtgagcctcccatccctggaggcattcaggccccactttgtaagctgcggtgggggttggaggttggggtgtagtctctgaggtgccagctgtgcctgtacctatgtgccctccctgcagcctgcacgtggaatgggcgtccctgcagcctgtctgtgcacatcgacaagggcttcacactgtgggcggct

SEQ ID NO: 369721 - DNA, 2592 bp, Homo sapiens
cgcccttctgacccaccccgctaggtagtcccacacggcggccctcggctcccgggccccgccccggcctcctgcatttgcccgaggccccctccccagcactggccacaccccagggtagccccgcccccagagctcctcccccagcggccggggtagggtggcggctggcccagccgggcccccgctgccctctgccctgggcgcttggtcggagcgggctgggcaaagcgggacagggcgagcgcggcggcccgggggctcggaggcgaagatggcgtccggcaggcgcgccccgcgcaccgggctgctggagctgcgcgccggggcgggctcgggggccggcggcgagcgatggcagcgggtgctgctgagtctggcggaggacgtgctgaccgtgagccccgccgacggcgaccctggtcccgagcccggcgctccgcgggagcaggagcccgcgcagctcaacggcgccgcggagccgggcgccgggcccccgcagctgccagaggcgctactgctccagcggcgccgcgtgacggtgcgcaaggccgacgccggtgggctgggcatcagcatcaaaggcggccgggagaacaagatgcctattctcatttccaagatcttcaagggattggcagctgaccagacagaggccctttttgtgggggatgccatcctgtctgtgaatggggaagacttgtcctctgctacccatgatgaggcggtgcaggtcctcaagaagacaggcaaggaggtggtgctggaggtcaagtatatgaaggacgtctcaccgtatttcaagaactctactggtgggacctcggtcggctgggactcacctcctgcctcaccccttcagcggcagccttcctcccctggccccacaccccggaacttcagcgaggccaaacacatgtccttgaagatggcatatgtctcgaagaggtgcacccccaatgacccggagcccaggtatctggagatctgctcggcagatggtcaagacaccctcttcctgagggccaaggatgaggctagtgcgaggtcgtgggcgactgccatccaagcccaggtcaatactctgacgccgcgggtcaaggatgagctgcaggcactgttggcagccaccagcacagctgggagccaggacatcaagcagattggctggctaactgagcagctgcccagtgggggcacagcccccaccctggccctgctaactgaaaaggaactgctcctctacttgtctctccccgagacccgcgaggccctgagccggccagcccgtactgccccactcatcgccaccagactggtgcactcaggcccctccaagggctcagtgccctacgatgcagagctctcttttgccctgcgcacgggcacgcgtcacggtgtggacactcacctgttcagcgtggagtcaccgcaggagctggctgcctggacccgccagcttgtggatggctgtcaccgggccgccgagggtgtgcaggaggtgtctacagcctgcacgtggaatgggcgtccctgcagcctgtctgtgcacatcgacaagggcttcacactgtgggcggctgagccaggtgcagcccgagctgtgctcctgcgacagcccttcgagaagctgcagatgtcttcagatgacggtgccagtctccttttcctggattttggaggtgctgaaggcgagatccagctggacctgcactcgtgtcccaaaaccatagtcttcatcatccactccttcctgtcggccaaagtcacccgcctcgggctgttggcctagaagtcgccggatgcactagccctgaagaggggtgtccatgacatggcctgagctgggcctccaccgactgcctgctcacccctgggctgagggaagggagaggagaggaacaagggcctccgaaaccccaaccctgagggagactggattggtcttggggcccaggacccagacgcaggacagagtggactctgcctgtgatggggtggccttcctgctgcccccctccaccagtgccttttgcagagagatattttgtgtacacagaagccattccgagtctgggacctgcccctgtgcggatcctgaccccagccaacagctgagctgccgggcctcctcgaggcccctaagccacccccagaggtcccatctgaagctggagtaccctggggtcagcagcaagagaaagaagaggagattttctgtttgtttttcccctcagccctgccaccgtggggagtctggtttttctcttcatcctgtctctctcctccttactcttggataaataaacagcctgtgagcacacaggcagcccggcaacaaatcaccgagcgccacgacagaaaggacgcattacctcacgcactcgcagagaaccacacaaaagagcggccggcgactagcgacgacagcgagcgcacaattcaccgacacaccatagtatagccagagcgccccagagagagggaaaaaagaaaacagcgcacataaaaaggtgcagtggaaaacaaaggcatcggaaagcccccttggcgggactgcgacacacagaacgccgcgctacccgatgacgg

SEQ ID NO: 369722 - DNA, 1448 bp, Homo sapiens
  misc_feature (68)..(68): n is a, c, g, or t
  misc_feature (73)..(73): n is a, c, g, or t
caacaaaaacaaccacaccacaaaccaagctattgaaactatcggctaggtcgaggccgcgttgttantcggncgaggcggagccaggtatctggagatctgctcggcagatggtcaagacaccctcttcctgagggccaaggatgaggctagtgcgaggtcgtgggcgactgccatccaagcccaggtcaatactctgacgccgcgggtcaaggatgagctgcaggcactgttggcagccaccagcacagctgggagccaggacatcaagcagattggctggctaactgagcagctgcccagtgggggcacagcccccaccctggccctgctaactgaaaaggaactgctcctctacttgtctctccccgagacccgcgaggccctgagccggccagcccgtactgccccactcatcgccaccagactggtgcactcaggcccctccaagggctcagtgccctacgatgcagagctctcttttgccctgcgcacgggcacgcgtcacggtgtggacactcacctgttcagcgtggagtcaccgcaggagctggctgcctggacccgccagcttgtggatggctgtcaccgggccgccgagggtgtgcaggaggtgtctacagcctgcacgtggaatgggcgtccctgcagcctgtctgtgcacatcgacaagggcttcacactgtgggcggctgagccaggtgcagcccgagctgtgctcctgcgacagcccttcgagaagctgcagatgtcttcagatgacggtgccagtctccttttcctggattttggaggtgctgaaggcgagatccagctggacctgcactcgtgtcccaaaaccatagtcttcatcatccactccttcctgtcggccaaagtcacccgcctcgggctgttggcctagaagtcgccggatgcactagccctgaagaggggtgtccatgacatggcctgagctgggcctccaccgactgcctgctcacccctgggctgagggaagggagaggagaggaacaagggcctccgaaaccccaaccctgagggagactggattggtcttggggcccaggacccagacgcaggacagagtggactctgcctgtgatggggtggccttcctgctgcccccctccaccagtgccttttgcagagagatattttgtgtacacagaagccattccgagtctgggacctgcccctgtgcggatcctgaccccagccaacagctgagctgccgggcctcctcgaggcccctaagccacccccagaggtcccatctgaagctggagtaccctggggtcagcagcaagagaaagaagaggagattttctgtttgtttttcccctcagccctgccaccgtggggagtctggtttttctcttcatcctgtctctctcctccttactcttggataaataaacagcctgtgagcacacaggcagcccggc

SEQ ID NO: 369723 - DNA, 2249 bp, Homo sapiens
cgcccttctgacccaccccgctaggtagtcccacacggcggccctcggctcccgggccccgccccggcctcctgcatttgcccgaggccccctccccagcactggccacaccccagggtagccccgcccccagagctcctcccccagcggccggggtagggtggcggctggcccagccgggcccccgctgccctctgccctgggcgcttggtcggagcgggctgggcaaagcgggacagggcgagcgcggcggcccgggggctcggaggcgaagatggcgtccggcaggcgcgccccgcgcaccgggctgctggagctgcgcgccggggcgggctcgggggccggcggcgagcgatggcagcgggtgctgctgagtctggcggaggacgtgctgaccgtgagccccgccgacggcgaccctggtcccgagcccggcgctccgcgggagcaggagcccgcgcagctcaacggcgccgcggagccgggcgccgggcccccgcagctgccagaggcgctactgctccagcggcgccgcgtgacggtgcgcaaggccgacgccggtgggctgggcatcagcatcaaaggcggccgggagaacaagatgcctattctcatttccaagatcttcaagggattggcagctgaccagacagaggccctttttgtgggggatgccatcctgtctgtgaatggggaagacttgtcctctgctacccatgatgaggcggtgcaggtcctcaagaagacaggcaaggaggtggtgctggaggtcaagtatatgaaggacgtctcaccgtatttcaagaactctactggtgggacctcggtcggctgggactcacctcctgcctcaccccttcagcggcagccttcctcccctggccccacaccccggaacttcagcgaggccaaacacatgtccttgaagatggcatatgtctcgaagaggtgcacccccaatgacccggagcccaggtatctggagatctgctcggcagatggtcaagacaccctcttcctgagggccaaggatgaggctagtgcgaggtcgtgggcgactgccatccaagcccaggtcaatactctgacgccgcgggtcaaggatgagctgcaggcactgttggcagccaccagcacagctgggagccaggacatcaagcagattggctggctaactgagcagctgcccagtgggggcacagcccccaccctggccctgctaactgaaaaggaactgctcctctacttgtctctccccgagacccgcgaggccctgagccggccagcccgtactgccccactcatcgccaccaggtacccacaggcaggggcagtatgtctcccccagaacttgccaggagatgctccagcagggccccagaagctgggaactccagccctgtccaccctcagctattccccagcctgcacgtggaatgggcgtccctgcagcctgtctgtgcacatcgacaagggcttcacactgtgggcggctgagccaggtgcagcccgagctgtgctcctgcgacagcccttcgagaagctgcagatgtcttcagatgacggtgccagtctccttttcctggattttggaggtgctgaaggcgagatccagctggacctgcactcgtgtcccaaaaccatagtcttcatcatccactccttcctgtcggccaaagtcacccgcctcgggctgttggcctagaagtcgccggatgcactagccctgaagaggggtgtccatgacatggcctgagctgggcctccaccgactgcctgctcacccctgggctgagggaagggagaggagaggaacaagggcctccgaaaccccaaccctgagggagactggattggtcttggggcccaggacccagacgcaggacagagtggactctgcctgtgatggggtggccttcctgctgcccccctccaccagtgccttttgcagagagatattttgtgtacacagaagccattccgagtctgggacctgcccctgtgcggatcctgaccccagccaacagctgagctgccgggcctcctcgaggcccctaagccacccccagaggtcccatctgaagctggagtaccctggggtcagcagcaagagaaagaagaggagattttctgtttgtttttcccctcagccctgccaccgtggggagtctggtttttctcttcatcctgtctctctcctccttactcttggataaataaacagcctgtgagcacacaggcagcccggc

SEQ ID NO: 369724 - DNA, 2133 bp, Homo sapiens
cgcccttctgacccaccccgctaggtagtcccacacggcggccctcggctcccgggccccgccccggcctcctgcatttgcccgaggccccctccccagcactggccacaccccagggtagccccgcccccagagctcctcccccagcggccggggtagggtggcggctggcccagccgggcccccgctgccctctgccctgggcgcttggtcggagcgggctgggcaaagcgggacagggcgagcgcggcggcccgggggctcggaggcgaagatggcgtccggcaggcgcgccccgcgcaccgggctgctggagctgcgcgccggggcgggctcgggggccggcggcgagcgatggcagcgggtgctgctgagtctggcggaggacgtgctgaccgtgagccccgccgacggcgaccctggtcccgagcccggcgctccgcgggagcaggagcccgcgcagctcaacggcgccgcggagccgggcgccgggcccccgcagctgccagaggcgctactgctccagcggcgccgcgtgacggtgcgcaaggccgacgccggtgggctgggcatcagcatcaaaggcggccgggagaacaagatgcctattctcatttccaagatcttcaagggattggcagctgaccagacagaggccctttttgtgggggatgccatcctgtctgtgaatggggaagacttgtcctctgctacccatgatgaggcggtgcaggtcctcaagaagacaggcaaggaggtggtgctggaggtcaagtatatgaaggacgtctcaccgtatttcaagaactctactggtgggacctcggtcggctgggactcacctcctgcctcaccccttcagcggcagccttcctcccctggccccacaccccggaacttcagcgaggccaaacacatgtccttgaagatggcatatgtctcgaagaggtgcacccccaatgacccggagcccaggtatctggagatctgctcggcagatggtcaagacaccctcttcctgagggccaaggatgaggctagtgcgaggtcgtgggcgactgccatccaagcccaggtcaatactctgacgccgcgggtcaaggatgagctgcaggcactgttggcagccaccagcacagctgggagccaggacatcaagcagattggctggctaactgagcagctgcccagtgggggcacagcccccaccctggccctgctaactgaaaaggaactgctcctctacttgtctctccccgagacccgcgaggccctgagccggccagcccgtactgccccactcatcgccaccagactggtgcactcaggcccctccaagggctcagtgccctacgatgcagagctctcttttgccctgcgcacgggcacgcgtcacggtgtggacactcacctgttcagcgtggagtcaccgcaggagctggctgcctggacccgccagcttgtggatggctgtcaccgggccgccgagggtgtgcaggaggtgtctacagcctgcacgtggaatgggcgtccctgcagcctgtctgtgcacatcgacaagggcttcacactgtgggcggctgagccaggtgcagcccgagctgtgctcctgcgacagcccttcgagaagctgcagatgtcttcagatgacggtgccagtctccttttcctggattttggaggtgctgaaggcgagatccagctggacctgcactcgtgtcccaaaaccatagtcttcatcatccactccttcctgtcggccaaagtcacccgcctcgggctgttggcctagaagtcgccggatgcactagccctgaagaggggtgtccatgacatggcctgagctgggcctccaccgactgcctgctcacccctgggctgagggaagggagaggagaggaacaagggcctccgaaaccccaaccctgagggagactggattggtcttggggcccaggacccagacgcaggacagagtggactctgcctgtgatggggtggccttcctgctgcccccctccaccagtgccttttgcagagagatattttgtgtcccgaagcatcggattggacctgccctgcgatctcgcccaattgatccggtcttagccaaccccaggccttttttccgtg

SEQ ID NO: 369725 - DNA, 2684 bp, Homo sapiens
cgcccttctgacccaccccgctaggtagtcccacacggcggccctcggctcccgggccccgccccggcctcctgcatttgcccgaggccccctccccagcactggccacaccccagggtagccccgcccccagagctcctcccccagcggccggggtagggtggcggctggcccagccgggcccccgctgccctctgccctgggcgcttggtcggagcgggctgggcaaagcgggacagggcgagcgcggcggcccgggggctcggaggcgaagatggcgtccggcaggcgcgccccgcgcaccgggctgctggagctgcgcgccggggcgggctcgggggccggcggcgagcgatggcagcgggtgctgctgagtctggcggaggacgtgctgaccgtgagccccgccgacggcgaccctggtcccgagcccggcgctccgcgggagcaggagcccgcgcagctcaacggcgccgcggagccgggcgccgggcccccgcagctgccagaggcgctactgctccagcggcgccgcgtgacggtgcgcaaggccgacgccggtgggctgggcatcagcatcaaaggcggccgggagaacaagatgcctattctcatttccaagatcttcaagggattggcagctgaccagacagaggccctttttgtgggggatgccatcctgtctgtgaatggggaagacttgtcctctgctacccatgatgaggcggtgcaggtcctcaagaagacaggcaaggaggtggtgctggaggtcaagtatatgaaggacgtctcaccgtatttcaagaactctactggtgggacctcggtcggctgggactcacctcctgcctcaccccttcagcggcagccttcctcccctggccccacaccccggaacttcagcgaggccaaacacatgtccttgaagatggcatatgtctcgaagaggtgcacccccaatgacccggagcccaggtatctggagatctgctcggcagatggtcaagacaccctcttcctgagggccaaggatgaggctagtgcgaggtcgtgggcgactgccatccaagcccaggtcaatactctgacgccgcgggtcaaggatgagctgcaggcactgttggcagccaccagcacagctgggagccaggacatcaagcagattggctggctaactgagcagctgcccagtgggggcacagcccccaccctggccctgctaactgaaaaggaactgctcctctacttgtctctccccgagacccgcgaggccctgagccggccagcccgtactgccccactcatcgccaccagactggtgcactcaggcccctccaagggctcagtgccctacgatgcagagctctcttttgccctgcgcacgggcacgcgtcacggtgtggacactcacctgttcagcgtggagtcaccgcaggagctggctgcctggacccgccagcttgtggatggctgtcaccgggccgccgagggtgtgcaggaggtgtctacagcctgcacgtggaatgggcgtccctgcagcctgtctgtgcacatcgacaagggcttcacactgtgggcggctgagccaggtgcagcccgagctgtgctcctgcgacagcccttcgagaagctgcagatgtcttcagatgacggtgccagtctccttttcctggattttggaggtgctgaaggcgagatccagctggacctgcactcgtgtcccaaaaccatagtcttcatcatccactccttcctgtcggccaaagtcacccgcctcgggctgttggcctagaagtcgccggatgcactagccctgaagaggggtgtccatgacatggcctgagctgggcctccaccgactgcctgctcacccctgggctgagggaagggagaggagaggaacaagggcctccgaaaccccaaccagctgagctgccgggcctcctcgaggcccctaagccacccccagaggtcccatctgaagctggagtaccctggggtcagcagcaagagaaagaagaggagattttctgtttgtttttcccctcagccctgccaccgtggggagtctggtttttctcttcatcctgtctctctcctccttactcttggataaataaacagcctgtgagcacacaggcagcccggcccagtgtatgtggtctgtgccttggcctttgggtcctggggtggcccctgcagtcccaagatggaccagaccaaggactagggcacctttccctggagaagaacagacctttactacatgggccaaagacagtgtattggttatctattgttgtgtgacaaattatccaaaatttgcagcttaaaatgacaaatattcattatctcttaggttctgtgggtcagaaatttgagaggggctaagctgggctgttcttgtctcagggtcgctcatgaggttgcagtcaagttgtcggctagggctgcagtcatctgaaggcttgactggggctggaggatccattccaatactgctcatgcacatggctgtgggtaggaggtctcagttcctcaccatgtagggctaaccctagagctgctgcttgagttttctcatgatatggcagttggctttccccacagtgagacagaagagagggcaaggaggaagccacaaacagtgcctcttatgacccggtcttggaagccttacactg

SEQ ID NO: 369726 - DNA, 1112 bp, Homo sapiens
atagtttttaatcagcctcaaaaattccccttatttccaagtatcttatttttactatttcattgatgtttcaagtggaatcaaatattccaactgttttccactggaagaagatgaatttcaggtacaattcagtagcaaagaacacccatgttttcaaaataatggagaaatttttttctcatatgaagttatgattaaatttgtgaattgcacaagcttggaattctgctgcaggatgcctacattctgtattgctttattttggtcatatattacaaatggaatatttcccagctcatttatatacagttcctggttgctgaaattttactggcaagctttgtgaactaattttacttctcaaagatactaggaataaagtgaaaatagggtcttttctctcataggtctaaaagatacttctttcctttaaccattacattctgggaggtgtaattaatccaaccctgctgtaggatagggatctcattattaaaggattctagggtaaacagtctttctagcagaaatggatctttttggttcagtcttggcaggcatttccctaaaattgctagtgtacgtagtaaataggggagggtaagtggggggaaatttcctaaaaatgccagtgtacagagtgaattgttaggtaaatgagaaaatcaggcttgatttaccaaccaccccatgtgcacatacaaacaaacacacactcacaccaaagccaggaaccctgcaacaaagttctatttaccctgaggagatataaaactttgtgactgcccactaaattatttttttgaaaaataataccagaaatttgtaagcagacacaacagcctcctagtttatcccaccaaataacaatataaatgggacaagcaaagagaaactgtaatttgaagatttttgagtgtgatacttataaaagtgtgtgtgtttgtgtgtagaaatgtattgaatttgagagtaatttatggaaagtgctgtcagcatggtatttcaaatgcttcacaatttgaatttaaactagtcaatgggatcattaagattattatgcatgttttccaaagagtttgaattcaaatgacaacttaaaagaaaaa

SEQ ID NO: 369727 - DNA, 869 bp, Homo sapiens
gcccatggcagagctctcactccgctccaccgctacagctctctacggcgttctgtttgagaagagcaaggaagctgccttcgccaatcaccgcctgtgggaggccctgggcttcgtcattgccttcgggtacagcacgtttttgtgcgtgcacgtcaagctctacattctgctgggggtcctgagcctgaccatggtggcgtatgggcttgcggagtgcgtggagtccaagaacccgatcagaccccacgctccaggacaggcgaaccaggcagaggatgaagaaatacaaacaaaaatgtgagagcagtgaggtctgaggaggatgaactcagaaagcaccagccagagaattttcttagaagatgcctcaggacatagagcggctcctcatcaccatctcagcacaatttggccattctgaagagatcatattatttcactctttatgtattttttttctattctaacaaatttttagtccaccatcttaacagagatcaagtgtatacatgaaggtatcagttcatttaattttagatgcaaaagaaaaaggtctaacgtacaatcagccaattagaatttgcctgaaatcatagactcaccctagttttattgctgtagttgtttttaagaattggaagcctgcttaaaaaatgtagttgagccccataattttacaaatgggcgaacttttaaacttctaactctacttggatcaaaacctcatacattttacaaaggggtcctgacaagtcagctgactcaacctcacagagtcagggggtgacaaagccagactggggctcaggattcctgaaacgtgtggggtctgcgtttctaaataaagacggttatttaacggactt

SEQ ID NO: 369728 - DNA, 683 bp, Homo sapiens
gcagcgcggagtcccggcccgggacacaagatggcggcagcggcgctggggagggcgaggcggaggcggcaaaacgggcggtcgagcagaacgtgtagccgcgtcccctccagtccgctccgggcagctgctgatgcaaggaatcccctgggctcccgtccactccactgctgaccagcccattcgcctgtgctgagtcttcctgcaggcctttccttgcctctgtgggaccctgtgggggtccatccggctggagaagaaaagcctctcatgctaacgttgcagaccccagagggtgagagaaagggggacttcattcagtcttgaaacctgtgtgctcagcccccaaggcatcaggaattcttcctgcccagagaatcaaggcagcttcatttttttcgtaccttggtcagtggttctcaacctttttgttatcaaggcactttttgttgtacatatgtcctgttgccccctgcatttttatctgccaaactgtactgatggagtaaccattgacttttcccttcctaaattaaggaagacgtctatgatggagtgtacaataaaatcagtgtcccaatgattcgtatgatgtcatcaacaaccaatcagagcttctgatcagcatgagataatcagtgtgaccacaatgagttgataaaatttcagcatgaaaagataaa

SEQ ID NO: 369729 - DNA, 588 bp, Homo sapiens
gctttgaactgcaactaatggccacagatgtcaatgttggaaaggccctacaatgcatttagttgatttcccaactctgccgaaagccatctctattacttgcccccgaaggctagtttaagttgcttctactcaagagcatttacagcttgggttcgatgtatatgtagcccgggcatggggcagggcttcttaacatttggacaccacgcagcacaaaggcccagagagggaaagagactggctggaagaggcagagccgcgcgggtgccaggacccaggtccttgctacgtccggagcctacgtcaccacgatgcctcccctgggccggcggcagaacccgagacccccgcaggttctaagacagcccccacgccccccagtgcgcacgctcagtccaaccccgccgcgcaccgcccaccgcgaacatccggctcctgcgtgtgtgctcgagggggaaactgaggcggggacgtgccagtgaattcattccttcctcagtccacccgcaggcctacaaagctgtctccccttcctcagcgccacaaggaacagcagggacggatgggaagaaggggagggggccg

SEQ ID NO: 369730 - DNA, 496 bp, Homo sapiens
  misc_feature (429)..(429): n is a, c, g, or t
  misc_feature (477)..(477): n is a, c, g, or t
  misc_feature (479)..(479): n is a, c, g, or t
  misc_feature (488)..(488): n is a, c, g, or t
  misc_feature (490)..(490): n is a, c, g, or t
tctgatgcctgttgcacgcacctcgactcttaggatcccccatcggatgtgccgctccgggcagctgctgatgcaaggaatcccctgggctcccgtccactccactgctgaccagcccattcgcctgtgctgagtcttcctgcaggcctttccttgcctctgtgggaccctgtgggggtccatccggctggagaagaaaagcctctcatgctaacgttgcagaccccagagggtcctgtgtgggtgtggagatggccaatgagaatcacggcagcccccgggaggaagcgtccctgctgagtcactccccaggtacctccaatcagagccagccctgttctccaaagccaatccgcctggttcaggacctcccagaggagctggtgcatgcaggctgggagaagtgctggagcggggagcggcacatgngttgggggatcctcagagtcgaggtgcatgccacggcatcagcgggangnagtcaatananaatcca

SEQ ID NO: 369731 - DNA, 3354 bp, Homo sapiens
gcagcgcggagtcccggcccgggacacaagatggcggcagcggcgctggggagggcgaggcggaggcggcaaaacgggcggtcgagcagaacgtgtagccgcgtcccctccagtccgctccgggcagctgctgatgcaaggaatcccctgggctcccgtccactccactgctgaccagcccattcgcctgtgctgagtcttcctgcaggcctttccttgcctctgtgggaccctgtgggggtccatccggctggagaagaaaagcctctcatgctaacgttgcagaccccagagggtcctgtgtgggtgtggagatggccaatgagaatcacggcagcccccgggaggaagcgtccctgctgagtcactccccaggtacctccaatcagagccagccctgttctccaaagccaatccgcctggttcaggacctcccagaggagctggtgcatgcaggctgggagaagtgctggagccggagggagaatcgtccctactacttcaaccgattcaccaaccagtccctgtgggagatgcccgtgctggggcagcacgatgtgatttcggaccctttggggctgaatgcgaccccactgccccaagactcaagcttggtggaaactcccccggctgagaacaagcccagaaagcggcagctctcggaagagcagccaagcggcaatggtgtgaagaagcccaagattgaaatcccagtgacacccacaggccagtcggtgcccagctcccccagtatcccaggaaccccaacgctgaagatgtggggtacgtcccctgaagataaacagcaggcagctctcctacgacccactgaggtctactgggacctggacatccagaccaatgctgtcatcaagcaccgggggccttcagaggtgctgcccccgcatcccgaagtggaactgctccgctctcagctcatcctgaagcttcggcagcactatcgggagctgtgccagcagcgagagggcattgagcctccacgggagtctttcaaccgctggatgctggagcgcaaggtggtagacaaaggatctgaccccctgttgcccagcaactgtgaaccagtcgtgtcaccttccatgtttcgtgaaatcatgaacgacattcctatcaggttatcccgaatcaagttccgggaggaagccaagcgcctgctctttaaatatgcggaggccgccaggcggctcatcgagtccaggagtgcatcccctgacagtaggaaggtggtcaaatggaatgtggaagacacctttagctggcttcggaaggaccactcagcctccaaggaggactacatggatcgcctggagcatctgcggaggcagtgtggcccccacgtctcggccgcagccaaggactccgtggaaggcatctgcagtaagatctaccacatctccctggagtacgtcaaacggatccgagagaagcaccttgccatcctcaaggaaaacaacatctcagaggaggtggaggcccctgaggtggagccccgcctagtgtactgctacccagtccggctggctgtgtctgcaccgcccatgcccagcgtggagatgcacatggagaacaacgtggtctgcatccggtataagggagagatggtcaaggtcagccgcaactacttcagcaagctgtggctcctttaccgctacagctgcattgatgactctgcctttgagaggttcctgccccgggtctggtgtcttctccgacggtaccagatgatgttcggcgtgggcctctacgaggggactggcctgcagggatcgctgcctgtgcatgtctttgaggccctccaccgactctttggcgtcagcttcgagtgcttcgcctcacccctcaactgctacttccgccagtactgttctgccttccccgacacagacggctactttggctcccgcgggccctgcctagactttgctccactgagtggttcatttgaggccaaccctcccttctgcgaggagctcatggatgccatggtctctcactttgagagactgcttgagagctcaccggagcccctgtccttcatcgtgttcatccctgagtggcgggaacccccaacaccagcgctcacccgcatggagcagagccgcttcaaacgccaccagttgatcctgcctgcctttgagcatgagtaccgcagtggctcccagcacatctgcaagaaggaggaaatgcactacaaggccgtccacaacacggctgtgctcttcctacagaacgaccctggctttgccaagtgggcgccgacgcctgaacggctgcaggagctgagtgctgcctaccggcagtcaggccgcagccacagctctggttcttcctcatcgtcctcctcggaggccaaggaccgggactcgggccgtgagcagggtcctagccgcgagcctcaccccacttaacatatcctgcggggaggaggagccccaggggtgctagtctggactgctgggactcgggcccctggggcctcagagggaccccggctgccactgacatatgaagattatggttctgccagggctcccctccctgcctgtccccaagtcctcacctcaaactccctccaagtcccatgtatataggtcctgatgccttcccaaccccgcccctcaccctgttgccaccttgtttcatttgtaaaaggaaatacagaaacccccccaagaatgtgtgagggtcttgagggcagagaaggctgaggcagctggagctacttctgggaccacactcccctccctccctccagcagctccttctcatggcccctgggccttcactctcccatctggggtcccacacagctgggtccctggtggcctctgcctgggctcaggaggtccgaagagtccaaggccctgcatcccctatctccaaactcccccagcagggcctgtatggatacccctggggatcagaggactgggagctgtgcctgtccccaacccaaaagccagactcttgctggccctggatccccacagtgagcgaagagctgggtgtgcctcacagtcaaggctcaggagagcagcttcagaggatctgtaggcacagagcgtgtgctccctagggcccagggaggaagcaggtctgaaggtgcttgctggggctctcgctggttcagccgtctctgaaccagccacctctctcattgccaggcctctgcagcaagggtctgccctgctggtggatcaccggacttaacaggggcagggcaggacagggcacgctgtggagccaggcagcctccacctcacaagacctggcctggtacaggctacagcagcaagcagacaaagtaagctgttcaggactggactccggtcc

SEQ ID NO: 369732 - DNA, 2675 bp, Homo sapiens
gcagcgcggagtcccggcccgggacacaagatggcggcagcggcgctggggagggcgaggcggaggcggcaaaacgggcggtcgagcagaacgtgtagccgcgtcccctccagtccgctccgggcagctgctgatgcaaggaatcccctgggctcccgtccactccactgctgaccagcccattcgcctgtgctgagtcttcctgcaggcctttccttgcctctgtgggaccctgtgggggtccatccggctggagaagaaaagcctctcatgctaacgttgcagaccccagagggtcctgtgtgggtgtggagatggccaatgagaatcacggcagcccccgggaggaagcgtccctgctgagtcactccccaggtacctccaatcagagccagccctgttctccaaagccaatccgcctggttcaggacctcccagaggagctggtgcatgcaggctgggagaagtgctggagccggagggagaatcgtccctactacttcaaccgattcaccaaccagtccctgtgggagatgcccgtgctggggcagcacgatgtgatttcggaccctttggggctgaatgcgaccccactgccccaagactcaagcttggtggaaactcccccggctgagaacaagcccagaaagcggcagctctcggaagagcagccaagcggcaatggtgtgaagaagcccaagattgaaatcccagtgacacccacaggccagtcggtgcccagctcccccagtatcccaggaaccccaacgctgaagatgtggggtacgtcccctgaagataaacagcaggcagctctcctacgacccactgaggtctactgggacctggacatccagaccaatgctgtcatcaagcaccgggggccttcagaggtgctgcccccgcatcccgaagtggaactgctccgctctcagctcatcctgaagcttcggcagcactatcgggagctgtgccagcagcgagagggcattgagcctccacgggagtctttcaaccgctggatgctggagcgcaaggtggtagacaaaggatctgaccccctgttgcccagcaactgtgaaccagtcgtgtcaccttccatgtttcgtgaaatcatgaacgacattcctatcaggttatcccgaatcaagttccgggaggaagccaagcgcctgctctttaaatatgcggaggccgccaggcggctcatcgagtccaggagtgcatcccctgacagtaggaaggtggtcaaatggaatgtggaagacacctttagctggcttcggaaggaccactcagcctccaaggaggactacatggatcgcctggagcatctgcggaggcagtgtggcccccacgtctcggccgcagccaaggactccgtggaaggcatctgcagtaagatctaccacatctccctggagtacgtcaaacggatccgagagaagcaccttgccatcctcaaggaaaacaacatctcagaggaggtggaggcccctgaggtggagccccgcctagtgtactgctacccagtccggctggctgtgtctgcaccgcccatgcccagcgtggagatgcacatggagaacaacgtggtctgcatccggtataagggagagatggtcaaggtcagccgcaactacttcagcaagctgtggctcctttaccgctacagctgcattgatgactctgcctttgagaggttcctgccccgggtctggtgtcttctccgacggtaccagatgatgttcggcgtgggcctctacgaggggactggcctgcagggatcgctgcctgtgcatgtctttgaggccctccaccgactctttggcgtcagcttcgagtgcttcgcctcacccctcaactgctacttccgccagtactgttctgccttccccgacacagacggctactttggctcccgcgggccctgcctagactttgctccactgagtggttcatttgaggccaaccctcccttctgcgaggagctcatggatgccatggtctctcactttgagagactgcttgagagctcaccggagcccctgtccttcatcgtgttcatccctgagtggcgggaacccccaacaccagcgctcacccgcatggagcagagccgcttcaaacgccaccagttgatcctgcctgcctttgagcatgagtaccgcagtggctcccagcacatctgcaagaaggaggaaatgcactacaaggccgtccacaacacggctgtgctcttcctacagaacgaccctggctttgccaagtgggcgccgacgcctgaacggctgcaggagctgagtgctgcctaccggcagtcaggccgcagccacagctctggttcttcctcatcgtcctcctcggaggccaaggaccgggactcgggccgtgagcagggtcctagccgcgagcctcaccccacttaacatatcctgcggggaggaggagccccaggggtgctagtctggactgctgggactcgggcccctggggcctcagagggaccccggctgccactgacatatgaagattatggttctgccagggctcccctccctgcctgtccccaagtcctcacctcaaactccctccaagtcccatgtatataggtcctgatgccttcccaaccccgcccttttctttttttttcttttttcttttttttttttttt

SEQ ID NO: 369733 - DNA, 2808 bp, Homo sapiens
gcagcgcggagtcccggcccgggacacaagatggcggcagcggcgctggggagggcgaggcggaggcggcaaaacgggcggtcgagcagaacgtgtagccgcgtcccctccagtccgctccgggcagctgctgatgcaaggaatcccctgggctcccgtccactccactgctgaccagcccattcgcctgtgctgagtcttcctgcaggcctttccttgcctctgtgggaccctgtgggggtccatccggctggagaagaaaagcctctcatgctaacgttgcagaccccagagggtgagagaaagggggacttcattcagtcttgaaacctgtgtgctcagcccccaaggcatcaggaattcttcctgcccagagaatcaaggcagcttcatttttttcgtaccttggtcctgtgtgggtgtggagatggccaatgagaatcacggcagcccccgggaggaagcgtccctgctgagtcactccccaggtacctccaatcagagccagccctgttctccaaagccaatccgcctggttcaggacctcccagaggagctggtgcatgcaggctgggagaagtgctggagccggagggagaatcgtccctactacttcaaccgattcaccaaccagtccctgtgggagatgcccgtgctggggcagcacgatgtgatttcggaccctttggggctgaatgcgaccccactgccccaagactcaagcttggtggaaactcccccggctgagaacaagcccagaaagcggcagctctcggaagagcagccaagcggcaatggtgtgaagaagcccaagattgaaatcccagtgacacccacaggccagtcggtgcccagctcccccagtatcccaggaaccccaacgctgaagatgtggggtacgtcccctgaagataaacagcaggcagctctcctacgacccactgaggtctactgggacctggacatccagaccaatgctgtcatcaagcaccgggggccttcagaggtgctgcccccgcatcccgaagtggaactgctccgctctcagctcatcctgaagcttcggcagcactatcgggagctgtgccagcagcgagagggcattgagcctccacgggagtctttcaaccgctggatgctggagcgcaaggtggtagacaaaggatctgaccccctgttgcccagcaactgtgaaccagtcgtgtcaccttccatgtttcgtgaaatcatgaacgacattcctatcaggttatcccgaatcaagttccgggaggaagccaagcgcctgctctttaaatatgcggaggccgccaggcggctcatcgagtccaggagtgcatcccctgacagtaggaaggtggtcaaatggaatgtggaagacacctttagctggcttcggaaggaccactcagcctccaaggaggactacatggatcgcctggagcatctgcggaggcagtgtggcccccacgtctcggccgcagccaaggactccgtggaaggcatctgcagtaagatctaccacatctccctggagtacgtcaaacggatccgagagaagcaccttgccatcctcaaggaaaacaacatctcagaggaggtggaggcccctgaggtggagccccgcctagtgtactgctacccagtccggctggctgtgtctgcaccgcccatgcccagcgtggagatgcacatggagaacaacgtggtctgcatccggtataagggagagatggtcaaggtcagccgcaactacttcagcaagctgtggctcctttaccgctacagctgcattgatgactctgcctttgagaggttcctgccccgggtctggtgtcttctccgacggtaccagatgatgttcggcgtgggcctctacgaggggactggcctgcagggatcgctgcctgtgcatgtctttgaggccctccaccgactctttggcgtcagcttcgagtgcttcgcctcacccctcaactgctacttccgccagtactgttctgccttccccgacacagacggctactttggctcccgcgggccctgcctagactttgctccactgagtggttcatttgaggccaaccctcccttctgcgaggagctcatggatgccatggtctctcactttgagagactgcttgagagctcaccggagcccctgtccttcatcgtgttcatccctgagtggcgggaacccccaacaccagcgctcacccgcatggagcagagccgcttcaaacgccaccagttgatcctgcctgcctttgagcatgagtaccgcagtggctcccagcacatctgcaagaaggaggaaatgcactacaaggccgtccacaacacggctgtgctcttcctacagaacgaccctggctttgccaagtgggcgccgacgcctgaacggctgcaggagctgagtgctgcctaccggcagtcaggccgcagccacagctctggttcttcctcatcgtcctcctcggaggccaaggaccgggactcgggccgtgagcagggtcctagccgcgagcctcaccccacttaacatatcctgcggggaggaggagccccaggggtgctagtctggactgctgggactcgggcccctggggcctcagagggaccccggctgccactgacatatgaagattatggttctgccagggctcccctccctgcctgtccccaagtcctcacctcaaactccctccaagtcccatgtatataggtcctgatgccttcccaaccccgcccctcaccctgttgccaccttgtttcatttgtaaaaggaaatacagaaacccccccaag

SEQ ID NO: 369734 - DNA, 457 bp, Homo sapiens
gccagtgaattcattccttcctcagtccacccgcaggcctacaaagctgtctccccttcctcagcgccacaaggaacagcagggacggatgggaagaaggggagggggccgaaagcaagctgggtgcgaggagccagccgaccctgccacactcaagatggcggcgcggccgcggcgaggtccctcagaggcggtaccagcgcatgcgcagcgcggagtcccggcccgggacacaagatggcggcagcggcgctggggagggcgaggcggaggcggcaaaacgggcggtcgagcagaacgtgtagccgcgtcccctccagtccgctccgggcaggtaagagtcccaggaagccatggtcccgcagcgagccgcgccagggtctggggatccgaagctggggggcggcggcccctccggcgctttctgctcgggactgccgcttgccctgtctctgtt

SEQ ID NO: 369735 - DNA, 2695 bp, Homo sapiens
gcagcgcggagtcccggcccgggacacaagatggcggcagcggcgctggggagggcgaggcggaggcggcaaaacgggcggtcgagcagaacgtgtagccgcgtcccctccagtccgctccgggcagctgctgatgcaaggaatcccctgggctcccgtccactccactgctgaccagcccattcgcctgtgctgagtcttcctgcaggcctttccttgcctctgtgggaccctgtgggggtccatccggctggagaagaaaagcctctcatgctaacgttgcagaccccagagggtcctgtgtgggtgtggagatggccaatgagaatcacggcagcccccgggaggaagcgtccctgctgagtcactccccaggtacctccaatcagagccagccctgttctccaaagccaatccgcctggttcaggacctcccagaggagctggtgcatgcaggctgggagaagtgctggagccggagggagaatcgtccctactacttcaaccgattcaccaaccagtccctgtgggagatgcccgtgctggggcagcacgatgtgatttcggaccctttggggctgaatgcgaccccactgccccaagactcaagcttggtggaaactcccccggctgagaacaagcccagaaagcggcagctctcggaagagcagccaagcggcaatggtgtgaagaagcccaagattgaaatcccagtgacacccacaggccagtcggtgcccagctcccccagtatcccaggaaccccaacgctgaagatgtggggtacgtcccctgaagataaacagcaggcagctctcctacgacccactgaggtctactgggacctggacatccagaccaatgctgtcatcaagcaccgggggccttcagaggtgctgcccccgcatcccgaagtggaactgctccgctctcagctcatcctgaagcttcggcagcactatcgggagctgtgccagcagcgagagggcattgagcctccacgggagtctttcaaccgctggatgctggagcgcaaggtggtagacaaaggatctgaccccctgttgcccagcaactgtgaaccagtcgtgtcaccttccatgtttcgtgaaatcatgaacgacattcctatcaggttatcccgaatcaagttccgggaggaagccaagcgcctgctctttaaatatgcggaggccgccaggcggctcatcgagtccaggagtgcatcccctgacagtaggaaggtggtcaaatggaatgtggaagacacctttagctggcttcggaaggaccactcagcctccaaggaggactacatggatcgcctggagcatctgcggaggcagtgtggcccccacgtctcggccgcagccaaggactccgtggaaggcatctgcagtaagatctaccacatctccctggagtacgtcaaacggatccgagagaagcaccttgccatcctcaaggaaaacaacatctcagaggaggtggaggcccctgaggtggagccccgcctagtgtactgctacccagtccggctggctgtgtctgcaccgcccatgcccagcgtggagatgcacatggagaacaacgtggtctgcatccggtataagggagagatggtcaaggtcagccgcaactacttcagcaagctgtggctcctttaccgctacagctgcattgatgactctgcctttgagaggttcctgccccgggtctggtgtcttctccgacggtaccagatgatgttcggcgtgggcctctacgaggggactggcctgcagggatcgctgcctgtgcatgtctttgaggccctccaccgactctttggcgtcagcttcgagtgcttcgcctcacccctcaactgctacttccgccagtactgttctgccttccccgacacagacggctactttggctcccgcgggccctgcctagactttgctccactgagtggttcatttgaggccaaccctcccttctgcgaggagctcatggatgccatggtctctcactttgagagactgcttgagagctcaccggagcccctgtccttcatcgtgttcatccctgagtggcgggaacccccaacaccagcgctcacccgcatggagcagagccgcttcaaacgccaccagttgatcctgcctgcctttgagcatgagtaccgcagtggctcccagcacatctgcaagaaggaggaaatgcactacaaggccgtccacaacacggctgtgctcttcctacagaacgaccctggctttgccaagtgggcgccgacgcctgaacggctgcaggagctgagtgctgcctaccggcagtcaggccgcagccacagctctggttcttcctcatcgtcctcctcggaggccaaggaccgggactcgggccgtgagcagggtcctagccgcgagcctcaccccacttaacatatcctgcggggaggaggagccccaggggtgctagtctggactgctgggactcgggcccctggggcctcagagggaccccggctgccactgacatatgaagattatggttctgccagggctcccctccctgcctgtccccaagtcctcacctcaaactccctccaagtcccatgtatataggtcctgatgccttcccaaccccgcccctcaccctgttgccaccttgtttcatttgtaaaaggaaatacagaaacccccccaag

SEQ ID NO: 369736 - DNA, 2780 bp, Homo sapiens
gcagcgcggagtcccggcccgggacacaagatggcggcagcggcgctggggagggcgaggcggaggcggcaaaacgggcggtcgagcagaacgtgtagccgcgtcccctccagtccgctccgggcagctgctgatgcaaggaatcccctgggctcccgtccactccactgctgaccagcccattcgcctgtgctgagtcttcctgcaggcctttccttgcctctgtgggaccctgtgggggtccatccggctggagaagaaaagcctctcatgctaacgttgcagaccccagagggtcctgtgtgggtgtggagatggccaatgagaatcacggcagcccccgggaggaagcgtccctgctgagtcactccccaggtacctccaatcagagccagccctgttctccaaagccaatccgcctggttcaggacctcccagaggagctggtgcatgcaggctgggagaagtgctggagccggagggagaatcgtccctactacttcaaccgattcaccaaccagtccctgtgggagatgcccgtgctggggcagcacgatgtgatttcggaccctttggggctgaatgcgaccccactgccccaagactcaagcttggtggaaactcccccggctgagaacaagcccagaaagcggcagctctcggaagagcagccaagcggcaatggtgtgaagaagcccaagattgaaatcccagtgacacccacaggccagtcggtgcccagctcccccagtatcccaggaaccccaacgctgaagatgtggggtacgtcccctgaagataaacagcaggcagctctcctacgacccactgaggtctactgggacctggacatccagaccaatgctgtcatcaagcaccgggggccttcagaggtgctgcccccgcatcccgaagtggaactgctccgctctcagctcatcctgaagcttcggcagcactatcgggagctgtgccagcagcgagagggcattgagcctccacgggagtctttcaaccgctggatgctggagcgcaaggtggtagacaaaggatctgaccccctgttgcccagcaactgtgaaccagtcgtgtcaccttccatgtttcgtgaaatcatgaacgacattcctatcaggttatcccgaatcaagttccgggaggaagccaagcgcctgctctttaaatatgcggaggccgccaggcggctcatcgagtccaggagtgcatcccctgacagtaggaaggtggtcaaatggaatgtggaagacacctttagctggcttcggaaggaccactcagcctccaaggaggactacatggatcgcctggagcatctgcggaggcagtgtggcccccacgtctcggccgcagccaaggactccgtggaaggcatctgcagtaagatctaccacatctccctggagtacgtcaaacggatccgagagaagcaccttgccatcctcaaggaaaacaacatctcagaggaggtggaggcccctgaggtggagccccgcctagtgtactgctacccagtccggctggctgtgtctgcaccgcccatgcccagcgtggagatgcacatggagaacaacgtggtctgcatccggtataagggagagatggtcaaggtcagccgcaactacttcagcaagctgtggctcctttaccgctacagctgcattgatgactctgcctttgagaggttcctgccccgggtctggtgtcttctccgacggtaccagatgatgttcggcgtgggcctctacgaggggactggcctgcagggatcgctgcctgtgcatgtctttgaggccctccaccgactctttggcgtcagcttcgagtgcttcgcctcacccctcaactgctacttccgccagtactgttctgccttccccgacacagacggctactttggctcccgcgggccctgcctagactttgctccactgagtggttcatttgaggccaaccctcccttctgcgaggagctcatggatgccatggtctctcactttgagagactgcttgagagctcaccggagcccctgtccttcatcgtgttcatccctgagtggcgggaacccccaacaccagcgctcacccgcatggagcagagccgcttcaaacgccaccagttgatcctgcctgcctttgagcatgagtaccgcagtggctcccagcacatctgcaagaagtgggtgccagggagggcaggggaaggaggctgggctggccaggccaggcccagccccaccctgagccattgcctttgcccgcagggaggaaatgcactacaaggccgtccacaacacggctgtgctcttcctacagaacgaccctggctttgccaagtgggcgccgacgcctgaacggctgcaggagctgagtgctgcctaccggcagtcaggccgcagccacagctctggttcttcctcatcgtcctcctcggaggccaaggaccgggactcgggccgtgagcagggtcctagccgcgagcctcaccccacttaacatatcctgcggggaggaggagccccaggggtgctagtctggactgctgggactcgggcccctggggcctcagagggaccccggctgccactgacatatgaagattatggttctgccagggctcccctccctgcctgtccccaagtcctcacctcaaactccctccaagtcccatgtatataggtcctgatgccttcccaaccccgcccctcaccctgttgccaccttgtttcatttgtaaaaggaaatacagaaacccccccaag

SEQ ID NO: 369737 - DNA, 2709 bp, Homo sapiens
gcagcgcggagtcccggcccgggacacaagatggcggcagcggcgctggggagggcgaggcggaggcggcaaaacgggcggtcgagcagaacgtgtagccgcgtcccctccagtccgctccgggcagctgctgatgcaaggaatcccctgggctcccgtccactccactgctgaccagcccattcgcctgtgctgagtcttcctgcaggcctttccttgcctctgtgggaccctgtgggggtccatccggctggagaagaaaagcctctcatgctaacgttgcagaccccagagggtcctgtgtgggtgtggagatggccaatgagaatcacggcagcccccgggaggaagcgtccctgctgagtcactccccaggtacctccaatcagagccagccctgttctccaaagccaatccgcctggttcaggacctcccagaggagctggtgcatgcaggctgggagaagtgctggagccggagggagaatcgtccctactacttcaaccgattcaccaaccagtccctgtgggagatgcccgtgctggggcagcacgatgtgatttcggaccctttggggctgaatgcgaccccactgccccaagactcaagcttggtggaaactcccccggctgagaacaagcccagaaagcggcagctctcggaagagcagccaagcggcaatggtgtgaagaagcccaagattgaaatcccagtgacacccacaggccagtcggtgcccagctcccccagtatcccaggaaccccaacgctgaagatgtggggtacgtcccctgaagataaacagcaggcagctctcctacgacccactgaggtctactgggacctggacatccagaccaatgctgtcatcaagcaccgggggccttcagaggtgctgcccccgcatcccgaagtggaactgctccgctctcagctcatcctgaagcttcggcagcactatcgggagctgtgccagcagcgagagggcattgagcctccacgggagtctttcaaccgctggatgctggagcgcaaggtggtagacaaaggatctgaccccctgttgcccagcaactgtgaaccagtcgtgtcaccttccatgtttcgtgaaatcatgaacgacattcctatcaggttatcccgaatcaagttccgggaggaagccaagcgcctgctctttaaatatgcggaggccgccaggcggctcatcgagtccaggagtgcatcccctgacagtaggaaggtggtcaaatggaatgtggaagacacctttagctggcttcggaaggaccactcagcctccaaggaggactacatggatcgcctggagcatctgcggaggcagtgtggcccccacgtctcggccgcagccaaggactccgtggaaggcatctgcagtaagatctaccacatctccctggagtacgtcaaacggatccgagagaagcaccttgccatcctcaaggaaaacaacatctcagaggaggtggaggcccctgaggtggagccccgcctagtgtactgctacccagtccggctggctgtgtctgcaccgcccatgcccagcgtggagatgcacatggagaacaacgtggtctgcatccggtataagggagagatggtcaaggtcagccgcaactacttcagcaagctgtggctcctttaccgctacagctgcattgatgactctgcctttgagaggttcctgccccgggtctggtgtcttctccgacggtaccagatgatgttcggcgtgggcctctacgaggggactggcctgcagggatcgctgcctgtgcatgtctttgaggccctccaccgactctttggcgtcagcttcgagtgcttcgcctcacccctcaactgctacttccgccagtactgttctgccttccccgacacagacggctactttggctcccgcgggccctgcctagactttgctccactgagtggttcatttgaggccaaccctcccttctgcgaggagctcatggatgccatggtctctcactttgagagactgcttgagagctcaccggagcccctgtccttcatcgtgttcatccctgagtggcgggaacccccaacaccagcgctcacccgcatggagcagagccgcttcaaacgccaccagttgatcctgcctgcctttgagcatgagtaccgcagtggctcccagcacatctgcaagaaggaggaaatgcactacaaggccgtccacaacacggctgtgctcttcctacagaacgaccctggctttgccaagtgggcgccgacgcctgaacggctgcaggagctgagtgctgcctaccggcagtcaggccgcagccacagctctggttcttcctcatcgtcctcctcggaggccaaggaccgggactcgggccgtgagcagggtcctagccgcgagcctcaccccacttaacatatcctgcggggaggaggagccccaggggtgctagtctggactgctgggactcgggcccctggggcctcagagggaccccggctgccactgacatatgaagattatggttctgccagggctcccctccctgcctgtccccaagtcctcacctcaaactccctccaagtcccatgtatataggtcctgatgccttcccaaccccgcccctcacctgtgcaatcagctcgattgtaaaagtaaacgactctcgtgtgttttcgtgttttctgttttgtgt

SEQ ID NO: 369738 - DNA, 1079 bp, Homo sapiens
gcactgctgaaggctcctcctctctgtcccgctccacagtggctcctttaccgctacagctgcattgatgactctgcctttgagaggttcctgccccgggtctggtgtcttctccgacggtaccagatgatgttcggcgtgggcctctacgaggggactggcctgcagggatcgctgcctgtgcatgtctttgaggccctccaccgactctttggcgtcagcttcgagtgcttcgcctcacccctcaactgctacttccgccagtactgttctgccttccccgacacagacggctactttggctcccgcgggccctgcctagactttgctccactgagtggttcatttgaggccaaccctcccttctgcgaggagctcatggatgccatggtctctcactttgagagactgcttgagagctcaccggagcccctgtccttcatcgtgttcatccctgagtggcgggaacccccaacaccagcgctcacccgcatggagcagagccgcttcaaacgccaccagttgatcctgcctgcctttgagcatgagtaccgcagtggctcccagcacatctgcaagaaggaggaaatgcactacaaggccgtccacaacacggctgtgctcttcctacagaacgaccctggctttgccaagtgggcgccgacgcctgaacggctgcaggagctgagtgctgcctaccggcagtcaggccgcagccacagctctggttcttcctcatcgtcctcctcggaggccaaggaccgggactcgggccgtgagcagggtcctagccgcgagcctcaccccacttaacatatcctgcggggaggaggagccccaggggtgctagtctggactgctgggactcgggcccctggggcctcagagggaccccggctgccactgacatatgaagattatggttctgccagggctcccctccctgcctgtccccaagtcctcacctcaaactccctccaagtcccatgtatataggtcctgatgccttcccaaccccgcccctcaccctgttgccaccttgtttcatttgtaaaaggaaatacagaaacccccccaag

SEQ ID NO: 369739 - DNA, 417 bp, Homo sapiens
ctcagctactcaggaggctgaggcagaagaatcacttgaaccaggaggcagaggttgcagtgagctgagatcgtgccactgcactccagcttaggcgacagagcgagactctgcctcaaaaaaaattaattaattaaaaaataaaaataattataaaataaaatcaatcatctaagtttgcacattagtaaaatagagaaagaataaataacaatcagtttataagttaaacttccacattggggaaaatagcgaaagaagagcaatgtaaatctaagttagcagaagaaaatagataacaaaaattagagcagaaatcagtgaaattgaaagtagaaacagtaggcaaaaatcaataaaagcaagaccggttctttgaaaagatcaataaaattgataaacctttaggctaaccac

SEQ ID NO: 369740 - DNA, 269 bp, Homo sapiens
gccctaatgatcgcttttcttgaaagtaagagttagcagcgtctcaggtgttatatgtgttacctgaatccaactctgtgcctgcatatactcatcagtccagtttacaattgcaggcctggcctggtccccagtgcagacacttatgagctgtggatattgggaagtttcctttctctgcctcaattttctttctgtaaaaaggagatgatgattaaaaatatccgccagttagggctgaggtaggaactaaatgaattatatcaatc

SEQ ID NO: 369741 - DNA, 224 bp, Homo sapiens
  misc_feature (9)..(10): n is a, c, g, or t
cctcgcgannatattttcaagtattctttatgtacaaagagctactctacctggaaagaatacttgaaaaattaattgtatgatgtatgagaagacagagtctcctagttttgtatcttgttgtatgactgccatgagttccaccagaaagccactctattttggtctctgtgacattttaaatgcgtgacagaagtgagcaaataaagtgaggaagaaatcta

SEQ ID NO: 369742 - DNA, 1084 bp, Homo sapiens
aacgcgctgatagcctcctccctgttgccacacacagctgtggctctttcacctccattgctgtttagaatcccagcatctgcggacccattctgctgatttgactggtttctcctggacactctcttcgcagccttggtcatctataatttcctgagcctgtgctatgagtacctaggaggagaaagttccatcatgtcggagatcagaggaaaacccattgagtccagctgtatgtatggcacctgctgcctctggggaaagacttattccatcggatttctgaggttctgcaaacaggccaccctgcagttctgtgtggtgaagccactcatggcggtcagcactgtggtcctccaggccttcggcaagtaccgggatggggactttgagtaagcagcgggtgctccccggggtgtgtgggaggagtgttggcgcaggctggtgccttggctcagggaagggggcagccagagtggccgcacagccatgaccttcctgggtgtctggtgctcacaacccccctgaagtctgagcccagcagtggacacccttgcagttggccccgctgccagcccctgagtgagccattggcagcagtcacgttcatgtccaggctgcagagtggtaccatgaagggatgggccacaaagggacagtgaccactgctgaggcagggagcgagagggtcagagccccaagaggtcggctcaagtccacagatacaaagcccgtgctgtgtaaattgtccacacccatttcattctgggcttagtgaaagtgaccccgtggctgggcacagtggttcacgcctgtaatcctagcactttgggaggccaacgcgggtagatcacctgaggtcaggagttcaagaccagcctggccaacatggtgaaaccccatcactactaaaaatacaaaaaattaaccgggcgtggtgacgggtgcctataatcccagctactcgggaggctgaggcaggagaatcgcttgaacccaggaggcagaggttgcggtgagccaagatcacgccattgcactctagcctgggtgacaagaacaaaactccatatctaaaaaaaaa

SEQ ID NO: 369743 - DNA, 869 bp, Homo sapiens
gttgggggccggtcgtagctggttttgtgagtggcaagagaacccgggtcgcgccccaacccgcggggcggcgggctggggttcggggcggcgggctggggttcggggcgcggcccctttaaggcccaggcagtgatctcagccgcgtccgccgccccgccctccccggcggcgagcccagagcgcatgcgcgccgcggctgcactccactgggcccgggacgcgccggcggcggcggagactccggggctgcggcgccgcccgccccgcccgcagagtccggctgccgcgcatcgtccgcagacgccgccaccgccatgggctcctgaggtatcccgcctggccggcctcgcccgggagccccaagggggagctgcgactcccgagcgcggggggctgcttgtttcggagaggcccgcgcgagggacgcccggcttcggccgccggctcccgggcggggagggcactacggaggccggtgcggccgcggagggagggggcatccgtctccccacccgtgcctcctctccgccccgcgaggtcgcccgtgggtgtgcccgctccctttccacgccaacgtggcgggggcagctcctggagtgtaatcggacctgtccggggggcggccccgggagagggaggcggatggaccaaggcgctttgcaagagggattgtgtgctcccgggtgggtgtgctggcgactggcacggccgagtgagtgggggaggcgtccgtgccctgtgcgggtggcagtgacctgggagggtggtcggcggggggctttcggggctgcgtcgtgagtggagggtgtacacgcccgccacacaggtccgcaggtttggaaggggatcgactgggacctggggct

SEQ ID NO: 369744 - DNA, 3591 bp, Homo sapiens
gttgggggccggtcgtagctggttttgtgagtggcaagagaacccgggtcgcgccccaacccgcggggcggcgggctggggttcggggcggcgggctggggttcggggcgcggcccctttaaggcccaggcagtgatctcagccgcgtccgccgccccgccctccccggcggcgagcccagagcgcatgcgcgccgcggctgcactccactgggcccgggacgcgccggcggcggcggagactccggggctgcggcgccgcccgccccgcccgcagagtccggctgccgcgcatcgtccgcagacgccgccaccgccatgggctcctgaggctagcttgtcactttctgcaaaggtttccctcagggagcctcctgctgccaggcaccatgacagtgaggggggatgtgctggccccggatccagcgtcgcccacgaccgcagcagcctcgcccagcgtctccgtgatccccgagggcagccccactgccatggagcagcctgtgttcctgatgacaactgccgctcaggccatctctggcttcttcgtgtggacggccctgctcatcacatgccaccagccttggtcatctataatttcctgagcctgtgctatgagtacctaggaggagaaagttccatcatgtcggagatcagaggaaaacccattgagtccagctgtatgtatggcacctgctgcctctggggaaagacttattccatcggatttctgaggttctgcaaacaggccaccctgcagttctgtgtggtgaagccactcatggcggtcagcactgtggtcctccaggccttcggcaagtaccgggatggggactttgacgtcaccagtggctacctctacgtgaccatcatctacaacatctccgtcagcctggccctctacgccctcttcctcttctacttcgccacccgggagctgctcagcccctacagccccgtcctcaagttcttcatggtcaagtccgtcatctttctttccttctggcaaggcatgctcctggccatcctggagaagtgtggggccatccccaaaatccactcggcccgcgtgtcggtgggcgagggcaccgtggctgccggctaccaggacttcatcatctgtgtggagatgttctttgcagccctggccctgcggcacgccttcacctacaaggtctatgctgacaagaggctggacgcacaaggccgctgtgcccccatgaagagcatctccagcagcctcaaggagaccatgaacccgcacgacatcgtgcaggacgccatccacaacttctcacctgcctaccagcagtacacgcagcagtccaccctggagcctgggcccacctggcgtggtggcgcccacggcctctcccgctcccacagcctcagtggcgcccgcgacaacgagaagactctcctgctcagctctgatgatgaattctaggtgcgggctgcagtggcggaagtgctggcgccatagccacggtcaggctgtgccccacctccagcctcaccaccaggccaggaggcagctggcacagtgctcacgccgcctttatttattggaccagaaacactcacatgtcacttccagaggaacgggggacagccaggctcgcccatgggccttcaggaatatttatacatggcccagcctgcactgcccgggcgagggcagaggacactgggagcaaggcttatgcccctgctgcccgtcctgtgctgggggcatgctgggaccagccgcacccaggccccaatgcttgtgtgtggaccagcggctgcagccttctagcccctcctccccgcgagactctcaggctgaggtcggcaagccgtggctcccccacacaccgtgcaataccctgtctgacctgggctcttcccgcctgcatccctcccctgtccacctttgtccagtgctagattcacctcaccccgggcaggagtggggatgtgggcgctctgtggtcctcccctcctgacccaggcctctgtggcatgctgcaaggatcagagccagacaccaggagtcacaggccccacccaggaagggcattcagggcccctgggcaccgcttctgttgaagcaggggcttctgggcccctgggtatccccacctgtcgtggccacacctctgcctgcctcatgccccttccccctggcctaccaaggacagcccacagcccgcactgccggctcacttgggtccttcctcgatagctttgggcagagcccttgcttcctggctgcttcagggctcaggggctcccagccctccttcccaggctgatgctgggtcctctctctctttggggcttctccctcccgtttcaggggaaaggtctgagtctccacgtttcagaccagcttctgggggaaggcagtccggcagggagaccgggaggggtggccacacagtggggagctgggaggtggggggaatggtcccagactcctctcggggcccctatccacacagggcctggtgttctaccccatctggcccctggcccatctcttctgtgccttagtcacatatgaaagcgcccctccctggctccccatctgtcccacacgctccctggggctcttagttcagctgctggcactcgcaggatcctgcagtgctgggcccagagcccttggacaggcctcaggagtggtcaggaccaccaagcccctcctctccccctccacacctctagacctggggcctccggaacccccagcaggctgggcttatactagctcctgacttaggaagagcctcgtgtcacaacacgtgtccctacaggcaaagtgtcctggcatttaaaacccagattatccctgggtttgggctgcagtcacctggagaagctggtagggtaagggagagggaccctgccggtgttcactggggattctttcttttggtccttcctggaatgaacaggttccctccctgccacctgtgaggagagttggggcccagccgtcttcctggcctccttcctttcctcgtggcagaggcctgcatgtgggtgccagaggccagctctccccctccatcttgggggggcggagcagttgggcccaagctgcccgggagggtgggtgcagacacaggctgaggaccagccctggccctgccccgccatctgctttcaccaagctgtctctccaccgtggcttcccttctccctccaggccaaagtgctgctgattcccactcccttggttttcgcctgcccagcgttgctgtttgcgtggagggtggggggagctcagtggcagggaatcagcggtccgtggggtcgtggggacgggaacatgtgcccgaccgctccatcccctcctcctccttaggatgcataacctaccttgtctttttttttttaaattttctttccaggtagagtagctctttgtacataaagaatacttgaaaaattaattgtatgatgtatgagaagacagagtctcctagttttgtatcttgttgtatgactgccatgagttccaccagaaagccactctattttggtctctgtgacattttaaatgcgtgacagaagtgagcaaataaagtgaggaagaaatcta

SEQ ID NO: 369745 - DNA, 2801 bp, Homo sapiens
gcccctgcctggcagatgcacttttcaactttcacctcaacttggaccctgctctcttctactcaaagtctagctgggtggcctctgtaatttgccctttgtgtttcttactaatatccttccgaactttggacgcgcatcctgcgcttcgaagcgcacgatgccccgtcctcaagttcttcatggtcaagtccgtcatctttctttccttctggcaaggcatgctcctggccatcctggagaagtgtggggccatccccaaaatccactcggcccgcgtgtcggtgggcgagggcaccgtggctgccggctaccaggacttcatcatctgtgtggagatgttctttgcagccctggccctgcggcacgccttcacctacaaggtctatgctgacaagaggctggacgcacaaggccgctgtgcccccatgaagagcatctccagcagcctcaaggagaccatgaacccgcacgacatcgtgcaggacgccatccacaacttctcacctgcctaccagcagtacacgcagcagtccaccctggagcctgggcccacctggcgtggtggcgcccacggcctctcccgctcccacagcctcagtggcgcccgcgacaacgagaagactctcctgctcagctctgatgatgaattctaggtgcgggctgcagtggcggaagtgctggcgccatagccacggtcaggctgtgccccacctccagcctcaccaccaggccaggaggcagctggcacagtgctcacgccgcctttatttattggaccagaaacactcacatgtcacttccagaggaacgggggacagccaggctcgcccatgggccttcaggaatatttatacatggcccagcctgcactgcccgggcgagggcagaggacactgggagcaaggcttatgcccctgctgcccgtcctgtgctgggggcatgctgggaccagccgcacccaggccccaatgcttgtgtgtggaccagcggctgcagccttctagcccctcctccccgcgagactctcaggctgaggtcggcaagccgtggctcccccacacaccgtgcaataccctgtctgacctgggctcttcccgcctgcatccctcccctgtccacctttgtccagtgctagattcacctcaccccgggcaggagtggggatgtgggcgctctgtggtcctcccctcctgacccaggcctctgtggcatgctgcaaggatcagagccagacaccaggagtcacaggccccacccaggaagggcattcagggcccctgggcaccgcttctgttgaagcaggggcttctgggcccctgggtatccccacctgtcgtggccacacctctgcctgcctcatgccccttccccctggcctaccaaggacagcccacagcccgcactgccggctcacttgggtccttcctcgatagctttgggcagagcccttgcttcctggctgcttcagggctcaggggctcccagccctccttcccaggctgatgctgggtcctctctctctttggggcttctccctcccgtttcaggggaaaggtctgagtctccacgtttcagaccagcttctgggggaaggcagtccggcagggagaccgggaggggtggccacacagtggggagctgggaggtggggggaatggtcccagactcctctcggggcccctatccacacagggcctggtgttctaccccatctggcccctggcccatctcttctgtgccttagtcacatatgaaagcgcccctccctggctccccatctgtcccacacgctccctggggctcttagttcagctgctggcactcgcaggatcctgcagtgctgggcccagagcccttggacaggcctcaggagtggtcaggaccaccaagcccctcctctccccctccacacctctagacctggggcctccggaacccccagcaggctgggcttatactagctcctgacttaggaagagcctcgtgtcacaacacgtgtccctacaggcaaagtgtcctggcatttaaaacccagattatccctgggtttgggctgcagtcacctggagaagctggtagggtaagggagagggaccctgccggtgttcactggggattctttcttttggtccttcctggaatgaacaggttccctccctgccacctgtgaggagagttggggcccagccgtcttcctggcctccttcctttcctcgtggcagaggcctgcatgtgggtgccagaggccagctctccccctccatcttgggggggcggagcagttgggcccaagctgcccgggagggtgggtgcagacacaggctgaggaccagccctggccctgccccgccatctgctttcaccaagctgtctctccaccgtggcttcccttctccctccaggccaaagtgctgctgattcccactcccttggttttcgcctgcccagcgttgctgtttgcgtggagggtggggggagctcagtggcagggaatcagcggtccgtggggtcgtggggacgggaacatgtgcccgaccgctccatcccctcctcctccttaggatgcataacctaccttgtctttttttttttaaattttctttccaggtagagtagctctttgtacataaagaatacttgaaaaattaattgtatgatgtatgagaagacagagtctcctagttttgtatcttgttgtatgactgccatgagttccaccagaaagccactctattttggtctctgtgacattttaaatgcgtgacagaagtgagcaaataaagtgaggaagaaatcta

SEQ ID NO: 369746 - DNA, 3811 bp, Homo sapiens
gttgggggccggtcgtagctggttttgtgagtggcaagagaacccgggtcgcgccccaacccgcggggcggcgggctggggttcggggcggcgggctggggttcggggcgcggcccctttaaggcccaggcagtgatctcagccgcgtccgccgccccgccctccccggcggcgagcccagagcgcatgcgcgccgcggctgcactccactgggcccgggacgcgccggcggcggcggagactccggggctgcggcgccgcccgccccgcccgcagagtccggctgccgcgcatcgtccgcagacgccgccaccgccatgggctcctgaggctagcttgtcactttctgcaaaggtttccctcagggagcctcctgctgccaggcaccatgacagtgaggggggatgtgctggccccggatccagcgtcgcccacgaccgcagcagcctcgcccagcgtctccgtgatccccgagggcagccccactgccatggagcagcctgtgttcctgatgacaactgccgctcaggccatctctggcttcttcgtgtggacggccctgctcatcacatgccaccagatctacatgcacctgcgctgctacagctgccccaacgagcagcgctacatcgtgcgcatcctcttcatcgtgcccatctacgcctttgactcctggctcagcctcctcttcttcaccaacgaccagtactacgtgtacttcggcaccgtccgcgactgctatgaggccttggtcatctataatttcctgagcctgtgctatgagtacctaggaggagaaagttccatcatgtcggagatcagaggaaaacccattgagtccagctgtatgtatggcacctgctgcctctggggaaagacttattccatcggatttctgaggttctgcaaacaggccaccctgcagttctgtgtggtgaagccactcatggcggtcagcactgtggtcctccaggccttcggcaagtaccgggatggggactttgacgtcaccagtggctacctctacgtgaccatcatctacaacatctccgtcagcctggccctctacgccctcttcctcttctacttcgccacccgggagctgctcagcccctacagccccgtcctcaagttcttcatggtcaagtccgtcatctttctttccttctggcaaggcatgctcctggccatcctggagaagtgtggggccatccccaaaatccactcggcccgcgtgtcggtgggcgagggcaccgtggctgccggctaccaggacttcatcatctgtgtggagatgttctttgcagccctggccctgcggcacgccttcacctacaaggtctatgctgacaagaggctggacgcacaaggccgctgtgcccccatgaagagcatctccagcagcctcaaggagaccatgaacccgcacgacatcgtgcaggacgccatccacaacttctcacctgcctaccagcagtacacgcagcagtccaccctggagcctgggcccacctggcgtggtggcgcccacggcctctcccgctcccacagcctcagtggcgcccgcgacaacgagaagactctcctgctcagctctgatgatgaattctaggtgcgggctgcagtggcggaagtgctggcgccatagccacggtcaggctgtgccccacctccagcctcaccaccaggccaggaggcagctggcacagtgctcacgccgcctttatttattggaccagaaacactcacatgtcacttccagaggaacgggggacagccaggctcgcccatgggccttcaggaatatttatacatggcccagcctgcactgcccgggcgagggcagaggacactgggagcaaggcttatgcccctgctgcccgtcctgtgctgggggcatgctgggaccagccgcacccaggccccaatgcttgtgtgtggaccagcggctgcagccttctagcccctcctccccgcgagactctcaggctgaggtcggcaagccgtggctcccccacacaccgtgcaataccctgtctgacctgggctcttcccgcctgcatccctcccctgtccacctttgtccagtgctagattcacctcaccccgggcaggagtggggatgtgggcgctctgtggtcctcccctcctgacccaggcctctgtggcatgctgcaaggatcagagccagacaccaggagtcacaggccccacccaggaagggcattcagggcccctgggcaccgcttctgttgaagcaggggcttctgggcccctgggtatccccacctgtcgtggccacacctctgcctgcctcatgccccttccccctggcctaccaaggacagcccacagcccgcactgccggctcacttgggtccttcctcgatagctttgggcagagcccttgcttcctggctgcttcagggctcaggggctcccagccctccttcccaggctgatgctgggtcctctctctctttggggcttctccctcccgtttcaggggaaaggtctgagtctccacgtttcagaccagcttctgggggaaggcagtccggcagggagaccgggaggggtggccacacagtggggagctgggaggtggggggaatggtcccagactcctctcggggcccctatccacacagggcctggtgttctaccccatctggcccctggcccatctcttctgtgccttagtcacatatgaaagcgcccctccctggctccccatctgtcccacacgctccctggggctcttagttcagctgctggcactcgcaggatcctgcagtgctgggcccagagcccttggacaggcctcaggagtggtcaggaccaccaagcccctcctctccccctccacacctctagacctggggcctccggaacccccagcaggctgggcttatactagctcctgacttaggaagagcctcgtgtcacaacacgtgtccctacaggcaaagtgtcctggcatttaaaacccagattatccctgggtttgggctgcagtcacctggagaagctggtagggtaagggagagggaccctgccggtgttcactggggattctttcttttggtccttcctggaatgaacaggttccctccctgccacctgtgaggagagttggggcccagccgtcttcctggcctccttcctttcctcgtggcagaggcctgcatgtgggtgccagaggccagctctccccctccatcttgggggggcggagcagttgggcccaagctgcccgggagggtgggtgcagacacaggctgaggaccagccctggccctgccccgccatctgctttcaccaagctgtctctccaccgtggcttcccttctccctccaggccaaagtgctgctgattcccactcccttggttttcgcctgcccagcgttgctgtttgcgtggagggtggggggagctcagtggcagggaatcagcggtccgtggggtcgtggggacgggaacatgtgcccgaccgctccatcccctcctcctccttaggatgcataacctaccttgtctttttttttttaaattttctttccaggtagagtagctctttgtacataaagaatacttgaaaaattaattgtatgatgtatgagaagacagagtctcctagttttgtatcttgttgtatgactgccatgagttccaccagaaagccactctattttggtctctgtgacattttaaatgcgtgacagaagtgagcaaataaagtgaggaagaaatctaaaaaaaaaaaaaaaaaaaaaaaaaaaaaaacaaaacgagtgtgttgcggccgcc

SEQ ID NO: 369747 - DNA, 3633 bp, Homo sapiens
gttgggggccggtcgtagctggttttgtgagtggcaagagaacccgggtcgcgccccaacccgcggggcggcgggctggggttcggggcggcgggctggggttcggggcgcggcccctttaaggcccaggcagtgatctcagccgcgtccgccgccccgccctccccggcggcgagcccagagcgcatgcgcgccgcggctgcactccactgggcccgggacgcgccggcggcggcggagactccggggctgcggcgccgcccgccccgcccgcagagtccggctgccgcgcatcgtccgcagacgccgccaccgccatgggctcctgaggctagcttgtcactttctgcaaaggtttccctcagggagcctcctgctgccaggcaccatgacagtgaggggggatgtgctggccccggatccagcgtcgcccacgaccgcagcagcctcgcccagcgtctccgtgatccccgagggcagccccactgccatggagcagcctgtgttcctgatgacaactgccgctcaggccatctctggcttcttcgtgtggacggccctgctcatcacatgccaccagatctacatgcacctgcgctgctacagctgccccaacgagcagcgctacatcgtgcgcatcctcttcatcgtgcccatctacgcctttgactcctggctcagcctcctcttcttcaccaacgaccagtactacgtgtacttcggcaccgtccgcgactgctatgaggccttggtcatctataatttcctgagcctgtgctatgagtacctaggaggagaaagttccatcatgtcggagatcagaggaaaacccattgagtccagctgtatgtatggcacctgctgcctctggggaaagacttattccatcggatttctgaggttctgcaaacaggccaccctgcagttctgtgtggtgaagccactcatggcggtcagcactgtggtcctccaggccttcggcaagtaccgggatggggactttgacgtcaccagtggctacctctacgtgaccatcatctacaacatctccgtcagcctggccctctacgccctcttcctcttctacttcgccacccgggagctgctcagcccctacagccccgtcctcaagttcttcatggtcaagtccgtcatctttctttccttctggcaaggcatgctcctggccatcctggagaagtgtggggccatccccaaaatccactcggcccgcgtgtcggtgggcgagggcaccgtggctgccggctaccaggacttcatcatctgtgtggagatgttctttgcagccctggccctgcggcacgccttcacctacaaggtctatgctgacaagaggctggacgcacaaggccgctgtgcccccatgaagagcatctccagcagcctcaaggagaccatgaacccgcacgacatcgtgcaggacgccatccacaacttctcacctgcctaccagcagtacacgcagcagtccaccctggagcctgggcccacctggcgtggtggcgcccacggcctctcccgctcccacagcctcagtggcgcccgcgacaacgagaagactctcctgctcagctctgatgatgaattctaggtgcgggctgcagtggcggaagtgctggcgccatagccacggtcaggctgtgccccacctccagcctcaccaccaggccaggaggcagctggcacagtgctcacgccgcctttatttattggaccagaaacactcacatgtcacttccagaggaacgggggacagccaggctcgcccatgggccttcaggaatatttatacatggcccagcctgcactgcccgggcgagggcagaggacactgggagcaaggcttatgcccctgctgcccgtcctgtgctgggggcatgctgggaccagccgcacccaggccccaatgcttgtgtgtggaccagcggctgcagccttctagcccctcctccccgcgagactctcaggctgaggtcggcaagccgtggctcccccacacaccgtgcaataccctgtctgacctgggctcttcccgcctgcatccctcccctgtccacctttgtccagtgctagattcacctcaccccgggcaggagtggggatgtgggcgctctgtggtcctcccctcctgacccaggcctctgtggcatgctgcaaggatcagagccagacaccaggagtcacaggccccacccaggaagggcattcagggcccctgggcaccgcttctgttgaagcaggggcttctgggcccctgggtatccccacctgtcgtggccacacctctgcctgcctcatgccccttccccctggcctaccaaggacagcccacagcccgcactgccggctcacttgggtccttcctcgatagctttgggcagagcccttgcttcctggctgcttcagggctcaggggctcccagccctccttcccaggctgatgctgggtcctctctctctttggggcttctccctcccgtttcaggggaaaggtctgagtctccacgtttcagaccagcttctgggggaaggcagtccggcagggagaccgggaggggtggccacacagtggggagctgggaggtggggggaatggtcccagactcctctcggggcccctatccacacagggcctggtgttctaccccatctggcccctggcccatctcttctgtgccttagtcacatatgaaagcgcccctccctggctccccatctgtcccacacgctccctggggctcttagttcagctgctggcactcgcaggatcctgcagtgctgggcccagagcccttggacaggcctcaggagtggtcaggaccaccaagcccctcctctccccctccacacctctagacctggggcctccggaacccccagcaggctgggcttatactagctcctgacttaggaagagcctcgtgtcacaacacgtgtccctacaggcaaagtgtcctggcatttaaaacccagattatccctgggtttgggctgcagtcacctggagaagctggtagggtaagggagagggaccctgccggtgttcactggggattctttcttttggtccttcctggaatgaacaggttccctccctgccacctgtgaggagagttggggcccagccgtcttcctggcctccttcctttcctcgtggcagaggcctgcatgtgggtgccagaggccagctctccccctccatcttgggggggcggagcagttgggcccaagctgcccgggagggtgggtgcagacacaggctgaggaccagccctggccctgccccgccatctgctttcaccaagctgtctctccaccgtggcttcccttctccctccaggccaaagtgctgctgattcccatcctcctccttaggatgcataacctaccttgtctttttttttttaaattttctttccaggtagagtagctctttgtacataaagaatacttgaaaaattaattgtatgatgtatgagaagacagagtctcctagttttgtatcttgttgtatgactgccatgagttccaccagaaagccactctattttggtctctgtgacattttaaatgcgtgacagaagtgagcaaataaagtgaggaagaaatcta

SEQ ID NO: 369748 - DNA, 956 bp, Homo sapiens
ctcctgacttaggaagagcctcgtgtcacaacacgtgtccctacaggcaaagtgtcctggcatttaaaacccagcctgctggggcctccggaacccccagcaggctgggcttatactagctcctgacttaggaagagcctcgtgtcacaacacgtgtccctacaggcaaagtgtcctggcatttaaaacccagattatccctgggtttgggctgcagtcacctggagaagctggtagggtaagggagagggaccctgccggtgttcactggggattctttcttttggtccttcctggaatgaacaggttccctccctgccacctgtgaggagagttggggcccagccgtcttcctggcctccttcctttcctcgtggcagaggcctgcatgtgggtgccagaggccagctctccccctccatcttgggggggcggagcagttgggcccaagctgcccgggagggtgggtgcagacacaggctgaggaccagccctggccctgccccgccatctgctttcaccaagctgtctctccaccgtggcttcccttctccctccaggccaaagtgctgctgattcccactcccttggttttcgcctgcccagcgttgctgtttgcgtggagggtggggggagctcagtggcagggaatcagcggtccgtggggtcgtggggacgggaacatgtgcccgaccgctccatcccctcctcctccttaggatgcataacctaccttgtctttttttttttaaattttctttccaggtagagtagctctttgtacataaagaatacttgaaaaattaattgtatgatgtatgagaagacagagtctcctagttttgtatcttgttgtatgactgccatgagttccaccagaaagccactctattttggtctctgtgacattttaaatgcgtgacagaagtgagcaaataaagtgaggaagaaatcta

SEQ ID NO: 369749 - DNA, 169 bp, Homo sapiens
gggagctgctcagcccctacagccccgtcctcaagttcttcatggtcaagtccgtcatctttctttccttctggcaaggtgagccccctcccagcacctggaggctgcccatgccaccctgtcctctgcgcttcctgctgccccttctgcttatggtccctggtgcctg

SEQ ID NO: 369750 - DNA, 3757 bp, Homo sapiens
gttgggggccggtcgtagctggttttgtgagtggcaagagaacccgggtcgcgccccaacccgcggggcggcgggctggggttcggggcggcgggctggggttcggggcgcggcccctttaaggcccaggcagtgatctcagccgcgtccgccgccccgccctccccggcggcgagcccagagcgcatgcgcgccgcggctgcactccactgggcccgggacgcgccggcggcggcggagactccggggctgcggcgccgcccgccccgcccgcagagtccggctgccgcgcatcgtccgcagacgccgccaccgccatgggctcctgaggctagcttgtcactttctgcaaaggtttccctcagggagcctcctgctgccaggcaccatgacagtgaggggggatgtgctggccccggatccagcgtcgcccacgaccgcagcagcctcgcccagcgtctccgtgatccccgagggcagccccactgccatggagcagcctgtgttcctgatgacaactgccgctcaggccatctctggcttcttcgtgtggacggccctgctcatcacatgccaccagatctacatgcacctgcgctgctacagctgccccaacgagcagcgctacatcgtgcgcatcctcttcatcgtgcccatctacgcctttgactcctggctcagcctcctcttcttcaccaacgaccagtactacgtgtacttcggcaccgtccgcgactgctatgaggccttggtcatctataatttcctgagcctgtgctatgagtacctaggaggagaaagttccatcatgtcggagatcagaggaaaacccattgagtccagctgtatgtatggcacctgctgcctctggggaaagacttattccatcggatttctgaggttctgcaaacaggccaccctgcagttctgtgtggtgaagccactcatggcggtcagcactgtggtcctccaggccttcggcaagtaccgggatggggactttgacgtcaccagtggctacctctacgtgaccatcatctacaacatctccgtcagcctggccctctacgccctcttcctcttctacttcgccacccgggagctgctcagcccctacagccccgtcctcaagttcttcatggtcaagtccgtcatctttctttccttctggcaaggcatgctcctggccatcctggagaagtgtggggccatccccaaaatccactcggcccgcgtgtcggtgggcgagggcaccgtggctgccggctaccaggacttcatcatctgtgtggagatgttctttgcagccctggccctgcggcacgccttcacctacaaggtctatgctgacaagaggctggacgcacaaggccgctgtgcccccatgaagagcatctccagcagcctcaaggagaccatgaacccgcacgacatcgtgcaggacgccatccacaacttctcacctgcctaccagcagtacacgcagcagtccaccctggagcctgggcccacctggcgtggtggcgcccacggcctctcccgctcccacagcctcagtggcgcccgcgacaacgagaagactctcctgctcagctctgatgatgaattctaggtgcgggctgcagtggcggaagtgctggcgccatagccacggtcaggctgtgccccacctccagcctcaccaccaggccaggaggcagctggcacagtgctcacgccgcctttatttattggaccagaaacactcacatgtcacttccagaggaacgggggacagccaggctcgcccatgggccttcaggaatatttatacatggcccagcctgcactgcccgggcgagggcagaggacactgggagcaaggcttatgcccctgctgcccgtcctgtgctgggggcatgctgggaccagccgcacccaggccccaatgcttgtgtgtggaccagcggctgcagccttctagcccctcctccccgcgagactctcaggctgaggtcggcaagccgtggctcccccacacaccgtgcaataccctgtctgacctgggctcttcccgcctgcatccctcccctgtccacctttgtccagtgctagattcacctcaccccgggcaggagtggggatgtgggcgctctgtggtcctcccctcctgacccaggcctctgtggcatgctgcaaggatcagagccagacaccaggagtcacaggccccacccaggaagggcattcagggcccctgggcaccgcttctgttgaagcaggggcttctgggcccctgggtatccccacctgtcgtggccacacctctgcctgcctcatgccccttccccctggcctaccaaggacagcccacagcccgcactgccggctcacttgggtccttcctcgatagctttgggcagagcccttgcttcctggctgcttcagggctcaggggctcccagccctccttcccaggctgatgctgggtcctctctctctttggggcttctccctcccgtttcaggggaaaggtctgagtctccacgtttcagaccagcttctgggggaaggcagtccggcagggagaccgggaggggtggccacacagtggggagctgggaggtggggggaatggtcccagactcctctcggggcccctatccacacagggcctggtgttctaccccatctggcccctggcccatctcttctgtgccttagtcacatatgaaagcgcccctccctggctccccatctgtcccacacgctccctggggctcttagttcagctgctggcactcgcaggatcctgcagtgctgggcccagagcccttggacaggcctcaggagtggtcaggaccaccaagcccctcctctccccctccacacctctagacctggggcctccggaacccccagcaggctgggcttatactagctcctgacttaggaagagcctcgtgtcacaacacgtgtccctacaggcaaagtgtcctggcatttaaaacccagattatccctgggtttgggctgcagtcacctggagaagctggtagggtaagggagagggaccctgccggtgttcactggggattctttcttttggtccttcctggaatgaacaggttccctccctgccacctgtgaggagagttggggcccagccgtcttcctggcctccttcctttcctcgtggcagaggcctgcatgtgggtgccagaggccagctctccccctccatcttgggggggcggagcagttgggcccaagctgcccgggagggtgggtgcagacacaggctgaggaccagccctggccctgccccgccatctgctttcaccaagctgtctctccaccgtggcttcccttctccctccaggccaaagtgctgctgattcccactcccttggttttcgcctgcccagcgttgctgtttgcgtggagggtggggggagctcagtggcagggaatcagcggtccgtggggtcgtggggacgggaacatgtgcccgaccgctccatcccctcctcctccttaggatgcataacctaccttgtctttttttttttaaattttctttccaggtagagtagctctttgtacataaagaatacttgaaaaattaattgtatgatgtatgagaagacagagtctcctagttttgtatcttgttgtatgactgccatgagttccaccagaaagccactctattttggtctctgtgacattttaaatgcgtgacagaagtgagcaaataaagtgaggaagaaatcta

SEQ ID NO: 369751 - DNA, 542 bp, Homo sapiens
cgactcttagagagatccccgctatcccccttcacatcccgatacaagtgaccagatattcacggtgtacatgtcggtcaccgtccgcgatctgctagtgaggccttggtcatctataatttcctgagcctgtgctatgagtacctaggaggagaaagttccatcatgtcggagatcagaggaaaacccattgagtccagctgtatgtatggcacctgctgcctctggggaaagacttattccatcggatttctgaggttctgcaaacaggccaccctgcagttctgtgtggtgaagccactcatggcggtcagcactgtggtcctccaggccttcggcaagtaccgggatggggactttgacgtcaccagtggctacctctacgtgaccatcatctacaacatctcctacctcggccaggcgcggtggctcacacctgtaatcccagcactgtgggaggccgaggcgggtggatcacctgaggacaggagttcgaggccaccctggccaacatggtgaaaacccgtctctactaaaaatac

SEQ ID NO: 369752 - DNA, 3278 bp, Homo sapiens
cccagggctcggctgggccaagtgtgatgtcatgagagctgggacgagacacccaggggctgcctggactgaggactgtggtagagcagctcttggcatttatctacatgcacctgcgctgctacagctgccccaacgagcagcgctacatcgtgcgcatcctcttcatcgtgcccatctacgcctttgactcctggctcagcctcctcttcttcaccaacgaccagtactacgtgtacttcggcaccgtccgcgactgctatgaggccttggtcatctataatttcctgagcctgtgctatgagtacctaggaggagaaagttccatcatgtcggagatcagaggaaaacccattgagtccagctgtatgtatggcacctgctgcctctggggaaagacttattccatcggatttctgaggttctgcaaacaggccaccctgcagttctgtgtggtgaagccactcatggcggtcagcactgtggtcctccaggccttcggcaagtaccgggatggggactttgacgtcaccagtggctacctctacgtgaccatcatctacaacatctccgtcagcctggccctctacgccctcttcctcttctacttcgccacccgggagctgctcagcccctacagccccgtcctcaagttcttcatggtcaagtccgtcatctttctttccttctggcaaggcatgctcctggccatcctggagaagtgtggggccatccccaaaatccactcggcccgcgtgtcggtgggcgagggcaccgtggctgccggctaccaggacttcatcatctgtgtggagatgttctttgcagccctggccctgcggcacgccttcacctacaaggtctatgctgacaagaggctggacgcacaaggccgctgtgcccccatgaagagcatctccagcagcctcaaggagaccatgaacccgcacgacatcgtgcaggacgccatccacaacttctcacctgcctaccagcagtacacgcagcagtccaccctggagcctgggcccacctggcgtggtggcgcccacggcctctcccgctcccacagcctcagtggcgcccgcgacaacgagaagactctcctgctcagctctgatgatgaattctaggtgcgggctgcagtggcggaagtgctggcgccatagccacggtcaggctgtgccccacctccagcctcaccaccaggccaggaggcagctggcacagtgctcacgccgcctttatttattggaccagaaacactcacatgtcacttccagaggaacgggggacagccaggctcgcccatgggccttcaggaatatttatacatggcccagcctgcactgcccgggcgagggcagaggacactgggagcaaggcttatgcccctgctgcccgtcctgtgctgggggcatgctgggaccagccgcacccaggccccaatgcttgtgtgtggaccagcggctgcagccttctagcccctcctccccgcgagactctcaggctgaggtcggcaagccgtggctcccccacacaccgtgcaataccctgtctgacctgggctcttcccgcctgcatccctcccctgtccacctttgtccagtgctagattcacctcaccccgggcaggagtggggatgtgggcgctctgtggtcctcccctcctgacccaggcctctgtggcatgctgcaaggatcagagccagacaccaggagtcacaggccccacccaggaagggcattcagggcccctgggcaccgcttctgttgaagcaggggcttctgggcccctgggtatccccacctgtcgtggccacacctctgcctgcctcatgccccttccccctggcctaccaaggacagcccacagcccgcactgccggctcacttgggtccttcctcgatagctttgggcagagcccttgcttcctggctgcttcagggctcaggggctcccagccctccttcccaggctgatgctgggtcctctctctctttggggcttctccctcccgtttcaggggaaaggtctgagtctccacgtttcagaccagcttctgggggaaggcagtccggcagggagaccgggaggggtggccacacagtggggagctgggaggtggggggaatggtcccagactcctctcggggcccctatccacacagggcctggtgttctaccccatctggcccctggcccatctcttctgtgccttagtcacatatgaaagcgcccctccctggctccccatctgtcccacacgctccctggggctcttagttcagctgctggcactcgcaggatcctgcagtgctgggcccagagcccttggacaggcctcaggagtggtcaggaccaccaagcccctcctctccccctccacacctctagacctggggcctccggaacccccagcaggctgggcttatactagctcctgacttaggaagagcctcgtgtcacaacacgtgtccctacaggcaaagtgtcctggcatttaaaacccagattatccctgggtttgggctgcagtcacctggagaagctggtagggtaagggagagggaccctgccggtgttcactggggattctttcttttggtccttcctggaatgaacaggttccctccctgccacctgtgaggagagttggggcccagccgtcttcctggcctccttcctttcctcgtggcagaggcctgcatgtgggtgccagaggccagctctccccctccatcttgggggggcggagcagttgggcccaagctgcccgggagggtgggtgcagacacaggctgaggaccagccctggccctgccccgccatctgctttcaccaagctgtctctccaccgtggcttcccttctccctccaggccaaagtgctgctgattcccactcccttggttttcgcctgcccagcgttgctgtttgcgtggagggtggggggagctcagtggcagggaatcagcggtccgtggggtcgtggggacgggaacatgtgcccgaccgctccatcccctcctcctccttaggatgcataacctaccttgtctttttttttttaaattttctttccaggtagagtagctctttgtacataaagaatacttgaaaaattaattgtatgatgtatgagaagacagagtctcctagttttgtatcttgttgtatgactgccatgagttccaccagaaagccactctattttggtctctgtgacattttaaatgcgtgacagaagtgagcaaataaagtgaggaagaaatcta

SEQ ID NO: 369753 - DNA, 3814 bp, Homo sapiens
gttgggggccggtcgtagctggttttgtgagtggcaagagaacccgggtcgcgccccaacccgcggggcggcgggctggggttcggggcggcgggctggggttcggggcgcggcccctttaaggcccaggcagtgatctcagccgcgtccgccgccccgccctccccggcggcgagcccagagcgcatgcgcgccgcggctgcactccactgggcccgggacgcgccggcggcggcggagactccggggctgcggcgccgcccgccccgcccgcagagtccggctgccgcgcatcgtccgcagacgccgccaccgccatgggctcctgaggctagcttgtcactttctgcaaaggtttccctcagggagcctcctgctgccaggcaccatgacagtgaggggggatgtgctggccccggatccagcgtcgcccacgaccgcagcagcctcgcccagcgtctccgtgatccccgagggcagccccactgccatggagcagcctgtgttcctgatgacaactgccgctcaggccatctctggcttcttcgtgtggacggccctgctcatcacatgccaccagatctacatgcacctgcgctgctacagctgccccaacgagcagcgctacatcgtgcgcatcctcttcatcgtgcccatctacgcctttgactcctggctcagcctcctcttcttcaccaacgaccagtactacgtgtacttcggcaccgtccgcgactgctatgaggccttggtcatctataatttcctgagcctgtgctatgagtacctaggaggagaaagttccatcatgtcggagatcagaggaaaacccattgagtccagctgtatgtatggcacctgctgcctctggggaaagacttattccatcggatttctgaggttctgcaaacaggccaccctgcagttctgtgtggtgaagccactcatggcggtcagcactgtggtcctccaggccttcggcaagtaccgggatggggactttgacgtcaccagtggctacctctacgtgaccatcatctacaacatctccgtcagcctggccctctacgccctcttcctcttctacttcgccacccgggagctgctcagcccctacagccccgtcctcaagttcttcatggtcaagtccgtcatctttctttccttctggcaaggcatgctcctggccatcctggagaagtgtggggccatccccaaaatccactcggcccgcgtgtcggtgggcgagggcaccgtggctgccggctaccaggacttcatcatctgtgtggagatgttctttgcagccctggccctgcggcacgccttcacctacaaggtctatgctgacaagaggctggacgcacaagtgccaacatacggcccttacgcctcctcacctgcccctcccgctccctgcccggcaggccgctgtgcccccatgaagagcatctccagcagcctcaaggagaccatgaacccgcacgacatcgtgcaggacgccatccacaacttctcacctgcctaccagcagtacacgcagcagtccaccctggagcctgggcccacctggcgtggtggcgcccacggcctctcccgctcccacagcctcagtggcgcccgcgacaacgagaagactctcctgctcagctctgatgatgaattctaggtgcgggctgcagtggcggaagtgctggcgccatagccacggtcaggctgtgccccacctccagcctcaccaccaggccaggaggcagctggcacagtgctcacgccgcctttatttattggaccagaaacactcacatgtcacttccagaggaacgggggacagccaggctcgcccatgggccttcaggaatatttatacatggcccagcctgcactgcccgggcgagggcagaggacactgggagcaaggcttatgcccctgctgcccgtcctgtgctgggggcatgctgggaccagccgcacccaggccccaatgcttgtgtgtggaccagcggctgcagccttctagcccctcctccccgcgagactctcaggctgaggtcggcaagccgtggctcccccacacaccgtgcaataccctgtctgacctgggctcttcccgcctgcatccctcccctgtccacctttgtccagtgctagattcacctcaccccgggcaggagtggggatgtgggcgctctgtggtcctcccctcctgacccaggcctctgtggcatgctgcaaggatcagagccagacaccaggagtcacaggccccacccaggaagggcattcagggcccctgggcaccgcttctgttgaagcaggggcttctgggcccctgggtatccccacctgtcgtggccacacctctgcctgcctcatgccccttccccctggcctaccaaggacagcccacagcccgcactgccggctcacttgggtccttcctcgatagctttgggcagagcccttgcttcctggctgcttcagggctcaggggctcccagccctccttcccaggctgatgctgggtcctctctctctttggggcttctccctcccgtttcaggggaaaggtctgagtctccacgtttcagaccagcttctgggggaaggcagtccggcagggagaccgggaggggtggccacacagtggggagctgggaggtggggggaatggtcccagactcctctcggggcccctatccacacagggcctggtgttctaccccatctggcccctggcccatctcttctgtgccttagtcacatatgaaagcgcccctccctggctccccatctgtcccacacgctccctggggctcttagttcagctgctggcactcgcaggatcctgcagtgctgggcccagagcccttggacaggcctcaggagtggtcaggaccaccaagcccctcctctccccctccacacctctagacctggggcctccggaacccccagcaggctgggcttatactagctcctgacttaggaagagcctcgtgtcacaacacgtgtccctacaggcaaagtgtcctggcatttaaaacccagattatccctgggtttgggctgcagtcacctggagaagctggtagggtaagggagagggaccctgccggtgttcactggggattctttcttttggtccttcctggaatgaacaggttccctccctgccacctgtgaggagagttggggcccagccgtcttcctggcctccttcctttcctcgtggcagaggcctgcatgtgggtgccagaggccagctctccccctccatcttgggggggcggagcagttgggcccaagctgcccgggagggtgggtgcagacacaggctgaggaccagccctggccctgccccgccatctgctttcaccaagctgtctctccaccgtggcttcccttctccctccaggccaaagtgctgctgattcccactcccttggttttcgcctgcccagcgttgctgtttgcgtggagggtggggggagctcagtggcagggaatcagcggtccgtggggtcgtggggacgggaacatgtgcccgaccgctccatcccctcctcctccttaggatgcataacctaccttgtctttttttttttaaattttctttccaggtagagtagctctttgtacataaagaatacttgaaaaattaattgtatgatgtatgagaagacagagtctcctagttttgtatcttgttgtatgactgccatgagttccaccagaaagccactctattttggtctctgtgacattttaaatgcgtgacagaagtgagcaaataaagtgaggaagaaatcta

SEQ ID NO: 369754 - DNA, 3790 bp, Homo sapiens
gttgggggccggtcgtagctggttttgtgagtggcaagagaacccgggtcgcgccccaacccgcggggcggcgggctggggttcggggcggcgggctggggttcggggcgcggcccctttaaggcccaggcagtgatctcagccgcgtccgccgccccgccctccccggcggcgagcccagagcgcatgcgcgccgcggctgcactccactgggcccgggacgcgccggcggcggcggagactccggggctgcggcgccgcccgccccgcccgcagagtccggctgccgcgcatcgtccgcagacgccgccaccgccatgggctcctgaggctagcttgtcactttctgcaaaggtttccctcagggagcctcctgctgccaggcaccatgacagtgaggggggatgtgctggccccggatccagcgtcgcccacgaccgcagcagcctcgcccagcgtctccgtgatccccgagggcagccccactgccatggagcagcctgtgttcctgatgacaactgccgctcaggccatctctggcttcttcgtgtggacggccctgctcatcacatgccaccagatctacatgcacctgcgctgctacagctgccccaacgagcagcgctacatcgtgcgcatcctcttcatcgtgcccatctacgcctttgactcctggctcagcctcctcttcttcaccaacgaccagtactacgtgtacttcggcaccgtccgcgactgctatgaggccttggtcatctataatttcctgagcctgtgctatgagtacctaggaggagaaagttccatcatgtcggagatcagaggaaaacccattgagtccagctgtatgtatggcacctgctgcctctggggaaagacttattccatcggatttctgaggttctgcaaacaggccaccctgcagttctgtgtggtgaagccactcatggcggtcagcactgtggtcctccaggccttcggcaagtaccgggatggggactttgacgtcaccagtggctacctctacgtgaccatcatctacaacatctccgtcagcctggccctctacgccctcttcctcttctacttcgccacccgggagctgctcagcccctacagccccgtcctcaagttcttcatggtcaagtccgtcatctttctttccttctggcaaggcatgctcctggccatcctggagaagtgtggggccatccccaaaatccactcggcccgcgtgtcggtgggcgagggcaccgtggctgccggctaccaggacttcatcatctgtgtggagatgttctttgcagccctggccctgcggcacgccttcacctacaaggtctatgctgacaagaggctggacgcacaaggccgctgtgcccccatgaagagcatctccagcagcctcaaggagaccatgaacccgcacgacatcgtgcaggacgccatccacaacttctcacctgcctaccagcagtacacgcagcagtccaccctggagcctgggcccacctggcgtggtggcgcccacggcctctcccgctcccacagcctcagtggcgcccgcgacaacgagaagactctcctgctcagctctgatgatgaattctaggtgcgggctgcagtggcggaagtgctggcgccatagccacggtcaggctgtgccccacctccagcctcaccaccaggccaggaggcagctggcacagtgctcacgccgcctttatttattggaccagaaacactcacatgtcacttccagaggaacgggggacagccaggctcgcccatgggccttcaggaatatttatacatggcccagcctgcactgcccgggcgagggcagaggacactgggagcaaggcttatgcccctgctgcccgtcctgtgctgggggcatgctgggaccagccgcacccaggccccaatgcttgtgtgtggaccagcggctgcagccttctagcccctcctccccgcgagactctcaggctgaggtcggcaagccgtggctcccccacacaccgtgcaataccctgtctgacctgggctcttcccgcctgcatccctcccctgtccacctttgtccagtgctagattcacctcaccccgggcaggagtggggatgtgggcgctctgtggtcctcccctcctgacccaggcctctgtggcatgctgcaaggatcagagccagacaccaggagtcacaggccccacccaggaagggcattcagggcccctgggcaccgcttctgttgaagcaggggcttctgggcccctgggtatccccacctgtcgtggccacacctctgcctgcctcatgccccttccccctggcctaccaaggacagcccacagcccgcactgccggctcacttgggtccttcctcgatagctttgggcagagcccttgcttcctggctgcttcagggctcaggggctcccagccctccttcccaggctgatgctgggtcctctctctctttggggcttctccctcccgtttcaggggaaaggtctgagtctccacgtttcagaccagcttctgggggaaggcagtccggcagggagaccgggaggggtggccacacagtggggagctgggaggtggggggaatggtcccagactcctctcggggcccctatccacacagggcctggtgttctaccccatctggcccctggcccatctcttctgtgccttagtcacatatgaaagcgcccctccctggctccccatctgtcccacacgctccctggggctcttagttcagctgctggcactcgcaggatcctgcagtgctgggcccagagcccttggacaggcctcaggagtggtcaggaccaccaagcccctcctctccccctccacacctctagacctggggcctccggaacccccagcaggctgggcttatactagctcctgacttaggaagagcctcgtgtcacaacacgtgtccctacaggcaaagtgtcctggcatttaaaacccagattatccctgggtttgggctgcagtcacctggagaagctggtagggtaagggagagggaccctgccggtgttcactggggattctttcttttggtccttcctggaatgaacaggttccctccctgccacctgtgaggagagttggggcccagccgtcttcctggcctccttcctttcctcgtggcagaggcctgcatgtgggtgccagaggccagctctccccctccatcttgggggggcggagcagttgggcccaagctgcccgggagggtgggtgcagacacaggctgaggaccagccctggccctgccccgccatctgctttcaccaagctgtctctccaccgtggcttcccttctccctccaggccaaagtgctgctgattcccactcccttggttttcgcctgcccagcgttgctgtttgcgtggagggtggggggagctcagtggcagggaatcagcggtccgtggggtcgtggggacgggaacatgtgcccgaccgctccatcccctcctcctccttaggatgcataacctaccttgtctttttttttttaaattttctttccaggtagagtagctctttgtacataaagaatacttgaaaaattaattgtatgatgtatgagaagacagagtctcctagttttgtatcttgttgtatgactgccatgagttccaccagaaagccactctattttggtctctgtgacattttaaatgcgtgacagaagtgagcaaataaagtgaggaagaaatctatatatgagataatatagattgtattgaaatctc

SEQ ID NO: 369755 - DNA, 1697 bp, Homo sapiens
gttgggggccggtcgtagctggttttgtgagtggcaagagaacccgggtcgcgccccaacccgcggggcggcgggctggggttcggggcggcgggctggggttcggggcgcggcccctttaaggcccaggcagtgatctcagccgcgtccgccgccccgccctccccggcggcgagcccagagcgcatgcgcgccgcggctgcactccactgggcccgggacgcgccggcggcggcggagactccggggctgcggcgccgcccgccccgcccgcagagtccggctgccgcgcatcgtccgcagacgccgccaccgccatgggctcctgaggctagcttgtcactttctgcaaaggtttccctcagggagcctcctgctgccaggcaccatgacagtgaggggggatgtgctggccccggatccagcgtcgcccacgaccgcagcagcctcgcccagcgtctccgtgatccccgagggcagccccactgccatggagcagcctgtgttcctgatgacaactgccgctcaggccatctctggcttcttcgtgtggacggccctgctcatcacatgccaccagatctacatgcacctgcgctgctacagctgccccaacgagcagcgctacatcgtgcgcatcctcttcatcgtgcccatctacgcctttgactcctggctcagcctcctcttcttcaccaacgaccagtactacgtgtacttcggcaccgtccgcgactgctatgaggccttggtcatctataatttcctgagcctgtgctatgagtacctaggaggagaaagttccatcatgtcggagatcagaggaaaacccattgagtccagctgtatgtatggcacctgctgcctctggggaaagacttattccatcggatttctgaggttctgcaaacaggccaccctgcagttctgtgtggtgaagccactcatggcggtcagcactgtggtcctccaggccttcggcaagtaccgggatggggactttgagtaagcagcgggtgctccccggggtgtgtgggaggagtgttggcgcaggctggtgccttggctcagggaagggggcagccagagtggccgcacagccatgaccttcctgggtgtctggtgctcacaacccccctgaagtctgagcccagcagtggacacccttgcagttggccccgctgccagcccctgagtgagccattggcagcagtcacgttcatgtccaggctgcagagtggtaccatgaagggatgggccacaaagggacagtgaccactgctgaggcagggagcgagagggtcagagccccaagaggtcggctcaagtccacagatacaaagcccgtgctgtgtaaattgtccacacccatttcattctgggcttagtgaaagtgaccccgtggctgggcacagtggttcacgcctgtaatcctagcactttgggaggccaacgcgggtagatcacctgaggtcaggagttcaagaccagcctggccaacatggtgaaaccccatcactactaaaaatacaaaaaattaaccgggcgtggtgacgggtgcctataatcccagctactcgggaggctgaggcaggagaatcgcttgaacccaggaggcagaggttgcggtgagccaagatcacgccattgcactctagcctgggtgacaagaacaaaactccatatctaaaaaaaaa

SEQ ID NO: 369756 - DNA, 639 bp, Homo sapiens
gaggctctggaagtctgaggagggaaagagaaaagatagagtggcatctagacaggttaattaaatgagtgctgtagtttccagacccttttgctgttttaagtctggaagggagggggtaacatggatactgtatgtagaaaaacttttccctggtgaaacatagacgtatgagtggatgctgcgccattagatattttgttctcattgtgtgctagttaagggaaagggccaaatgtagaatttggaggatagtgctggtctgctgtaaccactttcctcccagttttttctaaaggtgaaagttaacgttaatattgtaacaaaataggaataaggaattgtggaggaagatgagaagctgccagagggtaattggttttcccagaagttcttaaatttgggagctgtcttgccgcaagccattgagactggaaattcttggagttggtattgtttttgtaaattgactaatagagagttagggaagcctggagacttgttgggggtgagttctctaaatggttttaggcttgtctgtgtacttttgcaacgagattgtctaattctatgggcctctgaggtttcaaagtaaaacttgaaaattaattattttcccctccttatttgtttttgttt

SEQ ID NO: 369757 - DNA, 732 bp, Homo sapiens
gaggctctggaagtctgaggagggaaagagaaaagatagagtggcatctagacaggttaattaaatgagtgctgtagtttccagacccttttgctgttttaagtctggaagggagggggtaacatggatactgtatgtagaaaaacttttccctggtgaaacatagacgtatgagtggatgctgcgccattagatattttgttctcattgtgtgctagttaagggaaagggccaaatgtagaatttggaggatagtgctggtctgctgtaaccactttcctcccagttttttctaaaggtgaaagttaacgttaatattgtaacaaaataggaataaggaattgtggaggaagatgagaagctgccagagggtaattggttttcccagaagttcttaaatttgggagctgtcttgccgcaagccattgagactggaaattcttggagttggtattgtttttgtaaattgactaatagagagttagggaagcctggagacttgttgggggtgagttctctaaatggttttaggcttgtctgtgtacttttgcaacgagattgtctagaactggagcttagtccagctggtacaataccaactccccttctagttcccaaaggcgatgtccagacacagactttatgattattatatttttcaatgccagtgctgctcagccctcagcagaacttcagtttccatgaaataaacaatgactatataaaattcca

SEQ ID NO: 369758 - DNA, 2450 bp, Homo sapiens
tccggctcatgtctcactatggcctcgaagccgccactaaccggccgggttccgggaggcgccgttcaggatgcagccacccccgcccgcctgtcccctcccccacggccgcggcggcggcggcggcggcggctgctggagcccggatgcggcgccgtgaggcaggcccgggagagcggcgcggatggatccaacatggcggcgccgagcctgagccgagagaagagacctgggaaattaagtttcttgcggagtacggtggggattgcagctgctgagcagggattctggaaagcattgcgtacctgagcccccagcatggcgggcctaaagcggcgggcaagccaggtgtggccagaagagcatggtgagcaggaacatgggctgtacagcctgcaccgcatgtttgacatcgtgggcactcatctgacacacagagatgtgcgcgtgctttctttcctctttgttgatgtcattgatgaccacgagcgtggactcatccgaaatggacgtgacttcttattggcactggagcgccagggccgctgtgatgaaagtaactttcgccaggtgctgcagctgctgcgcatcatcactcgccacgacctgctgccctacgtcaccctcaagaggagacgggctgtgtgccctgatcttgtagacaagtatctggaggagacatcaattcgctatgtgacccccagagccctcagtgatccagaaccaaggcctccccagccctctaaaacagtgcctccccactatcctgtggtgtgttgccccacttcgggtcctcagatgtgtagcaagcggccagcccgagggagagccacacttgggagccagcgaaaacgccggaagtcagtgacaccagatcccaaggagaagcagacatgtgacatcagactgcgggttcgggctgaatactgccagcatgagactgctctgcagggcaatgtcttctctaacaagcaggacccacttgagcgccagtttgagcgctttaaccaggccaacaccatcctcaagtcccgggacctgggctccatcatctgtgacatcaagttctctgagctcacctacctcgatgcattctggcgtgactacatcaatggctctttattagaggcacttaaaggtgtcttcatcacagactccctcaagcaagctgtgggccatgaagccatcaagctgctggtaaatgtagacgaggaggactatgagctgggccgacagaaactcctgaggaacttgatgctgcaagcattgccctgacctattccctcttctcactttggggactgttcccatcacccacctctggagcttacactgttctggggtttgttctctacccttccaaccaatcacacccctgcctttttttttttttttttaaagaaaaagacaaaagaaagtggaagtggtattccccacccctccctgcacccatgtgcctgggcttcccctttatttcccttttccatttaccccgtaatgtgtctctacagctaccttaccactgagccgtaagacaaatgtataggaagaagcaaagtctacagcacatagtctttgtaagggattgatgtgaacacttttttttggatgcactaaggagttatcaatacttctggctttatgagagctcttaaattttgtctaaaaaaccaaagggctgtgagtaagggagctatgtggaaagtgggactctgaagtgtattttgaaaattaatcgccaccctcttccaaattatagaattttttaaaaacaagctgtggccctttccactctctcctggcctctggtgctgctcctctctgccgcctttcctccattccatggcttgaaacctctgcctgatgtggctccttcctttttcccatttgtcaaaccctcttcaaaggaggaacagataagactgggtcagcctagtcatgcctcccaactgtggtggtatatgtgtacacacatacacagggtggatggagaagaggttgctgattaaaatacactccccctataaaggggaagggggagtgtgacactttctttccatgttcaagtgaaaataaataatgtaccctgcagcccttttcccctttgctttcttctggcttgggcaaagggcatcataggtgtaagtgaagtaattcctttttccttccccctcctccactcctacgcccactcccatgcttgggagaatggggctgggacatgcactgagtgttgcacttttatttaggtagggaggcatgttgaatgagccaggaggtctagaactggagcttagtccagctggtacaataccaactccccttctagttcccaaaggcgatgtccagacacagactttatgattattatatttttcaatgccagtgctgctcagccctcagcagaacttcagtttccatgaaataaacaatgactatataaaattcca

SEQ ID NO: 369759 - DNA, 2778 bp, Homo sapiens
  misc_feature (351)..(351): n is a, c, g, or t
  misc_feature (356)..(356): n is a, c, g, or t
  misc_feature (363)..(364): n is a, c, g, or t
ccttccttgttggactccagtcggaaccaatcgttgtcagcattcttgttgttctccacataccggataagggactgatattcctccttcagtcgctgcacccacaactcacgatctcggggtccggcgttagtcttcagcaccgggatctcagacacaacacgtcgcgtggcttcatccgccatcttggaccagggcgcaagagaaacgcggaagtggtgttgcctgtagcttacctcaaggcgccgtcatcttttaaataattgggctacctcccccggggcccttccaaaattgggttccctgccaaccttaaaaattgggggggtcccccgttccccggaaaaaacnggccncagccannctaaccggccgggttccgggaggcgccgttcaggatgcagccacccccgcccgcctgtcccctcccccacggccgcggcggcggcggcggcggcggctgctggagcccggatgcggcgccgtgaggcaggcccgggagagcggcgcggatggatccaacatggcggcgccgagcctgagccgagagaagagacctgggaaattaagtttcttgcggagtacggtggggattgcagctgctgagcagggattctggaaagcattgcgtacctgagcccccagcatggcgggcctaaagcggcgggcaagccaggtgtggccagaagagcatggtgagcaggaacatgggctgtacagcctgcaccgcatgtttgacatcgtgggcactcatctgacacacagagatgtgcgcgtgctttctttcctctttgttgatgtcattgatgaccacgagcgtggactcatccgaaatggacgtgacttcttattggcactggagcgccagggccgctgtgatgaaagtaactttcgccaggtgctgcagctgctgcgcatcatcactcgccacgacctgctgccctacgtcaccctcaagaggagacgggctgtgtgccctgatcttgtagacaagtatctggaggagacatcaattcgctatgtgacccccagagccctcagtgatccagaaccaaggcctccccagccctctaaaacagtgcctccccactatcctgtggtgtgttgccccacttcgggtcctcagatgtgtagcaagcggccagcccgagggagagccacacttgggagccagcgaaaacgccggaagtcagtgacaccagatcccaaggagaagcagacatgtgacatcagactgcgggttcgggctgaatactgccagcatgagactgctctgcagggcaatgtcttctctaacaagcaggacccacttgagcgccagtttgagcgctttaaccaggccaacaccatcctcaagtcccgggacctgggctccatcatctgtgacatcaagttctctgagctcacctacctcgatgcattctggcgtgactacatcaatggctctttattagaggcacttaaaggtgtcttcatcacagactccctcaagcaagctgtgggccatgaagccatcaagctgctggtaaatgtagacgaggaggactatgagctgggccgacagaaactcctgaggaacttgatgctgcaagcattgccctgacctattccctcttctcactttggggactgttcccatcacccacctctggagcttacactgttctggggtttgttctctacccttccaaccaatcacacccctgcctttttttttttttttttaaagaaaaagacaaaagaaagtggaagtggtattccccacccctccctgcacccatgtgcctgggcttcccctttatttcccttttccatttaccccgtaatgtgtctctacagctaccttaccactgagccgtaagacaaatgtataggaagaagcaaagtctacagcacatagtctttgtaagggattgatgtgaacacttttttttggatgcactaaggagttatcaatacttctggctttatgagagctcttaaattttgtctaaaaaaccaaagggctgtgagtaagggagctatgtggaaagtgggactctgaagtgtattttgaaaattaatcgccaccctcttccaaattatagaattttttaaaaacaagctgtggccctttccactctctcctggcctctggtgctgctcctctctgccgcctttcctccattccatggcttgaaacctctgcctgatgtggctccttcctttttcccatttgtcaaaccctcttcaaaggaggaacagataagactgggtcagcctagtcatgcctcccaactgtggtggtatatgtgtacacacatacacagggtggatggagaagaggttgctgattaaaatacactccccctataaaggggaagggggagtgtgacactttctttccatgttcaagtgaaaataaataatgtaccctgcagcccttttcccctttgctttcttctggcttgggcaaagggcatcataggtgtaagtgaagtaattcctttttccttccccctcctccactcctacgcccactcccatgcttgggagaatggggctgggacatgcactgagtgttgcacttttatttaggtagggaggcatgttgaatgagccaggaggtctagaactggagcttagtccagctggtacaataccaactccccttctagttcccaaaggcgatgtccagacacagactttatgattattatatttttcaatgccagtgctgctcagccctcagcagaacttcagtttccatgaaataaacaatgactatataaaattcca

SEQ ID NO: 369760 - DNA, 2386 bp, Homo sapiens
  misc_feature (351)..(351): n is a, c, g, or t
  misc_feature (356)..(356): n is a, c, g, or t
  misc_feature (363)..(364): n is a, c, g, or t
ccttccttgttggactccagtcggaaccaatcgttgtcagcattcttgttgttctccacataccggataagggactgatattcctccttcagtcgctgcacccacaactcacgatctcggggtccggcgttagtcttcagcaccgggatctcagacacaacacgtcgcgtggcttcatccgccatcttggaccagggcgcaagagaaacgcggaagtggtgttgcctgtagcttacctcaaggcgccgtcatcttttaaataattgggctacctcccccggggcccttccaaaattgggttccctgccaaccttaaaaattgggggggtcccccgttccccggaaaaaacnggccncagccannctaaccggccgggttccgggaggcgccgttcaggatgcagccacccccgcccgcctgtcccctcccccacggccgcggcggcggcggcggcggcggctgctggagcccggatgcggcgccgtgaggcaggcccgggagagcggcgcggatggatccaacatggcggcgccgagcctgagccgagatacggtggggattgcagctgctgagcagggattctggaaagcattgcgtacctgagcccccagcatggcgggcctaaagcggcgggcaagccaggtgtggccagaagagcatggtgagcaggaacatgggctgtacagcctgcaccgcatgtttgacatcgtgggcactcatctgacacacagagatgtgcgcgtgctttctttcctctttgttgatgtcattgatgaccacgagcgtggactcatccgaaatggacgtgacttcttattggcactggagcgccagggccgctgtgatgaaagtaactttcgccaggtgctgcagctgctgcgcatcatcactcgccacgacctgctgccctacgtcaccctcaagaggagacgggctgtgtgccctgatcttgtagacaagtatctggaggagacatcaattcgctatgtgacccccagagccctcagtgatccagaaccaaggcctccccagccctctaaaacagtgcctccccactatcctgtggtgtgttgccccacttcgggtcctcagatgtgtagcaagcggccagcccgagggagagccacacttgggagccagcgaaaacgccggaagtcagtgacaccagatcccaaggagaagcagacatgtgacatcagactgcgggttcgggctgaatactgccagcatgagactgctctgcagggcaatgtcttctctaacaagcaggacccacttgagcgccagtttgagcgctttaaccaggccaacaccatcctcaagtcccgggacctgggctccatcatctgtgacatcaagttctctgagctcacctacctcgatgcattctggcgtgactacatcaatggctctttattagaggcacttaaaggtgtcttcatcacagactccctcaagcaagctgtgggccatgaagccatcaagctgctggtaaatgtagacgaggaggactatgagctgggccgacagaaactcctgaggaacttgatgctgcaagcattgccctgacctattccctcttctcactttggggactgttcccatcacccacctctggagcttacactgttctggggtttgttctctacccttccaaccaatcacacccctgcctttttttttttttttttaaagaaaaagacaaaagaaagtggaagtggtattccccacccctccctgcacccatgtgcctgggcttcccctttatttcccttttccatttaccccgtaatgtgtctctacagctaccttaccactgagccgtaagacaaatgtataggaagaagcaaagtctacagcacatagtctttgtaagggattgatgtgaacacttttttttggatgcactaaggagttatcaatacttctggctttatgagagctcttaaattttgtctaaaaaaccaaagggctgtgagtaagggagctatgtggaaagtgggactctgaagtgtattttgaaaattaatcgccaccctcttccaaattatagaattttttaaaaacaagctgtggccctttccactctctcctggcctctggtgctgctcctctctgccgcctttcctccattccatggcttgaaacctctgcctgatgtggctccttcctttttcccatttgtcaaaccctcttcaaaggaggaacagataagactgggtcagcctagtcatgcctcccaactgtggtggtatatgtgtacacacatacacagggtggatggagaagaggttgctgattaaaatacactccccctataaaggggaagggggagtgtgacactttctttccatgttcaagtgaaaataaataatgtaccctgca

SEQ ID NO: 369761 - DNA, 1948 bp, Homo sapiens
gaaggaaagtggagggggaggcggtggagacgtccagcctgagaacctcaagagagggaggtgacgggacgctgagaggaagagacctgggaaattaagtttcttgcggagtacggtggggattgcagctgctgagcagggattctggaaagcattgcgtacctgagcccccagcatggcgggcctaaagcggcgggcaagccaggtgtggccagaagagcatggtgagcaggaacatgggctgtacagcctgcaccgcatgtttgacatcgtgggcactcatctgacacacagagatgtgcgcgtgctttctttcctctttgttgatgtcattgatgaccacgagcgtggactcatccgaaatggacgtgacttcttattggcactggagcgccagggccgctgtgatgaaagtaactttcgccaggtgctgcagctgctgcgcatcatcactcgccacgacctgctgccctacgtcaccctcaagaggagacgggctgtgtgccctgatcttgtagacaagtatctggaggagacatcaattcgctatgtgacccccagagccctcagtgatccagaaccaaggcctccccagccctctaaaacagtgcctccccactatcctgtggtgtgttgccccacttcgggtcctcagatgtgtagcaagcggccagcccgagggagagccacacttgggagccagcgaaaacgccggaagtcagtgacaccagatcccaaggagaagcagacatgtgacatcagactgcgggttcgggctgaatactgccagcatgagactgctctgcagggcaatgtcttctctaacaagcaggacccacttgagcgccagtttgagcgctttaaccaggccaacaccatcctcaagtcccgggacctgggctccatcatctgtgacatcaagttctctgagctcacctacctcgatgcattctggcgtgactacatcaatggctctttattagaggcacttaaaggtgtcttcatcacagactccctcaagcaagctgtgggccatgaagccatcaagctgctggtaaatgtagacgaggaggactatgagctgggccgacagaaactcctgaggaacttgatgctgcaagcattgccctgacctattccctcttctcactttggggactgttcccatcacccacctctggagcttacactgttctggggtttgttctctacccttccaaccaatcacacccctgcctttttttttttttttttaaagaaaaagacaaaagaaagtggaagtggtattccccacccctccctgcacccatgtgcctgggcttcccctttatttcccttttccatttaccccgtaatgtgtctctacagctaccttaccactgagccgtaagacaaatgtataggaagaagcaaagtctacagcacatagtctttgtaagggattgatgtgaacacttttttttggatgcactaaggagttatcaatacttctggctttatgagagctcttaaattttgtctaaaaaaccaaagggctgtgagtaagggagctatgtggaaagtgggactctgaagtgtattttgaaaattaatcgccaccctcttccaaattatagaattttttaaaaacaagctgtggccctttccactctctcctggcctctggtgctgctcctctctgccgcctttcctccattccatggcttgaaacctctgcctgatgtggctccttcctttttcccatttgtcaaaccctcttcaaaggaggaacagataagactgggtcagcctagtcatgcctcccaactgtggtggtatatgtgtacacacatacacagggtggatggagaagaggttgctgattaaaatacactccccctataaaggggaagggggagtgtgacactttctttccatgttcaagtgaaaataaataatgtaccctgca

SEQ ID NO: 369762 - DNA, 1896 bp, Homo sapiens
tgggcgatccgctcgtattgaagggggaagagacctgggaaattaagtttcttgcggagtacggtggggattgcagctgctgagcagggattctggaaagcattgcgtacctgagcccccagcatggcgggcctaaagcggcgggcaagccaggtgtggccagaagagcatggtgagcaggaacatgggctgtacagcctgcaccgcatgtttgacatcgtgggcactcatctgacacacagagatgtgcgcgtgctttctttcctctttgttgatgtcattgatgaccacgagcgtggactcatccgaaatggacgtgacttcttattggcactggagcgccagggccgctgtgatgaaagtaactttcgccaggtgctgcagctgctgcgcatcatcactcgccacgacctgctgccctacgtcaccctcaagaggagacgggctgtgtgccctgatcttgtagacaagtatctggaggagacatcaattcgctatgtgacccccagagccctcagtgatccagaaccaaggcctccccagccctctaaaacagtgcctccccactatcctgtggtgtgttgccccacttcgggtcctcagatgtgtagcaagcggccagcccgagggagagccacacttgggagccagcgaaaacgccggaagtcagtgacaccagatcccaaggagaagcagacatgtgacatcagactgcgggttcgggctgaatactgccagcatgagactgctctgcagggcaatgtcttctctaacaagcaggacccacttgagcgccagtttgagcgctttaaccaggccaacaccatcctcaagtcccgggacctgggctccatcatctgtgacatcaagttctctgagctcacctacctcgatgcattctggcgtgactacatcaatggctctttattagaggcacttaaaggtgtcttcatcacagactccctcaagcaagctgtgggccatgaagccatcaagctgctggtaaatgtagacgaggaggactatgagctgggccgacagaaactcctgaggaacttgatgctgcaagcattgccctgacctattccctcttctcactttggggactgttcccatcacccacctctggagcttacactgttctggggtttgttctctacccttccaaccaatcacacccctgcctttttttttttttttttaaagaaaaagacaaaagaaagtggaagtggtattccccacccctccctgcacccatgtgcctgggcttcccctttatttcccttttccatttaccccgtaatgtgtctctacagctaccttaccactgagccgtaagacaaatgtataggaagaagcaaagtctacagcacatagtctttgtaagggattgatgtgaacacttttttttggatgcactaaggagttatcaatacttctggctttatgagagctcttaaattttgtctaaaaaaccaaagggctgtgagtaagggagctatgtggaaagtgggactctgaagtgtattttgaaaattaatcgccaccctcttccaaattatagaattttttaaaaacaagctgtggccctttccactctctcctggcctctggtgctgctcctctctgccgcctttcctccattccatggcttgaaacctctgcctgatgtggctccttcctttttcccatttgtcaaaccctcttcaaaggaggaacagataagactgggtcagcctagtcatgcctcccaactgtggtggtatatgtgtacacacatacacagggtggatggagaagaggttgctgattaaaatacactccccctataaaggggaagggggagtgtgacactttctttccatgttcaagtgaaaataaataatgtaccctgca

SEQ ID NO: 369763 - DNA, 2043 bp, Homo sapiens
tccggctcatgtctcactatggcctcgaagccgccactaaccggccgggttccgggaggcgccgttcaggatgcagccacccccgcccgcctgtcccctcccccacggccgcggcggcggcggcggcggcggctgctggagcccggatgcggcgccgtgaggcaggcccgggagagcggcgcggatggatccaacatggcggcgccgagcctgagccgagagaagagacctgggaaattaagtttcttgcggagtacggtggggattgcagctgctgagcagggattctggaaagcattgcgtacctgagcccccagcatggcgggcctaaagcggcgggcaagccaggtgtggccagaagagcatggtgagcaggaacatgggctgtacagcctgcaccgcatgtttgacatcgtgggcactcatctgacacacagagatgtgcgcgtgctttctttcctctttgttgatgtcattgatgaccacgagcgtggactcatccgaaatggacgtgacttcttattggcactggagcgccagggccgctgtgatgaaagtaactttcgccaggtgctgcagctgctgcgcatcatcactcgccacgacctgctgccctacgtcaccctcaagaggagacgggctgtgtgccctgatcttgtagacaagtatctggaggagacatcaattcgctatgtgacccccagagccctcagtgatccagaaccaaggcctccccagccctctaaaacagtgcctccccactatcctgtggtgtgttgccccacttcgggtcctcagatgtgtagcaagcggccagcccgagggagagccacacttgggagccagcgaaaacgccggaagtcagtgacaccagatcccaaggagaagcagacatgtgacatcagactgcgggttcgggctgaatactgccagcatgagactgctctgcagggcaatgtcttctctaacaagcaggacccacttgagcgccagtttgagcgctttaaccaggccaacaccatcctcaagtcccgggacctgggctccatcatctgtgacatcaagttctctgagctcacctacctcgatgcattctggcgtgactacatcaatggctctttattagaggcacttaaaggtgtcttcatcacagactccctcaagcaagctgtgggccatgaagccatcaagctgctggtaaatgtagacgaggaggactatgagctgggccgacagaaactcctgaggaacttgatgctgcaagcattgccctgacctattccctcttctcactttggggactgttcccatcacccacctctggagcttacactgttctggggtttgttctctacccttccaaccaatcacacccctgcctttcttatgatattcttattttaaaaggaaaaacagacaaagagacacggtggaaggtggatatttccccaaacccatcaccgtgacaccacatgtgtgtgccgggagacttccccattagatatgccacttaatcacattattacccgcgagaagagggtggtccctccctagcggagacgatacccgtgtcccacgaacgtgggagcgccgggtagatgaaaacaccacgtgtggatctatgcgggaaacgcaacagcacacaagagttcttaccacgggccaacgagttagggctccgttgtgggcttagcggggaattctggacgtgcgtgcaccaccacctctcttacagagtggggaagtggcaccaacaggagggaacgacataagactcagagacgacaaaaccgatgctcggtggaggaccgtctagcagacgacaagaaaaggacacccataaggaaacactcgacgcgggcccgataacaacacaagaccccccccagaggggggcccgtgcaagagaagacatacacggaggggacagaccccatatcgagggcagcaacaacacaggcgtgggggcgacgcctgcccgaaacaacgagaggagaatactccacgggggcacaacaacacttagtaaccacagccggagaa

SEQ ID NO: 369764 - DNA, 2046 bp, Homo sapiens
tccggctcatgtctcactatggcctcgaagccgccactaaccggccgggttccgggaggcgccgttcaggatgcagccacccccgcccgcctgtcccctcccccacggccgcggcggcggcggcggcggcggctgctggagcccggatgcggcgccgtgaggcaggcccgggagagcggcgcggatggatccaacatggcggcgccgagcctgagccgagagaagagacctgggaaattaagtttcttgcggagtacggtggggattgcagctgctgagcagggattctggaaagcattgcgtacctgagcccccagcatggcgggcctaaagcggcgggcaagccaggtgtggccagaagagcatggtgagcaggaacatgggctgtacagcctgcaccgcatgtttgacatcgtgggcactcatctgacacacagagatgtgcgcgtgctttctttcctctttgttgatgtcattgatgaccacgagcgtggactcatccgaaatggacgtgacttcttattggcactggagcgccagggccgctgtgatgaaagtaactttcgccaggtgctgcagctgctgcgcatcatcactcgccacgacctgctgccctacgtcaccctcaagaggagacgggctgtgtgccctgatcttgtagacaagtatctggaggagacatcaattcgctatgtgacccccagagccctcagtgatccagaaccaaggcctccccagccctctaaaacagtgcctccccactatcctgtggtgtgttgccccacttcgggtcctcagatgtgtagcaagcggccagcccgagggagagccacacttgggagccagcgaaaacacatcagactgcgggttcgggctgaatactgccagcatgagactgctctgcagggcaatgtcttctctaacaagcaggacccacttgagcgccagtttgagcgctttaaccaggccaacaccatcctcaagtcccgggacctgggctccatcatctgtgacatcaagttctctgagctcacctacctcgatgcattctggcgtgactacatcaatggctctttattagaggcacttaaaggtgtcttcatcacagactccctcaagcaagctgtgggccatgaagccatcaagctgctggtaaatgtagacgaggaggactatgagctgggccgacagaaactcctgaggaacttgatgctgcaagcattgccctgacctattccctcttctcactttggggactgttcccatcacccacctctggagcttacactgttctggggtttgttctctacccttccaaccaatcacacccctgcctttttttttttttttttaaagaaaaagacaaaagaaagtggaagtggtattccccacccctccctgcacccatgtgcctgggcttcccctttatttcccttttccatttaccccgtaatgtgtctctacagctaccttaccactgagccgtaagacaaatgtataggaagaagcaaagtctacagcacatagtctttgtaagggattgatgtgaacacttttttttggatgcactaaggagttatcaatacttctggctttatgagagctcttaaattttgtctaaaaaaccaaagggctgtgagtaagggagctatgtggaaagtgggactctgaagtgtattttgaaaattaatcgccaccctcttccaaattatagaattttttaaaaacaagctgtggccctttccactctctcctggcctctggtgctgctcctctctgccgcctttcctccattccatggcttgaaacctctgcctgatgtggctccttcctttttcccatttgtcaaaccctcttcaaaggaggaacagataagactgggtcagcctagtcatgcctcccaactgtggtggtatatgtgtacacacatacacagggtggatggagaagaggttgctgattaaaatacactccccctataaaggggaagggggagtgtgacactttctttccatgttcaagtgaaaataaataatgtaccctgca

SEQ ID NO: 369765 - DNA, 2056 bp, Homo sapiens
  misc_feature (351)..(351): n is a, c, g, or t
  misc_feature (356)..(356): n is a, c, g, or t
  misc_feature (363)..(364): n is a, c, g, or t
ccttccttgttggactccagtcggaaccaatcgttgtcagcattcttgttgttctccacataccggataagggactgatattcctccttcagtcgctgcacccacaactcacgatctcggggtccggcgttagtcttcagcaccgggatctcagacacaacacgtcgcgtggcttcatccgccatcttggaccagggcgcaagagaaacgcggaagtggtgttgcctgtagcttacctcaaggcgccgtcatcttttaaataattgggctacctcccccggggcccttccaaaattgggttccctgccaaccttaaaaattgggggggtcccccgttccccggaaaaaacnggccncagccannctaaccggccgggttccgggaggcgccgttcaggatgcagccacccccgcccgcctgtcccctcccccacggccgcggcggcggcggcggcggcggctgctggagcccggatgcggcgccgtgaggcaggcccgggagagcggcgcggatggatccaacatggcggcgccgagcctgagccgagagaagagacctgggaaattaagtttcttgcggaggtgctgcagctgctgcgcatcatcactcgccacgacctgctgccctacgtcaccctcaagaggagacgggctgtgtgccctgatcttgtagacaagtatctggaggagacatcaattcgctatgtgacccccagagccctcagtgatccagaaccaaggcctccccagccctctaaaacagatgtgtagcaagcggccagcccgagggagagccacacttgggagccagcgaaaacgccggaagtcagtgacaccagatcccaaggagaagcagacatgtgacatcagactgcgggttcgggctgaatactgccagcatgagactgctctgcagggcaatgtcttctctaacaagcaggacccacttgagcgccagtttgagcgctttaaccaggccaacaccatcctcaagtcccgggacctgggctccatcatctgtgacatcaagttctctgagctcacctacctcgatgcattctggcgtgactacatcaatggctctttattagaggcacttaaaggtgtcttcatcacagactccctcaagcaagctgtgggccatgaagccatcaagctgctggtaaatgtagacgaggaggactatgagctgggccgacagaaactcctgaggaacttgatgctgcaagcattgccctgacctattccctcttctcactttggggactgttcccatcacccacctctggagcttacactgttctggggtttgttctctacccttccaaccaatcacacccctgcctttttttttttttttttaaagaaaaagacaaaagaaagtggaagtggtattccccacccctccctgcacccatgtgcctgggcttcccctttatttcccttttccatttaccccgtaatgtgtctctacagctaccttaccactgagccgtaagacaaatgtataggaagaagcaaagtctacagcacatagtctttgtaagggattgatgtgaacacttttttttggatgcactaaggagttatcaatacttctggctttatgagagctcttaaattttgtctaaaaaaccaaagggctgtgagtaagggagctatgtggaaagtgggactctgaagtgtattttgaaaattaatcgccaccctcttccaaattatagaattttttaaaaacaagctgtggccctttccactctctcctggcctctggtgctgctcctctctgccgcctttcctccattccatggcttgaaacctctgcctgatgtggctccttcctttttcccatttgtcaaaccctcttcaaaggaggaacagataagactgggtcagcctagtcatgcctcccaactgtggtggtatatgtgtacacacatacacagggtggatggagaagaggttgctgattaaaatacactccccctataaaggggaagggggagtgtgacactttctttccatgttcaagtgaaaataaataatgtaccctgca

SEQ ID NO: 369766 - DNA, 1699 bp, Homo sapiens
ccaccaagcccagctaattttttctttttttgtagaaacgggtctccctatgttgcccaggctggtcttaaacgcctgggctcaagtgatcctcctgccttggcctcccaaaatgctgggattacaggtgtgagcccctgtgcctggccagtgtttatttttaaacaaacacttcaaaaatttaataaacatgtataaagcactatactgtgccaggcattgttagcaactgggaatatgggaatgcatgagactagttcctgcccttgagtgtctcatcggttctttccctgccctttcagtacggtggggattgcagctgctgagcagggattctggaaagcattgcgtacctgagcccccagcatggcgggcctaaagcggcgggcaagccaggtgtggccagaagagcatggtgagcaggaacatgggctgtacagcctgcaccgcatgtttgacatcgtgggcactcatctgacacacagagatgtgcgcgtgctttctttcctctttgttgatgtcattgatgaccacgagcgtggactcatccgaaatggacgtgacttcttattggcactggagcgccagggccgctgtgatgaaagtaactttcgccaggtgctgcagctgctgcgcatcatcactcgccacgacctgctgccctacgtcaccctcaagaggagacgggctgctcgatgcattctggcgtgactacatcaatggctctttattagaggcacttaaaggtgtcttcatcacagactccctcaagcaagctgtgggccatgaagccatcaagctgctggtaaatgtagacgaggaggactatgagctgggccgacagaaactcctgaggaacttgatgctgcaagcattgccctgacctattccctcttctcactttggggactgttcccatcacccacctctggagcttacactgttctggggtttgttctctacccttccaaccaatcacacccctgcctttttttttttttttttaaagaaaaagacaaaagaaagtggaagtggtattccccacccctccctgcacccatgtgcctgggcttcccctttatttcccttttccatttaccccgtaatgtgtctctacagctaccttaccactgagccgtaagacaaatgtataggaagaagcaaagtctacagcacatagtctttgtaagggattgatgtgaacacttttttttggatgcactaaggagttatcaatacttctggctttatgagagctcttaaattttgtctaaaaaaccaaagggctgtgagtaagggagctatgtggaaagtgggactctgaagtgtattttgaaaattaatcgccaccctcttccaaattatagaattttttaaaaacaagctgtggccctttccactctctcctggcctctggtgctgctcctctctgccgcctttcctccattccatggcttgaaacctctgcctgatgtggctccttcctttttcccatttgtcaaaccctcttcaaaggaggaacagataagactgggtcagcctagtcatgcctcccaactgtggtggtatatgtgtacacacatacacagggtggatggagaagaggttgctgattaaaatacactccccctataaaggggaagggggagtgtgacactttctttccatgttcaagtgaaaataaataatgtaccctgca

SEQ ID NO: 369767 - DNA, 1603 bp, Homo sapiens
tccggctcatgtctcactatggcctcgaagccgccactaaccggccgggttccgggaggcgccgttcaggatgcagccacccccgcccgcctgtcccctcccccacggccgcggcggcggcggcggcggcggctgctggagcccggatgcggcgccgtgaggcaggcccgggagagcggcgcggatggatccaacatggcggcgccgagcctgagccgagagaagagacctgggaaattaagtttcttgcggagtacggtggggattgcagctgctgagcagggattctggaaagcattgcgtacctgagcccccagcatggcgggcctaaagcggcgggcaagccaggtgtggccagaagagcatggtgagcaggaacatgggctgtacagcctgcaccgcatgtttgacatcgtgggcactcatctgacacacagagatgtgcgcgtgctttctttcctctttgttgatgtcattgatgaccacgagcgtggactcatccgaaatggacgtgacttcttattggcactggagcgccagggccgctgtgatgaaagtaactttcgccaggtgctgcagctgctgcgcatcatcactcgccacgacctgctgccctacgtcaccctcaagaggagacgggctgctcgatgcattctggcgtgactacatcaatggctctttattagaggcacttaaaggtgtcttcatcacagactccctcaagcaagctgtgggccatgaagccatcaagctgctggtaaatgtagacgaggaggactatgagctgggccgacagaaactcctgaggaacttgatgctgcaagcattgccctgacctattccctcttctcactttggggactgttcccatcacccacctctggagcttacactgttctggggtttgttctctacccttccaaccaatcacacccctgcctttcttatgatattcttattttaaaaggaaaaacagacaaagagacacggtggaaggtggatatttccccaaacccatcaccgtgacaccacatgtgtgtgccgggagacttccccattagatatgccacttaatcacattattacccgcgagaagagggtggtccctccctagcggagacgatacccgtgtcccacgaacgtgggagcgccgggtagatgaaaacaccacgtgtggatctatgcgggaaacgcaacagcacacaagagttcttaccacgggccaacgagttagggctccgttgtgggcttagcggggaattctggacgtgcgtgcaccaccacctctcttacagagtggggaagtggcaccaacaggagggaacgacataagactcagagacgacaaaaccgatgctcggtggaggaccgtctagcagacgacaagaaaaggacacccataaggaaacactcgacgcgggcccgataacaacacaagaccccccccagaggggggcccgtgcaagagaagacatacacggaggggacagaccccatatcgagggcagcaacaacacaggcgtgggggcgacgcctgcccgaaacaacgagaggagaatactccacgggggcacaacaacacttagtaaccacagccggagaa

SEQ ID NO: 369768 - DNA, 1832 bp, Homo sapiens
tgggcgatccgctcgtattgaagggggaagagacctgggaaattaagtttcttgcggagtacggtggggattgcagctgctgagcagggattctggaaagcattgcgtacctgagcccccagcatggcgggcctaaagcggcgggcaagccaggtgtggccagaagagcatggtgagcaggaacatgggctgtacagcctgcaccgcatgtttgacatcgtgggcactcatctgacacacagagatgtgcgcgtgctttctttcctctttgttgatgtcattgatgaccacgagcgtggactcatccgaaatggacgtgacttcttattggcactggagcgccagggccgctgtgatgaaagtaactttcgccaggtgctgcagctgctgcgcatcatcactcgccacgacctgctgccctacgtcaccctcaagaggagacgggctgtgtgccctgatcttgtagacaagtatctggaggagacatcaattcgctatgtgacccccagagccctcagtgatccagaaccaaggcctccccagccctctaaaacagtgcctccccactatcctgtggtgtgttgccccacttcgggtcctcagatgtgtagcaagcggccagcccgagggagagccacacttgggagccagcgaaaacgccggaagtcagtgacaccagatcccaaggagaagcagacatgtgacatcagactgcgggttcgggctgaatactgccagcatgagactgctctgcagggcaatgtcttctctaacaagcaggacccacttgagcgccagtttgagcgctttaaccaggccaacaccatcctcaagtcccgggacctgggctccatcatctgtgacatcaagttctctgagctcacctacctcgatgcattctggcgtgactacatcaatggctctttattagaggcacttaaaggtgtcttcatcacagactccctcaagcaagctgtgggccatgaagccatcaagctgctggtaaatgtagacgaggaggactatgagctgggccgacagaaactcctgaggaacttgatgctgcaagcattgccctgacctattccctcttctcactttggggactgttcccatcacccacctctggagcttacactgttctggggtttgttctctacccttccaaccaatcacacccctccctgcacccatgtgcctgggcttcccctttatttcccttttccatttaccccgtaatgtgtctctacagctaccttaccactgagccgtaagacaaatgtataggaagaagcaaagtctacagcacatagtctttgtaagggattgatgtgaacacttttttttggatgcactaaggagttatcaatacttctggctttatgagagctcttaaattttgtctaaaaaaccaaagggctgtgagtaagggagctatgtggaaagtgggactctgaagtgtattttgaaaattaatcgccaccctcttccaaattatagaattttttaaaaacaagctgtggccctttccactctctcctggcctctggtgctgctcctctctgccgcctttcctccattccatggcttgaaacctctgcctgatgtggctccttcctttttcccatttgtcaaaccctcttcaaaggaggaacagataagactgggtcagcctagtcatgcctcccaactgtggtggtatatgtgtacacacatacacagggtggatggagaagaggttgctgattaaaatacactccccctataaaggggaagggggagtgtgacactttctttccatgttcaagtgaaaataaataatgtaccctgca

SEQ ID NO: 369769 - DNA, 2091 bp, Homo sapiens
tccggctcatgtctcactatggcctcgaagccgccactaaccggccgggttccgggaggcgccgttcaggatgcagccacccccgcccgcctgtcccctcccccacggccgcggcggcggcggcggcggcggctgctggagcccggatgcggcgccgtgaggcaggcccgggagagcggcgcggatggatccaacatggcggcgccgagcctgagccgagagaagagacctgggaaattaagtttcttgcggagtacggtggggattgcagctgctgagcagggattctggaaagcattgcgtacctgagcccccagcatggcgggcctaaagcggcgggcaagccaggtgtggccagaagagcatggtgagcaggaacatgggctgtacagcctgcaccgcatgtttgacatcgtgggcactcatctgacacacagagatgtgcgcgtgctttctttcctctttgttgatgtcattgatgaccacgagcgtggactcatccgaaatggacgtgacttcttattggcactggagcgccagggccgctgtgatgaaagtaactttcgccaggtgctgcagctgctgcgcatcatcactcgccacgacctgctgccctacgtcaccctcaagaggagacgggctgtgtgccctgatcttgtagacaagtatctggaggagacatcaattcgctatgtgacccccagagccctcagtgatccagaaccaaggcctccccagccctctaaaacagtgcctccccactatcctgtggtgtgttgccccacttcgggtcctcagatgtgtagcaagcggccagcccgagggagagccacacttgggagccagcgaaaacgccggaagtcagtgacaccagatcccaaggagaagcagacatgtgacatcagactgcgggttcgggctgaatactgccagcatgagactgctctgcagggcaatgtcttctctaacaagcaggacccacttgagcgccagtttgagcgctttaaccaggccaacaccatcctcaagtcccgggacctgggctccatcatctgtgacatcaagttctctgagctcacctacctcgatgcattctggcgtgactacatcaatggctctttattagaggcacttaaaggtgtcttcatcacagactccctcaagcaagctgtgggccatgaagccatcaagctgctggtaaatgtagacgaggaggactatgagctgggccgacagaaactcctgaggaacttgatgctgcaagcattgccctgacctattccctcttctcactttggggactgttcccatcacccacctctggagcttacactgttctggggtttgttctctacccttccaaccaatcacacccctgcctttttttttttttttttaaagaaaaagacaaaagaaagtggaagtggtattccccacccctccctgcacccatgtgcctgggcttcccctttatttcccttttccatttaccccgtaatgtgtctctacagctaccttaccactgagccgtaagacaaatgtataggaagaagcaaagtctacagcacatagtctttgtaagggattgatgtgaacacttttttttggatgcactaaggagttatcaatacttctggctttatgagagctcttaaattttgtctaaaaaaccaaagggctgtgagtaagggagctatgtggaaagtgggactctgaagtgtattttgaaaattaatcgccaccctcttccaaattatagaattttttaaaaacaagctgtggccctttccactctctcctggcctctggtgctgctcctctctgccgcctttcctccattccatggcttgaaacctctgcctgatgtggctccttcctttttcccatttgtcaaaccctcttcaaaggaggaacagataagactgggtcagcctagtcatgcctcccaactgtggtggtatatgtgtacacacatacacagggtggatggagaagaggttgctgattaaaatacactccccctataaaggggaagggggagtgtgacactttctttccatgttcaagtgaaaataaataatgtaccctgca

SEQ ID NO: 369770 - DNA, 2027 bp, Homo sapiens
tccggctcatgtctcactatggcctcgaagccgccactaaccggccgggttccgggaggcgccgttcaggatgcagccacccccgcccgcctgtcccctcccccacggccgcggcggcggcggcggcggcggctgctggagcccggatgcggcgccgtgaggcaggcccgggagagcggcgcggatggatccaacatggcggcgccgagcctgagccgagagaagagacctgggaaattaagtttcttgcggagtacggtggggattgcagctgctgagcagggattctggaaagcattgcgtacctgagcccccagcatggcgggcctaaagcggcgggcaagccaggtgtggccagaagagcatggtgagcaggaacatgggctgtacagcctgcaccgcatgtttgacatcgtgggcactcatctgacacacagagatgtgcgcgtgctttctttcctctttgttgatgtcattgatgaccacgagcgtggactcatccgaaatggacgtgacttcttattggcactggagcgccagggccgctgtgatgaaagtaactttcgccaggtgctgcagctgctgcgcatcatcactcgccacgacctgctgccctacgtcaccctcaagaggagacgggctgtgtgccctgatcttgtagacaagtatctggaggagacatcaattcgctatgtgacccccagagccctcagtgatccagaaccaaggcctccccagccctctaaaacagtgcctccccactatcctgtggtgtgttgccccacttcgggtcctcagatgtgtagcaagcggccagcccgagggagagccacacttgggagccagcgaaaacgccggaagtcagtgacaccagatcccaaggagaagcagacatgtgacatcagactgcgggttcgggctgaatactgccagcatgagactgctctgcagggcaatgtcttctctaacaagcaggacccacttgagcgccagtttgagcgctttaaccaggccaacaccatcctcaagtcccgggacctgggctccatcatctgtgacatcaagttctctgagctcacctacctcgatgcattctggcgtgactacatcaatggctctttattagaggcacttaaaggtgtcttcatcacagactccctcaagcaagctgtgggccatgaagccatcaagctgctggtaaatgtagacgaggaggactatgagctgggccgacagaaactcctgaggaacttgatgctgcaagcattgccctgacctattccctcttctcactttggggactgttcccatcacccacctctggagcttacactgttctggggtttgttctctacccttccaaccaatcacacccctccctgcacccatgtgcctgggcttcccctttatttcccttttccatttaccccgtaatgtgtctctacagctaccttaccactgagccgtaagacaaatgtataggaagaagcaaagtctacagcacatagtctttgtaagggattgatgtgaacacttttttttggatgcactaaggagttatcaatacttctggctttatgagagctcttaaattttgtctaaaaaaccaaagggctgtgagtaagggagctatgtggaaagtgggactctgaagtgtattttgaaaattaatcgccaccctcttccaaattatagaattttttaaaaacaagctgtggccctttccactctctcctggcctctggtgctgctcctctctgccgcctttcctccattccatggcttgaaacctctgcctgatgtggctccttcctttttcccatttgtcaaaccctcttcaaaggaggaacagataagactgggtcagcctagtcatgcctcccaactgtggtggtatatgtgtacacacatacacagggtggatggagaagaggttgctgattaaaatacactccccctataaaggggaagggggagtgtgacactttctttccatgttcaagtgaaaataaataatgtaccctgca

SEQ ID NO: 369771 - DNA, 1901 bp, Homo sapiens
tatttcaatcatgggctggtgtctttcattgatagttactgtgccctttgccttacaattgacatacggtggggattgcagctgctgagcagggattctggaaagcattgcgtacctgagcccccagcatggcgggcctaaagcggcgggcaagccaggtgtggccagaagagcatggtgagcaggaacatgggctgtacagcctgcaccgcatgtttgacatcgtgggcactcatctgacacacagagatgtgcgcgtgctttctttcctctttgttgatgtcattgatgaccacgagcgtggactcatccgaaatggacgtgacttcttattggcactggagcgccagggccgctgtgatgaaagtaactttcgccaggtgctgcagctgctgcgcatcatcactcgccacgacctgctgccctacgtcaccctcaagaggagacgggctgtgtgccctgatcttgtagacaagtatctggaggagacatcaattcgctatgtgacccccagagccctcagtgatccagaaccaaggcctccccagccctctaaaacagtgcctccccactatcctgtggtgtgttgccccacttcgggtcctcagatgtgtagcaagcggccagcccgagggagagccacacttgggagccagcgaaaacgccggaagtcagtgacaccagatcccaaggagaagcagacatgtgacatcagactgcgggttcgggctgaatactgccagcatgagactgctctgcagggcaatgtcttctctaacaagcaggacccacttgagcgccagtttgagcgctttaaccaggccaacaccatcctcaagtcccgggacctgggctccatcatctgtgacatcaagttctctgagctcacctacctcgatgcattctggcgtgactacatcaatggctctttattagaggcacttaaaggtgtcttcatcacagactccctcaagcaagctgtgggccatgaagccatcaagctgctggtaaatgtagacgaggaggactatgagctgggccgacagaaactcctgaggaacttgatgctgcaagcattgccctgacctattccctcttctcactttggggactgttcccatcacccacctctggagcttacactgttctggggtttgttctctacccttccaaccaatcacacccctgcctttttttttttttttttaaagaaaaagacaaaagaaagtggaagtggtattccccacccctccctgcacccatgtgcctgggcttcccctttatttcccttttccatttaccccgtaatgtgtctctacagctaccttaccactgagccgtaagacaaatgtataggaagaagcaaagtctacagcacatagtctttgtaagggattgatgtgaacacttttttttggatgcactaaggagttatcaatacttctggctttatgagagctcttaaattttgtctaaaaaaccaaagggctgtgagtaagggagctatgtggaaagtgggactctgaagtgtattttgaaaattaatcgccaccctcttccaaattatagaattttttaaaaacaagctgtggccctttccactctctcctggcctctggtgctgctcctctctgccgcctttcctccattccatggcttgaaacctctgcctgatgtggctccttcctttttcccatttgtcaaaccctcttcaaaggaggaacagataagactgggtcagcctagtcatgcctcccaactgtggtggtatatgtgtacacacatacacagggtggatggagaagaggttgctgattaaaatacactccccctataaaggggaagggggagtgtgacactttctttccatgttcaagtgaaaataaataatgtaccctgca

SEQ ID NO: 369772 - DNA, 2139 bp, Homo sapiens
ccaccaagcccagctaattttttctttttttgtagaaacgggtctccctatgttgcccaggctggtcttaaacgcctgggctcaagtgatcctcctgccttggcctcccaaaatgctgggattacaggtgtgagcccctgtgcctggccagtgtttatttttaaacaaacacttcaaaaatttaataaacatgtataaagcactatactgtgccaggcattgttagcaactgggaatatgggaatgcatgagactagttcctgcccttgagtgtctcatcggttctttccctgccctttcagtacggtggggattgcagctgctgagcagggattctggaaagcattgcgtacctgagcccccagcatggcgggcctaaagcggcgggcaagccaggtgtggccagaagagcatggtgagcaggaacatgggctgtacagcctgcaccgcatgtttgacatcgtgggcactcatctgacacacagagatgtgcgcgtgctttctttcctctttgttgatgtcattgatgaccacgagcgtggactcatccgaaatggacgtgacttcttattggcactggagcgccagggccgctgtgatgaaagtaactttcgccaggtgctgcagctgctgcgcatcatcactcgccacgacctgctgccctacgtcaccctcaagaggagacgggctgtgtgccctgatcttgtagacaagtatctggaggagacatcaattcgctatgtgacccccagagccctcagtgatccagaaccaaggcctccccagccctctaaaacagtgcctccccactatcctgtggtgtgttgccccacttcgggtcctcagatgtgtagcaagcggccagcccgagggagagccacacttgggagccagcgaaaacgccggaagtcagtgacaccagatcccaaggagaagcagacatgtgacatcagactgcgggttcgggctgaatactgccagcatgagactgctctgcagggcaatgtcttctctaacaagcaggacccacttgagcgccagtttgagcgctttaaccaggccaacaccatcctcaagtcccgggacctgggctccatcatctgtgacatcaagttctctgagctcacctacctcgatgcattctggcgtgactacatcaatggctctttattagaggcacttaaaggtgtcttcatcacagactccctcaagcaagctgtgggccatgaagccatcaagctgctggtaaatgtagacgaggaggactatgagctgggccgacagaaactcctgaggaacttgatgctgcaagcattgccctgacctattccctcttctcactttggggactgttcccatcacccacctctggagcttacactgttctggggtttgttctctacccttccaaccaatcacacccctgcctttttttttttttttttaaagaaaaagacaaaagaaagtggaagtggtattccccacccctccctgcacccatgtgcctgggcttcccctttatttcccttttccatttaccccgtaatgtgtctctacagctaccttaccactgagccgtaagacaaatgtataggaagaagcaaagtctacagcacatagtctttgtaagggattgatgtgaacacttttttttggatgcactaaggagttatcaatacttctggctttatgagagctcttaaattttgtctaaaaaaccaaagggctgtgagtaagggagctatgtggaaagtgggactctgaagtgtattttgaaaattaatcgccaccctcttccaaattatagaattttttaaaaacaagctgtggccctttccactctctcctggcctctggtgctgctcctctctgccgcctttcctccattccatggcttgaaacctctgcctgatgtggctccttcctttttcccatttgtcaaaccctcttcaaaggaggaacagataagactgggtcagcctagtcatgcctcccaactgtggtggtatatgtgtacacacatacacagggtggatggagaagaggttgctgattaaaatacactccccctataaaggggaagggggagtgtgacactttctttccatgttcaagtgaaaataaataatgtaccctgca

SEQ ID NO: 369773 - DNA, 2181 bp, Homo sapiens
tccggctcatgtctcactatggcctcgaagccgccactaaccggccgggttccgggaggcgccgttcaggatgcagccacccccgcccgcctgtcccctcccccacggccgcggcggcggcggcggcggcggctgctggagcccggatgcggcgccgtgaggcaggcccgggagagcggcgcggatggatccaacatggcggcgccgagcctgagccgagagaagagacctgggaaattaagtttcttgcggagtacggtggggattgcagctgctgagcagggattctggaaagcattgcgtacctgagcccccagcatggcgggcctaaagcggcgggcaagccaggtgtggccagaagagcatggtgagcaggaacatgggctgtacagcctgcaccgcatgtttgacatcgtgggcactcatctgacacacagagatgtgcgcgtgctttctttcctctttgttgatgtcattgatgaccacgagcgtggactcatccgaaatggacgtgacttcttattggcactggagcgccagggccgctgtgatgaaagtaactttcgccaggtgctgcagctgctgcgcatcatcactcgccacgacctgctgccctacgtcaccctcaagaggagacgggctgtgtgccctgatcttgtagacaagtatctggaggagacatcaattcgctatgtgacccccagagccctcagtgatccagaaccaaggcctccccagccctctaaaacagtgcctccccactatcctgtggtgtgttgccccacttcgggtcctcagatgtgtagcaagcggccagcccgagggagagccacacttgggagccagcgaaaacgccggaagtcagtgacaccagatcccaaggagaagcagacatgtggtgaggaagttcaagggttccagagatggagcagacttgaaggagaatataaagaactgctgggacactgggcagtttatgctattcagtacatcagactgcgggttcgggctgaatactgccagcatgagactgctctgcagggcaatgtcttctctaacaagcaggacccacttgagcgccagtttgagcgctttaaccaggccaacaccatcctcaagtcccgggacctgggctccatcatctgtgacatcaagttctctgagctcacctacctcgatgcattctggcgtgactacatcaatggctctttattagaggcacttaaaggtgtcttcatcacagactccctcaagcaagctgtgggccatgaagccatcaagctgctggtaaatgtagacgaggaggactatgagctgggccgacagaaactcctgaggaacttgatgctgcaagcattgccctgacctattccctcttctcactttggggactgttcccatcacccacctctggagcttacactgttctggggtttgttctctacccttccaaccaatcacacccctgcctttttttttttttttttaaagaaaaagacaaaagaaagtggaagtggtattccccacccctccctgcacccatgtgcctgggcttcccctttatttcccttttccatttaccccgtaatgtgtctctacagctaccttaccactgagccgtaagacaaatgtataggaagaagcaaagtctacagcacatagtctttgtaagggattgatgtgaacacttttttttggatgcactaaggagttatcaatacttctggctttatgagagctcttaaattttgtctaaaaaaccaaagggctgtgagtaagggagctatgtggaaagtgggactctgaagtgtattttgaaaattaatcgccaccctcttccaaattatagaattttttaaaaacaagctgtggccctttccactctctcctggcctctggtgctgctcctctctgccgcctttcctccattccatggcttgaaacctctgcctgatgtggctccttcctttttcccatttgtcaaaccctcttcaaaggaggaacagataagactgggtcagcctagtcatgcctcccaactgtggtggtatatgtgtacacacatacacagggtggatggagaagaggttgctgattaaaatacactccccctataaaggggaagggggagtgtgacactttctttccatgttcaagtgaaaataaataatgtaccctgca

SEQ ID NO: 369774 - DNA, 2044 bp, Homo sapiens
tccggctcatgtctcactatggcctcgaagccgccactaaccggccgggttccgggaggcgccgttcaggatgcagccacccccgcccgcctgtcccctcccccacggccgcggcggcggcggcggcggcggctgctggagcccggatgcggcgccgtgaggcaggcccgggagagcggcgcggatggatccaacatggcggcgccgagcctgagccgagagaagagacctgggaaattaagtttcttgcggagtacggtggggattgcagctgctgagcagggattctggaaagcattgcgtacctgagcccccagcatggcgggcctaaagcggcgggcaagccaggtgtggccagaagagcatggtgagcaggaacatgggctgtacagcctgcaccgcatgtttgacatcgtgggcactcatctgacacacagagatgtgcgcgtgctttctttcctctttgttgatgtcattgatgaccacgagcgtggactcatccgaaatggacgtgacttcttattggcactggagcgccagggccgctgtgatgaaagtaactttcgccaggtgctgcagctgctgcgcatcatcactcgccacgacctgctgccctacgtcaccctcaagaggagacgggctgtgtgccctgatcttgtagacaagtatctggaggagacatcaattcgctatgtgacccccagagccctcagtgatccagaaccaaggcctccccagccctctaaaacagatgtgtagcaagcggccagcccgagggagagccacacttgggagccagcgaaaacgccggaagtcagtgacaccagatcccaaggagaagcagacatgtgacatcagactgcgggttcgggctgaatactgccagcatgagactgctctgcagggcaatgtcttctctaacaagcaggacccacttgagcgccagtttgagcgctttaaccaggccaacaccatcctcaagtcccgggacctgggctccatcatctgtgacatcaagttctctgagctcacctacctcgatgcattctggcgtgactacatcaatggctctttattagaggcacttaaaggtgtcttcatcacagactccctcaagcaagctgtgggccatgaagccatcaagctgctggtaaatgtagacgaggaggactatgagctgggccgacagaaactcctgaggaacttgatgctgcaagcattgccctgacctattccctcttctcactttggggactgttcccatcacccacctctggagcttacactgttctggggtttgttctctacccttccaaccaatcacacccctgcctttttttttttttttttaaagaaaaagacaaaagaaagtggaagtggtattccccacccctccctgcacccatgtgcctgggcttcccctttatttcccttttccatttaccccgtaatgtgtctctacagctaccttaccactgagccgtaagacaaatgtataggaagaagcaaagtctacagcacatagtctttgtaagggattgatgtgaacacttttttttggatgcactaaggagttatcaatacttctggctttatgagagctcttaaattttgtctaaaaaaccaaagggctgtgagtaagggagctatgtggaaagtgggactctgaagtgtattttgaaaattaatcgccaccctcttccaaattatagaattttttaaaaacaagctgtggccctttccactctctcctggcctctggtgctgctcctctctgccgcctttcctccattccatggcttgaaacctctgcctgatgtggctccttcctttttcccatttgtcaaaccctcttcaaaggaggaacagataagactgggtcagcctagtcatgcctcccaactgtggtggtatatgtgtacacacatacacagggtggatggagaagaggttgctgattaaaatacactccccctataaaggggaagggggagtgtgacactttctttccatgttcaagtgaaaataaataatgtaccctgca

SEQ ID NO: 369775 - DNA, 1017 bp, Homo sapiens
tccggctcatgtctcactatggcctcgaagccgccactaaccggccgggttccgggaggcgccgttcaggatgcagccacccccgcccgcctgtcccctcccccacggccgcggcggcggcggcggcggcggctgctggagcccggatgcggcgccgtgaggcaggcccgggagagcggcgcggatggatccaacatggcggcgccgagcctgagccgagagaagagacctgggaaattaagtttcttgcggagtacggtggggattgcagctgctgagcagggattctggaaagcattgcgtacctgagcccccagcatggcgggcctaaagcggcgggcaagccaggtgtggccagaagagcatggtgagcaggaacatgggctgtacagcctgcaccgcatgtttgacatcgtgggcactcatctgacacacagagatgtgcgcgtgctttctttcctctttgttgatgtcattgatgaccacgagcgtggactcatccgaaatggacgtgacttcttattggcactggagcgccagggccgctgtgatgaaagtaactttcgccaggtgctgcagctgctgcgcatcatcactcgccacgacctgctgccctacgtcaccctcaagaggagacgggctgtgtgccctgatcttgtagacaagtatctggaggagacatcaattcgctatgtgacccccagagccctcagtgatccagaaccaaggcctccccagccctctaaaacagtgcctccccactatcctgtggtgtgttgccccacttcgggtcctcagatgtgtagcaagcggccagcccgagggagagccacacttgggagccagcgaaaacgccggaagtcagtgacaccagatcccaaggagaagcagacatgtggtgaggaagttcaagggttccagagatggagcagacttgaaggagaatataaagaactgctgggacactgggcagtttatgctattcagtgggcatcctatagtagtcgtcctcaggca

SEQ ID NO: 369776 - DNA, 432 bp, Homo sapiens
ccttccttgttggactccagtcggaaccaatcgttgtcagcattcttgttgttctccacataccggataagggactgatattcctccttcagtcgctgcacccacaactcacgatctcggggtccggcgttagtcttcagcaccgggatctcagacacaacacgtcgcgtggcttcatccgccatcttggaccagggcgcaagagaaacgcggaagtggtgttgcctgtagcttacctcaaggcgccgtcatctttactatgggaagatgagacgttgggttgctgacactggtcctcctacgcctgagaccgacgttgccaggaccgcagggtcagggggacttggctgtcccccgtctttcaaataaagctgtttgtctaaaataaataaataaataaataaataaataaataaataaataaatttattt

SEQ ID NO: 369777 - DNA, 271 bp, Homo sapiens
aacctttaaaaaaaaaaaagaattgaaaaaagcctgacttttgagcctattgtcctcctaataaattctattttgtttatcagaagctgattataatctctgttctacttatgcaatctttctttcttttttttttttttttgagacggagtctcgctctgtcacccaggctggagtgcagtggcgctgtcttggctcactgcaagctccacctcttgggttcacaccatcctgcctcagcctcccaagtagctgggactacaggcgcccg

SEQ ID NO: 369778 - DNA, 2277 bp, Homo sapiens
gggggctggagagagtgaggaggaaggggaggaggtgccgtcccacaataccaggcgggagggcgggtaggcggtttgtatccgggctgtgaggtgctcggagcctcggcggaccttgctgcctctgtctctttaacgcgagaggaagcgatgcagaggggtggaaaatggcagagctgcagatgttactagaggaggagatcccgtctggcaagagggcgctgatcgagagttaccagaacctgactcgggtggcagactactgtgaaaacaactacatacaggctacagacaagagaaaagctttagaggagaccaaagcctatacaacccaatctctagctagtgttgcttatcaaataaatgcattggccaacaatgtactccagttgctggatatccaagcctctcagcttcggagaatggagtcttccatcaatcatatctcacagactgtggatattcataaggagaaagtggcacgaagagagattggtattttgacaacaaataagaatacatcaagaactcacaaaataatagcacctgcgaatatggagcgccctgtaaggtatattcggaaacctatcgattacacagttctggatgatgtgggccatggtgtcaagtaagcatggaaataaccagcctgcaagaactggcacactgtcgagaacaaatcctcctactcagaaaccgccaagtcctcccatgtcaggccggggaacactgggacggaatactccttataaaaccctggaacctgttaaacccccaacagttcctaatgactatatgaccagtcctgctaggcttggaagtcagcatagtccaggcaggacagcatctttaaatcagagaccaaggacacacagtggaagtagtggaggaagtggaagtcgagaaaacagtggtagcagtagtattggcattcccattgctgtgcctacaccttcgccacccactattggaccagcagccccgggctcagctcctggttcccagtatggcacaatgaccaggcagatatctcgacacaactctactacttcttcgacatcttctggtggatacagacgaactccctctgtgactgctcaattttctgctcagcctcatgttaatggaggtccactttattctcaaaattcaattgctgatagtccaactccaccgccaccacctccaccagatgacattcccatgtttgatgactctccacctcccccaccaccaccaccagtggattatgaagatgaggaggctgcagtagttcagtataatgatccatatgcagatggggatcctgcttgggcccccaagaattatattgagaaagttgttgcaatatatgattatacaaaagacaaggatgatgagctgtcatttatggagggtgcaatcatttatgttataaagaagaatgatgatggctggtatgaaggagtctgcaatcgagtgactggtctgttccctgggaactatgttgaatcaatcatgcactatactgattaatttttttttttcttttgaagtagattcttattactcagtcatactgtgggactattatggttaacagaactgtcttaatatgttttaaaatgtgcccatattttcagaacatgctgttttattggtaaattgaatgtctacctgtaagcataaatctttgaggcagtttatgtattgctgaatagcaatttatacaagaagctgtccataactgattatgcttatgtacttacttacacatttttaactttatgaccagcctaaatattctgggggaagtggggtataatatttaacgaatcatgattcagattgtaccattacatgtttcagtgcagcatggttactaacgctatgtcagactaatattaaaatcagaaaatttaaatgctggtgctggtcagactttttttgttagattctctcatttaaaaaaaatactgtttgtttaaagcatgcataaaaatttatgtattgaaatatacttaaaaattcaagatgcttcccatttgtgtaatatttacctggaggactcgtacttaggtgtcttaacgtgaattgagtctccaaggtctccatgtgaaacaaagcagcaaaaagagaattatctgtaatgttgtaatttgtacctaagttttttaatgagtgaaatttgcattataaactttttccattcataaatacataagtgaaccaaaggtttttgtcctttccttcactgatttgctttaaaaaaaataaaagataatgatttattgcaga

SEQ ID NO: 369779 - DNA, 1646 bp, Homo sapiens
  misc_feature (90)..(90): n is a, c, g, or t
atccaatgagttgttaaaaattactttaatgcaaagaactacgtattttaacttattggagatcaggtttcctttttcagaacagtgatnaaaaggtcacttttgagatatcccatgaaactctgactgattaacatgatatattcccttgtaaatttaggactgatatttttaaacataaaattgccaacttaaaaaaataacaaccttgttttacaaacaagagtttttcctggagagctgtgtgtgaatttagatatataataagaactgtctttaaaggaaacctgtgattaatatttttattgatatatgaaataaatagctattatatatttgttttatttatttgggtcctaatttacaacattaccttaaagctagacaaacctgttatagctatggcaaagacacaatattctggaaacctatgtaggtatttcattgttacctattttagaagtctttccttagaatttgaaaattttattttactaaagtgaatgtgatggtaaatttaaatcctccccaaacaatgtaacattaggattgaattaagtatatttgttcttttataaaattaattaattggctaagcacaacttggcctttaggtttgcttgtgggaaatgtactccaaggttctgcaggtttttgttttgttttttgttttgttttgtttcatttgcaaactgttctttgcatacttatgtttgtggtccttgtaactgacttctgctttttgtttgtttccttttctttcctttatctgttttacttcccccatactgtgttgttgctaccagtttctattgctccaccccctccccctatgcctcagttgactccacagatacctctcacaggcttcgtggccagggtgcaggaaaacagtaagtttggaaaaactgagctatggaagagtagaggctgtctccttatagcatgcatggctgacgatgagtcatcgttttccttacttttattgagaagctaatcttgaaaataggtgcagacatgttactgaaactgaagagcacggtcttcagttttttctctttgtgtgcatggttactgacccatataaatttcaaagctgcaattttcttatgtctttacatgatcctaaaacaggagatctgatctttacatattcttaaggaaagaataatcaaacacaaaaattcaaattatatggaaacttttagcttctaacagttactagaattagaagacatttttaattctaataaatttatcaagagataggtagatatactgtaagattaaatttaatatgaaattggggcagattttccccccttaatttcaaaattttagggaaagctttgtagcctcagatttttgtacatacatgatattgaacctacgtaaaggttcattgttaggataagattgaatgaccaggaataagtaaattacattcatgctatccatttcagtgtgagtgataagcaatttagcatccttttcacattttggctacatccaggcccacgaagattgttcctgaatatgaaaatcagttaacttttttagatcttctctcgaatgaagttcagggatttttttttgtggggggggagaagttattttggatatatggctttaatcaggatagacta

SEQ ID NO: 369780 - DNA, 905 bp, Homo sapiens
cggacgcgtgggtcgacccacgcgtccgagaaggtagctagctgatcactaatgatactttccatttttcaagtggattgttctcttaatttgtatataacctgttgtctaaattttatgtacagtcttttataataaaccattctcctatatgaaattttggatactgttaaaatataactcatgtggacttcaatgcagacttcacatttttctgacctttactcctacggtaaatcaagacaaaccatttgaattttaacattggttatttatttgtgtaatggccttacatgtggatattaacagtgtaaacaataccacatataaccatcaagataccttgattataatttataggactagaatgacagattcaggtggtttattaattacatttaaaaagttttctgaaaaaacttttgcaataaaaaaaaataaattgcccatcaaaataaaacacaaaaaaacaaaacacaaacaaacataacacacacaagggggggagccaccaaaaaaataacacgaaaaggggccccaaattacacgaaacaccgagtacagggaaacagaggggcaacaatagagagaagccatataaaaaacgagagaccttgcgctcgtctattataacaaagcgagcagcaacaggcatacaaacacggtactaacctgtacgaactttgtggaaaacgacacacctatacccatcgaggagagggacccatacgcggacgcaatattccctcgagagaatcttcgagcgctctgcaggcacctttttacacttcctacagcggcttccgcgggggtacccagcgcgcactacatacgctcgcggaacaagactttgtggcacacggctagtcgtttagagcagttatcgcgcaacgcggatgctaatc

SEQ ID NO: 369781 - DNA, 652 bp, Homo sapiens
  misc_feature (626)..(626): n is a, c, g, or t
caaaccattaacgtaatgttactcatatcattactgcagtccaaatgacaaaagtgacatagatttattttagattgttaacatttgtcccgatctgaaccttggaataaggaaactactcctataatccttataaaaagagacattgtctcctaacaccctgcattcattaatttgtagtacttccagatacccttatttttagctcattttgttatttttaaatgattcttgagtagcataaactttaacacaccaagcttttatttctaatcattgcatgttttattatagtgcatgctgtacttaagttagagctttcttaaattctgttaacttataagtttccatctagacttatttttgattcaaatcaatcatatgaatctttttagttgctgatagtccaactccaccgccaccacctccaccagatgacattcccatgtttgatgactctccacctcccccaccaccaccaccagtggattatgaagatgaggaggctgcagtagttcagtataatgatccatatgcagatggggatcctgcttgggcccccaagaattatattgagaaagtgttgcaattatgatattcaatgatgaggctggttgaagagttgnatcaatgattgcttgtcctggaacat

SEQ ID NO: 369782 - DNA, 854 bp, Homo sapiens
  misc_feature (90)..(90): n is a, c, g, or t
atccaatgagttgttaaaaattactttaatgcaaagaactacgtattttaacttattggagatcaggtttcctttttcagaacagtgatnaaaaggtcacttttgagatatcccatgaaactctgactgattaacatgatatattcccttgtaaatttaggactgatatttttaaacataaaattgccaacttaaaaaaataacaaccttgttttacaaacaagagtttttcctggagagctgtgtgtgaatttagatatataataagaactgtctttaaaggaaacctgtgattaatatttttattgatatatgaaataaatagctattatatatttgttttatttatttgggtcctaatttacaacattaccttaaagctagacaaacctgttatagctatggcaaagacacaatattctggaaacctatgtaggtatttcattgttacctattttagaagtctttccttagaatttgaaaattttattttactaaagtgaatgtgatggtaaatttaaatcctccccaaacaatgtaacattaggattgaattaagtatatttgttcttttataaaattaattaattggctaagcacaacttggcctttaggtttgcttgtgggaaatgtactccaaggttctgcaggtttttgttttgttttttgttttgttttgtttcatttgcaaactgttctttgcatacttatgtttgtggtccttgtaactgacttctgctttttgtttgtttccttttctttcctttatctgttttacttcccccatactgtgttgttgctaccagtttctattgctccaccccctctaccccctctagagccaaaaaaaaaaa

SEQ ID NO: 369783 - DNA, 3945 bp, Homo sapiens
gggggctggagagagtgaggaggaaggggaggaggtgccgtcccacaataccaggcgggagggcgggtaggcggtttgtatccgggctgtgaggtgctcggagcctcggcggaccttgctgcctctgtctctttaacgcgagaggaagcgatgcagaggggtggaaaatggcagagctgcagatgttactagaggaggagatcccgtctggcaagagggcgctgatcgagagttaccagaacctgactcgggtggcagactactgtgaaaacaactacatacaggctacagacaagagaaaagctttagaggagaccaaagcctatacaacccaatctctagctagtgttgcttatcaaataaatgcattggccaacaatgtactccagttgctggatatccaagcctctcagcttcggagaatggagtcttccatcaatcatatctcacagactgtggatattcataaggagaaagtggcacgaagagagattggtattttgacaacaaataagaatacatcaagaactcacaaaataatagcacctgcgaatatggagcgccctgtaaggtatattcggaaacctatcgattacacagttctggatgatgtgggccatggtgtcaagtaagcatggaaataaccagcctgcaagaactggcacactgtcgagaacaaatcctcctactcagaaaccgccaagtcctcccatgtcaggccggggaacactgggacggaatactccttataaaaccctggaacctgttaaacccccaacagttcctaatgactatatgaccagtcctgctaggcttggaagtcagcatagtccaggcaggacagcatctttaaatcagagaccaaggacacacagtggaagtagtggaggaagtggaagtcgagaaaacagtggtagcagtagtattggcattcccattgctgtgcctacaccttcgccacccactattggaccagcagccccgggctcagctcctggttcccagtatggcacaatgaccaggcagatatctcgacacaactctactacttcttcgacatcttctggtggatacagacgaactccctctgtgactgctcaattttctgctcagcctcatgttaatggaggtccactttattctcaaaattcaattgctgatagtccaactccaccgccaccacctccaccagatgacattcccatgtttgatgactctccacctcccccaccaccaccaccagtggattatgaagatgaggaggctgcagtagttcagtataatgatccatatgcagatggggatcctgcttgggcccccaagaattatattgagaaagttgttgcaatatatgattatacaaaagacaaggatgatgagctgtcatttatggagggtgcaatcatttatgttataaagaagaatgatgatggctggtatgaaggagtctgcaatcgagtgactggtctgttccctgggaactatgttgaatcaatcatgcactatactgattaatttttttttttcttttgaagtagattcttattactcagtcatactgtgggactattatggttaacagaactgtcttaatatgttttaaaatgtgcccatattttcagaacatgctgttttattggtaaattgaatgtctacctgtaagcataaatctttgaggcagtttatgtattgctgaatagcaatttatacaagaagctgtccataactgattatgcttatgtacttacttacacatttttaactttatgaccagcctaaatattctgggggaagtggggtataatatttaacgaatcatgattcagattgtaccattacatgtttcagtgcagcatggttactaacgctatgtcagactaatattaaaatcagaaaatttaaatgctggtgctggtcagactttttttgttagattctctcatttaaaaaaaatactgtttgtttaaagcatgcataaaaatttatgtattgaaatatacttaaaaattcaagatgcttcccatttgtgtaatatttacctggaggactcgtacttaggtgtcttaacgtgaattgagtctccaaggtctccatgtgaaacaaagcagcaaaaagagaattatctgtaatgttgtaatttgtacctaagttttttaatgagtgaaatttgcattataaactttttccattcataaatacataagtgaaccaaaggtttttgtcctttccttcactgatttgctttaaaaaaaataaaagataatgatttattgcagaattatgattctattttctcaatatgttaacttggaaaaaaattttagccttatcttaatctgtcccaacagcaatgtgacggatttttgcagattcaaaatctgcaatggttatttacaagtcaatctactgaattccttttttaaataatcttttgaaactaagaaaatgtgtcaaattgtgtgcattcattctgtaggtaaaattcttaaggattgccatgtcagtccttcagttgtacagtgaactgttgtacactggttcaatgaaaggaagttaaaagtaccttttacatattgtaaaagtggatacagttgatttgtgagtaggcactctttaatccattacctggcactagcaacattagaattttaaaataaaataattgggaaagaaggtgggtcatgtattaatcagtgaacagagatttacctaaccaacagacttggattgtcttttgacataatcaaaatgcaacacatgcactttgtgtgtctcctcttaattgaagggagggctgagggatgttttctcttcttgtcttgtgtataattctctattgcttaggatattaaagtagagcactcaagtgtgggtttctgtgttattgaggatttgtttggaattcaaattacagttatgtactggatgctacagacttataacagcatagtgaatggtaagactagtgcaaaacagttatttctgaaaattaaagaccattattgctaccaaatcaatgtgactatttcatatgcattttgcctttgttaattttaaacaaacaaagtatcattagtgatcagctagctaccttctactttccatttttcaagtggattgttctcttaatttgtatataacctgttgtctaaattttatgtacagtcttttataataaaccattctcctatatgaaattttggatactgttaaaatataactcatgtggacttcaatgcagacttcacatttttctgacctttactcctacggtaaatcaagacaaaccatttgaattttaacattggttatttatttgtgtaatggccttacatgtggatattaacagtgtaaacaataccacatataaccatcaagataccttgattataatttataggactagaatgacagattcaggtggtttattaattacatttaaaaagttttctgaaaaaacttttgcaataaaaaaaaataaattgcccatcaaaataaaacacaaaaaaacaaaacacaaacaaacataacacacacaagggggggagccaccaaaaaaataacacgaaaaggggccccaaattacacgaaacaccgagtacagggaaacagaggggcaacaatagagagaagccatataaaaaacgagagaccttgcgctcgtctattataacaaagcgagcagcaacaggcatacaaacacggtactaacctgtacgaactttgtggaaaacgacacacctatacccatcgaggagagggacccatacgcggacgcaatattccctcgagagaatcttcgagcgctctgcaggcacctttttacacttcctacagcggcttccgcgggggtacccagcgcgcactacatacgctcgcggaacaagactttgtggcacacggctagtcgtttagagcagttatcgcgcaacgcggatgctaatc

SEQ ID NO: 369784 - DNA, 3194 bp, Homo sapiens
gggggctggagagagtgaggaggaaggggaggaggtgccgtcccacaataccaggcgggagggcgggtaggcggtttgtatccgggctgtgaggtgctcggagcctcggcggaccttgctgcctctgtctctttaacgcgagaggaagcgatgcagaggggtggaaaatggcagagctgcagatgttactagaggaggagatcccgtctggcaagagggcgctgatcgagagttaccagaacctgactcgggtggcagactactgtgaaaacaactacatacaggctacagacaagagaaaagctttagaggagaccaaagcctatacaacccaatctctagctagtgttgcttatcaaataaatgcattggccaacaatgtactccagttgctggatatccaagcctctcagcttcggagaatggagtcttccatcaatcatatctcacagactgtggatattcataaggagaaagtggcacgaagagagattggtattttgacaacaaataagaatacatcaagaactcacaaaataatagcacctgcgaatatggagcgccctgtaaggtatattcggaaacctatcgattacacagttctggatgatgtgggccatggtgtcaagtaagcatggaaataaccagcctgcaagaactggcacactgtcgagaacaaatcctcctactcagaaaccgccaagtcctcccatgtcaggccggggaacactgggacggaatactccttataaaaccctggaacctgttaaacccccaacagttcctaatgactatatgaccagtcctgctaggcttggaagtcagcatagtccaggcaggacagcatctttaaatcagagaccaaggacacacagtggaagtagtggaggaagtggaagtcgagaaaacagtggtagcagtagtattggcattcccattgctgtgcctacaccttcgccacccactattggaccagcagccccgggctcagctcctggttcccagtatggcacaatgaccaggcagatatctcgacacaactctactacttcttcgacatcttctggtggatacagacgaactccctctgtgactgctcaattttctgctcagcctcatgttaatggaggtccactttattctcaaaattcaattgctgatagtccaactccaccgccaccacctccaccagatgacattcccatgtttgatgactctccacctcccccaccaccaccaccagtggattatgaagatgaggaggctgcagtagttcagtataatgatccatatgcagatggggatcctgcttgggcccccaagaattatattgagaaagttgttgcaatatatgattatacaaaagacaaggatgatgagctgtcatttatggagggtgcaatcatttatgttataaagaagaatgatgatggctggtatgaaggagtctgcaatcgagtgactggtctgttccctgggaactatgttgaatcaatcatgcactatactgattaatttttttttttcttttgaagtagattcttattactcagtcatactgtgggactattatggttaacagaactgtcttaatatgttttaaaatgtgcccatattttcagaacatgctgttttattggtaaattgaatgtctacctgtaagcataaatctttgaggcagtttatgtattgctgaatagcaatttatacaagaagctgtccataactgattatgcttatgtacttacttacacatttttaactttatgaccagcctaaatattctgggggaagtggggtataatatttaacgaatcatgattcagattgtaccattacatgtttcagtgcagcatggttactaacgctatgtcagactaatattaaaatcagaaaatttaaatgctggtgctggtcagactttttttgttagattctctcatttaaaaaaaatactgtttgtttaaagcatgcataaaaatttatgtattgaaatatacttaaaaattcaagatgcttcccatttgtgtaatatttacctggaggactcgtacttaggtgtcttaacgtgaattgagtctccaaggtctccatgtgaaacaaagcagcaaaaagagaattatctgtaatgttgtaatttgtacctaagttttttaatgagtgaaatttgcattataaactttttccattcataaatacataagtgaaccaaaggtttttgtcctttccttcactgatttgctttaaaaaaaataaaagataatgatttattgcagaattatgattctattttctcaatatgttaacttggaaaaaaattttagccttatcttaatctgtcccaacagcaatgtgacggatttttgcagattcaaaatctgcaatggttatttacaagtcaatctactgaattccttttttaaataatcttttgaaactaagaaaatgtgtcaaattgtgtgcattcattctgtaggtaaaattcttaaggattgccatgtcagtccttcagttgtacagtgaactgttgtacactggttcaatgaaaggaagttaaaagtaccttttacatattgtaaaagtggatacagttgatttgtgagtaggcactctttaatccattacctggcactagcaacattagaattttaaaataaaataattgggaaagaaggtgggtcatgtattaatcagtgaacagagatttacctaaccaacagacttggattgtcttttgacataatcaaaatgcaacacatgcactttgtgtgtctcctcttaattgaagggagggctgagggatgttttctcttcttgtcttgtgtataattctctattgcttaggatattaaagtagagcactcaagtgtgggtttctgtgttattgaggatttgtttggaattcaaattacagttatgtactggatgctacagacttataacagcatagtgaatggtaagactagtgcaaaacagttatttctgaaaattaaagaccattattgctaccaaatcaatgtgactatttcatatgcattttgcctttgttaattttaaacaaacaaagtatcattagtgatcagctagctaccttctactttccatttttcaagtggattgttctcttaatttgtatataacctgttgtctaaattttatgtacagtcttttataataaaccattctcctatatg

SEQ ID NO: 369785 - DNA, 2396 bp, Homo sapiens
aggttccgtcgtctttcaactgcggtttgtatccgggctgtgaggtgctcggagcctcggcggaccttgctgcctctgtctctttaacgcgagaggaagcgatgcagaggggtggaaaatggcagagctgcagatgttactagaggaggagatcccgtctggcaagagggcgctgatcgagagttaccagaacctgactcgggtggcagactactgtgaaaacaactacatacaggctacagacaagagaaaagctttagaggagaccaaagcctatacaacccaatctctagctagtgttgcttatcaaataaatgcattggccaacaatgtactccagttgctggatatccaagcctctcagcttcggagaatggagtcttccatcaatcatatctcacagactgtggatattcataaggagaaagtggcacgaagagagattggtattttgacaacaaataagaatacatcaagaactcacaaaataatagcacctgcgaatatggagcgccctgtaaggtatattcggaaacctatcgattacacagttctggatgatgtgggccatggtgtcaagtaagcatggaaataaccagcctgcaagaactggcacactgtcgagaacaaatcctcctactcagaaaccgccaagtcctcccatgtcaggccggggaacactgggacggaatactccttataaaaccctggaacctgttaaacccccaacagttcctaatgactatatgaccagtcctgctaggcttggaagtcagcatagtccaggcaggacagcatctttaaatcagagaccaaggacacacagtggaagtagtggaggaagtggaagtcgagaaaacagtggtagcagtagtattggcattcccattgctgtgcctacaccttcgccacccactattggaccagaaaacatttctgtccctcctccttctggagctccaccagcaccacctctggcaccacttctcccagtgagcactgtgatagcagccccgggctcagctcctggttcccagtatggcacaatgaccaggcagatatctcgacacaactctactacttcttcgacatcttctggtggatacagacgaactccctctgtgactgctcaattttctgctcagcctcatgttaatggaggtccactttattctcaaaattcaatttctattgctccaccccctccccctatgcctcagttgactccacagatacctctcacaggcttcgtggccagggtgcaggaaaacattgctgatagtccaactccaccgccaccacctccaccagatgacattcccatgtttgatgactctccacctcccccaccaccaccaccagtggattatgaagatgaggaggctgcagtagttcagtataatgatccatatgcagatggggatcctgcttgggcccccaagaattatattgagaaagttgttgcaatatatgattatacaaaagacaaggatgatgagctgtcatttatggagggtgcaatcatttatgttataaagaagaatgatgatggctggtatgaaggagtctgcaatcgagtgactggtctgttccctgggaactatgttgaatcaatcatgcactatactgattaatttttttttttcttttgaagtagattcttattactcagtcatactgtgggactattatggttaacagaactgtcttaatatgttttaaaatgtgcccatattttcagaacatgctgttttattggtaaattgaatgtctacctgtaagcataaatctttgaggcagtttatgtattgctgaatagcaatttatacaagaagctgtccataactgattatgcttatgtacttacttacacatttttaactttatgaccagcctaaatattctgggggaagtggggtataatatttaacgaatcatgattcagattgtaccattacatgtttcagtgcagcatggttactaacgctatgtcagactaatattaaaatcagaaaatttaaatgctggtgctggtcagactttttttgttagattctctcatttaaaaaaaatactgtttgtttaaagcatgcataaaaatttatgtattgaaatatacttaaaaattcaagatgcttcccatttgtgtaatatttacctggaggactcgtacttaggtgtcttaacgtgaattgagtctccaaggtctccatgtgaaacaaagcagcaaaaagagaattatctgtaatgttgtaatttgtacctaagttttttaatgagtgaaatttgcattataaactttttccattcataaatacataagtgaaccaaaggtttttgtcctttccttcactgatttgctttaaaaaaaataaaagataatgatttattgcaga

SEQ ID NO: 369786 - DNA, 2364 bp, Homo sapiens
gggggctggagagagtgaggaggaaggggaggaggtgccgtcccacaataccaggcgggagggcgggtaggcggtttgtatccgggctgtgaggtgctcggagcctcggcggaccttgctgcctctgtctctttaacgcgagaggaagcgatgcagaggggtggaaaatggcagagctgcagatgttactagaggaggagatcccgtctggcaagagggcgctgatcgagagttaccagaacctgactcgggtggcagactactgtgaaaacaactacatacaggctacagacaagagaaaagctttagaggagaccaaagcctatacaacccaatctctagctagtgttgcttatcaaataaatgcattggccaacaatgtactccagttgctggatatccaagcctctcagcttcggagaatggagtcttccatcaatcatatctcacagactgtggatattcataaggagaaagtggcacgaagagagattggtattttgacaacaaataagaatacatcaagaactcacaaaataatagcacctgcgaatatggagcgccctgtaaggtatattcggaaacctatcgattacacagttctggatgatgtgggccatggtgtcaagtaagcatggaaataaccagcctgcaagaactggcacactgtcgagaacaaatcctcctactcagaaaccgccaagtcctcccatgtcaggccggggaacactgggacggaatactccttataaaaccctggaacctgttaaacccccaacagttcctaatgactatatgaccagtcctgctaggcttggaagtcagcatagtccaggcaggacagcatctttaaatcagagaccaaggacacacagtggaagtagtggaggaagtggaagtcgagaaaacagtggtagcagtagtattggcattcccattgctgtgcctacaccttcgccacccactattggaccagcagccccgggctcagctcctggttcccagtatggcacaatgaccaggcagatatctcgacacaactctactacttcttcgacatcttctggtggatacagacgaactccctctgtgactgctcaattttctgctcagcctcatgttaatggaggtccactttattctcaaaattcaatttctattgctccaccccctccccctatgcctcagttgactccacagatacctctcacaggcttcgtggccagggtgcaggaaaacattgctgatagtccaactccaccgccaccacctccaccagatgacattcccatgtttgatgactctccacctcccccaccaccaccaccagtggattatgaagatgaggaggctgcagtagttcagtataatgatccatatgcagatggggatcctgcttgggcccccaagaattatattgagaaagttgttgcaatatatgattatacaaaagacaaggatgatgagctgtcatttatggagggtgcaatcatttatgttataaagaagaatgatgatggctggtatgaaggagtctgcaatcgagtgactggtctgttccctgggaactatgttgaatcaatcatgcactatactgattaatttttttttttcttttgaagtagattcttattactcagtcatactgtgggactattatggttaacagaactgtcttaatatgttttaaaatgtgcccatattttcagaacatgctgttttattggtaaattgaatgtctacctgtaagcataaatctttgaggcagtttatgtattgctgaatagcaatttatacaagaagctgtccataactgattatgcttatgtacttacttacacatttttaactttatgaccagcctaaatattctgggggaagtggggtataatatttaacgaatcatgattcagattgtaccattacatgtttcagtgcagcatggttactaacgctatgtcagactaatattaaaatcagaaaatttaaatgctggtgctggtcagactttttttgttagattctctcatttaaaaaaaatactgtttgtttaaagcatgcataaaaatttatgtattgaaatatacttaaaaattcaagatgcttcccatttgtgtaatatttacctggaggactcgtacttaggtgtcttaacgtgaattgagtctccaaggtctccatgtgaaacaaagcagcaaaaagagaattatctgtaatgttgtaatttgtacctaagttttttaatgagtgaaatttgcattataaactttttccattcataaatacataagtgaaccaaaggtttttgtcctttccttcactgatttgctttaaaaaaaataaaagataatgatttattgcaga

SEQ ID NO: 369787 - DNA, 2298 bp, Homo sapiens
gggggctggagagagtgaggaggaaggggaggaggtgccgtcccacaataccaggcgggagggcgggtaggcggtttgtatccgggctgtgaggtgctcggagcctcggcggaccttgctgcctctgtctctttaacgcgagaggaagcgatgcagaggggtggaaaatggcagagctgcagatgttactagaggaggagatcccgtctggcaagagggcgctgatcgagagttaccagaacctgactcgggtggcagactactgtgaaaacaactacatacaggctacagacaagagaaaagctttagaggagaccaaagcctatacaacccaatctctagctagtgttgcttatcaaataaatgcattggccaacaatgtactccagttgctggatatccaagcctctcagcttcggagaatggagtcttccatcaatcatatctcacagactgtggatattcataaggagaaagtggcacgaagagagattggtattttgacaacaaataagaatacatcaagaactcacaaaataatagcacctgcgaatatggagcgccctgtaaggtatattcggaaacctatcgattacacagttctggatgatgtgggccatggtgtcaagtaagcatggaaataaccagcctgcaagaactggcacactgtcgagaacaaatcctcctactcagaaaccgccaagtcctcccatgtcaggccggggaacactgggacggaatactccttataaaaccctggaacctgttaaacccccaacagttcctaatgactatatgaccagtcctgctaggcttggaagtcagcatagtccaggcaggacagcatctttaaatcagagaccaaggacacacagtggaagtagtggaggaagtggaagtcgagaaaacacagccccgggctcagctcctggttcccagtatggcacaatgaccaggcagatatctcgacacaactctactacttcttcgacatcttctggtggatacagacgaactccctctgtgactgctcaattttctgctcagcctcatgttaatggaggtccactttattctcaaaattcaatttctattgctccaccccctccccctatgcctcagttgactccacagatacctctcacaggcttcgtggccagggtgcaggaaaacattgctgatagtccaactccaccgccaccacctccaccagatgacattcccatgtttgatgactctccacctcccccaccaccaccaccagtggattatgaagatgaggaggctgcagtagttcagtataatgatccatatgcagatggggatcctgcttgggcccccaagaattatattgagaaagttgttgcaatatatgattatacaaaagacaaggatgatgagctgtcatttatggagggtgcaatcatttatgttataaagaagaatgatgatggctggtatgaaggagtctgcaatcgagtgactggtctgttccctgggaactatgttgaatcaatcatgcactatactgattaatttttttttttcttttgaagtagattcttattactcagtcatactgtgggactattatggttaacagaactgtcttaatatgttttaaaatgtgcccatattttcagaacatgctgttttattggtaaattgaatgtctacctgtaagcataaatctttgaggcagtttatgtattgctgaatagcaatttatacaagaagctgtccataactgattatgcttatgtacttacttacacatttttaactttatgaccagcctaaatattctgggggaagtggggtataatatttaacgaatcatgattcagattgtaccattacatgtttcagtgcagcatggttactaacgctatgtcagactaatattaaaatcagaaaatttaaatgctggtgctggtcagactttttttgttagattctctcatttaaaaaaaatactgtttgtttaaagcatgcataaaaatttatgtattgaaatatacttaaaaattcaagatgcttcccatttgtgtaatatttacctggaggactcgtacttaggtgtcttaacgtgaattgagtctccaaggtctccatgtgaaacaaagcagcaaaaagagaattatctgtaatgttgtaatttgtacctaagttttttaatgagtgaaatttgcattataaactttttccattcataaatacataagtgaaccaaaggtttttgtcctttccttcactgatttgctttaaaaaaaataaaagataatgatttattgcaga

SEQ ID NO: 369788 - DNA, 2100 bp, Homo sapiens
gggggctggagagagtgaggaggaaggggaggaggtgccgtcccacaataccaggcgggagggcgggtaggcggtttgtatccgggctgtgaggtgctcggagcctcggcggaccttgctgcctctgtctctttaacgcgagaggaagcgatgcagaggggtggaaaatggcagagctgcagatgttactagaggaggagatcccgtctggcaagagggcgctgatcgagagttaccagaacctgactcgggtggcagactactgtgaaaacaactacatacaggctacagacaagagaaaagctttagaggagaccaaagcctatacaacccaatctctagctagtgttgcttatcaaataaatgcattggccaacaatgtactccagttgctggatatccaagcctctcagcttcggagaatggagtcttccatcaatcatatctcacagactgtggatattcataaggagaaagtggcacgaagagagattggtattttgacaacaaataagaatacatcaagaactcacaaaataatagcacctgcgaatatggagcgccctgtaaggtatattcggaaacctatcgattacacagttctggatgatgtgggccatggtgtcaagtaagcatggaaataaccagcctgcaagaactggcacactgtcgagaacaaatcctcctactcagaaaccgccaagtcctcccatgtcaggccggggaacactgggacggaatactccttataaaaccctggaacctgttaaacccccaacagttcctaatgactatatgaccagtcctgctaggcttggaagtcagcatagtccaggcaggacagcatctttaaatcagagaccaaggacacacagtggaagtagtggaggaagtggaagtcgagaaaacagtggtagcagtagtattggcattcccattgctgtgcctacaccttcgccacccactattggaccagttgctgatagtccaactccaccgccaccacctccaccagatgacattcccatgtttgatgactctccacctcccccaccaccaccaccagtggattatgaagatgaggaggctgcagtagttcagtataatgatccatatgcagatggggatcctgcttgggcccccaagaattatattgagaaagttgttgcaatatatgattatacaaaagacaaggatgatgagctgtcatttatggagggtgcaatcatttatgttataaagaagaatgatgatggctggtatgaaggagtctgcaatcgagtgactggtctgttccctgggaactatgttgaatcaatcatgcactatactgattaatttttttttttcttttgaagtagattcttattactcagtcatactgtgggactattatggttaacagaactgtcttaatatgttttaaaatgtgcccatattttcagaacatgctgttttattggtaaattgaatgtctacctgtaagcataaatctttgaggcagtttatgtattgctgaatagcaatttatacaagaagctgtccataactgattatgcttatgtacttacttacacatttttaactttatgaccagcctaaatattctgggggaagtggggtataatatttaacgaatcatgattcagattgtaccattacatgtttcagtgcagcatggttactaacgctatgtcagactaatattaaaatcagaaaatttaaatgctggtgctggtcagactttttttgttagattctctcatttaaaaaaaatactgtttgtttaaagcatgcataaaaatttatgtattgaaatatacttaaaaattcaagatgcttcccatttgtgtaatatttacctggaggactcgtacttaggtgtcttaacgtgaattgagtctccaaggtctccatgtgaaacaaagcagcaaaaagagaattatctgtaatgttgtaatttgtacctaagttttttaatgagtgaaatttgcattataaactttttccattcataaatacataagtgaaccaaaggtttttgtcctttccttcactgatttgctttaaaaaaaataaaagataatgatttattgcaga

SEQ ID NO: 369789 - DNA, 2176 bp, Homo sapiens
gggggctggagagagtgaggaggaaggggaggaggtgccgtcccacaataccaggcgggagggcgggtaggcggtttgtatccgggctgtgaggtgctcggagcctcggcggaccttgctgcctctgtctctttaacgcgagaggaagcgatgcagaggggtggaaaatggcagagctgcagatgttactagaggaggagatcccgtctggcaagagggcgctgatcgagagttaccagaacctgactcgggtggcagactactgtgaaaacaactacatacaggctacagacaagagaaaagctttagaggagaccaaagcctatacaacccaatctctagctagtgttgcttatcaaataaatgcattggccaacaatgtactccagttgctggatatccaagcctctcagcttcggagaatggagtcttccatcaatcatatctcacagactgtggatattcataaggagaaagtggcacgaagagagattggtattttgacaacaaataagaatacatcaagaactcacaaaataatagcacctgcgaatatggagcgccctgtaaggtatattcggaaacctatcgattacacagttctggatgatgtgggccatggtgtcaagtaagcatggaaataaccagcctgcaagaactggcacactgtcgagaacaaatcctcctactcagaaaccgccaagtcctcccatgtcaggccggggaacactgggacggaatactccttataaaaccctggaacctgttaaacccccaacagttcctaatgactatatgaccagtcctgctaggcttggaagtcagcatagtccaggcaggacagcatctttaaatcagagaccaaggacacacagcagccccgggctcagctcctggttcccagtatggcacaatgaccaggcagatatctcgacacaactctactacttcttcgacatcttctggtggatacagacgaactccctctgtgactgctcaattttctgctcagcctcatgttaatggaggtccactttattctcaaaattcaattgctgatagtccaactccaccgccaccacctccaccagatgacattcccatgtttgatgactctccacctcccccaccaccaccaccagtggattatgaagatgaggaggctgcagtagttcagtataatgatccatatgcagatggggatcctgcttgggcccccaagaattatattgagaaagttgttgcaatatatgattatacaaaagacaaggatgatgagctgtcatttatggagggtgcaatcatttatgttataaagaagaatgatgatggctggtatgaaggagtctgcaatcgagtgactggtctgttccctgggaactatgttgaatcaatcatgcactatactgattaatttttttttttcttttgaagtagattcttattactcagtcatactgtgggactattatggttaacagaactgtcttaatatgttttaaaatgtgcccatattttcagaacatgctgttttattggtaaattgaatgtctacctgtaagcataaatctttgaggcagtttatgtattgctgaatagcaatttatacaagaagctgtccataactgattatgcttatgtacttacttacacatttttaactttatgaccagcctaaatattctgggggaagtggggtataatatttaacgaatcatgattcagattgtaccattacatgtttcagtgcagcatggttactaacgctatgtcagactaatattaaaatcagaaaatttaaatgctggtgctggtcagactttttttgttagattctctcatttaaaaaaaatactgtttgtttaaagcatgcataaaaatttatgtattgaaatatacttaaaaattcaagatgcttcccatttgtgtaatatttacctggaggactcgtacttaggtgtcttaacgtgaattgagtctccaaggtctccatgtgaaacaaagcagcaaaaagagaattatctgtaatgttgtaatttgtacctaagttttttaatgagtgaaatttgcattataaactttttccattcataaatacataagtgaaccaaaggtttttgtcctttccttcactgatttgctttaaaaaaaataaaagataatgatttattgcaga

SEQ ID NO: 369790 - DNA, 3979 bp, Homo sapiens
gggggctggagagagtgaggaggaaggggaggaggtgccgtcccacaataccaggcgggagggcgggtaggcggtttgtatccgggctgtgaggtgctcggagcctcggcggaccttgctgcctctgtctctttaacgcgagaggaagcgatgcagaggggtggaaaatggcagagctgcagatgttactagaggaggagatcccgtctggcaagagggcgctgatcgagagttaccagaacctgactcgggtggcagactactgtgaaaacaactacatacaggctacagacaagagaaaagctttagaggagaccaaagcctatacaacccaatctctagctagtgttgcttatcaaataaatgcattggccaacaatgtactccagttgctggatatccaagcctctcagcttcggagaatggagtcttccatcaatcatatctcacagactgtggatattcataaggagaaagtggcacgaagagagattggtattttgacaacaaataagaatacatcaagaactcacaaaataatagcacctgcgaatatggagcgccctgtaaggtatattcggaaacctatcgattacacagttctggatgatgtgggccatggtgtcaagtaagcatggaaataaccagcctgcaagaactggcacactgtcgagaacaaatcctcctactcagaaaccgccaagtcctcccatgtcaggccggggaacactgggacggaatactccttataaaaccctggaacctgttaaacccccaacagttcctaatgactatatgaccagtcctgctaggcttggaagtcagcatagtccaggcaggacagcatctttaaatcagagaccaaggacacacagtggaagtagtggaggaagtggaagtcgagaaaacagtggtagcagtagtattggcattcccattgctgtgcctacaccttcgccacccactattggaccagcagccccgggctcagctcctggttcccagtatggcacaatgaccaggcagatatctcgacacaactctactacttcttcgacatcttctggtggatacagacgaactccctctgtgactgctcaattttctgctcagcctcatgttaatggaggtccactttattctcaaaattcaatttctattgctccaccccctccccctatgcctcagttgactccacagatacctctcacaggcttcgtggccagggtgcaggaaaacattgctgatagtccaactccaccgccaccacctccaccagatgacattcccatgtttgatgactctccacctcccccaccaccaccaccagtggattatgaagatgaggaggctgcagtagttcagtataatgatccatatgcagatggggatcctgcttgggcccccaagaattatattgagaaagttgttgcaatatatgattatacaaaagacaaggatgatgagctgtcatttatggagggtgcaatcatttatgttataaagaagaatgatgatggctggtatgaaggagtctgcaatcgagtgactggtctgttccctgggaactatgttgaatcaatcatgcactatactgattaatttttttttttcttttgaagtagattcttattactcagtcatactgtgggactattatggttaacagaactgtcttaatatgttttaaaatgtgcccatattttcagaacatgctgttttattggtaaattgaatgtctacctgtaagcataaatctttgaggcagtttatgtattgctgaatagcaatttatacaagaagctgtccataactgattatgcttatgtacttacttacacatttttaactttatgaccagcctaaatattctgggggaagtggggtataatatttaacgaatcatgattcagattgtaccattacatgtttcagtgcagcatggttactaacgctatgtcagactaatattaaaatcagaaaatttaaatgctggtgctggtcagactttttttgttagattctctcatttaaaaaaaatactgtttgtttaaagcatgcataaatatttacctggaggactcgtacttaggtgtcttaacgtgaattgagtctccaaggtctccatgtgaaacaaagcagcaaaaagagaattatctgtaatgttgtaatttgtacctaagttttttaatgagtgaaatttgcattataaactttttccattcataaatacataagtgaaccaaaggtttttgtcctttccttcactgatttgctttaaaaaaaataaaagataatgatttattgcagaattatgattctattttctcaatatgttaacttggaaaaaaattttagccttatcttaatctgtcccaacagcaatgtgacggatttttgcagattcaaaatctgcaatggttatttacaagtcaatctactgaattccttttttaaataatcttttgaaactaagaaaatgtgtcaaattgtgtgcattcattctgtaggtaaaattcttaaggattgccatgtcagtccttcagttgtacagtgaactgttgtacactggttcaatgaaaggaagttaaaagtaccttttacatattgtaaaagtggatacagttgatttgtgagtaggcactctttaatccattacctggcactagcaacattagaattttaaaataaaataattgggaaagaaggtgggtcatgtattaatcagtgaacagagatttacctaaccaacagacttggattgtcttttgacataatcaaaatgcaacacatgcactttgtgtgtctcctcttaattgaagggagggctgagggatgttttctcttcttgtcttgtgtataattctctattgcttaggatattaaagtagagcactcaagtgtgggtttctgtgttattgaggatttgtttggaattcaaattacagttatgtactggatgctacagacttataacagcatagtgaatggtaagactagtgcaaaacagttatttctgaaaattaaagaccattattgctaccaaatcaatgtgactatttcatatgcattttgcctttgttaattttaaacaaacaaagtatcattagtgatcagctagctaccttctactttccatttttcaagtggattgttctcttaatttgtatataacctgttgtctaaattttatgtacagtcttttataataaaccattctcctatatgaaattttggatactgttaaaatataactcatgtggacttcaatgcagacttcacatttttctgacctttactcctacggtaaatcaagacaaaccatttgaattttaacattggttatttatttgtgtaatggccttacatgtggatattaacagtgtaaacaataccacatataaccatcaagataccttgattataatttataggactagaatgacagattcaggtggtttattaattacatttaaaaagttttctgaaaaaacttttgcaataaaaaaaaataaattgcccatcaaaataaaacacaaaaaaacaaaacacaaacaaacataacacacacaagggggggagccaccaaaaaaataacacgaaaaggggccccaaattacacgaaacaccgagtacagggaaacagaggggcaacaatagagagaagccatataaaaaacgagagaccttgcgctcgtctattataacaaagcgagcagcaacaggcatacaaacacggtactaacctgtacgaactttgtggaaaacgacacacctatacccatcgaggagagggacccatacgcggacgcaatattccctcgagagaatcttcgagcgctctgcaggcacctttttacacttcctacagcggcttccgcgggggtacccagcgcgcactacatacgctcgcggaacaagactttgtggcacacggctagtcgtttagagcagttatcgcgcaacgcggatgctaatc

SEQ ID NO: 369791 - DNA, 1519 bp, Homo sapiens
caaaccattaacgtaatgttactcatatcattactgcagtccaaatgacaaaagtgacatagatttattttagattgttaacatttgtcccgatctgaaccttggaataaggaaactactcctataatccttataaaaagagacattgtctcctaacaccctgcattcattaatttgtagtacttccagatacccttatttttagctcattttgttatttttaaatgattcttgagtagcataaactttaacacaccaagcttttatttctaatcattgcatgttttattatagtgcatgctgtacttaagttagagctttcttaaattctgttaacttataagtttccatctagacttatttttgattcaaatcaatcatatgaatctttttagttgctgatagtccaactccaccgccaccacctccaccagatgacattcccatgtttgatgactctccacctcccccaccaccaccaccagtggattatgaagatgaggaggctgcagtagttcagtataatgatccatatgcagatggggatcctgcttgggcccccaagaattatattgagaaagttgttgcaatatatgattatacaaaagacaaggatgatgagctgtcatttatggagggtgcaatcatttatgttataaagaagaatgatgatggctggtatgaaggagtctgcaatcgagtgactggtctgttccctgggaactatgttgaatcaatcatgcactatactgattaatttttttttttcttttgaagtagattcttattactcagtcatactgtgggactattatggttaacagaactgtcttaatatgttttaaaatgtgcccatattttcagaacatgctgttttattggtaaattgaatgtctacctgtaagcataaatctttgaggcagtttatgtattgctgaatagcaatttatacaagaagctgtccataactgattatgcttatgtacttacttacacatttttaactttatgaccagcctaaatattctgggggaagtggggtataatatttaacgaatcatgattcagattgtaccattacatgtttcagtgcagcatggttactaacgctatgtcagactaatattaaaatcagaaaatttaaatgctggtgctggtcagactttttttgttagattctctcatttaaaaaaaatactgtttgtttaaagcatgcataaaaatttatgtattgaaatatacttaaaaattcaagatgcttcccatttgtgtaatatttacctggaggactcgtacttaggtgtcttaacgtgaattgagtctccaaggtctccatgtgaaacaaagcagcaaaaagagaattatctgtaatgttgtaatttgtacctaagttttttaatgagtgaaatttgcattataaactttttccattcataaatacataagtgaaccaaaggtttttgtcctttccttcactgatttgctttaaaaaaaataaaagataatgatttattgcaga

SEQ ID NO: 369792 - DNA, 1993 bp, Homo sapiens
gggggctggagagagtgaggaggaaggggaggaggtgccgtcccacaataccaggcgggagggcgggtaggcggtttgtatccgggctgtgaggtgctcggagcctcggcggaccttgctgcctctgtctctttaacgcgagaggaagcgatgcagaggggtggaaaatggcagagctgcagatgttactagaggaggagatcccgtctggcaagagggcgctgatcgagagttaccagaacctgactcgggtggcagactactgtgaaaacaactacatacaggctacagacaagagaaaagctttagaggagaccaaagcctatacaacccaatctctagctagtgttgcttatcaaataaatgcattggccaacaatgtactccagttgctggatatccaagcctctcagcttcggagaatggagtcttccatcaatcatatctcacagactgtggatattcataaggagaaagtggcacgaagagagattggtattttgacaacaaataagaatacatcaagaactcacaaaataatagcacctgcgaatatggagcgccctgtaaggtatattcggaaacctatcgattacacagttctggatgatgtgggccatggtgtcaagtaagcatggaaataaccagcctgcaagaactggcacactgtcgagaacaaatcctcctactcagaaaccgccaagtcctcccatgtcaggccggggaacactgggacggaatactccttataaaaccctggaacctgttaaacccccaacagttcctaatgactatatgaccagtcctgctaggcttggaagtcagcatagtccaggcaggacagcatctttaaatcagagaccaaggacacacagtggaagtagtggaggaagtggaagtcgagaaaacagtggtagcagtagtattggcattcccattgctgtgcctacaccttcgccacccactattggaccagcagccccgggctcagctcctggttcccagtatggcacaatgaccaggcagatatctcgacacaactctactacttcttcgacatcttctggtggatacagacgaactccctctgtgactgctcaattttctgctcagcctcatgttaatggaggtccactttattctcaaaattcaatttctattgctccaccccctccccctatgcctcagttgactccacagatacctctcacaggcttcgtggccagggtgcaggaaaacagtaagtttggaaaaactgagctatggaagagtagaggctgtctccttatagcatgcatggctgacgatgagtcatcgttttccttacttttattgagaagctaatcttgaaaataggtgcagacatgttactgaaactgaagagcacggtcttcagttttttctctttgtgtgcatggttactgacccatataaatttcaaagctgcaattttcttatgtctttacatgatcctaaaacaggagatctgatctttacatattcttaaggaaagaataatcaaacacaaaaattcaaattatatggaaacttttagcttctaacagttactagaattagaagacatttttaattctaataaatttatcaagagataggtagatatactgtaagattaaatttaatatgaaattggggcagattttccccccttaatttcaaaattttagggaaagctttgtagcctcagatttttgtacatacatgatattgaacctacgtaaaggttcattgttaggataagattgaatgaccaggaataagtaaattacattcatgctatccatttcagtgtgagtgataagcaatttagcatccttttcacattttggctacatccaggcccacgaagattgttcctgaatatgaaaatcagttaacttttttagatcttctctcgaatgaagttcagggatttttttttgtggggggggagaagttattttggatatatggctttaatcaggatagacta

SEQ ID NO: 369793 - DNA, 1066 bp, Homo sapiens
gggggctggagagagtgaggaggaaggggaggaggtgccgtcccacaataccaggcgggagggcgggtaggcggtttgtatccgggctgtgaggtgctcggagcctcggcggaccttgctgcctctgtctctttaacgcgagaggaagcgatgcagaggggtggaaaatggcagagctgcagatgttactagaggaggagatcccgtctggcaagagggcgctgatcgagagttaccagaacctgactcgggtggcagactactgtgaaaacaactacatacaggctacagacaagagaaaagctttagaggagaccaaagcctatacaacccaatctctagctagtgttgcttatcaaataaatgcattggccaacaatgtactccagttgctggatatccaagcctctcagcttcggagaatggagtcttccatcaatcatatctcacagactgtggatattcataaggagaaagtggcacgaagagagattggtattttgacaacaaataagaatacatcaagaactcacaaaataatagcacctgcgaatatggagcgccctgtaaggtatattcggaaacctatcgattacacagttctggatgatgtgggccatggtgtcaagtagcattttatattacattaacaagctaatttgcatatccagtaaatattttggataggaaatattgtcataaagatgattttaatagattctctttagcagctggcattataattttcatacaatatttaatatgaattttactaaggttggggtgcaattttatcagttgaataggctgtattaaaaagatattaaaattagaaatggttattaagccataaatcctagacaaatattacccatttgtgttgtgaattctatgtctttctttcactactgaacatttaaaaataaaagtctacatgcttttcaaaattactttagaaaataatttataaatacttttatcgtttcatttctaaatatgtatatatatttgtatacctgtgtgtgtatctataatgccagcaacttattaaaaaatgaaaattgta

SEQ ID NO: 369794 - DNA, 660 bp, Homo sapiens
aggtataaactcggtagcctctttatgtacaaaattcatactcatttgagcatgctttacatgggggtatcttttttctttttcttcccgatacattgtactttcttgctgtttcaaaatgttgagttttcttttcttgtactctgacctgaattataaactattttattagaaaacatttctgtccctcctccttctggagctccaccagcaccacctctggcaccacttctcccagtgagcactgtgataggtgagattgcatagccattggagccattgaactcactttacataattcataataaactcctctgtgctagtagagtgctggcttttatagttattaggttgcaggtgataatacaaagtttaaagtattaaatctaatatcactaacttctggtgaaaggcttctgcacttatacagtaaacaaatataaaacaactttttctataatatgaaatgcttggtttataaccaacttaatgtgtttttaatttgttgtttgtttagatttttctagtctaatcccccctgccccgcacaagtgaaacttaatttggaactctctggtatatacaacagtcaaaggatcagggtgaaggtggggacaggaggagaaaaattgaaaggcaaacgatatgtgtgggatgggg

SEQ ID NO: 369795 - DNA, 2445 bp, Homo sapiens
gggggctggagagagtgaggaggaaggggaggaggtgccgtcccacaataccaggcgggagggcgggtaggcggtttgtatccgggctgtgaggtgctcggagcctcggcggaccttgctgcctctgtctctttaacgcgagaggaagcgatgcagaggggtggaaaatggcagagctgcagatgttactagaggaggagatcccgtctggcaagagggcgctgatcgagagttaccagaacctgactcgggtggcagactactgtgaaaacaactacatacaggctacagacaagagaaaagctttagaggagaccaaagcctatacaacccaatctctagctagtgttgcttatcaaataaatgcattggccaacaatgtactccagttgctggatatccaagcctctcagcttcggagaatggagtcttccatcaatcatatctcacagactgtggatattcataaggagaaagtggcacgaagagagattggtattttgacaacaaataagaatacatcaagaactcacaaaataatagcacctgcgaatatggagcgccctgtaaggtatattcggaaacctatcgattacacagttctggatgatgtgggccatggtgtcaagtaagcatggaaataaccagcctgcaagaactggcacactgtcgagaacaaatcctcctactcagaaaccgccaagtcctcccatgtcaggccggggaacactgggacggaatactccttataaaaccctggaacctgttaaacccccaacagttcctaatgactatatgaccagtcctgctaggcttggaagtcagcatagtccaggcaggacagcatctttaaatcagagaccaaggacacacagtggaagtagtggaggaagtggaagtcgagaaaacagtggtagcagtagtattggcattcccattgctgtgcctacaccttcgccacccactattggaccagaaaacatttctgtccctcctccttctggagctccaccagcaccacctctggcaccacttctcccagtgagcactgtgatagcagccccgggctcagctcctggttcccagtatggcacaatgaccaggcagatatctcgacacaactctactacttcttcgacatcttctggtggatacagacgaactccctctgtgactgctcaattttctgctcagcctcatgttaatggaggtccactttattctcaaaattcaatttctattgctccaccccctccccctatgcctcagttgactccacagatacctctcacaggcttcgtggccagggtgcaggaaaacattgctgatagtccaactccaccgccaccacctccaccagatgacattcccatgtttgatgactctccacctcccccaccaccaccaccagtggattatgaagatgaggaggctgcagtagttcagtataatgatccatatgcagatggggatcctgcttgggcccccaagaattatattgagaaagttgttgcaatatatgattatacaaaagacaaggatgatgagctgtcatttatggagggtgcaatcatttatgttataaagaagaatgatgatggctggtatgaaggagtctgcaatcgagtgactggtctgttccctgggaactatgttgaatcaatcatgcactatactgattaatttttttttttcttttgaagtagattcttattactcagtcatactgtgggactattatggttaacagaactgtcttaatatgttttaaaatgtgcccatattttcagaacatgctgttttattggtaaattgaatgtctacctgtaagcataaatctttgaggcagtttatgtattgctgaatagcaatttatacaagaagctgtccataactgattatgcttatgtacttacttacacatttttaactttatgaccagcctaaatattctgggggaagtggggtataatatttaacgaatcatgattcagattgtaccattacatgtttcagtgcagcatggttactaacgctatgtcagactaatattaaaatcagaaaatttaaatgctggtgctggtcagactttttttgttagattctctcatttaaaaaaaatactgtttgtttaaagcatgcataaaaatttatgtattgaaatatacttaaaaattcaagatgcttcccatttgtgtaatatttacctggaggactcgtacttaggtgtcttaacgtgaattgagtctccaaggtctccatgtgaaacaaagcagcaaaaagagaattatctgtaatgttgtaatttgtacctaagttttttaatgagtgaaatttgcattataaactttttccattcataaatacataagtgaaccaaaggtttttgtcctttccttcactgatttgctttaaaaaaaataaaagataatgatttattgcaga

SEQ ID NO: 369796 - DNA, 3281 bp, Homo sapiens
gggggctggagagagtgaggaggaaggggaggaggtgccgtcccacaataccaggcgggagggcgggtaggcggtttgtatccgggctgtgaggtgctcggagcctcggcggaccttgctgcctctgtctctttaacgcgagaggaagcgatgcagaggggtggaaaatggcagagctgcagatgttactagaggaggagatcccgtctggcaagagggcgctgatcgagagttaccagaacctgactcgggtggcagactactgtgaaaacaactacatacaggctacagacaagagaaaagctttagaggagaccaaagcctatacaacccaatctctagctagtgttgcttatcaaataaatgcattggccaacaatgtactccagttgctggatatccaagcctctcagcttcggagaatggagtcttccatcaatcatatctcacagactgtggatattcataaggagaaagtggcacgaagagagattggtattttgacaacaaataagaatacatcaagaactcacaaaataatagcacctgcgaatatggagcgccctgtaaggtatattcggaaacctatcgattacacagttctggatgatgtgggccatggtgtcaagtaagcatggaaataaccagcctgcaagaactggcacactgtcgagaacaaatcctcctactcagaaaccgccaagtcctcccatgtcaggccggggaacactgggacggaatactccttataaaaccctggaacctgttaaacccccaacagttcctaatgactatatgaccagtcctgctaggcttggaagtcagcatagtccaggcaggacagcatctttaaatcagagaccaaggacacacagtggaagtagtggaggaagtggaagtcgagaaaacagtggtagcagtagtattggcattcccattgctgtgcctacaccttcgccacccactattggaccagcagccccgggctcagctcctggttcccagtatggcacaatgaccaggcagatatctcgacacaactctactacttcttcgacatcttctggtggatacagacgaactccctctgtgactgctcaattttctgctcagcctcatgttaatggaggtccactttattctcaaaattcaatttctattgctccaccccctccccctatgcctcagttgactccacagatacctctcacaggcttcgtggccagggtgcaggaaaacattgctgatagtccaactccaccgccaccacctccaccagatgacattcccatgtttgatgactctccacctcccccaccaccaccaccagtggattatgaagatgaggaggctgcagtagttcagtataatgatccatatgcagatggggatcctgcttgggcccccaagaattatattgagaaagttgttgcaatatatgattatacaaaagacaaggatgatgagctgtcatttatggagggtgcaatcatttatgttataaagaagaatgatgatggctggtatgaaggagtctgcaatcgagtgactggtctgttccctgggaactatgttgaatcaatcatgcactatactgattaatttttttttttcttttgaagtagattcttattactcagtcatactgtgggactattatggttaacagaactgtcttaatatgttttaaaatgtgcccatattttcagaacatgctgttttattggtaaattgaatgtctacctgtaagcataaatctttgaggcagtttatgtattgctgaatagcaatttatacaagaagctgtccataactgattatgcttatgtacttacttacacatttttaactttatgaccagcctaaatattctgggggaagtggggtataatatttaacgaatcatgattcagattgtaccattacatgtttcagtgcagcatggttactaacgctatgtcagactaatattaaaatcagaaaatttaaatgctggtgctggtcagactttttttgttagattctctcatttaaaaaaaatactgtttgtttaaagcatgcataaaaatttatgtattgaaatatacttaaaaattcaagatgcttcccatttgtgtaatatttacctggaggactcgtacttaggtgtcttaacgtgaattgagtctccaaggtctccatgtgaaacaaagcagcaaaaagagaattatctgtaatgttgtaatttgtacctaagttttttaatgagtgaaatttgcattataaactttttccattcataaatacataagtgaaccaaaggtttttgtcctttccttcactgatttgctttaaaaaaaataaaagataatgatttattgcagaattatgattctattttctcaatatgttaacttggaaaaaaattttagccttatcttaatctgtcccaacagcaatgtgacggatttttgcagattcaaaatctgcaatggttatttacaagtcaatctactgaattccttttttaaataatcttttgaaactaagaaaatgtgtcaaattgtgtgcattcattctgtaggtaaaattcttaaggattgccatgtcagtccttcagttgtacagtgaactgttgtacactggttcaatgaaaggaagttaaaagtaccttttacatattgtaaaagtggatacagttgatttgtgagtaggcactctttaatccattacctggcactagcaacattagaattttaaaataaaataattgggaaagaaggtgggtcatgtattaatcagtgaacagagatttacctaaccaacagacttggattgtcttttgacataatcaaaatgcaacacatgcactttgtgtgtctcctcttaattgaagggagggctgagggatgttttctcttcttgtcttgtgtataattctctattgcttaggatattaaagtagagcactcaagtgtgggtttctgtgttattgaggatttgtttggaattcaaattacagttatgtactggatgctacagacttataacagcatagtgaatggtaagactagtgcaaaacagttatttctgaaaattaaagaccattattgctaccaaatcaatgtgactatttcatatgcattttgcctttgttaattttaaacaaacaaagtatcattagtgatcagctagctaccttctactttccatttttcaagtggattgttctcttaatttgtatataacctgttgtctaaattttatgtacagtcttttataataaaccattctcctatatg

SEQ ID NO: 369797 - DNA, 3011 bp, Homo sapiens
gggggctggagagagtgaggaggaaggggaggaggtgccgtcccacaataccaggcgggagggcgggtaggcggtttgtatccgggctgtgaggtgctcggagcctcggcggaccttgctgcctctgtctctttaacgcgagaggaagcgatgcagaggggtggaaaatggcagagctgcagatgttactagaggaggagatcccgtctggcaagagggcgctgatcgagagttaccagaacctgactcgggtggcagactactgtgaaaacaactacatacaggctacagacaagagaaaagctttagaggagaccaaagcctatacaacccaatctctagctagtgttgcttatcaaataaatgcattggccaacaatgtactccagttgctggatatccaagcctctcagcttcggagaatggagtcttccatcaatcatatctcacagactgtggatattcataaggagaaagtggcacgaagagagattggtattttgacaacaaataagaatacatcaagaactcacaaaataatagcacctgcgaatatggagcgccctgtaaggtatattcggaaacctatcgattacacagttctggatgatgtgggccatggtgtcaagtaagcatggaaataaccagcctgcaagaactggcacactgtcgagaacaaatcctcctactcagaaaccgccaagtcctcccatgtcaggccggggaacactgggacggaatactccttataaaaccctggaacctgttaaacccccaacagttcctaatgactatatgaccagtcctgctaggcttggaagtcagcatagtccaggcaggacagcatctttaaatcagagaccaaggacacacagtggaagtagtggaggaagtggaagtcgagaaaacagtggtagcagtagtattggcattcccattgctgtgcctacaccttcgccacccactattggaccagcagccccgggctcagctcctggttcccagtatggcacaatgaccaggcagatatctcgacacaactctactacttcttcgacatcttctggtggatacagacgaactccctctgtgactgctcaattttctgctcagcctcatgttaatggaggtccactttattctcaaaattcaattgctgatagtccaactccaccgccaccacctccaccagatgacattcccatgtttgatgactctccacctcccccaccaccaccaccagtggattatgaagatgaggaggctgcagtagttcagtataatgatccatatgcagatggggatcctgcttgggcccccaagaattatattgagaaagttgttgcaatatatgattatacaaaagacaaggatgatgagctgtcatttatggagggtgcaatcatttatgttataaagaagaatgatgatggctggtatgaaggagtctgcaatcgagtgactggtctgttccctgggaactatgttgaatcaatcatgcactatactgattaatttttttttttcttttgaagtagattcttattactcagtcatactgtgggactattatggttaacagaactgtcttaatatgttttaaaatgtgcccatattttcagaacatgctgttttattggtaaattgaatgtctacctgtaagcataaatctttgaggcagtttatgtattgctgaatagcaatttatacaagaagctgtccataactgattatgcttatgtacttacttacacatttttaactttatgaccagcctaaatattctgggggaagtggggtataatatttaacgaatcatgattcagattgtaccattacatgtttcagtgcagcatggttactaacgctatgtcagactaatattaaaatcagaaaatttaaatgctggtgctggtcagactttttttgttagattctctcatttaaaaaaaatactgtttgtttaaagcatgcataaaaatttatgtattgaaatatacttaaaaattcaagatgcttcccatttgtgtaatatttacctggaggactcgtacttaggtgtcttaacgtgaattgagtctccaaggtctccatgtgaaacaaagcagcaaaaagagaattatctgtaatgttgtaatttgtacctaagttttttaatgagtgaaatttgcattataaactttttccattcataaatacataagtgaaccaaaggtttttgtcctttccttcactgatttgctttaaaaaaaataaaagataatgatttattgcagaattatgattctattttctcaatatgttaacttggaaaaaaattttagccttatcttaatctgtcccaacagcaatgtgacggatttttgcagattcaaaatctgcaatggttatttacaagtcaatctactgaattccttttttaaataatcttttgaaactaagaaaatgtgtcaaattgtgtgcattcattctgtaggtaaaattcttaaggattgccatgtcagtccttcagttgtacagtgaactgttgtacactggttcaatgaaaggaagttaaaagtaccttttacatattgtaaaagtggatacagttgatttgtgagtaggcactctttaatccattacctggcactagcaacattagaattttaaaataaaataattgggaaagaaggtgggtcatgtattaatcagtgaacagagatttacctaaccaacagacttggattgtcttttgacataatcaaaatgcaacacatgcactttgtgtgtctcctcttaattgaagggagggctgagggatgttttctcttcttgtcttgtgtataattctctattgcttaggatattaaagtagagcactcaagtgtgggtttctgtgttattgaggatttgtttggaattcaaattacagttatgtactggatgctacagacttataacagcatagtgaatggtaagactagtgcaaaacagttatttctgaaaattaaagaccattattgctacca

SEQ ID NO: 369798 - DNA, 2187 bp, Homo sapiens
gggggctggagagagtgaggaggaaggggaggaggtgccgtcccacaataccaggcgggagggcgggtaggcggtttgtatccgggctgtgaggtgctcggagcctcggcggaccttgctgcctctgtctctttaacgcgagaggaagcgatgcagaggggtggaaaatggcagagctgcagatgttactagaggaggagatcccgtctggcaagagggcgctgatcgagagttaccagaacctgactcgggtggcagactactgtgaaaacaactacatacaggctacagacaagagaaaagctttagaggagaccaaagcctatacaacccaatctctagctagtgttgcttatcaaataaatgcattggccaacaatgtactccagttgctggatatccaagcctctcagcttcggagaatggagtcttccatcaatcatatctcacagactgtggatattcataaggagaaagtggcacgaagagagattggtattttgacaacaaataagaatacatcaagaactcacaaaataatagcacctgcgaatatggagcgccctgtaaggtatattcggaaacctatcgattacacagttctggatgatgtgggccatggtgtcaagtaagcatggaaataaccagcctgcaagaactggcacactgtcgagaacaaatcctcctactcagaaaccgccaagtcctcccatgtcaggccggggaacactgggacggaatactccttataaaaccctggaacctgttaaacccccaacagttcctaatgactatatgaccagtcctgctaggcttggaagtcagcatagtccaggcaggacagcatctttaaatcagagaccaaggacacacagtggaagtagtggaggaagtggaagtcgagaaaacagtggtagcagtagtattggcattcccattgctgtgcctacaccttcgccacccactattggaccagtttctattgctccaccccctccccctatgcctcagttgactccacagatacctctcacaggcttcgtggccagggtgcaggaaaacattgctgatagtccaactccaccgccaccacctccaccagatgacattcccatgtttgatgactctccacctcccccaccaccaccaccagtggattatgaagatgaggaggctgcagtagttcagtataatgatccatatgcagatggggatcctgcttgggcccccaagaattatattgagaaagttgttgcaatatatgattatacaaaagacaaggatgatgagctgtcatttatggagggtgcaatcatttatgttataaagaagaatgatgatggctggtatgaaggagtctgcaatcgagtgactggtctgttccctgggaactatgttgaatcaatcatgcactatactgattaatttttttttttcttttgaagtagattcttattactcagtcatactgtgggactattatggttaacagaactgtcttaatatgttttaaaatgtgcccatattttcagaacatgctgttttattggtaaattgaatgtctacctgtaagcataaatctttgaggcagtttatgtattgctgaatagcaatttatacaagaagctgtccataactgattatgcttatgtacttacttacacatttttaactttatgaccagcctaaatattctgggggaagtggggtataatatttaacgaatcatgattcagattgtaccattacatgtttcagtgcagcatggttactaacgctatgtcagactaatattaaaatcagaaaatttaaatgctggtgctggtcagactttttttgttagattctctcatttaaaaaaaatactgtttgtttaaagcatgcataaaaatttatgtattgaaatatacttaaaaattcaagatgcttcccatttgtgtaatatttacctggaggactcgtacttaggtgtcttaacgtgaattgagtctccaaggtctccatgtgaaacaaagcagcaaaaagagaattatctgtaatgttgtaatttgtacctaagttttttaatgagtgaaatttgcattataaactttttccattcataaatacataagtgaaccaaaggtttttgtcctttccttcactgatttgctttaaaaaaaataaaagataatgatttattgcaga

SEQ ID NO: 369799 - DNA, 2363 bp, Homo sapiens
gggggctggagagagtgaggaggaaggggaggaggtgccgtcccacaataccaggcgggagggcgggtaggcggtttgtatccgggctgtgaggtgctcggagcctcggcggaccttgctgcctctgtctctttaacgcgagaggaagcgatgcagaggggtggaaaatggcagagctgcagatgttactagaggaggagatcccgtctggcaagagggcgctgatcgagagttaccagaacctgactcgggtggcagactactgtgaaaacaactacatacaggctacagacaagagaaaagctttagaggagaccaaagcctatacaacccaatctctagctagtgttgcttatcaaataaatgcattggccaacaatgtactccagttgctggatatccaagcctctcagcttcggagaatggagtcttccatcaatcatatctcacagactgtggatattcataaggagaaagtggcacgaagagagattggtattttgacaacaaataagaatacatcaagaactcacaaaataatagcacctgcgaatatggagcgccctgtaaggtatattcggaaacctatcgattacacagttctggatgatgtgggccatggtgtcaagtaagcatggaaataaccagcctgcaagaactggcacactgtcgagaacaaatcctcctactcagaaaccgccaagtcctcccatgtcaggccggggaacactgggacggaatactccttataaaaccctggaacctgttaaacccccaacagttcctaatgactatatgaccagtcctgctaggcttggaagtcagcatagtccaggcaggacagcatctttaaatcagagaccaaggacacacagtggaagtagtggaggaagtggaagtcgagaaaacagtggtagcagtagtattggcattcccattgctgtgcctacaccttcgccacccactattggaccagcagccccgggctcagctcctggttcccagtatggcacaatgaccaggcagatatctcgacacaactctactacttcttcgacatcttctggtggatacagacgaactccctctgtgactgctcaattttctgctcagcctcatgttaatggaggtccactttattctcaaaattcaatttctattgctccaccccctccccctatgcctcagttgactccacagatacctctcacaggcttcgtggccagggtgcaggaaaacattgctgatagtccaactccaccgccaccacctccaccagatgacattcccatgtttgatgactctccacctcccccaccaccaccaccagtggattatgaagatgaggaggctgcagtagttcagtataatgatccatatgcagatggggatcctgcttgggcccccaagaattatattgagaaagttgttgcaatatatgattatacaaaagacaaggatgatgagctgtcatttatggagggtgcaatcatttatgttataaagaagaatgatgatggctggtatgaaggagtctgcaatcgagtgactggtctgttccctgggaactatgttgaatcaatcatgcactatactgattaatttttttttttcttttgaagtagattcttattactcagtcatactgtgggactattatggttaacagaactgtcttaatatgttttaaaatgtgcccatattttcagaacatgctgttttattggtaaattgaatgtctacctgtaagcataaatctttgaggcagtttatgtattgctgaatagcaatttatacaagaagctgtccataactgattatgcttatgtacttacttacacatttttaactttatgaccagcctaaatattctgggggaagtggggtataatatttaacgaatcatgattcagattgtaccattacatgtttcagtgcagcatggttactaacgctatgtcagactaatattaaaatcagaaaatttaaatgctggtgctggtcagactttttttgttagattctctcatttaaaaaaaatactgtttgtttaaagcatgcataaaaatttatgtattgaaatatacttaaaaattcaagatgcttcccatttgtgtaatatttacctggaggactcgtacttaggtgtcttaacgtgaattgagtctccaaggtctccatgtgaaacaaagcagcaaaaagagaattatctgtaatgttgtaatttgtacctaagttttttaatgagtgaaatttgcattataaactttttccattcataaatacataagtgaaccaaaggttgtccatcctaccctaaaaagattttaatgtgagcttaagatgtaaataaataattttgc

SEQ ID NO: 369800 - DNA, 1298 bp, Homo sapiens
aggttccgtcgtctttcaactgcggtttgtatccgggctgtgaggtgctcggagcctcggcggaccttgctgcctctgtctctttaacgcgagaggaagcgatgcagaggggtggaaaatggcagagtccacagatacctctcacaggcttcgtggccagggtgcaggaaaacattgctgatagtccaactccaccgccaccacctccaccagatgacattcccatgtttgatgactctccacctcccccaccaccaccaccagtggattatgaagatgaggaggctgcagtagttcagtataatgatccatatgcagatggggatcctgcttgggcccccaagaattatattgagaaagttgttgcaatatatgattatacaaaagacaaggatgatgagctgtcatttatggagggtgcaatcatttatgttataaagaagaatgatgatggctggtatgaaggagtctgcaatcgagtgactggtctgttccctgggaactatgttgaatcaatcatgcactatactgattaatttttttttttcttttgaagtagattcttattactcagtcatactgtgggactattatggttaacagaactgtcttaatatgttttaaaatgtgcccatattttcagaacatgctgttttattggtaaattgaatgtctacctgtaagcataaatctttgaggcagtttatgtattgctgaatagcaatttatacaagaagctgtccataactgattatgcttatgtacttacttacacatttttaactttatgaccagcctaaatattctgggggaagtggggtataatatttaacgaatcatgattcagattgtaccattacatgtttcagtgcagcatggttactaacgctatgtcagactaatattaaaatcagaaaatttaaatgctggtgctggtcagactttttttgttagattctctcatttaaaaaaaatactgtttgtttaaagcatgcataaaaatttatgtattgaaatatacttaaaaattcaagatgcttcccatttgtgtaatatttacctggaggactcgtacttaggtgtcttaacgtgaattgagtctccaaggtctccatgtgaaacaaagcagcaaaaagagaattatctgtaatgttgtaatttgtacctaagttttttaatgagtgaaatttgcattataaactttttccattcataaatacataagtgaaccaaaggtttttgtcctttccttcactgatttgctttaaaaaaaataaaagataatgatttattgcaga

SEQ ID NO: 369801 - DNA, 1894 bp, Homo sapiens
gggggctggagagagtgaggaggaaggggaggaggtgccgtcccacaataccaggcgggagggcgggtaggcggtttgtatccgggctgtgaggtgctcggagcctcggcggaccttgctgcctctgtctctttaacgcgagaggaagcgatgcagaggggtggaaaatggcagagctgcagatgttactagaggaggagatcccgtctggcaagagggcgctgatcgagagttaccagaacctgactcgggtggcagactactgtgaaaacaactacatacaggctacagacaagagaaaagctttagaggagaccaaagcctatacaacccaatctctagctagtgttgcttatcaaataaatgcattggccaacaatgtactccagttgctggatatccaagcctctcagcttcggagaatggagtcttccatcaatcatatctcacagactgtggatattcataaggagaaagtggcacgaagagagattggtattttgacaacaaataagaatacatcaagaactcacaaaataatagcacctgcgaatatggagcgccctgtaaggtatattcggaaacctatcgattacacagttctggatgatgtgggccatggtgtcaagtaagcatggaaataaccagcctgcaagaactggcacactgtcgagaacaaatcctcctactcagaaaccgccaagtcctcccatgtcaggccggggaacactgggacggaatactccttataaaaccctggaacctgttaaacccccaacagttcctaatgactatatgaccagtcctgctaggcttggaagtcagcatagtccaggcaggacagcatctttaaatcagagaccaaggacacacagtggaagtagtggaggaagtggaagtcgagaaaacagtggtagcagtagtattggcattcccattgctgtgcctacaccttcgccacccactattggaccagcagccccgggctcagctcctggttcccagtatggcacaatgaccaggcagatatctcgacacaactctactacttcttcgacatcttctggtggatacagacgaactccctctgtgactgctcaattttctgctcagcctcatgttaatggaggtccactttattctcaaaattcaagtaagcttgtgctttgcaggcatacagcaacagtggagctccttttgaaggaaattatttgaaactgttattcttgccagtgatagacaacaattgaaaaccatgatgtttcatgtttatttttgttttaggatattagtccttgaatcataccattttaagagtaattgtttaccactttctcttccaaaatttagacttaccaagtatacttaactaaatttatcgagacgtgtctatattgagtataccaaaatttaactttaatatgcgattttattacataagtagaactagagaacaaaaacattgcagaaataaactgaatttattggcatgtttgagacagcgtagtaatggtaaaattaaagacacaaacattgtcaaagttttccttcaaattaatataatgaaattgctggctatcacttttaaggtcattaacgtgttcagaaatgagttcaaaaccgattaaaactgtttgtgatgcctgcttaattactctgtctttgaataattctaatggtgggaatttcttttgatttctttctgtttacctcaaattgcacatctcaacactaattgcagtcagtgtttaaaagctggtaagaaaagaaaatagttttagcatataatgttaggaagttagaatagtgtagggtagtcattaatatcactttccatattaagatgttcaatgcaaaaaggaaaaaaaacaaaattagaaatgaacctgttgtc

SEQ ID NO: 369802 - DNA, 916 bp, Homo sapiens
gggggctggagagagtgaggaggaaggggaggaggtgccgtcccacaataccaggcgggagggcgggtaggcggtttgtatccgggctgtgaggtgctcggagcctcggcggaccttgctgcctctgtctctttaacgcgagaggaagcgatgcagaggggtggaaaatggcagagctgcagatgttactagaggaggagatcccgtctggcaagagggcgctgatcgagagttaccagaacctgactcgggtggcagactactgtgaaaacaactacatacaggctacagacaagagaaaagctttagaggagaccaaagcctatacaacccaatctctagctagtgttgcttatcaaataaatgcattggccaacaatgtactccagttgctggatatccaagcctctcagcttcggagaatggagtcttccatcaatcatatctcacagactgtggatattcataaggagaaagtggcacgaagagagattggtattttgacaacaaataagaatacatcaagaactcacaaaataatagcacctgcgaatatggagcgccctgtaaggtatattcggaaacctatcgattacacagttctggatgatgtgggccatggtgtcaagtaagcatggaaataaccagcctgcaagaactggcacactgtcgagaacaaatcctcctactcagaaaccgccaagtcctcccatgtcaggccggggaacactgggaggatactcttataaaacctggaacctggaaaccccaaagtctagtgttatatgacaggctgtagggtggacgtagtatccaggggcagctcttatcgagcagccctggctccggggcgggattgaacagggcagttggtccttggggtacctcgccccatggtggggtacccggcccagtg

SEQ ID NO: 369803 - DNA, 293 bp, Homo sapiens
cgacagcagtgaaagacaccatagaatggacaaccataggggaaagtttggggatgaaggagagcttaaaggtgtttcaattaagttagaaaactgacacaggctgttgagaattctttgccacttttcccaccccaaaacagcatggggcctgacatcttctgccctggtcccctttctcttgatgtggaaagtctgaatgcagtatttatagacttctaaggttttaaaatccagtatcaagaagaaaatcagaaatactggttggtgaaataaagagtttaggcattgtt

SEQ ID NO: 369804 - DNA, 646 bp, Homo sapiens
ttagaaggtatattaagctcagaaactttgtaattttgacttggcctggtgataatttccaggccttttccctgtaatcagttgcagaagtaaaaactctcttcctccccagttcatctgcatctcgttactgggccacaagaaatagcagtccacccctcagtctggtctgcaaatacacatacagatcatgtgcacacatagtgtgtacattcctagaaatggtactgtcacatatggagtgatttgctacgtccttcacttgaggatagttctagtagagtgagtgcagagctgatgacaagttgaaatgagatcaatctatttgtttaaaaatatacaaatattttgcatttaatttcatcggttaaaatgtctaaacattagagtaaacccatttccctatctacatccttactctgaagtccactaatcaaacctactcttccacagctgttctctggtccaccaagggctatgaggctcaccccttggatggtgctcagaaccacaaggaatactgaagaagccttgcctatgatttcaggtggcatcagacattgggctaattttcaaggtgtctctccttcccaacaggacagtcggagtctggttctttaataaatagctatatggatcttactta

SEQ ID NO: 369805 - DNA, 569 bp, Homo sapiens
gcggccgcctactactactactgctcgaattcaagcttctaacgatgtacggggacatggggcctgacatcttctgccctggtcccctttctcttgatgtggaaagtctgaatgcagtatttatagacttctaaggttttaaaatccagtatcaagaagaaaatcagaaatactggttggtgaaataaagagtttaggcattgttggcctgtcttttttgaagcatgtgtgttatgtgtagttagatatatttcacttatgtgagtcatcatggtgttggtcttgtagcccattatttttcctgtgcttccccagcttcccaaagtagctagttagaacttaaggtaaatatttattcttgggttggtggagtggatattgccagttaggagtcatggatcaattactgattatattgaaagtaaatataatcaattatgtacttttgagctttgcaggttcaatttaggtaaaaatcacattatgaaactgggaaagtctgaaggaatatgggcaaaatatttctcagtaaagcttccatgcttcacccttgacatgattacccttga

SEQ ID NO: 369806 - DNA, 2117 bp, Homo sapiens
agcggaagtagagttgcggttccctcgggagaggggcggaggctcagaggtgcaccacgtggggtttgctgccggagcggagtctccggccggcgtccagtttgagtctaggttggagttggaaccgtggagatgcggaaggaaaccccaccccccctagtgcccccggcggcccgggagtggaatcttcccccaaatgcgcccgcctgcatggaacggcagttggaggctgcgcggtaccggtccgatggggcgcttctcctcggggcctccagcctgagtgggcgctgctgggccggctccctctggctttttaaggacccctgtgccgcccccaacgaaggcttctgctccgccggagtccaaacggaggctggagtggctgacctcacttgggttggggagagaggtattctagtggcctccgattcaggtgctgttgaattgtgggaactagatgagaatgagacacttattgtcagcaagttctgcaagtatgagcatgatgacattgtgtctacagtcagtgtcttgagctctggcacacaagctgtcagtggtagcaaagacatctgcatcaaggtttgggaccttgctcagcaggtggtactgagttcataccgagctcatgctgctcaggtcacttgtgttgctgcctctcctcacaaggactctgtgtttctttcatgcagcgaggacaatagaattttactctgggatacccgctgtcccaagccagcatcacagattggctgcagtgcgcctggctaccttcctacctcgctggcttggcatcctcagcaaagtgaagtctttgtctttggtgatgagaatgggacagtctcccttgtggacaccaagagtacaagctgtgtcctgagctcagctgtacactcccagtgtgtcactgggctggtgttctccccacacagtgttcccttcctggcctctctcagtgaagactgctcacttgctgtgctggactcaagcctttctgagttgtttagaagccaagcccacagagactttgtgagagatgcgacttggtccccgctcaatcactccctgcttaccacagtgggctgggaccatcaggtcgtccaccacgttgtgcccacagaacctctcccagcccctggacctgcaagtgttactgagtagattggatttaagacaaaaagcaagtcccccatgagtgtccacttctttgccctgccctctcagcttgtgagacaacacaggagccttctatagtatgttgatatgctagatctgtgccgttaataggcatcgtctctcagcctgagggaggctggattctgggttcctgtagtcacagggaggaaaagctttcttaaaaatggacatgtatgtgcgtgtgagtgtgtgtgtagatttatagtttttggtagtggcaggaataaaaaaaatccatcctacatcttccctaagcactgcctctctctcaccccccaaaacaagttgacgaaagggttttatgtagctgtctatgaggaattggccgtgtctgggtgggttatgggatgtgggcatccctgggttcttggaagcagctcttatgctactcatagagatgggattgactttatttttttatagtgcttaattcaccattatgagaaatgcttccagtcacaaaaatgcagcccagctcactctgaggaagaagcaggacttggtacggttttacacaactccttaccattaaactgaatcagaaatccattttctggctgaataaaaagtttggcttgcctgtgtaatgcccactcccttccccctggctccctagtgatgggacatatatgagagagaagtgtttttctatcatagacaccataggggaaagtttggggatgaaggagagcttaaaggtgtttcaattaagttagaaaactgacacaggctgttgagaattctttgccacttttcccaccccaaaacagcatggggcctgacatcttctgccctggtcccctttctcttgatgtggaaagtctgaatgcagtatttatagacttctaaggttttaaaatccagtatcaagaagaaaatcagaaatactggttggtgaaataaagagtttaggcattgtt

SEQ ID NO: 369807 - DNA, 2047 bp, Homo sapiens
agcggaagtagagttgcggttccctcgggagaggggcggaggctcagaggtgcaccacgtggggtttgctgccggagcggagtctccggccggcgtccagtttgagtctaggttggagttggaaccgtggagatgcggaaggaaaccccaccccccctagtgcccccggcggcccgggagtggaatcttcccccaaatgcgcccgcctgcatggaacggcagttggaggctgcgcggtaccggtccgatggggcgcttctcctcggggcctccagcctgagtgggcgctgctgggccggctccctctggctttttaaggacccctgtgccgcccccaacgaaggcttctgctccgccggagtccaaacggaggctggagtggctgacctcacttgggttggggagagaggtattctagtggcctccgattcaggtgctgttgaattgtgggaactagatgagaatgagacacttattgtcagcaagttctgcaagtatgagcatgatgacattgtgtctacagtcagtgtcttgagctctggcacacaagctgtcagtggtagcaaagacatctgcatcaaggtttgggaccttgctcagcaggtggtactgagttcataccgagctcatgctgctcaggtcacttgtgttgctgcctctcctcacaaggactctgtgtttctttcatgcagcgaggacaatagaattttactctgggatacccgctgtcccaagccagcatcacagattggctgcagtgcgcctggctaccttcctacctcgctggcttggcatcctcagcaaagtgaagtctttgtctttggtgatgagaatgggacagtctcccttgtggacaccaagagtacaagctgtgtcctgagctcagctgtacactcccagtgtgtcactgggctggtgttctccccacacagtgttcccttcctggcctctctcagtgaagactgctcacttgctgtgctggactcaagcctttctgagttgtttagaagccaagcccacagagactttgtgagagatgcgacttggtccccgctcaatcaccccctggacctgcaagtgttactgagtagattggatttaagacaaaaagcaagtcccccatgagtgtccacttctttgccctgccctctcagcttgtgagacaacacaggagccttctatagtatgttgatatgctagatctgtgccgttaataggcatcgtctctcagcctgagggaggctggattctgggttcctgtagtcacagggaggaaaagctttcttaaaaatggacatgtatgtgcgtgtgagtgtgtgtgtagatttatagtttttggtagtggcaggaataaaaaaaatccatcctacatcttccctaagcactgcctctctctcaccccccaaaacaagttgacgaaagggttttatgtagctgtctatgaggaattggccgtgtctgggtgggttatgggatgtgggcatccctgggttcttggaagcagctcttatgctactcatagagatgggattgactttatttttttatagtgcttaattcaccattatgagaaatgcttccagtcacaaaaatgcagcccagctcactctgaggaagaagcaggacttggtacggttttacacaactccttaccattaaactgaatcagaaatccattttctggctgaataaaaagtttggcttgcctgtgtaatgcccactcccttccccctggctccctagtgatgggacatatatgagagagaagtgtttttctatcatagacaccataggggaaagtttggggatgaaggagagcttaaaggtgtttcaattaagttagaaaactgacacaggctgttgagaattctttgccacttttcccaccccaaaacagcatggggcctgacatcttctgccctggtcccctttctcttgatgtggaaagtctgaatgcagtatttatagacttctaaggttttaaaatccagtatcaagaagaaaatcagaaatactggttggtgaaataaagagtttaggcattgtt

SEQ ID NO: 369808 - DNA, 2332 bp, Homo sapiens
agcggaagtagagttgcggttccctcgggagaggggcggaggctcagaggtgcaccacgtggggtttgctgccggagcggagtctccggccggcgtccagtttgagtctaggttggagttggaaccgtggagatgcggaaggaaaccccaccccccctagtgcccccggcggcccgggagtggaatcttcccccaaatgcgcccgcctgcatggaacggcagttggaggctgcgcggtaccggtccgatggggcgcttctcctcggggcctccagcctgagtgggcgctgctgggccggctccctctggctttttaaggacccctgtgccgcccccaacgaaggcttctgctccgccggagtccaaacggaggctggagtggctgacctcacttgggttggggagagaggtattctagtggcctccgattcaggtgctgttgaattgtgggaactagatgagaatgagacacttattgtcagcaagttctgcaagtatgagcatgatgacattgtgtctacagtcagtgtcttgagctctggcacacaagctgtcagtggtagcaaagacatctgcatcaaggtttgggaccttgctcagcaggtggtactgagttcataccgagctcatgctgctcaggtcacttgtgttgctgcctctcctcacaaggactctgtgtttctttcatgcagcgaggacaatagaattttactctgggatacccgctgtcccaagccagcatcacagattggctgcagtgcgcctggctaccttcctacctcgctggcttggcatcctcagcaaagtgaagtctttgtctttggtgatgagaatgggacagtctcccttgtggacaccaagagtacaagctgtgtcctgagctcagctgtacactcccagtgtgtcactgggctggtgttctccccacacagtgttcccttcctggcctctctcagtgaagactgctcacttgctgtgctggactcaagcctttctgagttcatttcttcatctatgaaaatagaagactggattggatgactgatgacatccactgtggatagctacactgctatcctggcgatgaggccatacagttggtgaaatgtgtgtaacacacccaaaaaatgtgccccagatgtgttgggttctctttttttctccaggtctgcttttcttgtctctactctgccccgactttttttctttcttctaggtttagaagccaagcccacagagactttgtgagagatgcgacttggtccccgctcaatcactccctgcttaccacagtgggctgggaccatcaggtcgtccaccacgttgtgcccacagaacctctcccagcccctggacctgcaagtgttactgagtagattggatttaagacaaaaagcaagtcccccatgagtgtccacttctttgccctgccctctcagcttgtgagacaacacaggagccttctatagtatgttgatatgctagatctgtgccgttaataggcatcgtctctcagcctgagggaggctggattctgggttcctgtagtcacagggaggaaaagctttcttaaaaatggacatgtatgtgcgtgtgagtgtgtgtgtagatttatagtttttggtagtggcaggaataaaaaaaatccatcctacatcttccctaagcactgcctctctctcaccccccaaaacaagttgacgaaagggttttatgtagctgtctatgaggaattggccgtgtctgggtgggttatgggatgtgggcatccctgggttcttggaagcagctcttatgctactcatagagatgggattgactttatttttttatagtgcttaattcaccattatgagaaatgcttccagtcacaaaaatgcagcccagctcactctgaggaagaagcaggacttggtacggttttacacaactccttaccattaaactgaatcagaaatccattttctggctgaataaaaagtttggcttgcctgtgtaatgcccactcccttccccctggctccctagtgatgggacatatatgagagagaagtgtttttctatcatagacaccataggggaaagtttggggatgaaggagagcttaaaggtgtttcaattaagttagaaaactgacacaggctgttgagaattctttgccacttttcccaccccaaaacagcatggggcctgacatcttctgccctggtcccctttctcttgatgtggaaagtctgaatgcagtatttatagacttctaaggttttaaaatccagtatcaagaagaaaatcagaaatactggttggtgaaataaagagtttaggcattgtt

SEQ ID NO: 369809 - DNA, 2155 bp, Homo sapiens
agcggaagtagagttgcggttccctcgggagaggggcggaggctcagaggtgcaccacgtggggtttgctgccggagcggagtctccggccggcgtccagtttgagtctaggttggagttggaaccgtggagatgcggaaggaaaccccaccccccctagtgcccccggcggcccgggagtggaatcttcccccaaatgcgcccgcctgcatggaacggcagttggaggctgcgcggtaccggtccgatggggcgcttctcctcggggcctccagcctgagtgggcgctgctgggccggctccctctggctttttaaggacccctgtgccgcccccaacgaaggcttctgctccgccggagtccaaacggaggctggagtggctgacctcacttgggttggggagagaggtattctagtggcctccgattcaggtgctgttgaattgtgggaactagatgagaatgagacacttattgtcagcaagttctgcaagtatgagcatgatgacattgtgtctacagtcagtgtcttgagctctggcacacaagctgtcagtggtagcaaagacatctgcatcaaggtttgggaccttgctcagcaggtggtactgagttcataccgagctcatgctgctcaggtcacttgtgttgctgcctctcctcacaaggactctgtgtttctttcatgcagcgaggacaatagaattttactctgggatacccgctgtcccaagccagcatcacagattggctgcagtgcgcctggctaccttcctacctcgctggcttggcatcctcagcaaagtgaagtctttgtctttggtgatgagaatgggacagtctcccttgtggacaccaagagtacaagctgtgtcctgagctcagctgtacactcccagtgtgtcactgggctggtgttctccccacacaggctggacctttcacaaccctctcctccatctgatagtgtgttcccttcctggcctctctcagtgaagactgctcacttgctgtgctggactcaagcctttctgagttgtttagaagccaagcccacagagactttgtgagagatgcgacttggtccccgctcaatcactccctgcttaccacagtgggctgggaccatcaggtcgtccaccacgttgtgcccacagaacctctcccagcccctggacctgcaagtgttactgagtagattggatttaagacaaaaagcaagtcccccatgagtgtccacttctttgccctgccctctcagcttgtgagacaacacaggagccttctatagtatgttgatatgctagatctgtgccgttaataggcatcgtctctcagcctgagggaggctggattctgggttcctgtagtcacagggaggaaaagctttcttaaaaatggacatgtatgtgcgtgtgagtgtgtgtgtagatttatagtttttggtagtggcaggaataaaaaaaatccatcctacatcttccctaagcactgcctctctctcaccccccaaaacaagttgacgaaagggttttatgtagctgtctatgaggaattggccgtgtctgggtgggttatgggatgtgggcatccctgggttcttggaagcagctcttatgctactcatagagatgggattgactttatttttttatagtgcttaattcaccattatgagaaatgcttccagtcacaaaaatgcagcccagctcactctgaggaagaagcaggacttggtacggttttacacaactccttaccattaaactgaatcagaaatccattttctggctgaataaaaagtttggcttgcctgtgtaatgcccactcccttccccctggctccctagtgatgggacatatatgagagagaagtgtttttctatcatagacaccataggggaaagtttggggatgaaggagagcttaaaggtgtttcaattaagttagaaaactgacacaggctgttgagaattctttgccacttttcccaccccaaaacagcatggggcctgacatcttctgccctggtcccctttctcttgatgtggaaagtctgaatgcagtatttatagacttctaaggttttaaaatccagtatcaagaagaaaatcagaaatactggttggtgaaataaagagtttaggcattgtt

SEQ ID NO: 369810 - DNA, 1450 bp, Homo sapiens
agcggaagtagagttgcggttccctcgggagaggggcggaggctcagaggtgcaccacgtggggtttgctgccggagcggagtctccggccggcgtccagtttgagtctaggttggagttggaaccgtggagatgcggaaggaaaccccaccccccctagtgcccccggcggcccgggagtggaatcttcccccaaatgcgcccgcctgcatggaacggcagttggaggctgcgcggtaccggtccgatggggcgcttctcctcggggcctccagcctgagtgggcgctgctgggccggctccctctggctttttaaggacccctgtgccgcccccaacgaaggcttctgctccgccggagtccaaacggaggctggagtggctgacctcacttgggttggggagagaggtattctagtggcctccgattcaggtgctgttgaattgtgggaactagatgagaatgagacacttattgtcagcaagttctgcaagtatgagcatgatgacattgtgtctacagtcagtgtcttgagctctggcacacaagctgtcagtggtagcaaagacatctgcatcaaggtttgggaccttgctcagcaggtggtactgagttcataccgagctcatgctgctcaggtcacttgtgttgctgcctctcctcacaaggactctgtgtttctttcatgcagcgaggacaatagaattttactctgggatacccgctgtcccaagccagcatcacagattggctgcagtgcgcctggctaccttcctacctcgctggcttggcatcctcagcaaagtgaagtctttgtctttggtgatgagaatgggacagtctcccttgtggacaccaagagtacaagctgtgtcctgagctcagctgtacactcccagtgtgtcactgggctggtgttctccccacacagtgttcccttcctggcctctctcagtgaagactgctcacttgctgtgctggactcaagcctttctgagttgtttagaagccaagcccacagagactttgtgagagatgcgacttggtccccgctcaatcactccctgcttaccacagtgggctgggaccatcaggtcgtccaccacgttgtgcccacagaacctctcccagcccctggacctgcaagtgttactgagtagattggatttaagacaaaaagcaagtcccccatgagtgtccacttctttgccctgccctctcagcttgtgagacaacacaggagccttctatagtatgttgatatgctagatctgtgccgttaataggcatcgtctctcagcctgagggaggctggattctgggttcctgtagtcacagggaggaaaagctttcttaaaaatggacatgtatgtgcgtgtgagtgtgtgtgtagatttatagtttttggtagtggcaggaataaaaaaaatccatcctacatcttcccta

SEQ ID NO: 369811 - DNA, 2556 bp, Homo sapiens
agcggaagtagagttgcggttccctcgggagaggggcggaggctcagaggtgcaccacgtggggtttgctgccggagcggagtctccggccggcgtccagtttgagtctaggttggagttggaaccgtggagatgcggaaggaaaccccaccccccctagtgcccccggcggcccgggagtggaatcttcccccaaatgcgcccgcctgcatggaacggcagttggaggctgcgcggtaccggtccgatggggcgcttctcctcggggcctccagcctgagtgggcgctgctgggccggctccctctggctttttaaggacccctgtgccgcccccaacgaaggcttctgctccgccggagtccaaacggaggctggagtggctgacctcacttgggttggggagagaggtattctagtggcctccgattcaggtgctgttgaattgtgggaactagatgagaatgagacacttattgtcagcaagttctgcaagtatgagcatgatgacattgtgtctacagtcagtgtcttgagctctggcacacaagctgtcagtggtagcaaagacatctgcatcaaggtttgggaccttgctcagcaggtggtactgagttcataccgagctcatgctgctcaggtcacttgtgttgctgcctctcctcacaaggactctgtgtttctttcatgcagcgaggacaatagaattttactctgggatacccgctgtcccaagccagcatcacagattggctgcagtgcgcctggctaccttcctacctcgctggcttggcatcctcagcaaagtgaagtctttgtctttggtgatgagaatgggacagtctcccttgtggacaccaagagtacaagctgtgtcctgagctcagctgtacactcccagtgtgtcactgggctggtgttctccccacacagtgttcccttcctggcctctctcagtgaagactgctcacttgctgtgctggactcaagcctttctgagttgtttagaagccaagcccacagagactttgtgagagatgcgacttggtccccgctcaatcactccctgcttaccacagtgggctgggaccatcaggtcgtccaccacgttgtgcccacagaacctctcccagcccctggacctgcaagtgttactgagtagattggatttaagacaaaaagcaagtcccccatgagtgtccacttctttgccctgccctctcagcttgtgagacaacacaggagccttctatagtatgttgatatgctagatctgtgccgttaataggcatcgtctctcagcctgagggaggctggattctgggttcctgtagtcacagggaggaaaagctttcttaaaaatggacatgtatgtgcgtgtgagtgtgtgtgtagatttatagtttttggtagtggcaggaataaaaaaaatccatcctacatcttccctaagcactgcctctctctcaccccccaaaacaagttgacgaaagggttttatgtagctgtctatgaggaattggccgtgtctgggtgggttatgggatgtgggcatccctgggttcttggaagcagctcttatgctactcatagagatgggattgactttatttttttatagtgcttaattcaccattatgagaaatgcttccagtcacaaaaatgcagcccagctcactctgaggaagaagcaggacttggtacggttttacacaactccttaccattaaactgaatcagaaatccattttctggctgaataaaaagtttggcttgcctgtgtaatgcccactcccttccccctggctccctagtgatgggacatatatgagagagaagtgtttttctatcatagacaccataggggaaagtttggggatgaaggagagcttaaaggtgtttcaattaagttagaaaactgacacaggctgttgagaattctttgccacttttcccaccccaaaacagcatggggcctgacatcttctgccctggtcccctttctcttgatgtggaaagtctgaatgcagtatttatagacttctaaggttttaaaatccagtatcaagaagaaaatcagaaatactggttggtgaaataaagagtttaggcattgttaaaaaaaaaaaaaaaaaaaaaaaaaaaaggggggcgcgcgcgcccaaaaattccccccgggggcgccccaatttcgcgggtccccggttttcttgtgtcacaagggcgccccatatatgggggaggctcggtatatataagccgatacggcactgcgcccgtcggttatcaacaaccgctcccgcagacttgggggacaacctggcacacgtctgggagactcttgggaaagggacccttaatctccgtggggggcggcgacatatttggggccacacttccctacagagaggatttaaacggcctcaaagggtaactttcaacactcttaacggtgtactacggtgtaaaaccatacggtgcattctgctcgcgtttagacatttcggcacccgggttttagctcttagaccatttttttccgagctgtgtctcaatg

SEQ ID NO: 369812 - DNA, 2578 bp, Homo sapiens
agcggaagtagagttgcggttccctcgggagaggggcggaggctcagaggtgcaccacgtggggtttgctgccggagcggagtctccggccggcgtccagtttgagtctaggttggagttggaaccgtggagatgcggaaggaaaccccaccccccctagtgcccccggcggcccgggagtggaatcttcccccaaatgcgcccgcctgcatggaacggcagttggaggctgcgcggtaccggtccgatggggcgcttctcctcggggcctccagcctgagtgggcgctgctgggccggctccctctggctttttaaggacccctgtgccgcccccaacgaaggcttctgctccgccggagtccaaacggaggctggagtggctgacctcacttgggttggggagagaggtattctagtggcctccgattcaggtgctgttgaattgtgggaactagatgagaatgagacacttattgtcagcaagttctgcaagtatgagcatgatgacattgtgtctacagtcagtgtcttgagctctggcacacaagctgtcagtggtagcaaagacatctgcatcaaggtttgggaccttgctcagcaggtggtactgagttcataccgagctcatgctgctcaggtcacttgtgttgctgcctctcctcacaaggactctgtgtttctttcatgcagcgaggacaatagaattttactctgggatacccgctgtcccaagccagcatcacagattggctgcagtgcgcctggctaccttcctacctcgctggcttggcatcctcagcaaagtgaagtctttgtctttggtgatgagaatgggacagtctcccttgtggacaccaagagtacaagctgtgtcctgagctcagctgtacactcccagtgtgtcactgggctggtgttctccccacacagtgttcccttcctggcctctctcagtgaagactgctcacttgctgtgctggactcaagcctttctgagttgtttagaagccaagcccacagagactttgtgagagatgcgacttggtccccgctcaatcactccctgcttaccacagtgggctgggaccatcaggtcgtccaccacgttgtgcccacagaacctctcccagcccctggacctgcaagtgttactgagtagattggatttaagacaaaaagcaagtcccccatgagtgtccacttctttgccctgccctctcagcttgtgagacaacacaggagccttctatagtatgttgatatgctagatctgtgccgttaataggcatcgtctctcagcctgagggaggctggattctgggttcctgtagtcacagggaggaaaagctttcttaaaaatggacatgtatgtgcgtgtgagtgtgtgtgtagatttatagtttttggtagtggcaggaataaaaaaaatccatcctacatcttccctaagcactgcctctctctcaccccccaaaacaagttgacgaaagggttttatgtagctgtctatgaggaattggccgtgtctgggtgggttatgggatgtgggcatccctgggttcttggaagcagctcttatgctactcatagagatgggattgactttatttttttatagtgcttaattcaccattatgagaaatgcttccagtcacaaaaatgcagcccagctcactctgaggaagaagcaggacttggtacggttttacacaactccttaccattaaactgaatcagaaatccattttctggctgaataaaaagtttggcttgcctgtgtaatgcccactcccttccccctggctccctagtgatgggacatatatgagagagaagtgtttttctatcatagacaccataggggaaagtttggggatgaaggagagcttaaaggtgtttcaattaagttagaaaactgacacaggctgttgagaattctttgccacttttcccaccccaaaacagcatggggcctgacatcttctgccctggtcccctttctcttgatgtggaaagtctgaatgcagtatttatagacttctaaggttttaaaatccagtatcaagaagaaaatcagaaatactggttggtgaaataaagagtttaggcattgttaaaaaaaaaaaaaaaaaaaaaaaaaaaaaaaaaaaaaaaaaaaaaaaaaaaaaaaaaaaaaaaaaaaaaaaaaaaaaaaaaaaaaaaaaaaaaaaaaaaaaaaaaagaaaaaaaaaaaaaaagagagagagggcggggcgcgagcgcagagacatcctctccccggggcggcggggcgacccaactaactcaccagcccgcaccaccagtatgcgtgttgcagtgaatgtcacgaggaggcgcgcccacctcagagacgtcggaggagacactatatatatatataaatagagcgcgggcggctaggcgcggtagcactaaatacaaccacagagcgggacgggggaggcagacaccagccgtcgcgccagcgggtgccactggcggtagagaaaaacccacatccactcattgtcgtgaggcggataaacactagcgcgcagctccgccccgctcctggt

SEQ ID NO: 369813 - DNA, 2097 bp, Homo sapiens
  misc_feature (155)..(155): n is a, c, g, or t
  misc_feature (171)..(171): n is a, c, g, or t
  misc_feature (176)..(177): n is a, c, g, or t
  misc_feature (193)..(193): n is a, c, g, or t
  misc_feature (203)..(203): n is a, c, g, or t
  misc_feature (205)..(205): n is a, c, g, or t
  misc_feature (215)..(216): n is a, c, g, or t
  misc_feature (221)..(223): n is a, c, g, or t
agcggaagtagagttgcggttccctcgggagaggggcggaggctcagaggtgcaccacgtggggtttgctgccggagcggagtctccggccggcgtccagtttgagtctaggttggagttggaaccgtggagatgcggaaggaaaccccactcgngagaatcgcagaggcngttanntaggaccgtaatagtnagtgcgtgtngncaagctgcgnngtacnnntccgatggggcgcttctcctcggggcctccagcctgagtgggcgctgctgggccggctccctctggctttttaaggacccctgtgccgcccccaacgaaggcttctgctccgccggagtccaaacggaggctggagtggctgacctcacttgggttggggagagaggtattctagtggcctccgattcaggtgctgttgaattgtgggaactagatgagaatgagacacttattgtcagcaagttctgcaagtatgagcatgatgacattgtgtctacagtcagtgtcttgagctctggcacacaagctgtcagtggtagcaaagacatctgcatcaaggtttgggaccttgctcagcaggtggtactgagttcataccgagctcatgctgctcaggtcacttgtgttgctgcctctcctcacaaggactctgtgtttctttcatgcagcgaggacaatagaattttactctgggatacccgctgtcccaagccagcatcacagattggctgcagtgcgcctggctaccttcctacctcgctggcttggcatcctcagcaaagtgaagtctttgtctttggtgatgagaatgggacagtctcccttgtggacaccaagagtacaagctgtgtcctgagctcagctgtacactcccagtgtgtcactgggctggtgttctccccacacagtgttcccttcctggcctctctcagtgaagactgctcacttgctgtgctggactcaagcctttctgagttgtttagaagccaagcccacagagactttgtgagagatgcgacttggtccccgctcaatcactccctgcttaccacagtgggctgggaccatcaggtcgtccaccacgttgtgcccacagaacctctcccagcccctggacctgcaagtgttactgagtagattggatttaagacaaaaagcaagtcccccatgagtgtccacttctttgccctgccctctcagcttgtgagacaacacaggagccttctatagtatgttgatatgctagatctgtgccgttaataggcatcgtctctcagcctgagggaggctggattctgggttcctgtagtcacagggaggaaaagctttcttaaaaatggacatgtatgtgcgtgtgagtgtgtgtgtagatttatagtttttggtagtggcaggaataaaaaaaatccatcctacatcttccctaagcactgcctctctctcaccccccaaaacaagttgacgaaagggttttatgtagctgtctatgaggaattggccgtgtctgggtgggttatgggatgtgggcatccctgggttcttggaagcagctcttatgctactcatagagatgggattgactttatttttttatagtgcttaattcaccattatgagaaatgcttccagtcacaaaaatgcagcccagctcactctgaggaagaagcaggacttggtacggttttacacaactccttaccattaaactgaatcagaaatccattttctggctgaataaaaagtttggcttgcctgtgtaatgcccactcccttccccctggctccctagtgatgggacatatatgagagagaagtgtttttctatcatagacaccataggggaaagtttggggatgaaggagagcttaaaggtgtttcaattaagttagaaaactgacacaggctgttgagaattctttgccacttttcccaccccaaaacagcatggggcctgacatcttctgccctggtcccctttctcttgatgtggaaagtctgaatgcagtatttatagacttctaaggttttaaaatccagtatcaagaagaaaatcagaaatactggttggtgaaataaagagtttaggcattgtt

SEQ ID NO: 369814 - DNA, 2094 bp, Homo sapiens
agcggaagtagagttgcggttccctcgggagaggggcggaggctcagaggtgcaccacgtggggtttgctgccggagcggagtctccggccggcgtccagtttgagtctaggttggagttggaaccgtggagatgcggaaggaaaccccacgtggtgtatgctgagtgccgatggaggtaccccagggcgcctgcgttgtgacgggtgaggtgggggccgtccgatggggcgcttctcctcggggcctccagcctgagtgggcgctgctgggccggctccctctggctttttaaggacccctgtgccgcccccaacgaaggcttctgctccgccggagtccaaacggaggctggagtggctgacctcacttgggttggggagagaggtattctagtggcctccgattcaggtgctgttgaattgtgggaactagatgagaatgagacacttattgtcagcaagttctgcaagtatgagcatgatgacattgtgtctacagtcagtgtcttgagctctggcacacaagctgtcagtggtagcaaagacatctgcatcaaggtttgggaccttgctcagcaggtggtactgagttcataccgagctcatgctgctcaggtcacttgtgttgctgcctctcctcacaaggactctgtgtttctttcatgcagcgaggacaatagaattttactctgggatacccgctgtcccaagccagcatcacagattggctgcagtgcgcctggctaccttcctacctcgctggcttggcatcctcagcaaagtgaagtctttgtctttggtgatgagaatgggacagtctcccttgtggacaccaagagtacaagctgtgtcctgagctcagctgtacactcccagtgtgtcactgggctggtgttctccccacacagtgttcccttcctggcctctctcagtgaagactgctcacttgctgtgctggactcaagcctttctgagttgtttagaagccaagcccacagagactttgtgagagatgcgacttggtccccgctcaatcactccctgcttaccacagtgggctgggaccatcaggtcgtccaccacgttgtgcccacagaacctctcccagcccctggacctgcaagtgttactgagtagattggatttaagacaaaaagcaagtcccccatgagtgtccacttctttgccctgccctctcagcttgtgagacaacacaggagccttctatagtatgttgatatgctagatctgtgccgttaataggcatcgtctctcagcctgagggaggctggattctgggttcctgtagtcacagggaggaaaagctttcttaaaaatggacatgtatgtgcgtgtgagtgtgtgtgtagatttatagtttttggtagtggcaggaataaaaaaaatccatcctacatcttccctaagcactgcctctctctcaccccccaaaacaagttgacgaaagggttttatgtagctgtctatgaggaattggccgtgtctgggtgggttatgggatgtgggcatccctgggttcttggaagcagctcttatgctactcatagagatgggattgactttatttttttatagtgcttaattcaccattatgagaaatgcttccagtcacaaaaatgcagcccagctcactctgaggaagaagcaggacttggtacggttttacacaactccttaccattaaactgaatcagaaatccattttctggctgaataaaaagtttggcttgcctgtgtaatgcccactcccttccccctggctccctagtgatgggacatatatgagagagaagtgtttttctatcatagacaccataggggaaagtttggggatgaaggagagcttaaaggtgtttcaattaagttagaaaactgacacaggctgttgagaattctttgccacttttcccaccccaaaacagcatggggcctgacatcttctgccctggtcccctttctcttgatgtggaaagtctgaatgcagtatttatagacttctaaggttttaaaatccagtatcaagaagaaaatcagaaatactggttggtgaaataaagagtttaggcattgtt

SEQ ID NO: 369815 - DNA, 1742 bp, Homo sapiens
  misc_feature (2)..(2): n is a, c, g, or t
anctgaatctactcacaacgcacaatacatgtccatttttaagaaagcttttcctccctgtgactacaggaacccagaatccagcctccctcaggctgagagacgatgcctattaacggcacagaacatgatgacattgtgtctacagtcagtgtcttgagctctggcacacaagctgtcagtggtagcaaagacatctgcatcaaggtttgggaccttgctcagcaggtggtactgagttcataccgagctcatgctgctcaggtcacttgtgttgctgcctctcctcacaaggactctgtgtttctttcatgcagcgaggacaatagaattttactctgggatacccgctgtcccaagccagcatcacagattggctgcagtgcgcctggctaccttcctacctcgctggcttggcatcctcagcaaagtgaagtctttgtctttggtgatgagaatgggacagtctcccttgtggacaccaagagtacaagctgtgtcctgagctcagctgtacactcccagtgtgtcactgggctggtgttctccccacacagtgttcccttcctggcctctctcagtgaagactgctcacttgctgtgctggactcaagcctttctgagttgtttagaagccaagcccacagagactttgtgagagatgcgacttggtccccgctcaatcactccctgcttaccacagtgggctgggaccatcaggtcgtccaccacgttgtgcccacagaacctctcccagcccctggacctgcaagtgttactgagtagattggatttaagacaaaaagcaagtcccccatgagtgtccacttctttgccctgccctctcagcttgtgagacaacacaggagccttctatagtatgttgatatgctagatctgtgccgttaataggcatcgtctctcagcctgagggaggctggattctgggttcctgtagtcacagggaggaaaagctttcttaaaaatggacatgtatgtgcgtgtgagtgtgtgtgtagatttatagtttttggtagtggcaggaataaaaaaaatccatcctacatcttccctaagcactgcctctctctcaccccccaaaacaagttgacgaaagggttttatgtagctgtctatgaggaattggccgtgtctgggtgggttatgggatgtgggcatccctgggttcttggaagcagctcttatgctactcatagagatgggattgactttatttttttatagtgcttaattcaccattatgagaaatgcttccagtcacaaaaatgcagcccagctcactctgaggaagaagcaggacttggtacggttttacacaactccttaccattaaactgaatcagaaatccattttctggctgaataaaaagtttggcttgcctgtgtaatgcccactcccttccccctggctccctagtgatgggacatatatgagagagaagtgtttttctatcatagacaccataggggaaagtttggggatgaaggagagcttaaaggtgtttcaattaagttagaaaactgacacaggctgttgagaattctttgccacttttcccaccccaaaacagcatggggcctgacatcttctgccctggtcccctttctcttgatgtggaaagtctgaatgcagtatttatagacttctaaggttttaaaatccagtatcaagaagaaaatcagaaatactggttggtgaaataaagagtttaggcattgtt

SEQ ID NO: 369816 - DNA, 1446 bp, Homo sapiens
agcggaagtagagttgcggttccctcgggagaggggcggaggctcagaggtgcaccacgtggggtttgctgccggagcggagtctccggccggcgtccagtttgagtctaggttggagttggaaccgtggagatgcggaaggaaaccccaccccccctagtgcccccggcggcccgggagtggaatcttcccccaaatgcgcccgcctgcatggaacggcagttggaggctgcgcggtaccggtccgatggggcgcttctcctcggggcctccagcctgagtgggcgctgctgggccggctccctctggctttttaaggacccctgtgccgcccccaacgaaggcttctgctccgccggagtccaaacggaggctggagtggctgacctcacttgggttggggagagaggtattctagtggcctccgattcaggtgctgttgaattgtgggaactagatgagaatgagacacttattgtcagcaagttctgcaagtatgagcatgatgacattgtgtctacagtcagtgtcttgagctctggcacacaagctgtcagtggtagcaaagacatctgcatcaaggtttgggaccttgctcagcaggtggtactgagttcataccgagctcatgctgctcaggtcacttgtgttgctgcctctcctcacaaggactctgtgtttctttcatgcagcgaggacaatagaattttactctgggatacccgctgtcccaagccagcatcacagattggctgcagtgcgcctggctaccttcctacctcgctggcttggcatcctcagcaaagtgaagtctttgtctttggtgatgagaatgggacagtctcccttgtggacaccaagagtacaagctgtgtcctgagctcagctgtacactcccagtgtgtcactgggctggtgttctccccacacagtgttcccttcctggcctctctcagtgaagactgctcacttgctgtgctggactcaagcctttctgagttgtttagaagccaagcccacagagactttgtgagagatgcgacttggtccccgctcaatcactccctgcttaccacagtgggctgggaccatcaggtcgtccaccacgttgtgcccacagaacctctcccagcccctggacctgcaagtgttactgagtagattggatttaagacaaaaagcaagtcccccatgagtgtccacttctttgccctgccctctcagcttgtgagacaacacaggagccttctatactgttctctggtccaccaagggctatgaggctcaccccttggatggtgctcagaaccacaaggaatactgaagaagccttgcctatgatttcaggtggcatcagacattgggctaattttcaaggtgtctctccttcccaacaggacagtcggagtctggttctttaataaatagctatatggatcttactta

SEQ ID NO: 369817 - DNA, 1665 bp, Homo sapiens
agcggaagtagagttgcggttccctcgggagaggggcggaggctcagaggtgcaccacgtggggtttgctgccggagcggagtctccggccggcgtccagtttgagtctaggttggagttggaaccgtggagatgcggaaggaaaccccaccccccctagtgcccccggcggcccgggagtggaatcttcccccaaatgcgcccgcctgcatggaacggcagttggaggctgcgcggtaccggtccgatggggcgcttctcctcggggcctccagcctgagtgggcgctgctgggccggctccctctggctttttaaggacccctgtgccgcccccaacgaaggcttctgctccgccggagtccaaacggaggctggagtggctgacctcacttgggttggggagagaggtattctagtggcctccgattcaggtgctgttgaattgtgggaactagatgagaatgagacacttattgtcagcaagttctgcaagtatgagcatgatgacattgtgtctacagtcagtgtcttgagctctggcacacaagctgtcagtggtagcaaagacatctgcatcaaggtttgggaccttgctcagcaggtggtactgagttcataccgagctcatgctgctcaggtcacttgtgttgctgcctctcctcacaaggactctgtgtttctttcatgcagcgaggacaatagaattttactctgggatacccgctgtcccaagccagcatcacagattggctgcagtgcgcctggctaccttcctacctcgctggcttggcatcctcagcaaagtgaagtctttgtctttggtgatgagaatgggacagtctcccttgtggacaccaagagtacaagctgtgtcctgagctcagctgtacactcccagtgtgtcactgggctggtgttctccccacacagtgttcccttcctggcctctctcagtgaagactgctcacttgctgtgctggactcaagcctttctgagttcatttcttcatctatgaaaatagaagactggattggatgactgatgacatccactgtggatagctacactgctatcctggcgatgaggccatacagttggtgaaatgtgtgtaacacacccaaaaaatgtgccccagatgtgttgggttctctttttttctccaggtctgcttttcttgtctctactctgccccgactttttttctttcttctaggtttagaagccaagcccacagagactttgtgagagatgcgacttggtccccgctcaatcactccctgcttaccacagtgggctgggaccatcaggtcgtccaccacgttgtgcccacagaacctctcccagcccctggacctgcaagtgttactgagtagattggatttaagacaaaaagcaagtcccccatgagtgtccacttctttgccctgccctctcagcttgtgagacaacacaggagccttctatagtatgttgatatgctagatctgtgccgttaataggcatcgtctctcagcctgagggaggctggattctgggttcctgtagtcacagggaggaaaagctttcttaaaaatggacatgtatgtgcgtgtgagtgtgtgtgtagatttatagtttttggtagtggcaggaataaaaaaaatccatcctacatcttcccta

SEQ ID NO: 369818 - DNA, 1420 bp, Homo sapiens
tgatgttatccccaacacagtgttcccttcctggcctctctcagtgaagactgctcacttgctgtgctggactcaagcctttctgagttcatttcttcatctatgaaaatagaagactggattggatgactgatgacatccactgtggatagctacactgctatcctggcgatgaggccatacagttggtgaaatgtgtgtaacacacccaaaaaatgtgccccagatgtgttgggttctctttttttctccaggtctgcttttcttgtctctactctgccccgactttttttctttcttctaggtttagaagccaagcccacagagactttgtgagagatgcgacttggtccccgctcaatcactccctgcttaccacagtgggctgggaccatcaggtcgtccaccacgttgtgcccacagaacctctcccagcccctggacctgcaagtgttactgagtagattggatttaagacaaaaagcaagtcccccatgagtgtccacttctttgccctgccctctcagcttgtgagacaacacaggagccttctatagtatgttgatatgctagatctgtgccgttaataggcatcgtctctcagcctgagggaggctggattctgggttcctgtagtcacagggaggaaaagctttcttaaaaatggacatgtatgtgcgtgtgagtgtgtgtgtagatttatagtttttggtagtggcaggaataaaaaaaatccatcctacatcttccctaagcactgcctctctctcaccccccaaaacaagttgacgaaagggttttatgtagctgtctatgaggaattggccgtgtctgggtgggttatgggatgtgggcatccctgggttcttggaagcagctcttatgctactcatagagatgggattgactttatttttttatagtgcttaattcaccattatgagaaatgcttccagtcacaaaaatgcagcccagctcactctgaggaagaagcaggacttggtacggttttacacaactccttaccattaaactgaatcagaaatccattttctggctgaataaaaagtttggcttgcctgtgtaatgcccactcccttccccctggctccctagtgatgggacatatatgagagagaagtgtttttctatcatagacaccataggggaaagtttggggatgaaggagagcttaaaggtgtttcaattaagttagaaaactgacacaggctgttgagaattctttgccacttttcccaccccaaaacagcatggggcctgacatcttctgccctggtcccctttctcttgatgtggaaagtctgaatgcagtatttatagacttctaaggttttaaaatccagtatcaagaagaaaatcagaaatactggttggtgaaataaagagtttaggcattgtt

SEQ ID NO: 369819 - DNA, 1193 bp, Homo sapiens
atataacacaagacttgcacatacatagatggctggtacattgctgtgctggaatcacgcctatctgtatagtaaaggtttagaagccaagcccacagagactttgtgagagatgcgacttggtccccgctcaatcactccctgcttaccacagtgggctgggaccatcaggtcgtccaccacgttgtgcccacagaacctctcccagcccctggacctgcaagtgttactgagtagattggatttaagacaaaaagcaagtcccccatgagtgtccacttctttgccctgccctctcagcttgtgagacaacacaggagccttctatagtatgttgatatgctagatctgtgccgttaataggcatcgtctctcagcctgagggaggctggattctgggttcctgtagtcacagggaggaaaagctttcttaaaaatggacatgtatgtgcgtgtgagtgtgtgtgtagatttatagtttttggtagtggcaggaataaaaaaaatccatcctacatcttccctaagcactgcctctctctcaccccccaaaacaagttgacgaaagggttttatgtagctgtctatgaggaattggccgtgtctgggtgggttatgggatgtgggcatccctgggttcttggaagcagctcttatgctactcatagagatgggattgactttatttttttatagtgcttaattcaccattatgagaaatgcttccagtcacaaaaatgcagcccagctcactctgaggaagaagcaggacttggtacggttttacacaactccttaccattaaactgaatcagaaatccattttctggctgaataaaaagtttggcttgcctgtgtaatgcccactcccttccccctggctccctagtgatgggacatatatgagagagaagtgtttttctatcatagacaccataggggaaagtttggggatgaaggagagcttaaaggtgtttcaattaagttagaaaactgacacaggctgttgagaattctttgccacttttcccaccccaaaacagcatggggcctgacatcttctgccctggtcccctttctcttgatgtggaaagtctgaatgcagtatttatagacttctaaggttttaaaatccagtatcaagaagaaaatcagaaatactggttggtgaaataaagagtttaggcattgtt

SEQ ID NO: 369820 - DNA, 968 bp, Homo sapiens
agcggaagtagagttgcggttccctcgggagaggggcggaggctcagaggtgcaccacgtggggtttgctgccggagcggagtctccggccggcgtccagtttgagtctaggttggagttggaaccgtggagatgcggaaggaaaccccaccccccctagtgcccccggcggcccgggagtggaatcttcccccaaatgcgcccgcctgcatggaacggcagttggaggctgcgcggtaccggtccgatggggcgcttctcctcggggcctccagcctgagtgggcgctgctgggccggctccctctggctttttaaggacccctgtgccgcccccaacgaaggcttctgctccgccggagtccaaacggaggctggagtggctgacctcacttgggttggggagagaggtattctagtggcctccgattcaggtgctgttgaattgtgggaactagatgagaatgagacacttattgtcagcaagttctgcaagtatgagcatgatgacattgtgtctacagtcagtgtcttgagctctggcacacaagctgtcagtggtagcaaagacatctgcatcaaggtttgggaccttgctcagcaggtggtactgagttcataccgagctcatgctgctcaggtcacttgtgttgctgcctctcctcacaaggactctgtgtttctttcatgcagcgaggacaatagaattttactctgggatacccgctgtcccaagccagcatcacagattggctgcagtgcgcctggctaccttcctacctcgctggcttggcatcctcagcaaagtgaagtctttgtctttggtgatgagaatgggacagtctcccttgtggacaccaagagtacaagctgtgtcctgagctcagctgtacactcccagtgtgtcactgggctggtgttctccccacacaggtactgttctttgtcatcaggggcctgatgggtata

SEQ ID NO: 369821 - DNA, 812 bp, Homo sapiens
ccagtgacacactgggagtgtacagctgagctcaggacacagcttgtactcttggtgtccacaagggagactgtcccattctcatcaccaaagacaaagacttcactttgctgaggatgccaagcctttctgagttgtttagaagccaagcccacagagactttgtgagagatgcgacttggtccccgctcaatcactccctgcttaccacagtgggctgggaccatcaggtcgtccaccacgttgtgcccacagaacctctcccagcccctggacctgcaagtgttactgagtagattggatttaagacaaaaatgcttaattcaccattatgagaaatgcttccagtcacaaaaatgcagcccagctcactctgaggaagaagcaggacttggtacggttttacacaactccttaccattaaactgaatcagaaatccattttctggctgaataaaaagtttggcttgcctgtgtaatgcccactcccttccccctggctccctagtgatgggacatatatgagagagaagtgtttttctatcatagacaccataggggaaagtttggggatgaaggagagcttaaaggtgtttcaattaagttagaaaactgacacaggctgttgagaattctttgccacttttcccaccccaaaacagcatggggcctgacatcttctgccctggtcccctttctcttgatgtggaaagtctgaatgcagtatttatagacttctaaggttttaaaatccagtatcaagaagaaaatcagaaatactggttggtgaaataaagagtttaggcattgtt

SEQ ID NO: 369822 - DNA, 941 bp, Homo sapiens
agcggaagtagagttgcggttccctcgggagaggggcggaggctcagaggtgcaccacgtggggtttgctgccggagcggagtctccggccggcgtccagtttgagtctaggttggagttggaaccgtggagatgcggaaggaaaccccaccccccctagtgcccccggcggcccgggagtggaatcttcccccaaatgcgcccgcctgcatggaacggcagttggaggctgcgcggtaccggtccgatggggcgcttctcctcggggcctccagcctgagtgggcgctgctgggccggctccctctggctttttaaggacccctgtgccgcccccaacgaaggcttctgctccgccggagtccaaacggaggctggagtggctgacctcacttgggttggggagagaggtattctagtggcctccgattcaggtgctgttgaattgtgggaactagatgagaatgagacacttattgtcagcaagttctgcaagtatgagcatgatgacattgtgtctacagtcagtgtcttgagctctggcacacaagctgtcagtggtagcaaagacatctgcatcaagttgcggaccttgctcagcagggtggtactggagttcataccgaggctccatgctggtccaggtccctttgtgtttgctgctctacttcaaagggctccgggttccttttcatggcgggggaatagaattaagctcgggaacccgtgtcccagcgcagtaagattgggggcagggcgcgggagcctcaacaccggcggggccccacaagagagtctgttttgggcgaaagagaggcactcctgggcgaatactgtgtggcgcaagaccaccgtgagtagtccaacagcaacgcgctcacatctgttgtgcatttttctcattatctcctcttgtttgtcgcacgatcctctgcttgagga

SEQ ID NO: 369823 - DNA, 878 bp, Homo sapiens
agcggaagtagagttgcggttccctcgggagaggggcggaggctcagaggtgcaccacgtggggtttgctgccggagcggagtctccggccggcgtccagtttgagtctaggttggagttggaaccgtggagatgcggaaggaaaccccacggtggcgcaggagccgaggctgggactcgagcggagtgggagtgtgacctcgccaaggaggcgccctgcggacgcaggtaggagccagggtgctatggacggaggcccaggtgaaacgtctccgactgggtggacaccattcacatcgtgtggcctgaaagcaatcgatgttggcgcgcgtgaactcgtgttgcgggaggctccggttgccagggtgcctctcttatacaccgcggaccgccctgatcgggcggacacgcgcaaagggacaaccgtgtgacatgcctcccggacgaagagtcccatgacgcgaaggcggtgcgcaggtggcctggagactccacgtgagggggaaccgagcgagaaggagtagggactactagcacaggccggaccatgccgggaagagggtggccagcagggacgcaggccgaggcaaggggaggaaccccccaaaatgggttagcccacaaagaagaaggagaaggtgtacgagcgagccgcccaggggactggaacaccccagggagatgggaattgaattggaccacgcgccaaccactggggccgcaacgaggcagcggcggcccggaccacagggcacgaaggacagagagcggatggaccacgaggggggaaagcgcgcccactgccgaaagaagaaccctcgcgcccatcacgtgcggggcggcaccacggcaacccgccaacatgacgcagggacaca

SEQ ID NO: 369824 - DNA, 2223 bp, Homo sapiens
agcggaagtagagttgcggttccctcgggagaggggcggaggctcagaggtgcaccacgtggggtttgctgccggagcggagtctccggccggcgtccagtttgagtctaggttggagttggaaccgtggagatgcggaaggaaaccccaccccccctagtgcccccggcggcccgggagtggaatcttcccccaaatgcgcccgcctgcatggaacggcagttggaggctgcgcggtaccggtccgatggggcgcttctcctcggggcctccagcctgagtgggcgctgctgggccggctccctctggctttttaaggacccctgtgccgcccccaacgaaggcttctgctccgccggagtccaaacggaggctggagtggctgacctcacttgggttggggagagaggtattctagtggcctccgattcaggtgctgttgaattgtgggaactagatgagaatgagacacttattgtcagcaagttctgcaagtatgagcatgatgacattgtgtctacagtcagtgtcttgagctctggcacacaagctgtcagtggtagcaaagacatctgcatcaaggtttgggaccttgctcagcaggtggtactgagttcataccgagctcatgctgctcaggtcacttgtgttgctgcctctcctcacaaggactctgtgtttctttcatgcagcgaggacaatagaattttactctgggatacccgctgtcccaagccagcatcacagattggctgcagtgcgcctggctaccttcctacctcgctggcttggcatcctcagcaaagtgaagtctttgtctttggtgatgagaatgggacagtctcccttgtggacaccaagagtacaagctgtgtcctgagctcagctgtacactcccagtgtgtcactgggctggtgttctccccacacagtgttcccttcctggcctctctcagtgaagactgctcacttgctgtgctggactcaagcctttctgagttcatttcttcatctatgaaaatagaagactggattggatgactgatgacatccactgtggatagctacactgctatcctggcgatgaggccatacagttggtgaaatgtttagaagccaagcccacagagactttgtgagagatgcgacttggtccccgctcaatcactccctgcttaccacagtgggctgggaccatcaggtcgtccaccacgttgtgcccacagaacctctcccagcccctggacctgcaagtgttactgagtagattggatttaagacaaaaagcaagtcccccatgagtgtccacttctttgccctgccctctcagcttgtgagacaacacaggagccttctatagtatgttgatatgctagatctgtgccgttaataggcatcgtctctcagcctgagggaggctggattctgggttcctgtagtcacagggaggaaaagctttcttaaaaatggacatgtatgtgcgtgtgagtgtgtgtgtagatttatagtttttggtagtggcaggaataaaaaaaatccatcctacatcttccctaagcactgcctctctctcaccccccaaaacaagttgacgaaagggttttatgtagctgtctatgaggaattggccgtgtctgggtgggttatgggatgtgggcatccctgggttcttggaagcagctcttatgctactcatagagatgggattgactttatttttttatagtgcttaattcaccattatgagaaatgcttccagtcacaaaaatgcagcccagctcactctgaggaagaagcaggacttggtacggttttacacaactccttaccattaaactgaatcagaaatccattttctggctgaataaaaagtttggcttgcctgtgtaatgcccactcccttccccctggctccctagtgatgggacatatatgagagagaagtgtttttctatcatagacaccataggggaaagtttggggatgaaggagagcttaaaggtgtttcaattaagttagaaaactgacacaggctgttgagaattctttgccacttttcccaccccaaaacagcatggggcctgacatcttctgccctggtcccctttctcttgatgtggaaagtctgaatgcagtatttatagacttctaaggttttaaaatccagtatcaagaagaaaatcagaaatactggttggtgaaataaagagtttaggcattgtt

SEQ ID NO: 369825 - DNA, 2481 bp, Homo sapiens
agcggaagtagagttgcggttccctcgggagaggggcggaggctcagaggtgcaccacgtggggtttgctgccggagcggagtctccggccggcgtccagtttgagtctaggttggagttggaaccgtggagatgcggaaggaaaccccaccccccctagtgcccccggcggcccgggagtggaatcttcccccaaatgcgcccgcctgcatggaacggcagttggaggctgcgcggtaccggtccgatggggcgcttctcctcggggcctccagcctgagtgggcgctgctgggccggctccctctggctttttaaggacccctgtgccgcccccaacgaaggcttctgctccgccggagtccaaacggaggctggagtggctgacctcacttgggttggggagagaggtattctagtggcctccgattcaggtgctgttgaattgtgggaactagatgagaatgagacacttattgtcagcaagttctgcaagtatgagcatgatgacattgtgtctacagtcagtgtcttgagctctggcacacaagctgtcagtggtagcaaagacatctgcatcaaggtttgggaccttgctcagcaggtggtactgagttcataccgagctcatgctgctcaggtcacttgtgttgctgcctctcctcacaaggactctgtgtttctttcatgcagcgaggacaatagaattttactctgggatacccgctgtcccaagccagcatcacagattggctgcagtgcgcctggctaccttcctacctcgctggcttggcatcctcagcaaagtgaagtctttgtctttggtgatgagaatgggacagtctcccttgtggacaccaagagtacaagctgtgtcctgagctcagctgtacactcccagtgtgtcactgggctggtgttctccccacacagtgttcccttcctggcctctctcagtgaagactgctcacttgctgtgctggactcaagcctttctgagttgtttagaagccaagcccacagagactttgtgagagatgcgacttggtccccgctcaatcactccctgcttaccacagtgggctgggaccatcaggtcgtccaccacgttgtgcccacagaacctctcccagcccctggacctgcaagtgttactgagtagattggatttaagacaaaaagcaagtcccccatgagtgtccacttctttgccctgccctctcagcttgtgagacaacacaggagccttctatagtatgttgatatgctagatctgtgccgttaataggcatcgtctctcagcctgagggaggctggattctgggttcctgtagtcacagggaggaaaagctttcttaaaaatggacatgtatgtgcgtgtgagtgtgtgtgtagatttatagtttttggtagtggcaggaataaaaaaaatccatcctacatcttccctaagcactgcctctctctcaccccccaaaacaagttgacgaaagggttttatgtagctgtctatgaggaattggccgtgtctgggtgggttatgggatgtgggcatccctgggttcttggaagcagctcttatgctactcatagagatgggattgactttatttttttatagtgcttaattcaccattatgagaaatgcttccagtcacaaaaatgcagcccagctcactctgaggaagaagcaggacttggtacggttttacacaactccttaccattaaactgaatcagaaatccattttctggctgaataaaaagtttggcttgcctgtgtaatgcccactcccttccccctggctccctagtgatgggacatatatgagagagaagtgtttttctatcatagacaccataggggaaagtttggggatgaaggagagcttaaaggtgtttcaattaagttagaaaactgacacaggctgttgagaattctttgccacttttcccaccccaaaacagcatggggcctgacatcttctgccctggtcccctttctcttgatgtggaaagtctgaatgcagtatttatagacttctaaggttttaaaatccagtatcaagaagaaaatcagaaatactggttggtgaaataaagagtttaggcattgttggcctgtcttttttgaagcatgtgtgttatgtgtagttagatatatttcacttatgtgagtcatcatggtgttggtcttgtagcccattatttttcctgtgcttccccagcttcccaaagtagctagttagaacttaaggtaaatatttattcttgggttggtggagtggatattgccagttaggagtcatggatcaattactgattatattgaaagtaaatataatcaattatgtacttttgagctttgcaggttcaatttaggtaaaaatcacattatgaaactgggaaagtctgaaggaatatgggcaaaatatttctcagtaaagcttccatgcttcacccttgacatgattacccttga

SEQ ID NO: 369826 - DNA, 1746 bp, Homo sapiens
agcggaagtagagttgcggttccctcgggagaggggcggaggctcagaggtgcaccacgtggggtttgctgccggagcggagtctccggccggcgtccagtttgagtctaggttggagttggaaccgtggagatgcggaaggaaaccccaccccccctagtgcccccggcggcccgggagtggaatcttcccccaaatgcgcccgcctgcatggaacggcagttggaggctgcgcggtaccggtccgatggggcgcttctcctcggggcctccagcctgagtgggcgctgctgggccggctccctctggctttttaaggacccctgtgccgcccccaacgaaggcttctgctccgccggagtccaaacggaggctggagtggctgacctcacttgggttggggagagaggtattctagtggcctccgattcaggtgctgttgaattgtgggaactagatgagaatgagacacttattgtcagcaagttctgcaagtatgagcatgatgacattgtgtctacagtcagtgtcttgagctctggcacacaagctgtcagtggtagcaaagacatctgcatcaaggtttgggaccttgctcagcaggtggtactgagttcataccgagctcatgctgctcaggtcacttgtgttgctgcctctcctcacaaggactctgtgtttctttcatgcagcgaggacaatagaattttactctgggatacccgctgtcccaagccagcatcacagattggctgcagtgcgcctggctaccttcctacctcgctggcttggcatcctcagcaaagtgaagtctttgtctttggtgatgagaatgggacagtctcccttgtggacaccaagagtacaagctgtgtcctgagctcagctgtacactcccagtgtgtcactgggctggtgttctccccacacagtgttcccttcctggcctctctcagtgaagactgctcacttgctgtgctggactcaagcctttctgagttgtttagaagccaagcccacagagactttgtgagagatgcgacttggtccccgctcaatcactccctgcttaccacagtgggctgggaccatcaggtcgtccaccacgttgtgcccacagaacctctcccagcccctggacctgcaagtgttactgagtagattggatttaagacaaaaagcaagtcccccatgagtgtccacttctttgccctgccctctcagcttgtgagacaacacaggagccttctatagtatgttgatatgctagatctgtgccgttaataggcatcgtctctcagcctgagggaggctggattctgggttcctgtagtcacagggaggaaaagctttcttaaaaatggacatgtatgtgcgtgtgagtgtgtgtgtagatttatagtttttggtagtggcaggaataaaaaaaatccatcctacatcttccctaagcactgcctctctctcaccccccaaaacaagttgacgaaagggttttatgtagctgtctatgaggaattggccgtgtctgggtgggttatgggatgtgggcatccctgggttcttggaagcagctcttatgctactcatagagatgggattgactttatttttttatagtgcttaattcaccattatgagaaatgcttccagtcacaaaaatgcagcccagctcactctgaggaagaagcaggacttggtacggttttacacaactccttaccattaaactgaatcagaaatcca

SEQ ID NO: 369827 - DNA, 2423 bp, Homo sapiens
agcggaagtagagttgcggttccctcgggagaggggcggaggctcagaggtgcaccacgtggggtttgctgccggagcggagtctccggccggcgtccagtttgagtctaggttggagttggaaccgtggagatgcggaaggaaaccccaccccccctagtgcccccggcggcccgggagtggaatcttcccccaaatgcgcccgcctgcatggaacggcagttggaggctgcgcggtaccggtccgatggggcgcttctcctcggggcctccagcctgagtgggcgctgctgggccggctccctctggctttttaaggacccctgtgccgcccccaacgaaggcttctgctccgccggagtccaaacggaggctggagtggctgacctcacttgggttggggagagaggtattctagtggcctccgattcaggtgctgttgaattgtgggaactagatgagaatgagacacttattgtcagcaagttctgcaagtatgagcatgatgacattgtgtctacagtcagtgtcttgagctctggcacacaagctgtcagtggtagcaaagacatctgcatcaaggtttgggaccttgctcagcaggtggtactgagttcataccgagctcatgctgctcaggtcacttgtgttgctgcctctcctcacaaggactctgtgtttctttcatgcagcgaggacaatagaattttactctgggatacccgctgtcccaagccagcatcacagattggctgcagtgcgcctggctaccttcctacctcgctggcttggcatcctcagcaaagtgaagtctttgtctttggtgatgagaatgggacagtctcccttgtggacaccaagagtacaagctgtgtcctgagctcagctgtacactcccagtgtgtcactgggctggtgttctccccacacagtgttcccttcctggcctctctcagtgaagactgctcacttgctgtgctggactcaagcctttctgagttgtttagaagccaagcccacagagactttgtgagagatgcgacttggtccccgctcaatcactccctgcttaccacagtgggctgggaccatcaggtcgtccaccacgttgtgcccacagaacctctcccagcccctggacctgcaagtgttactgagtagattggatttaagacaaaaagcaagtcccccatgagtgtccacttctttgccctgccctctcagcttgtgagacaacacaggagccttctatagtatgttgatatgctagatctgtgccgttaataggcatcgtctctcagcctgagggaggctggattctgggttcctgtagtcacagggaggaaaagctttcttaaaaatggacatgtatgtgcgtgtgagtgtgtgtgtagatttatagtttttggtagtggcaggaataaaaaaaatccatcctacatcttccctaagcactgcctctctctcaccccccaaaacaagttgacgaaagggttttatgtagctgtctatgaggaattggccgtgtctgggtgggttatgggatgtgggcatccctgggttcttggaagcagctcttatgctactcatagagatgggattgactttatttttttatagtgcttaattcaccattatgagaaatgcttccagtcacaaaaatgcagcccagctcactctgaggaagaagcaggacttggtacggttttacacaactccttaccattaaactgaatcagaaatccattttctggctgaataaaaagtttggcttgcctgtgtaatgcccactcccttccccctggctccctagtgatgggacatatatgagagagaagtgtttttctatcatagacaccataggggaaagtttggggatgaaggagagcttaaaggtgtttcaattaagttagaaaactgacatcttctgccctggtcccctttctcttgatgtggaaagtctgaatgcagtatttatagacttctaaggttttaaaatccagtatcaagaagaaaatcagaaatactggttggtgaaataaagagtttaggcattgttggcctgtcttttttgaagcatgtgtgttatgtgtagttagatatatttcacttatgtgagtcatcatggtgttggtcttgtagcccattatttttcctgtgcttccccagcttcccaaagtagctagttagaacttaaggtaaatatttattcttgggttggtggagtggatattgccagttaggagtcatggatcaattactgattatattgaaagtaaatataatcaattatgtacttttgagctttgcaggttcaatttaggtaaaaatcacattatgaaactgggaaagtctgaaggaatatgggcaaaatatttctcagtaaagcttccatgcttcacccttgacatgattacccttga

SEQ ID NO: 369828 - DNA, 2336 bp, Homo sapiens
agcggaagtagagttgcggttccctcgggagaggggcggaggctcagaggtgcaccacgtggggtttgctgccggagcggagtctccggccggcgtccagtttgagtctaggttggagttggaaccgtggagatgcggaaggaaaccccaccccccctagtgcccccggcggcccgggagtggaatcttcccccaaatgcgcccgcctgcatggaacggcagttggaggctgcgcggtaccggtccgatggggcgcttctcctcggggcctccagcctgagtgggcgctgctgggccggctccctctggctttttaaggacccctgtgccgcccccaacgaaggcttctgctccgccggagtccaaacggaggctggagtggctgacctcacttgggttggggagagaggtattctagtggcctccgattcaggtgctgttgaattgtgggaactagatgagaatgagacacttattgtcagcaagttctgcaagtatgagcatgatgacattgtgtctacagtcagtgtcttgagctctggcacacaagctgtcagtggtagcaaagacatctgcatcaaggtttgggaccttgctcagcaggtggtactgagttcataccgagctcatgctgctcaggtcacttgtgttgctgcctctcctcacaaggactctgtgtttctttcatgcagcgaggacaatagaattttactctgggatacccgctgtcccaagccagcatcacagattggctgcagtgcgcctggctaccttcctacctcgctggcttggcatcctcagcaaagtgaagtctttgtctttggtgatgagaatgggacagtctcccttgtggacaccaagagtacaagctgtgtcctgagctcagctgtacactcccagtgtgtcactgggctggtgttctccccacacagtgttcccttcctggcctctctcagtgaagactgctcacttgctgtgctggactcaagcctttctgagttgtttagaagccaagcccacagagactttgtgagagatgcgacttggtccccgctcaatcactccctgcttaccacagtgggctgggaccatcaggtcgtccaccacgttgtgcccacagaacctctcccagcccctggacctgcaagtgttactgagtagattggatttaagacaaaaagcaagtcccccatgagtgtccacttctttgccctgccctctcagcttgtgagacaacacaggagccttctatagtatgttgatatgctagatctgtgccgttaataggcatcgtctctcagcctgagggaggctggattctgggttcctgtagtcacagggaggaaaagctttcttaaaaatggacatgtatgtgcgtgtgagtgtgtgtgtagatttatagtttttggtagtggcaggaataaaaaaaatccatcctacatcttccctaagcactgcctctctctcaccccccaaaacaagttgacgaaagggttttatgtagctgtctatgaggaattggccgtgtctgggtgggttatgggatgtgggcatccctgggttcttggaagcagctcttatgctactcatagagatgggattgactttatttttttatagtgcttaattcaccattatgagaaatgcttccagtcacaaaaatgcagcccagctcactctgaggaagaagcaggacttggtacggttttacacaactccttaccattaaactgaatcagaaatccattttctggctgaataaaaagtttggcttgcctgtgtaatgcccactcccttccccctgctctgaccagcaccatggcggttggcaagaacaagcgccttacgaaaggcggcaaaaagggagccttgaagaaagtggttgatccattttctaagaaagattggtatgatgtgaaagcacctgctatgttcaatataagaaatattggaaagacgctcgtcaccaggacccaaggaaccaaaattgcatctgatggtctcaagggtcgtgtgtttgaagtgagtcttgctgatttgcagaatgatgaagttgcatttagaaaattcaagctgattactgaagatgttcagggtaaaaactgcctgactaacttccatggcatggatcttacccgtgacaaaatgtgttccatggtcaaaaaatggcagacaatgattgaagctcacgttgatgtcaagactaccgatggttacttgcttcgtctgtactgtgatggttttactaaaaaacgcaacaatcagatacggaagacctcttatgctcagcaccaaacaggtccgccaaatccggaagaagatgatggaaatcatga

SEQ ID NO: 369829 - DNA, 1881 bp, Homo sapiens
agcggaagtagagttgcggttccctcgggagaggggcggaggctcagaggtgcaccacgtggggtttgctgccggagcggagtctccggccggcgtccagtttgagtctaggttggagttggaaccgtggagatgcggaaggaaaccccaccccccctagtgcccccggcggcccgggagtggaatcttcccccaaatgcgcccgcctgcatggaacggcagttggaggctgcgcggtaccggtccgatggggcgcttctcctcggggcctccagcctgagtgggcgctgctgggccggctccctctggctttttaaggacccctgtgccgcccccaacgaaggcttctgctccgccggagtccaaacggaggctggagtggctgacctcacttgggttggggagagaggtattctagtggcctccgattcaggtgctgttgaattgtgggaactagatgagaatgagacacttattgtcagcaagttctgcaagtatgagcatgatgacattgtgtctacagtcagtgtcttgagctctggcacacaagctgtcagtggtagcaaagacatctgcatcaaggtttgggaccttgctcagcaggtggtactgagttcataccgagctcatgctgctcaggtcacttgtgttgctgcctctcctcacaaggactctgtgtttctttcatgcagcgagtgttcccttcctggcctctctcagtgaagactgctcacttgctgtgctggactcaagcctttctgagttgtttagaagccaagcccacagagactttgtgagagatgcgacttggtccccgctcaatcactccctgcttaccacagtgggctgggaccatcaggtcgtccaccacgttgtgcccacagaacctctcccagcccctggacctgcaagtgttactgagtagattggatttaagacaaaaagcaagtcccccatgagtgtccacttctttgccctgccctctcagcttgtgagacaacacaggagccttctatagtatgttgatatgctagatctgtgccgttaataggcatcgtctctcagcctgagggaggctggattctgggttcctgtagtcacagggaggaaaagctttcttaaaaatggacatgtatgtgcgtgtgagtgtgtgtgtagatttatagtttttggtagtggcaggaataaaaaaaatccatcctacatcttccctaagcactgcctctctctcaccccccaaaacaagttgacgaaagggttttatgtagctgtctatgaggaattggccgtgtctgggtgggttatgggatgtgggcatccctgggttcttggaagcagctcttatgctactcatagagatgggattgactttatttttttatagtgcttaattcaccattatgagaaatgcttccagtcacaaaaatgcagcccagctcactctgaggaagaagcaggacttggtacggttttacacaactccttaccattaaactgaatcagaaatccattttctggctgaataaaaagtttggcttgcctgtgtaatgcccactcccttccccctggctccctagtgatgggacatatatgagagagaagtgtttttctatcatagacaccataggggaaagtttggggatgaaggagagcttaaaggtgtttcaattaagttagaaaactgacacaggctgttgagaattctttgccacttttcccaccccaaaacagcatggggcctgacatcttctgccctggtcccctttctcttgatgtggaaagtctgaatgcagtatttatagacttctaaggttttaaaatccagtatcaagaagaaaatcagaaatactggttggtgaaataaagagtttaggcattgtt

SEQ ID NO: 369830 - DNA, 1816 bp, Homo sapiens
agtgatccaggcccatcgcggtcaaagcctccaacagctacagcacaacaccatcagtttgcgatggctggggggccttctggaagaagagaggcaaagaaagtctgaagacaagccatgctgtgctcataaaggaggggctggtctgctcgccaatctagtacatccctgtctggagggaggtggttggggtcttcagtttcaggatcagtgccttcctgtaagttattgttggggtcctgatttacaacgtcaggagtagcaaagacatctgcatcaaggtttgggaccttgctcagcaggtggtactgagttcataccgagctcatgctgctcaggtcacttgtgttgctgcctctcctcacaaggactctgtgtttctttcatgcagcgaggacaatagaattttactctgggatacccgctgtcccaagccagcatcacagattggctgcagtgcgcctggctaccttcctacctcgctggcttggcatcctcagcaaagtgaagtctttgtctttggtgatgagaatgggacagtctcccttgtggacaccaagagtacaagctgtgtcctgagctcagctgtacactcccagtgtgtcactgggctggtgttctccccacacagtgttcccttcctggcctctctcagtgaagactgctcacttgctgtgctggactcaagcctttctgagttgtttagaagccaagcccacagagactttgtgagagatgcgacttggtccccgctcaatcactccctgcttaccacagtgggctgggaccatcaggtcgtccaccacgttgtgcccacagaacctctcccagcccctggacctgcaagtgttactgagtagattggatttaagacaaaaagcaagtcccccatgagtgtccacttctttgccctgccctctcagcttgtgagacaacacaggagccttctatagtatgttgatatgctagatctgtgccgttaataggcatcgtctctcagcctgagggaggctggattctgggttcctgtagtcacagggaggaaaagctttcttaaaaatggacatgtatgtgcgtgtgagtgtgtgtgtagatttatagtttttggtagtggcaggaataaaaaaaatccatcctacatcttccctaagcactgcctctctctcaccccccaaaacaagttgacgaaagggttttatgtagctgtctatgaggaattggccgtgtctgggtgggttatgggatgtgggcatccctgggttcttggaagcagctcttatgctactcatagagatgggattgactttatttttttatagtgcttaattcaccattatgagaaatgcttccagtcacaaaaatgcagcccagctcactctgaggaagaagcaggacttggtacggttttacacaactccttaccattaaactgaatcagaaatccattttctggctgaataaaaagtttggcttgcctgtgtaatgcccactcccttccccctggctccctagtgatgggacatatatgagagagaagtgtttttctatcatagacaccataggggaaagtttggggatgaaggagagcttaaaggtgtttcaattaagttagaaaactgacacaggctgttgagaattctttgccacttttcccaccccaaaacagcatggggcctgacatcttctgccctggtcccctttctcttgatgtggaaagtctgaatgcagtatttatagacttctaaggttttaaaatccagtatcaagaagaaaatcagaaatactggttggtgaaataaagagtttaggcattgtt

SEQ ID NO: 369831 - DNA, 1731 bp, Homo sapiens
tttgggaatcagggaaggggagcagtgggtgggcgagtcattttcctcttcagaaaactgtgttgtgcttttggagaacagattctccatctgtatccgaagggacttggtaatggaagcaggctggctgttgaccctgtccattcctggggcacattcacaaccccaaggacaagccgtgtccttggtagaggggggtggtaggtgaaatttttaagtctagccctccagcgctctcccacaagggggcggcagtctaccctctcacataaagaactgcgtatgaaatgcagcctgctacagggtaaaaggcagcacctggaagacctgaattgtacttccctccttgccgtgatttgctgcctgttactgcccctcatcactgtcttgttctatccagcatttcttcatctatgaaaatagaagactggattggatgactgatgacatccactgtggatagctacactgctatcctggcgatgaggccatacagttggtgaaatgtgtgtaacacacccaaaaaatgtgccccagatgtgttgggttctctttttttctccaggtctgcttttcttgtctctactctgccccgactttttttctttcttctaggtttagaagccaagcccacagagactttgtgagagatgcgacttggtccccgctcaatcactccctgcttaccacagtgggctgggaccatcaggtcgtccaccacgttgtgcccacagaacctctcccagcccctggacctgcaagtgttactgagtagattggatttaagacaaaaagcaagtcccccatgagtgtccacttctttgccctgccctctcagcttgtgagacaacacaggagccttctatagtatgttgatatgctagatctgtgccgttaataggcatcgtctctcagcctgagggaggctggattctgggttcctgtagtcacagggaggaaaagctttcttaaaaatggacatgtatgtgcgtgtgagtgtgtgtgtagatttatagtttttggtagtggcaggaataaaaaaaatccatcctacatcttccctaagcactgcctctctctcaccccccaaaacaagttgacgaaagggttttatgtagctgtctatgaggaattggccgtgtctgggtgggttatgggatgtgggcatccctgggttcttggaagcagctcttatgctactcatagagatgggattgactttatttttttatagtgcttaattcaccattatgagaaatgcttccagtcacaaaaatgcagcccagctcactctgaggaagaagcaggacttggtacggttttacacaactccttaccattaaactgaatcagaaatccattttctggctgaataaaaagtttggcttgcctgtgtaatgcccactcccttccccctggctccctagtgatgggacatatatgagagagaagtgtttttctatcatagacaccataggggaaagtttggggatgaaggagagcttaaaggtgtttcaattaagttagaaaactgacacaggctgttgagaattctttgccacttttcccaccccaaaacagcatggggcctgacatcttctgccctggtcccctttctcttgatgtggaaagtctgaatgcagtatttatagacttctaaggttttaaaatccagtatcaagaagaaaatcagaaatactggttggtgaaataaagagtttaggcattgtt

SEQ ID NO: 369832 - DNA, 799 bp, Homo sapiens
  misc_feature (703)..(703): n is a, c, g, or t
  misc_feature (707)..(707): n is a, c, g, or t
  misc_feature (772)..(772): n is a, c, g, or t
agcggaagtagagttgcggttccctcgggagaggggcggaggctcagaggtgcaccacgtggggtttgctgccggagcggagtctccggccggcgtccagtttgagtctaggttggagttggaaccgtggagatgcggaaggaaaccccaccccccctagtgcccccggcggcccgggagtggaatcttcccccaaatgcgcccgcctgcatggaacggcagttggaggctgcgcggtaccggtccgatggggcgcttctcctcggggcctccagcctgagtgggcgctgctgggccggctccctctggctttttaaggacccctgtgccgcccccaacgaaggcttctgctccgccggagtccaaacggaggctggagtggctgacctcacttgggttggggagagaggtattctagtggcctccgattcaggtgctgttgaattgtgggaactagatgagaatgagacacttattgtcagcaagttctgcaagtatgagcatgatgacattgtgtctacagtcagtgtcttgagctctggcacacaagctgtcagtggtagcaaagacatctgcatcaaggtttgggaccttgctcagcaggtggtactgagttcataccgagctcatgctgctcaggtcacttgtgttgctgcctctcctcacaaggactctgtgtttctttcatgcagcgagaggaaanatanaattttactctggggaataccccccttgttcccaagcccatcatccacagaattgggttggcaanggcgccctgggctaaccttccctaacc

SEQ ID NO: 369833 - DNA, 3553 bp, Homo sapiens
  misc_feature (161)..(161): n is a, c, g, or t
  misc_feature (325)..(325): n is a, c, g, or t
atgaaagagattgtggatatgacaaaaaaggtctttcagcataaggatcttacagaaattcaagagccagtagacatcacaccagaggaattaacataatataacttgataaagatgagtgctttggaaccagtgctagacagtgaggaagaagactttgnagaaacagtgccaggggccaaatgcagtggctcatgcctgtaatgccagcattttgggaggccaaggtggatggctcacttgagcccaggagttcaagcctgggtaacacggtgaaaccctgtctctacaaaaaatacaaaaaatttagctggatgtggaggtncacgtctgtagtcccagctacatggggggctgaggtggggaagatcagttgagcctgggatgcagtgagccatgatggcaccactgcactccagctgggatgacagagtgagactctatctcaaaaaaaaaaaaaaaaaaaaagtggtgccagaacacaaattgacagtagacaatatggcagaaggttttcaattatcaagactgcttttcacttcttttatcacatggacccttctttgatactggcactgaatctaaagcaaatggtagaagaaagatcagtactatataaaaatgtttttagagaaatgaaacggcaaaaagtcgggcagaaatcatgatgtacttctataaagtcgagtgtgcctgccacttctgcatccccttctacctctttcacccctgcaattcctcagacagcaagaccaacccctcctcttcagcctacccagtgtgaagacaatgaagatgaagacctttgtgataatccacttccacttaatacagttaggacttcaggaattatttcctcaaggtcatagctgtgctgtttgtggtaaagtgaaatgtaaacgacataggccttctttgctacttgaaaactaccagccatggctagacctgaaaatttcttccaaggttgatgcatctctctcagaggttcttgaattagtgttggaaaactttgtttatccgtggtacagggatgtgacagatgatgaatcctttgttgatgaactgagaataacattacgtttttttgcatctgtcttaataagaaggattcacaaggtggatattccatctattataaccaagaaactattaaaagcagcaatgaagcatatagaagtgatagttaaagccagacagaaagtaaaaaatacagagtttttacagcaagctgctttagaagaatatggtccagagcttcatgttgctttgagaagtcgaagagatgaattgcactatttaaggaaacttactgaactgctttttccttatattttgcctcctaaagcaacagactgcagatctctgaccttacttataagagagattctgtctggctctgtgttccttccttctttggatttcctagctgatccagatactgtgaatcatttgcttatcatcttcatagatgacagtccacctgaaaaagcaactgaaccggcttctcctttggttccattcttgcagaaatttgcagaacctagaaataaaaagccatctgtgctgaagttagaattgaagcaaatcagagagcaacaagatcttttatttcgttttatgaactttctgaaacaagaaggcgcagtgcacgtgttgcagttttgtttgactgtggaggaatttaatgatagaattttacgaccagaattatcaaatgatgaaatgctgtctcttcatgaagaattgcagaagatttataaaacatactgtttggatgaaagtattgacaaaattagatttgatcccttcattgtagaagagattcaaagaattgctgaaggcccatacatagatgttgtgaaacttcaaactatgagatgtctttttgaagcatatgaacatgttctttcccttttggagaatgtatttactcctatgttctgccatagtgatgagtatttcagacaacttttaagaggtgcagaatcaccaacacgcaattcaaaattgaacaggaacacacagaaaaggggagaatcatttggaatcagcagaataggtagcaaaattaaaggagtattcaaaagtaccacaatggagggagctatgttgcctaattatggtgtagctgaaggtgaagatgattttattgaagaaggtattgttgtaatggaagatgattctccagtggaggctgtgagcacacctaatactccccgaaaccttgctgcatggaaaattagcattccatatgtagacttttttgaggatccctcctctgaaaggaaggagaaaaaagaaagaattcctgtgttttgtattgatgttgaaagaaatgatagaagagcagttggacacgagcctgaacattggtctgtctatagaagatatcttgaattctatgtacttgaatcaaaactaacagaatttcatggtgcatttcctgatgcccagcttccttctaagaggatcattggccccaaaaattatgaattcttaaagtcaaagagggaagagttccaagaatatctacagaaacttctgcagcatccagaactgagtaatagtcaacttctggcagactttctttcccctaatggtggggaaacacaatttcttgataagatactaccagatgtaaatcttgggaaaattataaaatctgttcctggaaaactaatgaaagagaaaggtcagcatttggaaccttttatcatgaatttcattaattcttgtgagtctccaaagcctaaaccaagtagaccagaactgaccattctcagccctacttcagaaaacaacaagaagcttttcaatgatctgtttaaaaataatgcaaaccgtgctgaaaatacagagagaaagcaaaatcagaattattttatggaggtgatgactgtagaaggagtctatgattacctgatgtatgtaggacgggtagttttccaggttcctgactggcttcatcatctcttaatgggaactcgaatcctctttaaaaacaccctggaaatgtatactgattactatcttcagtgtaaactagaacagctatttcaggagcaccgtttggtctcactcataacacttctcagagatgctatattctgtgaaaacactgaacctcgctctctccaagataagcaaaaaggagcaaaacagacttttgaagaaatgatgaattacattccagatctgttagtcaagtgtattggtgaagaaaccaagtatgaaagcatcagacttctgtttgatggcttacagcaaccagtactcaacaagcagctgacttatgttttattggacattgtgatacaggaactgtttccagagctcaataaggtacaaaaggaagttacctctgtgacatcttggatgtaaacacttggatttggtatagaataacccattgaaatttctgctgtgcgagggtggtagaaatttacttttttgggtatattcttatatatattatgtacatcgctgtctgaaattttagttattttttgtttttaataaagactaacacaaacttaatgattaaaagtga

SEQ ID NO: 369834 - DNA, 629 bp, Homo sapiens
tttttttttttactgcagcatttctcagagtttgcattatgccttgtgcattgtgaatctccaaaaatgggatacatgatactgcatttgtcaacttgaccatagaaacctcttatccaggagcctcttatagaaacactggtttggggagtattgatttgcagtttttgcctagtatctgggaaacagggtggtgattttgctttatgatccagttaatggtgagtcactttataatataaaattatttcacatttggcctttttgtttagatctgttagtcaagtgtattggtgaagaaaccaagtatgaaagcatcagacttctgtttgatggcttacagcaaccagtactcaacaagcagctgacttatgttttattggacattgtgatacaggaactgtttccagagctcaataaggtacaaaaggaagttacctctgtgacatcttggatgtaaacacttggatttggtatagaataacccattgaaatttctgctgtgcgagggtggtagaaatttacttttttgggtatattcttatatatattatgtacatcgctgtctgaaattttagttattttttgtttttaataaagactaacacaaacttaatgattaaaagtga

SEQ ID NO: 369835 - DNA, 516 bp, Homo sapiens
tactttccactgcatgaaagaaatggtatgcctaaggacaaagaaaagacagaattatttctggatatttaatttctaagaaccttttttaattatgtagaaaaaagtcagttatttcctgatatatttaatttttttccatgtcacccaagagaaaacatatttaatttttaagaaccgtttttagtaatgtagacttcatccaaacacaaaagacagctatgtgcgtttatcttacctttatcaccttattcatgaagatttcttccctttgcaaaaatgaatgttatacacctgtgtaacttctgaagcttttaaattttgttttgtgttctaaaatgaagtttatataatatctgggctttctttctttcctctccttatattatttcacatacctgttattgcagaggtagcctaagtttggatgattttcggtaagtcttgagcatgtgattcttttcagtattaaatgtttttagaaagtacattgtgaacaacctaatacaaataaaa

SEQ ID NO: 369836 - DNA, 530 bp, Homo sapiens
aaaaaaattttcaagttattgtgatattaagtgcatattaaaacagagtggcagttacagactttgtatctttaattttcatgggaatcaacaacaggaaacctttagctctgtttgagacttcataacagagctgtcattaaacgttgccttttttctcatatctagaacatagatatttctcactccatatgccagccaatttattttggtttacaatatatatgtcttaggttagaattttaatacactagagctgttaggcaatttacaaatgaacctgtgtcttgtcttctattaaatggatttatttttactttaggtacaaaaggaagttacctctgtgacatcttggatgtaaacacttggatttggtatagaataacccattgaaatttctgctgtgcgagggtggtagaaatttacttttttgggtatattcttatatatattatgtacatcgctgtctgaaattttagttattttttgtttttaataaagactaacacaaacttaatgattaaaagtga

SEQ ID NO: 369837 - DNA, 3923 bp, Homo sapiens
attgaaactatagtactgtacctacaccatggggtgaatgcatgaaggtcaaatgaaagtgcttagtgtctgtaccgcctaagtaaattttcgcgataatagtcttcctgcatctctcactgtagcggacaatacagaaaaaaaaatttagaaatgtgatgaattagtaaagggaaaaccccatgagactctataagagggattttacctaatctgccaacctgcctcttccaagcactcggattttggttgggctcccggagccggcgtgaattgagctctacccttgcccgtgagcgcgcaaaagagattttgttggtggggtggcggcctgatgagttgtagtctttattctagggctgttttactcgccacccccccagcccccaacacaccccttttaaaataccgactcaaaggcgtcctcctatccccctctcccttaggcgtcacgcaaagctcggacctgctcccacccggagccgagtgtacggtgaggcgcggagcgttgcggggtcggggaagcgctaccacccgctccatccctctgcgggttcgtgtcacgaagactacagttcccagcgggctccacgagctccggttgcccctcaggcagcgcccggcggctacgggggtgctgtagtttcttccgggctccctacaaccttcttccctctcctccgcaatacaggcagttactgggtgctggggctgtcctttgatttccggaaatggccggtcgccagtgttgtcagagtttccacggaagactgcgcgctactccggccaggagggcggagcggcgagacgctagaggctttgcgctgggtgacgacttcgggcacgttctacggccgttcctctggtcggctggggaccgcggccgcgcacgcgcggcggggggcgtggggctgggcccagccggacgcgacctcagcctgcggcggctaactgccggtaggcgtctgtgtgcgccgccaagtcggtggggcggggacgcgaggtgtggatggggggtcgccttgacctctgcctcagccagtagcgcagtctcggcctcgccgttacggagatggtgccctgggtgcggacgatggggcagaagctgaagcagcggctgcgactggacgtgggacgcgagatctgccgccagtacccgctgttctgcttcctgctgctctgtctcagcgccgcctccctgcttcttaacaggtatattcatattttaatgatcttctggtcatttgttgctggagttgtcacattctactgctcactaggacctgattctctcttaccaaatatattcttcacaataaaatacaaacccaagcagttaggacttcaggaattatttcctcaaggtcatagctgtgctgtttgtggtaaagtgaaatgtaaacgacataggccttctttgctacttgaaaactaccagccatggctagacctgaaaatttcttccaaggttgatgcatctctctcagaggtggatattccatctattataaccaagaaactattaaaagcagcaatgaagcatatagaagtgatagttaaagccagacagaaagtaaaaaatacagagtttttacagcaagctgctttagaagaatatggtccagagcttcatgttgctttgagaagtcgaagagatgaattgcactatttaaggaaacttactgaactgctttttccttatattttgcctcctaaagcaacagactgcagatctctgaccttacttataagagagattctgtctggctctgtgttccttccttctttggatttcctagctgatccagatactgtgaatcatttgcttatcatcttcatagatgacagtccacctgaaaaagcaactgaaccggcttctcctttggttccattcttgcagaaatttgcagaacctagaaataaaaagccatctgtgctgaagttagaattgaagcaaatcagagagcaacaagatcttttatttcgttttatgaactttctgaaacaagaaggcgcagtgcacgtgttgcagttttgtttgactgtggaggaatttaatgatagaattttacgaccagaattatcaaatgatgaaatgctgtctcttcatgaagaattgcagaagatttataaaacatactgtttggatgaaagtattgacaaaattagatttgatcccttcattgtagaagagattcaaagaattgctgaaggcccatacatagatgttgtgaaacttcaaactatgagatgtctttttgaagcatatgaacatgttctttcccttttggagaatgtatttactcctatgttctgccatagtgatgagtatttcagacaacttttaagaggtgcagaatcaccaacacgcaattcaaaattgaacaggaacacacagaaaaggggagaatcatttggaatcagcagaataggtagcaaaattaaaggagtattcaaaagtaccacaatggagggagctatgttgcctaattatggtgtagctgaaggtgaagatgattttattgaagaaggtattgttgtaatggaagatgattctccagtggaggctgtgagcacacctaatactccccgaaaccttgctgcatggaaaattagcattccatatgtagacttttttgaggatccctcctctgaaaggaaggagaaaaaagaaagaattcctgtgttttgtattgatgttgaaagaaatgatagaagagcagttggacacgagcctgaacattggtctgtctatagaagatatcttgaattctatgtacttgaatcaaaactaacagaatttcatggtgcatttcctgatgcccagcttccttctaagaggatcattggccccaaaaattatgaattcttaaagtcaaagagggaagagttccaagaatatctacagaaacttctgcagcatccagaactgagtaatagtcaacttctggcagactttctttcccctaatggtggggaaacacaatttcttgataagatactaccagatgtaaatcttgggaaaattataaaatctgttcctggaaaactaatgaaagagaaaggtcagcatttggaaccttttatcatgaatttcattaattcttgtgagtctccaaagcctaaaccaagtagaccagaactgaccattctcagccctacttcagaaaacaacaagaagcttttcaatgatctgtttaaaaataatgcaaaccgtgctgaaaatacagagagaaagcaaaatcagaattattttatggaggtgatgactgtagaaggagtctatgattacctgatgtatgtaggacgggtagttttccaggttcctgactggcttcatcatctcttaatgggaactcgaatcctctttaaaaacaccctggaaatgtatactgattactatcttcagtgtaaactagaacagctatttcaggagcaccgtttggtctcactcataacacttctcagagatgctatattctgtgaaaacactgaacctcgctctctccaagataagcaaaaaggagcaaaacagacttttgaagaaatgatgaattacattccagatctgttagtcaagtgtattggtgaagaaaccaagtatgaaagcatcagacttctgtttgatggcttacagcaaccagtactcaacaagcagctgacttatgttttattggacattgtgatacaggaactgtttccagagctcaataaggtacaaaaggaagttacctctgtgacatcttggatgtaaacacttggatttggtatagaataacccattgaaatttctgctgtgcgagggtggtagaaatttacttttttgggtatattcttatatatattatgtacatcgctgtctgaaattttagttattttttgtttttaataaagactaacacaaacttaatgattaaaagtga

SEQ ID NO: 369838 - DNA, 4082 bp, Homo sapiens
attgaaactatagtactgtacctacaccatggggtgaatgcatgaaggtcaaatgaaagtgcttagtgtctgtaccgcctaagtaaattttcgcgataatagtcttcctgcatctctcactgtagcggacaatacagaaaaaaaaatttagaaatgtgatgaattagtaaagggaaaaccccatgagactctataagagggattttacctaatctgccaacctgcctcttccaagcactcggattttggttgggctcccggagccggcgtgaattgagctctacccttgcccgtgagcgcgcaaaagagattttgttggtggggtggcggcctgatgagttgtagtctttattctagggctgttttactcgccacccccccagcccccaacacaccccttttaaaataccgactcaaaggcgtcctcctatccccctctcccttaggcgtcacgcaaagctcggacctgctcccacccggagccgagtgtacggtgaggcgcggagcgttgcggggtcggggaagcgctaccacccgctccatccctctgcgggttcgtgtcacgaagactacagttcccagcgggctccacgagctccggttgcccctcaggcagcgcccggcggctacgggggtgctgtagtttcttccgggctccctacaaccttcttccctctcctccgcaatacaggcagttactgggtgctggggctgtcctttgatttccggaaatggccggtcgccagtgttgtcagagtttccacggaagactgcgcgctactccggccaggagggcggagcggcgagacgctagaggctttgcgctgggtgacgacttcgggcacgttctacggccgttcctctggtcggctggggaccgcggccgcgcacgcgcggcggggggcgtggggctgggcccagccggacgcgacctcagcctgcggcggctaactgccggtaggcgtctgtgtgcgccgccaagtcggtggggcggggacgcgaggtgtggatggggggtcgccttgacctctgcctcagccagtagcgcagtctcggcctcgccgttacggagatggtgccctgggtgcggacgatggggcagaagctgaagcagcggctgcgactggacgtgggacgcgagatctgccgccagtacccgctgttctgcttcctgctgctctgtctcagcgccgcctccctgcttcttaacaggtatattcatattttaatgatcttctggtcatttgttgctggagttgtcacattctactgctcactaggacctgattctctcttaccaaatatattcttcacaataaaatacaaacccaagcagttaggacttcaggaattatttcctcaaggtcatagctgtgctgtttgtggtaaagtgaaatgtaaacgacataggccttctttgctacttgaaaactaccagccatggctagacctgaaaatttcttccaaggttgatgcatctctctcagaggttcttgaattagtgttggaaaactttgtttatccgtggtacagggatgtgacagatgatgaatcctttgttgatgaactgagaataacattacgtttttttgcatctgtcttaataagaaggattcacaaggtggatattccatctattataaccaagaaactattaaaagcagcaatgaagcatatagaagtgatagttaaagccagacagaaagtaaaaaatacagagtttttacagcaagctgctttagaagaatatggtccagagcttcatgttgctttgagaagtcgaagagatgaattgcactatttaaggaaacttactgaactgctttttccttatattttgcctcctaaagcaacagactgcagatctctgaccttacttataagagagattctgtctggctctgtgttccttccttctttggatttcctagctgatccagatactgtgaatcatttgcttatcatcttcatagatgacagtccacctgaaaaagcaactgaaccggcttctcctttggttccattcttgcagaaatttgcagaacctagaaataaaaagccatctgtgctgaagttagaattgaagcaaatcagagagcaacaagatcttttatttcgttttatgaactttctgaaacaagaaggcgcagtgcacgtgttgcagttttgtttgactgtggaggaatttaatgatagaattttacgaccagaattatcaaatgatgaaatgctgtctcttcatgaagaattgcagaagatttataaaacatactgtttggatgaaagtattgacaaaattagatttgatcccttcattgtagaagagattcaaagaattgctgaaggcccatacatagatgttgtgaaacttcaaactatgagatgtctttttgaagcatatgaacatgttctttcccttttggagaatgtatttactcctatgttctgccatagtgatgagtatttcagacaacttttaagaggtgcagaatcaccaacacgcaattcaaaattgaacagaggtagcctaagtttggatgattttcggaacacacagaaaaggggagaatcatttggaatcagcagaataggtagcaaaattaaaggagtattcaaaagtaccacaatggagggagctatgttgcctaattatggtgtagctgaaggtgaagatgattttattgaagaaggtattgttgtaatggaagatgattctccagtggaggctgtgagcacacctaatactccccgaaaccttgctgcatggaaaattagcattccatatgtagacttttttgaggatccctcctctgaaaggaaggagaaaaaagaaagaattcctgtgttttgtattgatgttgaaagaaatgatagaagagcagttggacacgagcctgaacattggtctgtctatagaagatatcttgaattctatgtacttgaatcaaaactaacagaatttcatggtgcatttcctgatgcccagcttccttctaagaggatcattggccccaaaaattatgaattcttaaagtcaaagagggaagagttccaagaatatctacagaaacttctgcagcatccagaactgagtaatagtcaacttctggcagactttctttcccctaatggtggggaaacacaatttcttgataagatactaccagatgtaaatcttgggaaaattataaaatctgttcctggaaaactaatgaaagagaaaggtcagcatttggaaccttttatcatgaatttcattaattcttgtgagtctccaaagcctaaaccaagtagaccagaactgaccattctcagccctacttcagaaaacaacaagaagcttttcaatgatctgtttaaaaataatgcaaaccgtgctgaaaatacagagagaaagcaaaatcagaattattttatggaggtgatgactgtagaaggagtctatgattacctgatgtatgtaggacgggtagttttccaggttcctgactggcttcatcatctcttaatgggaactcgaatcctctttaaaaacaccctggaaatgtatactgattactatcttcagtgtaaactagaacagctatttcaggagcaccgtttggtctcactcataacacttctcagagatgctatattctgtgaaaacactgaacctcgctctctccaagataagcaaaaaggagcaaaacagacttttgaagaaatgatgaattacattccagatctgttagtcaagtgtattggtgaagaaaccaagtatgaaagcatcagacttctgtttgatggcttacagcaaccagtactcaacaagcagctgacttatgttttattggacattgtgatacaggaactgtttccagagctcaataaggtacaaaaggaagttacctctgtgacatcttggatgtaaacacttggatttggtatagaataacccattgaaatttctgctgtgcgagggtggtagaaatttacttttttgggtatattcttatatatattatgtacatcgctgtctgaaattttagttattttttgtttttaataaagactaacacaaacttaatgattaaaagtga

SEQ ID NO: 369839 - DNA, 4230 bp, Homo sapiens
attgaaactatagtactgtacctacaccatggggtgaatgcatgaaggtcaaatgaaagtgcttagtgtctgtaccgcctaagtaaattttcgcgataatagtcttcctgcatctctcactgtagcggacaatacagaaaaaaaaatttagaaatgtgatgaattagtaaagggaaaaccccatgagactctataagagggattttacctaatctgccaacctgcctcttccaagcactcggattttggttgggctcccggagccggcgtgaattgagctctacccttgcccgtgagcgcgcaaaagagattttgttggtggggtggcggcctgatgagttgtagtctttattctagggctgttttactcgccacccccccagcccccaacacaccccttttaaaataccgactcaaaggcgtcctcctatccccctctcccttaggcgtcacgcaaagctcggacctgctcccacccggagccgagtgtacggtgaggcgcggagcgttgcggggtcggggaagcgctaccacccgctccatccctctgcgggttcgtgtcacgaagactacagttcccagcgggctccacgagctccggttgcccctcaggcagcgcccggcggctacgggggtgctgtagtttcttccgggctccctacaaccttcttccctctcctccgcaatacaggcagttactgggtgctggggctgtcctttgatttccggaaatggccggtcgccagtgttgtcagagtttccacggaagactgcgcgctactccggccaggagggcggagcggcgagacgctagaggctttgcgctgggtgacgacttcgggcacgttctacggccgttcctctggtcggctggggaccgcggccgcgcacgcgcggcggggggcgtggggctgggcccagccggacgcgacctcagcctgcggcggctaactgccggtaggcgtctgtgtgcgccgccaagtcggtggggcggggacgcgaggtgtggatggggggtcgccttgacctctgcctcagccagtagcgcagtctcggcctcgccgttacggagatggtgccctgggtgcggacgatggggcagaagctgaagcagcggctgcgactggacgtgggacgcgagatctgccgccagtacccgctgttctgcttcctgctgctctgtctcagcgccgcctccctgcttcttaacaggtatattcatattttaatgatcttctggtcatttgttgctggagttgtcacattctactgctcactaggacctgattctctcttaccaaatatattcttcacaataaaatacaaacccaagcagttaggacttcaggaattatttcctcaaggtcatagctgtgctgtttgtggtaaagtgaaatgtaaacgacataggccttctttgctacttgaaaactaccagccatggctagacctgaaaatttcttccaaggttgatgcatctctctcagaggtggatattccatctattataaccaagaaactattaaaagcagcaatgaagcatatagaagtgatagttaaagccagacagaaagtaaaaaatacagagtttttacagcaagctgctttagaagaatatggtccagagcttcatgttgctttgagaagtcgaagagatgaattgcactatttaaggaaacttactgaactgctttttccttatattttgcctcctaaagcaacagactgcagatctctgaccttacttataagagagattctgtctggctctgtgttccttccttctttggatttcctagctgatccagatactgtgaatcatttgcttatcatcttcatagatgacagtccacctgaaaaagcaactgaaccggcttctcctttggttccattcttgcagaaatttgcagaacctagaaataaaaagccatctgtgctgaagttagaattgaagcaaatcagagagcaacaagatcttttatttcgttttatgaactttctgaaacaagaaggcgcagtgcacgtgttgcagttttgtttgactgtggaggaatttaatgatagaattttacgaccagaattatcaaatgatgaaatgctgtctcttcatgaagaattgcagaagatttataaaacatactgtttggatgaaagtattgacaaaattagatttgatcccttcattgtagaagagattcaaagaattgctgaaggcccatacatagatgttgtgaaacttcaaactatgagatgtctttttgaagcatatgaacatgttctttcccttttggagaatgtatttactcctatgttctgccatagtgatgagtatttcagacaacttttaagaggtgcagaatcaccaacacgcaattcaaaattgaacaggaacacacagaaaaggggagaatcatttggaatcagcagaataggtagcaaaattaaaggagtattcaaaagtaccacaatggagggagctatgttgcctaattatggtgtagctgaaggtgaagatgattttattgaagaaggtattgttgtaatggaagatgattctccagtggaggctgtgagcacacctaatactccccgaaaccttgctgcatggaaaattagcattccatatgtagacttttttgaggatccctcctctgaaaggaaggagaaaaaagaaagaattcctgtgttttgtattgatgttgaaagaaatgatagaagagcagttggacacgagcctgaacattggtctgtctatagaagatatcttgaattctatgtacttgaatcaaaactaacagaatttcatggtgcatttcctgatgcccagcttccttctaagaggatcattggccccaaaaattatgaattcttaaagtcaaagagggaagagttccaagaatatctacagaaacttctgcagcatccagaactgagtaatagtcaacttctggcagactttctttcccctaatggtggggaaacacaatttcttgataagatactaccagatgtaaatcttgggaaaattataaaatctgttcctggaaaactaatgaaagagaaaggtcagcatttggaaccttttatcatgaatttcattaattcttgtgagtctccaaagcctaaaccaagtagaccagaactgaccattctcagccctacttcagaaaacaacaagaagcttttcaatgatctgtttaaaaataatgcaaaccgtgctgaaaatacagagagaaagcaaaatcagaattattttatggaggtgatgactgtagaaggagtctatgattacctgatgtatgtaggacgggtagttttccaggttcctgactggcttcatcatctcttaatgggaactcgaatcctctttaaaaacaccctggaaatgtatactgattactatcttcagtgtaaactagaacagctatttcaggagcaccgtttggtctcactcataacacttctcagagatgctatattctgtgaaaacactgaacctcgctctctccaagataagcaaaaaggagcaaaacagacttttgaagaaatgatgaattacattccagatctgttagtcaagtgtattggtgaagaaaccaagtatgaaagcatcagacttctgtttgatggcttacagcaaccagtactcaacaagcagctgacttatgttttattggacattgtgatacaggaactgtttccagagctcaataaggtacaaaaggaagttacctctgtgacatcttggatgtaaacacttggatttggtatagaataacccattgaaatttctgctgtgcgagggtggtagaaatttacttttttgggtatattcttatatatattatgtacatcgctgtctgaaattttagttattttttgtttttaataaagactaacacaaacttaatgattaaaagtgattgagtctcatagtctttcatttgctagctgtgatccaaattttattagaacataagtcacttgttattgccatttttaaaagagaaaattcataatgatgttatggcaaacagataagactgataaacttcgtattgtatagctttgaaaataattatgcctagtatggagaaacaggaataagatctgattttcttagagttaatatattttagtagattggttttccttttttttattttgtacatagttaactgtgtatctataaataaagcatcctatatgagtttttaataataaaaaaag

SEQ ID NO: 369840 - DNA, 3869 bp, Homo sapiens
attgaaactatagtactgtacctacaccatggggtgaatgcatgaaggtcaaatgaaagtgcttagtgtctgtaccgcctaagtaaattttcgcgataatagtcttcctgcatctctcactgtagcggacaatacagaaaaaaaaatttagaaatgtgatgaattagtaaagggaaaaccccatgagactctataagagggattttacctaatctgccaacctgcctcttccaagcactcggattttggttgggctcccggagccggcgtgaattgagctctacccttgcccgtgagcgcgcaaaagagattttgttggtggggtggcggcctgatgagttgtagtctttattctagggctgttttactcgccacccccccagcccccaacacaccccttttaaaataccgactcaaaggcgtcctcctatccccctctcccttaggcgtcacgcaaagctcggacctgctcccacccggagccgagtgtacggtgaggcgcggagcgttgcggggtcggggaagcgctaccacccgctccatccctctgcgggttcgtgtcacgaagactacagttcccagcgggctccacgagctccggttgcccctcaggcagcgcccggcggctacgggggtgctgtagtttcttccgggctccctacaaccttcttccctctcctccgcaatacaggcagttactgggtgctggggctgtcctttgatttccggaaatggccggtcgccagtgttgtcagagtttccacggaagactgcgcgctactccggccaggagggcggagcggcgagacgctagaggctttgcgctgggtgacgacttcgggcacgttctacggccgttcctctggtcggctggggaccgcggccgcgcacgcgcggcggggggcgtggggctgggcccagccggacgcgacctcagcctgcggcggctaactgccggtaggcgttctgtctcagcgccgcctccctgcttcttaacaggtatattcatattttaatgatcttctggtcatttgttgctggagttgtcacattctactgctcactaggacctgattctctcttaccaaatatattcttcacaataaaatacaaacccaagcagttaggacttcaggaattatttcctcaaggtcatagctgtgctgtttgtggtaaagtgaaatgtaaacgacataggccttctttgctacttgaaaactaccagccatggctagacctgaaaatttcttccaaggttgatgcatctctctcagaggttcttgaattagtgttggaaaactttgtttatccgtggtacagggatgtgacagatgatgaatcctttgttgatgaactgagaataacattacgtttttttgcatctgtcttaataagaaggattcacaaggtggatattccatctattataaccaagaaactattaaaagcagcaatgaagcatatagaagtgatagttaaagccagacagaaagtaaaaaatacagagtttttacagcaagctgctttagaagaatatggtccagagcttcatgttgctttgagaagtcgaagagatgaattgcactatttaaggaaacttactgaactgctttttccttatattttgcctcctaaagcaacagactgcagatctctgaccttacttataagagagattctgtctggctctgtgttccttccttctttggatttcctagctgatccagatactgtgaatcatttgcttatcatcttcatagatgacagtccacctgaaaaagcaactgaaccggcttctcctttggttccattcttgcagaaatttgcagaacctagaaataaaaagccatctgtgctgaagttagaattgaagcaaatcagagagcaacaagatcttttatttcgttttatgaactttctgaaacaagaaggcgcagtgcacgtgttgcagttttgtttgactgtggaggaatttaatgatagaattttacgaccagaattatcaaatgatgaaatgctgtctcttcatgaagaattgcagaagatttataaaacatactgtttggatgaaagtattgacaaaattagatttgatcccttcattgtagaagagattcaaagaattgctgaaggcccatacatagatgttgtgaaacttcaaactatgagatgtctttttgaagcatatgaacatgttctttcccttttggagaatgtatttactcctatgttctgccatagtgatgagtatttcagacaacttttaagaggtgcagaatcaccaacacgcaattcaaaattgaacagaggtagcctaagtttggatgattttcggaacacacagaaaaggggagaatcatttggaatcagcagaataggtagcaaaattaaaggagtattcaaaagtaccacaatggagggagctatgttgcctaattatggtgtagctgaaggtgaagatgattttattgaagaaggtattgttgtaatggaagatgattctccagtggaggctgtgagcacacctaatactccccgaaaccttgctgcatggaaaattagcattccatatgtagacttttttgaggatccctcctctgaaaggaaggagaaaaaagaaagaattcctgtgttttgtattgatgttgaaagaaatgatagaagagcagttggacacgagcctgaacattggtctgtctatagaagatatcttgaattctatgtacttgaatcaaaactaacagaatttcatggtgcatttcctgatgcccagcttccttctaagaggatcattggccccaaaaattatgaattcttaaagtcaaagagggaagagttccaagaatatctacagaaacttctgcagcatccagaactgagtaatagtcaacttctggcagactttctttcccctaatggtggggaaacacaatttcttgataagatactaccagatgtaaatcttgggaaaattataaaatctgttcctggaaaactaatgaaagagaaaggtcagcatttggaaccttttatcatgaatttcattaattcttgtgagtctccaaagcctaaaccaagtagaccagaactgaccattctcagccctacttcagaaaacaacaagaagcttttcaatgatctgtttaaaaataatgcaaaccgtgctgaaaatacagagagaaagcaaaatcagaattattttatggaggtgatgactgtagaaggagtctatgattacctgatgtatgtaggacgggtagttttccaggttcctgactggcttcatcatctcttaatgggaactcgaatcctctttaaaaacaccctggaaatgtatactgattactatcttcagtgtaaactagaacagctatttcaggagcaccgtttggtctcactcataacacttctcagagatgctatattctgtgaaaacactgaacctcgctctctccaagataagcaaaaaggagcaaaacagacttttgaagaaatgatgaattacattccagatctgttagtcaagtgtattggtgaagaaaccaagtatgaaagcatcagacttctgtttgatggcttacagcaaccagtactcaacaagcagctgacttatgttttattggacattgtgatacaggaactgtttccagagctcaataaggtacaaaaggaagttacctctgtgacatcttggatgtaaacacttggatttggtatagaataacccattgaaatttctgctgtgcgagggtggtagaaatttacttttttgggtatattcttatatatattatgtacatcgctgtctgaaattttagttattttttgtttttaataaagactaacacaaacttaatgattaaaagtga

SEQ ID NO: 369841 - DNA, 3213 bp, Homo sapiens
attattatgattattatggttatgattaccataactatcgtggtggatatgaagatccatactatggttatgaagattttcaagttggagctagaggaaggggtggtagaggagcaaggggtgctgctccatccagaggtcgtggggctgctcctccccgcggtagagccggttattcacagagaggaggtcctggatcagcaagaggcgttcgaggtgcgagaggaggtgcccaacaacaaagaggccgcgggggaaaaggggtcgaggccggtcctgacctgttacaatgaagactgacttgctatgtgggattacaccagaagcttgcagtggagtaatggtatattcatattttaatgatcttctggtcatttgttgctggagttgtcacattctactgctcactaggacctgattctctcttaccaaatatattcttcacaataaaatacaaacccaagcagttaggacttcaggaattatttcctcaaggtcatagctgtgctgtttgtggtaaagtgaaatgtaaacgacataggccttctttgctacttgaaaactaccagccatggctagacctgaaaatttcttccaaggttgatgcatctctctcagaggttcttgaattagtgttggaaaactttgtttatccgtggtacagggatgtgacagatgatgaatcctttgttgatgaactgagaataacattacgtttttttgcatctgtcttaataagaaggattcacaaggtggatattccatctattataaccaagaaactattaaaagcagcaatgaagcatatagaagtgatagttaaagccagacagaaagtaaaaaatacagagtttttacagcaagctgctttagaagaatatggtccagagcttcatgttgctttgagaagtcgaagagatgaattgcactatttaaggaaacttactgaactgctttttccttatattttgcctcctaaagcaacagactgcagatctctgaccttacttataagagagattctgtctggctctgtgttccttccttctttggatttcctagctgatccagatactgtgaatcatttgcttatcatcttcatagatgacagtccacctgaaaaagcaactgaaccggcttctcctttggttccattcttgcagaaatttgcagaacctagaaataaaaagccatctgtgctgaagttagaattgaagcaaatcagagagcaacaagatcttttatttcgttttatgaactttctgaaacaagaaggcgcagtgcacgtgttgcagttttgtttgactgtggaggaatttaatgatagaattttacgaccagaattatcaaatgatgaaatgctgtctcttcatgaagaattgcagaagatttataaaacatactgtttggatgaaagtattgacaaaattagatttgatcccttcattgtagaagagattcaaagaattgctgaaggcccatacatagatgttgtgaaacttcaaactatgagatgtctttttgaagcatatgaacatgttctttcccttttggagaatgtatttactcctatgttctgccatagtgatgagtatttcagacaacttttaagaggtgcagaatcaccaacacgcaattcaaaattgaacagaggtagcctaagtttggatgattttcggaacacacagaaaaggggagaatcatttggaatcagcagaataggtagcaaaattaaaggagtattcaaaagtaccacaatggagggagctatgttgcctaattatggtgtagctgaaggtgaagatgattttattgaagaaggtattgttgtaatggaagatgattctccagtggaggctgtgagcacacctaatactccccgaaaccttgctgcatggaaaattagcattccatatgtagacttttttgaggatccctcctctgaaaggaaggagaaaaaagaaagaattcctgtgttttgtattgatgttgaaagaaatgatagaagagcagttggacacgagcctgaacattggtctgtctatagaagatatcttgaattctatgtacttgaatcaaaactaacagaatttcatggtgcatttcctgatgcccagcttccttctaagaggatcattggccccaaaaattatgaattcttaaagtcaaagagggaagagttccaagaatatctacagaaacttctgcagcatccagaactgagtaatagtcaacttctggcagactttctttcccctaatggtggggaaacacaatttcttgataagatactaccagatgtaaatcttgggaaaattataaaatctgttcctggaaaactaatgaaagagaaaggtcagcatttggaaccttttatcatgaatttcattaattcttgtgagtctccaaagcctaaaccaagtagaccagaactgaccattctcagccctacttcagaaaacaacaagaagcttttcaatgatctgtttaaaaataatgcaaaccgtgctgaaaatacagagagaaagcaaaatcagaattattttatggaggtgatgactgtagaaggagtctatgattacctgatgtatgtaggacgggtagttttccaggttcctgactggcttcatcatctcttaatgggaactcgaatcctctttaaaaacaccctggaaatgtatactgattactatcttcagtgtaaactagaacagctatttcaggagcaccgtttggtctcactcataacacttctcagagatgctatattctgtgaaaacactgaacctcgctctctccaagataagcaaaaaggagcaaaacagacttttgaagaaatgatgaattacattccagatctgttagtcaagtgtattggtgaagaaaccaagtatgaaagcatcagacttctgtttgatggcttacagcaaccagtactcaacaagcagctgacttatgttttattggacattgtgatacaggaactgtttccagagctcaataaggtacaaaaggaagttacctctgtgacatcttggatgtaaacacttggatttggtatagaataacccattgaaatttctgctgtgcgagggtggtagaaatttacttttttgggtatattcttatatatattatgtacatcgctgtctgaaattttagttattttttgtttttaataaagactaacacaaacttaatgattaaaagtga

SEQ ID NO: 369842 - DNA, 1643 bp, Homo sapiens
gtttatcattttcaaaactgtttttcttttttttaataatggttttcaataaactagactgttgtgataatttgctatgtacttgatacatttttgtttaatattcaggaacacacagaaaaggggagaatcatttggaatcagcagaataggtagcaaaattaaaggagtattcaaaagtaccacaatggagggagctatgttgcctaattatggtgtagctgaaggtgaagatgattttattgaagaaggtattgttgtaatggaagatgattctccagtggaggctgtgagcacacctaatactccccgaaaccttgctgcatggaaaattagcattccatatgtagacttttttgaggatccctcctctgaaaggaaggagaaaaaagaaagaattcctgtgttttgtattgatgttgaaagaaatgatagaagagcagttggacacgagcctgaacattggtctgtctatagaagatatcttgaattctatgtacttgaatcaaaactaacagaatttcatggtgcatttcctgatgcccagcttccttctaagaggatcattggccccaaaaattatgaattcttaaagtcaaagagggaagagttccaagaatatctacagaaacttctgcagcatccagaactgagtaatagtcaacttctggcagactttctttcccctaatggtggggaaacacaatttcttgataagatactaccagatgtaaatcttgggaaaattataaaatctgttcctggaaaactaatgaaagagaaaggtcagcatttggaaccttttatcatgaatttcattaattcttgtgagtctccaaagcctaaaccaagtagaccagaactgaccattctcagccctacttcagaaaacaacaagaagcttttcaatgatctgtttaaaaataatgcaaaccgtgctgaaaatacagagagaaagcaaaatcagaattattttatggaggtgatgactgtagaaggagtctatgattacctgatgtatgtaggacgggtagttttccaggttcctgactggcttcatcatctcttaatgggaactcgaatcctctttaaaaacaccctggaaatgtatactgattactatcttcagtgtaaactagaacagctatttcaggagcaccgtttggtctcactcataacacttctcagagatgctatattctgtgaaaacactgaacctcgctctctccaagataagcaaaaaggagcaaaacagacttttgaagaaatgatgaattacattccagatctgttagtcaagtgtattggtgaagaaaccaagtatgaaagcatcagacttctgtttgatggcttacagcaaccagtactcaacaagcagctgacttatgttttattggacattgtgatacaggaactgtttccagagctcaataaggtacaaaaggaagttacctctgtgacatcttggatgtaaacacttggatttggtatagaataacccattgaaatttctgctgtgcgagggtggtagaaatttacttttttgggtatattcttatatatattatgtacatcgctgtctgaaattttagttattttttgtttttaataaagactaacacaaacttaatgattaaaagtga

SEQ ID NO: 369843 - DNA, 1602 bp, Homo sapiens
actccgacctcccaccaagctccattcaaaattgaacagaggtagcctaagatttggatgattttcggaacacacagaaaaggggagaatcatttggaatcagcagaataggtagcaaaattaaaggagtattcaaaagtaccacaatggagggagctatgttgcctaattatggtgtagctgaaggtgaagatgattttattgaagaaggtattgttgtaatggaagatgattctccagtggaggctgtgagcacacctaatactccccgaaaccttgctgcatggaaaattagcattccatatgtagacttttttgaggatccctcctctgaaaggaaggagaaaaaagaaagaattcctgtgttttgtattgatgttgaaagaaatgatagaagagcagttggacacgagcctgaacattggtctgtctatagaagatatcttgaattctatgtacttgaatcaaaactaacagaatttcatggtgcatttcctgatgcccagcttccttctaagaggatcattggccccaaaaattatgaattcttaaagtcaaagagggaagagttccaagaatatctacagaaacttctgcagcatccagaactgagtaatagtcaacttctggcagactttctttcccctaatggtggggaaacacaatttcttgataagatactaccagatgtaaatcttgggaaaattataaaatctgttcctggaaaactaatgaaagagaaaggtcagcatttggaaccttttatcatgaatttcattaattcttgtgagtctccaaagcctaaaccaagtagaccagaactgaccattctcagccctacttcagaaaacaacaagaagcttttcaatgatctgtttaaaaataatgcaaaccgtgctgaaaatacagagagaaagcaaaatcagaattattttatggaggtgatgactgtagaaggagtctatgattacctgatgtatgtaggacgggtagttttccaggttcctgactggcttcatcatctcttaatgggaactcgaatcctctttaaaaacaccctggaaatgtatactgattactatcttcagtgtaaactagaacagctatttcaggagcaccgtttggtctcactcataacacttctcagagatgctatattctgtgaaaacactgaacctcgctctctccaagataagcaaaaaggagcaaaacagacttttgaagaaatgatgaattacattccagatctgttagtcaagtgtattggtgaagaaaccaagtatgaaagcatcagacttctgtttgatggcttacagcaaccagtactcaacaagcagctgacttatgttttattggacattgtgatacaggaactgtttccagagctcaataaggtacaaaaggaagttacctctgtgacatcttggatgtaaacacttggatttggtatagaataacccattgaaatttctgctgtgcgagggtggtagaaatttacttttttgggtatattcttatatatattatgtacatcgctgtctgaaattttagttattttttgtttttaataaagactaacacaaacttaatgattaaaagtga

SEQ ID NO: 369844 - DNA, 1285 bp, Homo sapiens
aatgttatgtatcataaacttcaacgcccaagtagaaacaaatgcagtagactgtcaacgactctcttaatttaccccgctacagttggacacgagcctgaacattggtctgtctatagaagatatcttgaattctatgtacttgaatcaaaactaacagaatttcatggtgcatttcctgatgcccagcttccttctaagaggatcattggccccaaaaattatgaattcttaaagtcaaagagggaagagttccaagaatatctacagaaacttctgcagcatccagaactgagtaatagtcaacttctggcagactttctttcccctaatggtggggaaacacaatttcttgataagatactaccagatgtaaatcttgggaaaattataaaatctgttcctggaaaactaatgaaagagaaaggtcagcatttggaaccttttatcatgaatttcattaattcttgtgagtctccaaagcctaaaccaagtagaccagaactgaccattctcagccctacttcagaaaacaacaagaagcttttcaatgatctgtttaaaaataatgcaaaccgtgctgaaaatacagagagaaagcaaaatcagaattattttatggaggtgatgactgtagaaggagtctatgattacctgatgtatgtaggacgggtagttttccaggttcctgactggcttcatcatctcttaatgggaactcgaatcctctttaaaaacaccctggaaatgtatactgattactatcttcagtgtaaactagaacagctatttcaggagcaccgtttggtctcactcataacacttctcagagatgctatattctgtgaaaacactgaacctcgctctctccaagataagcaaaaaggagcaaaacagacttttgaagaaatgatgaattacattccagatctgttagtcaagtgtattggtgaagaaaccaagtatgaaagcatcagacttctgtttgatggcttacagcaaccagtactcaacaagcagctgacttatgttttattggacattgtgatacaggaactgtttccagagctcaataaggtacaaaaggaagttacctctgtgacatcttggatgtaaacacttggatttggtatagaataacccattgaaatttctgctgtgcgagggtggtagaaatttacttttttgggtatattcttatatatattatgtacatcgctgtctgaaattttagttattttttgtttttaataaagactaacacaaacttaatgattaaaagtga

SEQ ID NO: 369845 - DNA, 4551 bp, Homo sapiens
attgaaactatagtactgtacctacaccatggggtgaatgcatgaaggtcaaatgaaagtgcttagtgtctgtaccgcctaagtaaattttcgcgataatagtcttcctgcatctctcactgtagcggacaatacagaaaaaaaaatttagaaatgtgatgaattagtaaagggaaaaccccatgagactctataagagggattttacctaatctgccaacctgcctcttccaagcactcggattttggttgggctcccggagccggcgtgaattgagctctacccttgcccgtgagcgcgcaaaagagattttgttggtggggtggcggcctgatgagttgtagtctttattctagggctgttttactcgccacccccccagcccccaacacaccccttttaaaataccgactcaaaggcgtcctcctatccccctctcccttaggcgtcacgcaaagctcggacctgctcccacccggagccgagtgtacggtgaggcgcggagcgttgcggggtcggggaagcgctaccacccgctccatccctctgcgggttcgtgtcacgaagactacagttcccagcgggctccacgagctccggttgcccctcaggcagcgcccggcggctacgggggtgctgtagtttcttccgggctccctacaaccttcttccctctcctccgcaatacaggcagttactgggtgctggggctgtcctttgatttccggaaatggccggtcgccagtgttgtcagagtttccacggaagactgcgcgctactccggccaggagggcggagcggcgagacgctagaggctttgcgctgggtgacgacttcgggcacgttctacggccgttcctctggtcggctggggaccgcggccgcgcacgcgcggcggggggcgtggggctgggcccagccggacgcgacctcagcctgcggcggctaactgccggtaggcgtctgtgtgcgccgccaagtcggtggggcggggacgcgaggtgtggatggggggtcgccttgacctctgcctcagccagtagcgcagtctcggcctcgccgttacggagatggtgccctgggtgcggacgatggggcagaagctgaagcagcggctgcgactggacgtgggacgcgagatctgccgccagtacccgctgttctgcttcctgctgctctgtctcagcgccgcctccctgcttcttaacaggtatattcatattttaatgatcttctggtcatttgttgctggagttgtcacattctactgctcactaggacctgattctctcttaccaaatatattcttcacaataaaatacaaacccaagcagttaggacttcaggaattatttcctcaaggtcatagctgtgctgtttgtggtaaagtgaaatgtaaacgacataggccttctttgctacttgaaaactaccagccatggctagacctgaaaatttcttccaaggttgatgcatctctctcagaggttcttgaattagtgttggaaaactttgtttatccgtggtacagggatgtgacagatgatgaatcctttgttgatgaactgagaataacattacgtttttttgcatctgtcttaataagaaggattcacaaggtggatattccatctattataaccaagaaactattaaaagcagcaatgaagcatatagaagtgatagttaaagccagacagaaagtaaaaaatacagagtttttacagcaagctgctttagaagaatatggtccagagcttcatgttgctttgagaagtcgaagagatgaattgcactatttaaggaaacttactgaactgctttttccttatattttgcctcctaaagcaacagactgcagatctctgaccttacttataagagagattctgtctggctctgtgttccttccttctttggatttcctagctgatccagatactgtgaatcatttgcttatcatcttcatagatgacagtccacctgaaaaagcaactgaaccggcttctcctttggttccattcttgcagaaatttgcagaacctagaaataaaaagccatctgtgctgaagttagaattgaagcaaatcagagagcaacaagatcttttatttcgttttatgaactttctgaaacaagaaggcgcagtgcacgtgttgcagttttgtttgactgtggaggaatttaatgatagaattttacgaccagaattatcaaatgatgaaatgctgtctcttcatgaagaattgcagaagatttataaaacatactgtttggatgaaagtattgacaaaattagatttgatcccttcattgtagaagagattcaaagaattgctgaaggcccatacatagatgttgtgaaacttcaaactatgagatgtctttttgaagcatatgaacatgttctttcccttttggagaatgtatttactcctatgttctgccatagtgatgagtatttcagacaacttttaagaggtgcagaatcaccaacacgcaattcaaaattgaacagaggtagcctaagtttggatgattttcggaacacacagaaaaggggagaatcatttggaatcagcagaataggtagcaaaattaaaggagtattcaaaagtaccacaatggagggagctatgttgcctaattatggtgtagctgaaggtgaagatgattttattgaagaaggtattgttgtaatggaagatgattctccagtggaggctgtgagcacacctaatactccccgaaaccttgctgcatggaaaattagcattccatatgtagacttttttgaggatccctcctctgaaaggaaggagaaaaaagaaagaattcctgtgttttgtattgatgttgaaagaaatgatagaagagcagttggacacgagcctgaacattggtctgtctatagaagatatcttgaattctatgtacttgaatcaaaactaacagaatttcatggtgcatttcctgatgcccagcttccttctaagaggatcattggccccaaaaattatgaattcttaaagtcaaagagggaagagttccaagaatatctacagaaacttctgcagcatccagaactgagtaatagtcaacttctggcagactttctttcccctaatggtggggaaacacaatttcttgataagatactaccagatgtaaatcttgggaaaattataaaatctgttcctggaaaactaatgaaagagaaaggtcagcatttggaaccttttatcatgaatttcattaattcttgtgagtctccaaagcctaaaccaagtagaccagaactgaccattctcagccctacttcagaaaacaacaagaagcttttcaatgatctgtttaaaaataatgcaaaccgtgctgaaaatacagagagaaagcaaaatcagaattattttatggaggtgatgactgtagaaggagtctatgattacctgatgtatgtaggacgggtagttttccaggttcctgactggcttcatcatctcttaatgggaactcgaatcctctttaaaaacaccctggaaatgtatactgattactatcttcagtgtaaactagaacagctatttcaggagcaccgtttggtctcactcataacacttctcagagatgctatattctgtgaaaacactgaacctcgctctctccaagataagcaaaaaggagcaaaacagacttttgaagaaatgatgaattacattccagatctgttagtcaagtgtattggtgaagaaaccaagtatgaaagcatcagacttctgtttgatggcttacagcaaccagtactcaacaagcagctgacttatgttttattggacattgtgatacaggaactgtttccagagctcaataaggtaactgaaaagcagtaattttattcatgattttcttaatggtatgctgacatttattttaattagggacataaatgtaagaaaacccttgtctctgttctctgtggttctttaaaaaattaacctcagcaaattgccttttgtattttctttattaaacatgcccaaacaattctgggggacagctattgaatagcttctgctttgacttcatccctttttaattacaagcagatagggaccctatatagtctttccaggggaagaagtgagtgtaagtcctagcactagaataggccaagctcagtgttatcgtctgcaccattgtatgctgtgtaagtcagaaactagagtatttttgaagcaagttttatgtaaacccaagcacaaaatgaactaaaattagagcatggtcatattattactatgttgaatcttgaggattttgagttttgagcaaaggtttaagtcattattttctgtcttattttttgactaatccttttggttggatgaaacaactgttgttcagtgctgtggtattgaaatgaagtgtgacttttgtagagtagaggaaaccagatttgggctatttacttattataaactttcaagttgactgggcacggtggctcacgcctgtaatcccagcaccttgggaggccaaggcgggggga

SEQ ID NO: 369846 - DNA, 4191 bp, Homo sapiens
attgaaactatagtactgtacctacaccatggggtgaatgcatgaaggtcaaatgaaagtgcttagtgtctgtaccgcctaagtaaattttcgcgataatagtcttcctgcatctctcactgtagcggacaatacagaaaaaaaaatttagaaatgtgatgaattagtaaagggaaaaccccatgagactctataagagggattttacctaatctgccaacctgcctcttccaagcactcggattttggttgggctcccggagccggcgtgaattgagctctacccttgcccgtgagcgcgcaaaagagattttgttggtggggtggcggcctgatgagttgtagtctttattctagggctgttttactcgccacccccccagcccccaacacaccccttttaaaataccgactcaaaggcgtcctcctatccccctctcccttaggcgtcacgcaaagctcggacctgctcccacccggagccgagtgtacggtgaggcgcggagcgttgcggggtcggggaagcgctaccacccgctccatccctctgcgggttcgtgtcacgaagactacagttcccagcgggctccacgagctccggttgcccctcaggcagcgcccggcggctacgggggtgctgtagtttcttccgggctccctacaaccttcttccctctcctccgcaatacaggcagttactgggtgctggggctgtcctttgatttccggaaatggccggtcgccagtgttgtcagagtttccacggaagactgcgcgctactccggccaggagggcggagcggcgagacgctagaggctttgcgctgggtgacgacttcgggcacgttctacggccgttcctctggtcggctggggaccgcggccgcgcacgcgcggcggggggcgtggggctgggcccagccggacgcgacctcagcctgcggcggctaactgccggtaggcgtctgtgtgcgccgccaagtcggtggggcggggacgcgaggtgtggatggggggtcgccttgacctctgcctcagccagtagcgcagtctcggcctcgccgttacggagatggtgccctgggtgcggacgatggggcagaagctgaagcagcggctgcgactggacgtgggacgcgagatctgccgccagtacccgctgttctgcttcctgctgctctgtctcagcgccgcctccctgcttcttaacaggtatattcatattttaatgatcttctggtcatttgttgctggagttgtcacattctactgctcactaggacctgattctctcttaccaaatatattcttcacaataaaatacaaacccaagcagttaggacttcaggaattatttcctcaaggtcatagctgtgctgtttgtggtaaagtgaaatgtaaacgacataggccttctttgctacttgaaaactaccagccatggctagacctgaaaatttcttccaaggttgatgcatctctctcagaggttcttgaattagtgttggaaaactttgtttatccgtggtacagggatgtgacagatgatgaatcctttgttgatgaactgagaataacattacgtttttttgcatctgtcttaataagaaggattcacaaggtggatattccatctattataaccaagaaactattaaaagcagcaatgaagcatatagaagtgatagttaaagccagacagaaagtaaaaaatacagagtttttacagcaagctgctttagaagaatatggtccagagcttcatgttgctttgagaagtcgaagagatgaattgcactatttaaggaaacttactgaactgctttttccttatattttgcctcctaaagcaacagactgcagatctctgaccttacttataagagagattctgtctggctctgtgttccttccttctttggatttcctagctgatccagatactgtgaatcatttgcttatcatcttcatagatgacagtccacctgaaaaagcaactgaaccggcttctcctttggttccattcttgcagaaatttgcagaacctagaaataaaaagccatctgtgctgaagttagaattgaagcaaatcagagagcaacaagatcttttatttcgttttatgaactttctgaaacaagaaggcgcagtgcacgtgttgcagttttgtttgactgtggaggaatttaatgatagaattttacgaccagaattatcaaatgatgaaatgctgtctcttcatgaagaattgcagaagatttataaaacatactgtttggatgaaagtattgacaaaattagatttgatcccttcattgtagaagagattcaaagaattgctgaaggcccatacatagatgttgtgaaacttcaaactatgagatgtctttttgaagcatatgaacatgttctttcccttttggagaatgtatttactcctatgttctgccatagtgatgagtatttcagacaacttttaagaggtgcagaatcaccaacacgcaattcaaaattgaacagaggtagcctaagtttggatgattttcggaacacacagaaaaggggagaatcatttggaatcagcagaataggtagcaaaattaaaggagtattcaaaagtaccacaatggagggagctatgttgcctaattatggtgtagctgaaggtgaagatgattttattgaagaaggtattgttgtaatggaagatgattctccagtggaggctgtgagcacacctaatactccccgaaaccttgctgcatggaaaattagcattccatatgtagacttttttgaggatccctcctctgaaaggaaggagaaaaaagaaagaattcctgtgttttgtattgatgttgaaagaaatgatagaagagcagttggacacgagcctgaacattggtctgtctatagaagatatcttgaattctatgtacttgaatcaaaactaacagaatttcatggtgcatttcctgatgcccagcttccttctaagaggatcattggccccaaaaattatgaattcttaaagtcaaagagggaagagttccaagaatatctacagaaacttctgcagcatccagaactgagtaatagtcaacttctggcagactttctttcccctaatggtggggaaacacaatttcttgataagatactaccagatgtaaatcttgggaaaattataaaatctgttcctggaaaactaatgaaagagaaaggtcagcatttggaaccttttatcatgaatttcattaattcttgtgagtctccaaagcctaaaccaagtagaccagaactgaccattctcagccctacttcagaaaacaacaagaagcttttcaatgatctgtttaaaaataatgcaaaccgtgctgaaaatacagagagaaagcaaaatcagaattattttatggaggtgatgactgtagaaggagtctatgattacctgatgtatgtagatgctatattctgtgaaaacactgaacctcgctctctccaagataagcaaaaaggagcaaaacagacttttgaagaaatgatgaattacattccagatctgttagtcaagtgtattggtgaagaaaccaagtatgaaagcatcagacttctgtttgatggcttacagcaaccagtactcaacaagcaggaactgtttccagagctcaataaggtacaaaaggaagttacctctgtgacatcttggatgtaaacacttggatttggtatagaataacccattgaaatttctgctgtgcgagggtggtagaaatttacttttttgggtatattcttatatatattatgtacatcgctgtctgaaattttagttattttttgtttttaataaagactaacacaaacttaatgattaaaagtgattgagtctcatagtctttcatttgctagctgtgatccaaattttattagaacataagtcacttgttattgccatttttaaaagagaaaattcataatgatgttatggcaaacagataagactgataaacttcgtattgtatagctttgaaaataattatgcctagtatggagaaacaggaataagatctgattttcttagagttaatatattttagtagattggttttccttttttttattttgtacatagttaactgtgtatctataaataaagcatcctatatgagtttttaataataaaaaaag

SEQ ID NO: 369847 - DNA, 3884 bp, Homo sapiens
attgaaactatagtactgtacctacaccatggggtgaatgcatgaaggtcaaatgaaagtgcttagtgtctgtaccgcctaagtaaattttcgcgataatagtcttcctgcatctctcactgtagcggacaatacagaaaaaaaaatttagaaatgtgatgaattagtaaagggaaaaccccatgagactctataagagggattttacctaatctgccaacctgcctcttccaagcactcggattttggttgggctcccggagccggcgtgaattgagctctacccttgcccgtgagcgcgcaaaagagattttgttggtggggtggcggcctgatgagttgtagtctttattctagggctgttttactcgccacccccccagcccccaacacaccccttttaaaataccgactcaaaggcgtcctcctatccccctctcccttaggcgtcacgcaaagctcggacctgctcccacccggagccgagtgtacggtgaggcgcggagcgttgcggggtcggggaagcgctaccacccgctccatccctctgcgggttcgtgtcacgaagactacagttcccagcgggctccacgagctccggttgcccctcaggcagcgcccggcggctacgggggtgctgtagtttcttccgggctccctacaaccttcttccctctcctccgcaatacaggcagttactgggtgctggggctgtcctttgatttccggaaatggccggtcgccagtgttgtcagagtttccacggaagactgcgcgctactccggccaggagggcggagcggcgagacgctagaggctttgcgctgggtgacgacttcgggcacgttctacggccgttcctctggtcggctggggaccgcggccgcgcacgcgcggcggggggcgtggggctgggcccagccggacgcgacctcagcctgcggcggctaactgccggtaggcgtctgtgtgcgccgccaagtcggtggggcggggacgcgaggtgtggatggggggtcgccttgacctctgcctcagccagtagcgcagtctcggcctcgccgttacggagatggtgccctgggtgcggacgatggggcagaagctgaagcagcggctgcgactggacgtgggacgcgagatctgccgccagtacccgctgttctgcttcctgctgctctgtctcagcgccgcctccctgcttcttaacaggtatattcatattttaatgatcttctggtcatttgttgctggagttgtcacattctactgctcactaggacctgattctctcttaccaaatatattcttcacaataaaatacaaacccaagcagttaggacttcaggaattatttcctcaaggtcatagctgtgctgtttgtggtaaagtgaaatgtaaacgacataggccttctttgctacttgaaaactaccagccatggctagacctgaaaatttcttccaaggttgatgcatctctctcagaggttcttgaattagtgttggaaaactttgtttatccgtggtacagggatgtgacagatgatgaatcctttgttgatgaactgagaataacattacgtttttttgcatctgtcttaataagaaggattcacaaggtggatattccatctattataaccaagaaactattaaaagcagcaatgaagcatatagaagtgatagttaaagccagacagaaagtaaaaaatacagagtttttacagcaagctgctttagaagaatatggtccagagcttcatgttgctttgagaagtcgaagagatgaattgcactatttaaggaaacttactgaactgctttttccttatattttgcctcctaaagcaacagactgcagatctctgaccttacttataagagagattctgtctggctctgtgttccttccttctttggatttcctagctgatccagatactgtgaatcatttgcttatcatcttcatagatgacagtccacctgaaaaagcaactgaaccggcttctcctttggttccattcttgcagaaatttgcagaacctagaaataaaaagccatctgtgctgaagttagaattgaagcaaatcagagagcaacaagatcttttatttcgttttatgaactttctgaaacaagaaggcgcagtgcacgtgttgcagttttgtttgactgtggaggaatttaatgatagaattttacgaccagaattatcaaatgatgaaatgctgtctcttcatgaagaattgcagaagatttataaaacatactgtttggatgaaagtattgacaaaattagatttgatcccttcattgtagaagagattcaaagaattgctgaaggcccatacatagatgttgtgaaacttcaaactatgagatgtctttttgaagcatatgaacatgttctttcccttttggagaatgtatttactcctatgttctgccatagtgatgagtatttcagacaacttttaagaggtgcagaatcaccaacacgcaattcaaaattgaacagaggtagcctaagtttggatgattttcggaacacacagaaaaggggagaatcatttggaatcagcagaataggtagcaaaattaaaggagtattcaaaagtaccacaatggagggagctatgttgcctaattatggtgtagctgaaggtgaagatgattttattgaagaaggtattgttgtaatggaagatgattctccagtggaggctgtgagcacacctaatactccccgaaaccttgctgcatggaaaattagcattccatatgtagacttttttgaggatccctcctctgaaaggaaggagaaaaaagaaagaattcctgtgttttgtattgatgttgaaagaaatgatagaagagcagttggacacgagcctgaacattggtctgtctatagaagatatcttgaattctatgtacttgaatcaaaactaacagaatttcatggtgcatttcctgatgcccagcttccttctaagaggatcattggccccaaaaattatgaattcttaaagtcaaagagggaagagttccaagaatatctacagaaacttctgcagcatccagaactgagtaatagtcaacttctggcagactttctttcccctaatggtggggaaacacaatttcttgataagatactaccagatgtaaatcttgggaaaattataaaatctgttcctggaaaactaatgaaagagaaaggtcagcatttggaaccttttatcatgaatttcattaattcttgtgagtctccaaagcctaaaccaagtagaccagaactgaccattctcagccctacttcagaaaacaacaagaagcttttcaatgatctgtttaaaaataatgcaaaccgtgctgaaaatacagagagaaagcaaaatcagaattattttatggaggtgatgactgtagaaggagtctatgattacctgatgtatgtagatgctatattctgtgaaaacactgaacctcgctctctccaagataagcaaaaaggagcaaaacagacttttgaagaaatgatgaattacattccagatctgttagtcaagtgtattggtgaagaaaccaagtatgaaagcatcagacttctgtttgatggcttacagcaaccagtactcaacaagcaggaactgtttccagagctcaataaggtacaaaaggaagttacctctgtgacatcttggatgtaaacacttggatttggtatagaataacccattgaaatttctgctgtgcgagggtggtagaaatttacttttttgggtatattcttatatatattatgtacatcgctgtctgaaattttagttattttttgtttttaataaagactaacacaaacttaatgattaaaagtga

SEQ ID NO: 369848 - DNA, 3467 bp, Homo sapiens
attgaaactatagtactgtacctacaccatggggtgaatgcatgaaggtcaaatgaaagtgcttagtgtctgtaccgcctaagtaaattttcgcgataatagtcttcctgcatctctcactgtagcggacaatacagaaaaaaaaatttagaaatgtgatgaattagtaaagggaaaaccccatgagactctataagagggattttacctaatctgccaacctgcctcttccaagcactcggattttggttgggctcccggagccggcgtgaattgagctctacccttgcccgtgagcgcgcaaaagagattttgttggtggggtggcggcctgatgagttgtagtctttattctagggctgttttactcgccacccccccagcccccaacacaccccttttaaaataccgactcaaaggcgtcctcctatccccctctcccttaggcgtcacgcaaagctcggacctgctcccacccggagccgagtgtacggtgaggcgcggagcgttgcggggtcggggaagcgctaccacccgctccatccctctgcgggttcgtgtcacgaagactacagttcccagcgggctccacgagctccggttgcccctcaggcagcgcccggcggctacgggggtgctgtagtttcttccgggctccctacaaccttcttccctctcctccgcaatacaggcagttactgggtgctggggctgtcctttgatttccggaaatggccggtcgccagtgttgtcagagtttccacggaagactgcgcgctactccggccaggagggcggagcggcgagacgctagaggctttgcgctgggtgacgacttcgggcacgttctacggccgttcctctggtcggctggggaccgcggccgcgcacgcgcggcggggggcgtggggctgggcccagccggacgcgacctcagcctgcggcggctaactgccggtaggcgtctgtgtgcgccgccaagtcggtggggcggggacgcgaggtgtggatggggggtcgccttgacctctgcctcagccagtagcgcagtctcggcctcgccgttacggagatggtgccctgggtgcggacgatggggcagaagctgaagcagcggctgcgactggacgtgggacgcgagatctgccgccagtacccgctgttctgcttcctgctgctctgtctcagcgccgcctccctgcttcttaacaggtatattcatattttaatgatcttctggtcatttgttgctggagttgtcacattctactgctcactaggacctgattctctcttaccaaatatattcttcacaataaaatacaaacccaagcagttaggacttcaggaattatttcctcaaggtcatagctgtgctgtttgtggtaaagtgaaatgtaaacgacataggccttctttgctacttgaaaactaccagccatggctagacctgaaaatttcttccaaggttgatgcatctctctcagaggttcttgaattagtgttggaaaactttgtttatccgtggtacagggatgtgacagatgatgaatcctttgttgatgaactgagaataacattacgtttttttgcatctgtcttaataagaaggattcacaaggtggatattccatctattataaccaagaaactattaaaagcagcaatgaagcatatagaagtgatagttaaagccagacagaaagtaaaaaatacagagtttttacagcaagctgctttagaagaatatggtccagagcttcatgttgctttgagaagtcgaagagatgaattgcactatttaaggaaacttactgaactgctttttccttatattttgcctcctaaagcaacagactgcagatctctgaccttacttataagagagattctgtctggctctgtgttccttccttctttggatttcctagctgatccagatactgtgaatcatttgcttatcatcttcatagatgacagtccacctgaaaaagcaactgaaccggcttctcctttggttccattcttgcagaaatttgcagaacctagaaataaaaagccatctgtgctgaagttagaattgaagcaaatcagagagcaacaagatcttttatttcgttttatgaactttctgaaacaagaaggcgcagtgcacgtgttgcagttttgtttgactgtggaggaatttaatgatagaattttacgaccagaattatcaaatgatgaaatgctgtctcttcatgaagaattgcagaagatttataaaacatactgtttggatgaaagtattgacaaaattagatttgatcccttcattgtagaagagattcaaagaattgctgaaggcccatacatagatgttgtgaaacttcaaactatgagatgtctttttgaagcatatgaacatgttctttcccttttggagaatgtatttactcctatgttctgccatagtgatgagtatttcagacaacttttaagaggtgcagaatcaccaacacgcaattcaaaattgaacagaggtagcctaagtttggatgattttcggaacacacagaaaaggggagaatcatttggaatcagcagaataggtagcaaaattaaaggagtattcaaaagtaccacaatggagggagctatgttgcctaattatggtgtagctgaaggtgaagatgattttattgaagaaggtattgttgtaatggaagatgattctccagtggaggctgtgagcacacctaatactccccgaaaccttgctgcatggaaaattagcattccatatgtagacttttttgaggatccctcctctgaaaggaaggagaaaaaagaaagaattcctgtgttttgtattgatgttgaaagaaatgatagaagagcagttggacacgagcctgaacattggtctgtctatagaagatatcttgaattctatgtacttgaatcaaaactaacagaatttcatggtgcatttcctgatgcccagcttccttctaagaggatcattggccccaaaaattatgaattcttaaagtcaaagagggaagagttccaagaatatctacagaaacttctgcagcatccagaactgagtaatagtcaacttctggcagactttctttcccctaatggtggggaaacacaatttcttgataagatactaccagatgtaaatcttgggaaaattataaaatctgttcctggaaaactaatgaaagagaaaggtcagcatttggaaccttttatcatgaatttcattaattcttgtgagtctccaaagcctaaaccaagtagaccagaactgaccattctcagccctacttcagaaaacaacaagaagcttttcaatgatctgtttaaaaataatgcaaaccgtgctgaaaatacagagagaaagcaaaatcagaattattttgtaggttaacctgggttaggtctacctgggggtacgagctcgattgtatctg

SEQ ID NO: 369849 - DNA, 2195 bp, Homo sapiens
attgaaactatagtactgtacctacaccatggggtgaatgcatgaaggtcaaatgaaagtgcttagtgtctgtaccgcctaagtaaattttcgcgataatagtcttcctgcatctctcactgtagcggacaatacagaaaaaaaaatttagaaatgtgatgaattagtaaagggaaaaccccatgagactctataagagggattttacctaatctgccaacctgcctcttccaagcactcggattttggttgggctcccggagccggcgtgaattgagctctacccttgcccgtgagcgcgcaaaagagattttgttggtggggtggcggcctgatgagttgtagtctttattctagggctgttttactcgccacccccccagcccccaacacaccccttttaaaataccgactcaaaggcgtcctcctatccccctctcccttaggcgtcacgcaaagctcggacctgctcccacccggagccgagtgtacggtgaggcgcggagcgttgcggggtcggggaagcgctaccacccgctccatccctctgcgggttcgtgtcacgaagactacagttcccagcgggctccacgagctccggttgcccctcaggcagcgcccggcggctacgggggtgctgtagtttcttccgggctccctacaaccttcttccctctcctccgcaatacaggcagttactgggtgctggggctgtcctttgatttccggaaatggccggtcgccagtgttgtcagagtttccacggaagactgcgcgctactccggccaggagggcggagcggcgagacgctagaggctttgcgctgggtgacgacttcgggcacgttctacggccgttcctctggtcggctggggaccgcggccgcgcacgcgcggcggggggcgtggggctgggcccagccggacgcgacctcagcctgcggcggctaactgccggtaggcgtctgtgtgcgccgccaagtcggtggggcggggacgcgaggtgtggatggggggtcgccttgacctctgcctcagccagtagcgcagtctcggcctcgccgttacggagatggtgccctgggtgcggacgatggggcagaagctgaagcagcggctgcgactggacgtgggacgcgagatctgccgccagtacccgctgttctgcttcctgctgctctgtctcagcgccgcctccctgcttcttaacaggtatattcatattttaatgatcttctggtcatttgttgctggagttgtcacattctactgctcactaggacctgattctctcttaccaaatatattcttcacaataaaatacaaacccaagcagttaggacttcaggaattatttcctcaaggtcatagctgtgctgtttgtggtaaagtgaaatgtaaacgacataggccttctttgctacttgaaaactaccagccatggctagacctgaaaatttcttccaaggttgatgcatctctctcagaggttcttgaattagtgttggaaaactttgtttatccgtggtacagggatgtgacagatgatgaatcctttgttgatgaactgagaataacattacgtttttttgcatctgtcttaataagaaggattcacaaggtggatattccatctattataaccaagaaactattaaaagcagcaatgaagcatatagaagtgatagttaaagccagacagaaagtaaaaaatacagagtttttacagcaagctgctttagaagaatatggtccagagcttcatgttgctttgagaagtcgaagagatgaattgcactatttaaggaaacttactgaactgctttttccttatattttgcctcctaaagcaacagactgcagatctctgaccttacttataagagagattctgtctggctctgtgttccttccttctttggatttcctagctgatccagatactgtgaatcatttgcttatcatcttcatagatgacagtccagtgagtattgaatatattagaaaacacttcagattgcattgaattttgattttgtatgtcaaatcaagtgggaattttactgagttaataattctctttctttcaaagcctgaaaaagcaactgaaccggcttctcctttggttccattcttgcagaattgcgagaactgaggattctatgctctggcggttgtagagtagtatggagggg

SEQ ID NO: 369850 - DNA, 1395 bp, Homo sapiens
attgaaactatagtactgtacctacaccatggggtgaatgcatgaaggtcaaatgaaagtgcttagtgtctgtaccgcctaagtaaattttcgcgataatagtcttcctgcatctctcactgtagcggacaatacagaaaaaaaaatttagaaatgtgatgaattagtaaagggaaaaccccatgagactctataagagggattttacctaatctgccaacctgcctcttccaagcactcggattttggttgggctcccggagccggcgtgaattgagctctacccttgcccgtgagcgcgcaaaagagattttgttggtggggtggcggcctgatgagttgtagtctttattctagggctgttttactcgccacccccccagcccccaacacaccccttttaaaataccgactcaaaggcgtcctcctatccccctctcccttaggcgtcacgcaaagctcggacctgctcccacccggagccgagtgtacggtgaggcgcggagcgttgcggggtcggggaagcgctaccacccgctccatccctctgcgggttcgtgtcacgaagactacagttcccagcgggctccacgagctccggttgcccctcaggcagcgcccggcggctacgggggtgctgtagtttcttccgggctccctacaaccttcttccctctcctccgcaatacaggcagttactgggtgctggggctgtcctttgatttccggaaatggccggtcgccagtgttgtcagagtttccacggaagactgcgcgctactccggccaggagggcggagcggcgagacgctagaggctttgcgctgggtgacgacttcgggcacgttctacggccgttcctctggtcggctggggaccgcggccgcgcacgcgcggcggggggcgtggggctgggcccagccggacgcgacctcagcctgcggcggctaactgccggtaggcgtctgtgtgcgccgccaagtcggtggggcggggacgcgaggtgtggatggggggtcgccttgacctctgcctcagccagtagcgcagtctcggcctcgccgttacggagatggtgccctgggtgcggacgatggggcagaagctgaagcagcggctgcgactggacgtgggacgcgagatctgccgccagtacccgctgttctgcttcctgctgctctgtctcagcgccgcctccctgcttcttaacaggtaacgccgcagcgcggagcctgggcggcggcttttctccgaaggtgcagacgcccggcccgtgctgcttaaccgtgcggaggccgcgtagctgcgggactggggaccagtggggagagcgagctccgcagaggagcggcctcggggagcacggcggagcgtcgaggccggaagcacaggccg

SEQ ID NO: 369851 - DNA, 837 bp, Homo sapiens
aaaaaaattttcaagttattgtgatattaagtgcatattaaaacagagtggcagttacagactttgtatctttaattttcatgggaatcaacaacaggaaacctttagctctgtttgagacttcataacagagctgtcattaaacgttgccttttttctcatatctagaacatagatatttctcactccatatgccagccaatttattttggtttacaatatatatgtcttaggttagaattttaatacactagagctgttaggcaatttacaaatgaacctgtgtcttgtcttctattaaatggatttatttttactttaggtacaaaaggaagttacctctgtgacatcttggatgtaaacacttggatttggtatagaataacccattgaaatttctgctgtgcgagggtggtagaaatttacttttttgggtatattcttatatatattatgtacatcgctgtctgaaattttagttattttttgtttttaataaagactaacacaaacttaatgattaaaagtgattgagtctcatagtctttcatttgctagctgtgatccaaattttattagaacataagtcacttgttattgccatttttaaaagagaaaattcataatgatgttatggcaaacagataagactgataaacttcgtattgtatagctttgaaaataattatgcctagtatggagaaacaggaataagatctgattttcttagagttaatatattttagtagattggttttccttttttttattttgtacatagttaactgtgtatctataaataaagcatcctatatgagtttttaataataaaaaaag

SEQ ID NO: 369852 - DNA, 346 bp, Homo sapiens
ttagaaatgcagacttttagggcctaaccaagacctactgaattatagtctccattttaacaagatccttacgtaattcacatgcacttgaaagttaagaactaatataaatcactaaatataaacaattattattatttctttttccagatctctgaccttacttataagagagattctgtctggctctgtgttccttccttctttggatttcctagctgatccagtaagacttaagatttttttttaaattgttacaaattacacttaatataacatttagtatcttaaacatttttatgtatatagtcagtgatactgaaaacattcatattgttgtgcaacc

SEQ ID NO: 369853 - DNA, 914 bp, Homo sapiens
  misc_feature (836)..(836): n is a, c, g, or t
  misc_feature (843)..(843): n is a, c, g, or t
aatgttatgtatcataaacttcaacgcccaagtagaaacaaatgcagtagactgtcaacgactctcttaatttaccccgctacagttggacacgagcctgaacattggtctgtctatagaagatatcttgaattctatgtacttgaatcaaaactaacagaatttcatggtgcatttcctgatgcccagcttccttctaagaggatcattggccccaaaaattatgaattcttaaagtcaaagagggaagagttccaagaatatctacagaaacttctgcagcatccagaactgagtaatagtcaacttctggcagactttctttcccctaatggtggggaaacacaatttcttgataagatactaccagatgtaaatcttgggaaaattataaaatctgttcctggaaaactaatgaaagagaaaggtcagcatttggaaccttttatcatgaatttcattaattcttgtgagtctccaaagcctaaaccaagtagaccagaactgaccattctcagccctacttcagaaaacaacaagaagcttttcaatgatctgtttaaaaataatgcaaaccgtgctgaaaatacagagagaaagcaaaatcagaattattttatggaggtgatgactgtagaaggagtctatgattacctgatgtatgtaggacgggtagttttccaggttcctgactggcttcatcatctcttaatgggaactcgaatcctctttaaaaacaccctggaaatgtatactgattactatcttcagtgtaaactagaacagctatttcaggagcaccgtttggtctcactcataacacttctcagaggacntctcaanatgctttttctgggaaacactgacctcttttccaaaaacgcaaggggcaaacaactttgagaatgggattc

SEQ ID NO: 369854 - DNA, 3723 bp, Homo sapiens
attgaaactatagtactgtacctacaccatggggtgaatgcatgaaggtcaaatgaaagtgcttagtgtctgtaccgcctaagtaaattttcgcgataatagtcttcctgcatctctcactgtagcggacaatacagaaaaaaaaatttagaaatgtgatgaattagtaaagggaaaaccccatgagactctataagagggattttacctaatctgccaacctgcctcttccaagcactcggattttggttgggctcccggagccggcgtgaattgagctctacccttgcccgtgagcgcgcaaaagagattttgttggtggggtggcggcctgatgagttgtagtctttattctagggctgttttactcgccacccccccacgggctccacgagctccggttgcccctcaggcagcgcccggcggctacgggggtgctgtagtttcttccgggctccctacaaccttcttccctctcctccgcaatacaggcagttactgggtgctggggctgtcctttgatttccggaaatggccggtcgccagtgttgtcagagtttccacggaagactgcgcgctactccggccaggagggcggagcggcgagacgctagaggctttgcgctgggtgacgacttcgggcacgttctacggccgttcctctggtcggctggggaccgcggccgcgcacgcgcggcggggggcgtggggctgggcccagccggacgcgacctcagcctgcggcggctaactgccggtaggcgtctgtgtgcgccgccaagtcggtggggcggggacgcgaggtgtggatggggggtcgccttgacctctgcctcagccagtagcgcagtctcggcctcgccgttacggagatggtgccctgggtgcggacgatggggcagaagctgaagcagcggctgcgactggacgtgggacgcgagatctgccgccagtacccgctgttctgcttcctgctgctctgtctcagcgccgcctccctgcttcttaacaggtatattcatattttaatgatcttctggtcatttgttgctggagttgtcacattctactgctcactaggacctgattctctcttaccaaatatattcttcacaataaaatacaaacccaagcagttaggacttcaggaattatttcctcaaggtcatagctgtgctgtttgtggtaaagtgaaatgtaaacgacataggccttctttgctacttgaaaactaccagccatggctagacctgaaaatttcttccaaggttgatgcatctctctcagaggtggatattccatctattataaccaagaaactattaaaagcagcaatgaagcatatagaagtgatagttaaagccagacagaaagtaaaaaatacagagtttttacagcaagctgctttagaagaatatggtccagagcttcatgttgctttgagaagtcgaagagatgaattgcactatttaaggaaacttactgaactgctttttccttatattttgcctcctaaagcaacagactgcagatctctgaccttacttataagagagattctgtctggctctgtgttccttccttctttggatttcctagctgatccagatactgtgaatcatttgcttatcatcttcatagatgacagtccacctgaaaaagcaactgaaccggcttctcctttggttccattcttgcagaaatttgcagaacctagaaataaaaagccatctgtgctgaagttagaattgaagcaaatcagagagcaacaagatcttttatttcgttttatgaactttctgaaacaagaaggcgcagtgcacgtgttgcagttttgtttgactgtggaggaatttaatgatagaattttacgaccagaattatcaaatgatgaaatgctgtctcttcatgaagaattgcagaagatttataaaacatactgtttggatgaaagtattgacaaaattagatttgatcccttcattgtagaagagattcaaagaattgctgaaggcccatacatagatgttgtgaaacttcaaactatgagatgtctttttgaagcatatgaacatgttctttcccttttggagaatgtatttactcctatgttctgccatagtgatgagtatttcagacaacttttaagaggtgcagaatcaccaacacgcaattcaaaattgaacaggaacacacagaaaaggggagaatcatttggaatcagcagaataggtagcaaaattaaaggagtattcaaaagtaccacaatggagggagctatgttgcctaattatggtgtagctgaaggtgaagatgattttattgaagaaggtattgttgtaatggaagatgattctccagtggaggctgtgagcacacctaatactccccgaaaccttgctgcatggaaaattagcattccatatgtagacttttttgaggatccctcctctgaaaggaaggagaaaaaagaaagaattcctgtgttttgtattgatgttgaaagaaatgatagaagagcagttggacacgagcctgaacattggtctgtctatagaagatatcttgaattctatgtacttgaatcaaaactaacagaatttcatggtgcatttcctgatgcccagcttccttctaagaggatcattggccccaaaaattatgaattcttaaagtcaaagagggaagagttccaagaatatctacagaaacttctgcagcatccagaactgagtaatagtcaacttctggcagactttctttcccctaatggtggggaaacacaatttcttgataagatactaccagatgtaaatcttgggaaaattataaaatctgttcctggaaaactaatgaaagagaaaggtcagcatttggaaccttttatcatgaatttcattaattcttgtgagtctccaaagcctaaaccaagtagaccagaactgaccattctcagccctacttcagaaaacaacaagaagcttttcaatgatctgtttaaaaataatgcaaaccgtgctgaaaatacagagagaaagcaaaatcagaattattttatggaggtgatgactgtagaaggagtctatgattacctgatgtatgtaggacgggtagttttccaggttcctgactggcttcatcatctcttaatgggaactcgaatcctctttaaaaacaccctggaaatgtatactgattactatcttcagtgtaaactagaacagctatttcaggagcaccgtttggtctcactcataacacttctcagagatgctatattctgtgaaaacactgaacctcgctctctccaagataagcaaaaaggagcaaaacagacttttgaagaaatgatgaattacattccagatctgttagtcaagtgtattggtgaagaaaccaagtatgaaagcatcagacttctgtttgatggcttacagcaaccagtactcaacaagcagctgacttatgttttattggacattgtgatacaggaactgtttccagagctcaataaggtacaaaaggaagttacctctgtgacatcttggatgtaaacacttggatttggtatagaataacccattgaaatttctgctgtgcgagggtggtagaaatttacttttttgggtatattcttatatatattatgtacatcgctgtctgaaattttagttattttttgtttttaataaagactaacacaaacttaatgattaaaagtga

SEQ ID NO: 369855 - DNA, 3997 bp, Homo sapiens
attgaaactatagtactgtacctacaccatggggtgaatgcatgaaggtcaaatgaaagtgcttagtgtctgtaccgcctaagtaaattttcgcgataatagtcttcctgcatctctcactgtagcggacaatacagaaaaaaaaatttagaaatgtgatgaattagtaaagggaaaaccccatgagactctataagagggattttacctaatctgccaacctgcctcttccaagcactcggattttggttgggctcccggagccggcgtgaattgagctctacccttgcccgtgagcgcgcaaaagagattttgttggtggggtggcggcctgatgagttgtagtctttattctagggctgttttactcgccacccccccagcccccaacacaccccttttaaaataccgactcaaaggcgtcctcctatccccctctcccttaggcgtcacgcaaagctcggacctgctcccacccggagccgagtgtacggtgaggcgcggagcgttgcggggtcggggaagcgctaccacccgctccatccctctgcgggttcgtgtcacgaagactacagttcccagcgggctccacgagctccggttgcccctcaggcagcgcccggcggctacgggggtgctgtagtttcttccgggctccctacaaccttcttccctctcctccgcaatacaggcagttactgggtgctggggctgtcctttgatttccggaaatggccggtcgccagtgttgtcagagtttccacggaagactgcgcgctactccggccaggagggcggagcggcgagacgctagaggctttgcgctgggtgacgacttcgggcacgttctacggccgttcctctggtcggctggggaccgcggccgcgcacgcgcggcggggggcgtggggctgggcccagccggacgcgacctcagcctgcggcggctaactgccggtaggcgtctgtgtgcgccgccaagtcggtggggcggggacgcgaggtgtggatggggggtcgccttgacctctgcctcagccagtagcgcagtctcggcctcgccgttacggagatggtgccctgggtgcggacgatggggcagaagctgaagcagcggctgcgactggacgtgggacgcgagatctgccgccagtacccgctgttctgcttcctgctgctctgtctcagcgccgcctccctgcttcttaacaggtatattcatattttaatgatcttctggtcatttgttgctggagttgtcacattctactgctcactaggacctgattctctcttaccaaatatattcttcacaataaaatacaaacccaagcagttaggacttcaggaattatttcctcaaggtcatagctgtgctgtttgtggtaaagtgaaatgtaaacgacataggccttctttgctacttgaaaactaccagccatggctagacctgaaaatttcttccaaggttgatgcatctctctcagaggttcttgaattagtgttggaaaactttgtttatccgtggtacagggatgtgacagatgatgaatcctttgttgatgaactgagaataacattacgtttttttgcatctgtcttaataagaaggattcacaagtaaaaaatacagagtttttacagcaagctgctttagaagaatatggtccagagcttcatgttgctttgagaagtcgaagagatgaattgcactatttaaggaaacttactgaactgctttttccttatattttgcctcctaaagcaacagactgcagatctctgaccttacttataagagagattctgtctggctctgtgttccttccttctttggatttcctagctgatccagatactgtgaatcatttgcttatcatcttcatagatgacagtccacctgaaaaagcaactgaaccggcttctcctttggttccattcttgcagaaatttgcagaacctagaaataaaaagccatctgtgctgaagttagaattgaagcaaatcagagagcaacaagatcttttatttcgttttatgaactttctgaaacaagaaggcgcagtgcacgtgttgcagttttgtttgactgtggaggaatttaatgatagaattttacgaccagaattatcaaatgatgaaatgctgtctcttcatgaagaattgcagaagatttataaaacatactgtttggatgaaagtattgacaaaattagatttgatcccttcattgtagaagagattcaaagaattgctgaaggcccatacatagatgttgtgaaacttcaaactatgagatgtctttttgaagcatatgaacatgttctttcccttttggagaatgtatttactcctatgttctgccatagtgatgagtatttcagacaacttttaagaggtgcagaatcaccaacacgcaattcaaaattgaacagaggtagcctaagtttggatgattttcggaacacacagaaaaggggagaatcatttggaatcagcagaataggtagcaaaattaaaggagtattcaaaagtaccacaatggagggagctatgttgcctaattatggtgtagctgaaggtgaagatgattttattgaagaaggtattgttgtaatggaagatgattctccagtggaggctgtgagcacacctaatactccccgaaaccttgctgcatggaaaattagcattccatatgtagacttttttgaggatccctcctctgaaaggaaggagaaaaaagaaagaattcctgtgttttgtattgatgttgaaagaaatgatagaagagcagttggacacgagcctgaacattggtctgtctatagaagatatcttgaattctatgtacttgaatcaaaactaacagaatttcatggtgcatttcctgatgcccagcttccttctaagaggatcattggccccaaaaattatgaattcttaaagtcaaagagggaagagttccaagaatatctacagaaacttctgcagcatccagaactgagtaatagtcaacttctggcagactttctttcccctaatggtggggaaacacaatttcttgataagatactaccagatgtaaatcttgggaaaattataaaatctgttcctggaaaactaatgaaagagaaaggtcagcatttggaaccttttatcatgaatttcattaattcttgtgagtctccaaagcctaaaccaagtagaccagaactgaccattctcagccctacttcagaaaacaacaagaagcttttcaatgatctgtttaaaaataatgcaaaccgtgctgaaaatacagagagaaagcaaaatcagaattattttatggaggtgatgactgtagaaggagtctatgattacctgatgtatgtaggacgggtagttttccaggttcctgactggcttcatcatctcttaatgggaactcgaatcctctttaaaaacaccctggaaatgtatactgattactatcttcagtgtaaactagaacagctatttcaggagcaccgtttggtctcactcataacacttctcagagatgctatattctgtgaaaacactgaacctcgctctctccaagataagcaaaaaggagcaaaacagacttttgaagaaatgatgaattacattccagatctgttagtcaagtgtattggtgaagaaaccaagtatgaaagcatcagacttctgtttgatggcttacagcaaccagtactcaacaagcagctgacttatgttttattggacattgtgatacaggaactgtttccagagctcaataaggtacaaaaggaagttacctctgtgacatcttggatgtaaacacttggatttggtatagaataacccattgaaatttctgctgtgcgagggtggtagaaatttacttttttgggtatattcttatatatattatgtacatcgctgtctgaaattttagttattttttgtttttaataaagactaacacaaacttaatgattaaaagtga

SEQ ID NO: 369856 - DNA, 3792 bp, Homo sapiens
attgaaactatagtactgtacctacaccatggggtgaatgcatgaaggtcaaatgaaagtgcttagtgtctgtaccgcctaagtaaattttcgcgataatagtcttcctgcatctctcactgtagcggacaatacagaaaaaaaaatttagaaatgtgatgaattagtaaagggaaaaccccatgagactctataagagggattttacctaatctgccaacctgcctcttccaagcactcggattttggttgggctcccggagccggcgtgaattgagctctacccttgcccgtgagcgcgcaaaagagattttgttggtggggtggcggcctgatgagttgtagtctttattctagggctgttttactcgccacccccccagcccccaacacaccccttttaaaataccgactcaaaggcgtcctcctatccccctctcccttaggcgtcacgcaaagctcggacctgctcccacccggagccgagtgtacggtgaggcgcggagcgttgcggggtcggggaagcgctaccacccgctccatccctctgcgggttcgtgtcacgaagactacagttcccagcgggctccacgagctccggttgcccctcaggcagcgcccggcggctacgggggtgctgtagtttcttccgggctccctacaaccttcttccctctcctccgcaatacaggcagttactgggtgctggggctgtcctttgatttccggaaatggccggtcgccagtgttgtcagagtttccacggaagactgcgcgctactccggccaggagggcggagcggcgagacgctagaggctttgcgctgggtgacgacttcgggcacgttctacggccgttcctctggtcggctggggaccgcggccgcgcacgcgcggcggggggcgtggggctgggcccagccggacgcgacctcagcctgcggcggctaactgccggtaggcgtctgtgtgcgccgccaagtcggtggggcggggacgcgaggtgtggatggggggtcgccttgacctctgcctcagccagtagcgcagtctcggcctcgccgttacggagatggtgccctgggtgcggacgatggggcagaagctgaagcagcggctgcgactggacgtgggacgcgagatctgccgccagtacccgctgttctgcttcctgctgctctgtctcagcgccgcctccctgcttcttaacaggtatattcatattttaatgatcttctggtcatttgttgctggagttgtcacattctactgctcactaggacctgattctctcttaccaaatatattcttcacaataaaatacaaacccaagcagttaggacttcaggaattatttcctcaaggtcatagctgtgctgtttgtggtaaagtgaaatgtaaacgacataggccttctttgctacttgaaaactaccagccatggctagacctgaaaatttcttccaaggttgatgcatctctctcagaggtggatattccatctattataaccaagaaactattaaaagcagcaatgaagcatatagaagtgatagttaaagccagacagaaagtaaaaaatacagagtttttacagcaagctgctttagaagaatatggtccagagcttcatgttgctttgagaagtcgaagagatgaattgcactatttaaggaaacttactgaactgctttttccttatattttgcctcctaaagcaacagactgcagatctctgaccttacttataagagagattctgtctggctctgtgttccttccttctttggatttcctagctgatccagatactgtgaatcatttgcttatcatcttcatagatgacagtccacctgaaaaagcaactgaaccggcttctcctttggttccattcttgcagaaatttgcagaacctagaaataaaaagccatctgtgctgaagttagaattgaagcaaatcagagagcaacaagatcttttatttcgttttatgaactttctgaaacaagaaggcgcagtgcacgtgttgcagttttgtttgactgtggaggaatttaatgatagaattttacgaccagaattatcaaatgatgaaatgctgtctcttcatgaagaattgcagaagatttataaaacatactgtttggatgaaagtattgacaaaattagatttgatcccttcattgtagaagagattcaaagaattgctgaaggcccatacatagatgttgtgaaacttcaaactatgagatgtctttttgaagcatatgaacatgttctttcccttttggagaatgtatttactcctatgttctgccatagtgatgagtatttcagacaacttttaagaggtgcagaatcaccaacacgcaattcaaaattgaacaggaacacacagaaaaggggagaatcatttggaatcagcagaataggtagcaaaattaaaggagtattcaaaagtaccacaatggagggagctatgttgcctaattatggtgtagctgaaggtgaagatgattttattgaagaaggtattgttgtaatggaagatgattctccagtggaggctgtgagcacacctaatactccccgaaaccttgctgcatggaaaattagcattccatatgtagacttttttgaggatccctcctctgaaaggaaggagaaaaaagaaagaattcctgtgttttgtattgatgttgaaagaaatgatagaagagcagttggacacgagcctgaacattggtctgtctatagaagatatcttgaattctatgtacttgaatcaaaactaacagaatttcatggtgcatttcctgatgcccagcttccttctaagaggatcattggccccaaaaattatgaattcttaaagtcaaagagggaagagttccaagaatatctacagaaacttctgcagcatccagaactgagtaatagtcaacttctggcagactttctttcccctaatggtggggaaacacaatttcttgataagatactaccagatgtaaatcttgggaaaattataaaatctgttcctggaaaactaatgaaagagaaaggtcagcatttggaaccttttatcatgaatttcattaattcttgtgagtctccaaagcctaaaccaagtagaccagaactgaccattctcagccctacttcagaaaacaacaagaagcttttcaatgatctgtttaaaaataatgcaaaccgtgctgaaaatacagagagaaagcaaaatcagaattattttatggaggtgatgactgtagaaggagtctatgattacctgatgtatgtaggacgggtagttttccaggttcctgactggcttcatcatctcttaatgggaactcgaatcctctttaaaaacaccctggaaatgtatactgattactatcttcagtgtaaactagaacagctatttcaggagcaccgtttggtctcactcataacacttctcagagatgctatattctgtgaaaacactgaacctcgctctctccaagataagcaaaaaggagcaaaacagacttttgaagaaatgatgaattacattccagatctgttagtcaagtgtattggtgaagaaaccaagtatgaaagcatcagacttctgtttgatggcttacagcaaccagtactcaacaagcagctgacttatgttttattggacattgtgatacaggaactgtttccagagctcaataaggtacaaaaggaagttacctctgtgacatcttggatgtaaacacttggaatagctgctgtaggtgggggttcctctag

SEQ ID NO: 369857 - DNA, 3917 bp, Homo sapiens
attgaaactatagtactgtacctacaccatggggtgaatgcatgaaggtcaaatgaaagtgcttagtgtctgtaccgcctaagtaaattttcgcgataatagtcttcctgcatctctcactgtagcggacaatacagaaaaaaaaatttagaaatgtgatgaattagtaaagggaaaaccccatgagactctataagagggattttacctaatctgccaacctgcctcttccaagcactcggattttggttgggctcccggagccggcgtgaattgagctctacccttgcccgtgagcgcgcaaaagagattttgttggtggggtggcggcctgatgagttgtagtctttattctagggctgttttactcgccacccccccagcccccaacacaccccttttaaaataccgactcaaaggcgtcctcctatccccctctcccttaggcgtcacgcaaagctcggacctgctcccacccggagccgagtgtacggtgaggcgcggagcgttgcggggtcggggaagcgctaccacccgctccatccctctgcgggttcgtgtcacgaagactacagttcccagcgggctccacgagctccggttgcccctcaggcagcgcccggcggctacgggggtgctgtagtttcttccgggctccctacaaccttcttccctctcctccgcaatacaggcagttactgggtgctggggctgtcctttgatttccggaaatggccggtcgccagtgttgtcagagtttccacggaagactgcgcgctactccggccaggagggcggagcggcgagacgctagaggctttgcgctgggtgacgacttcgggcacgttctacggccgttcctctggtcggctggggaccgcggccgcgcacgcgcggcggggggcgtggggctgggcccagccggacgcgacctcagcctgcggcggctaactgccggtaggcgtctgtgtgcgccgccaagtcggtggggcggggacgcgaggtgtggatggggggtcgccttgacctctgcctcagccagtagcgcagtctcggcctcgccgttacggagatggtgccctgggtgcggacgatggggcagaagctgaagcagcggctgcgactggacgtgggacgcgagatctgccgccagtacccgctgttctgcttcctgctgctctgtctcagcgccgcctccctgcttcttaacaggtatattcatattttaatgatcttctggtcatttgttgctggagttgtcacattctactgctcactaggacctgattctctcttaccaaatatattcttcacaataaaatacaaacccaagcagttaggacttcaggaattatttcctcaaggtcatagctgtgctgtttgtggtaaagtgaaatgtaaacgacataggccttctttgctacttgaaaactaccagccatggctagacctgaaaatttcttccaaggttgatgcatctctctcagaggttcttgaattagtgttggaaaactttgtttatccgtggtacagggatgtgacagatgatgaatcctttgttgatgaactgagaataacattacgtttttttgcatctgtcttaataagaaggattcacaaggtggatattccatctattataaccaagaaactattaaaagcagcaatgaagcatatagaagtgatagttaaagccagacagaaagtaaaaaatacagagtttttacagcaagctgctttagaagaatatggtccagagcttcatgttgctttgagaagtcgaagagatgaattgcactatttaaggaaacttactgaactgctttttccttatattttgcctcctaaagcaacagactgcagatctctgaccttacttataagagagattctgtctggctctgtgttccttccttctttggatttcctagctgatccagatactgtgaatcatttgcttatcatcttcatagatgacagtccacctgaaaaagcaactgaaccggcttctcctttggttccattcttgcagaaatttgcagaacctagaaataaaaagccatctgtgctgaagttagaattgaagcaaatcagagagcaacaagatcttttatttcgttttatgaactttctgaaacaagaaggcgcagtgcacgtgttgcagttttgtttgactgtggaggaatttaatgatagaattttacgaccagaattatcaaatgatgaaatgctgtctcttcatgaagaattgcagaagatttataaaacatactgtttggatgaaagtattgacaaaattagatttgatcccttcattgtagaagagattcaaagaattgctgaaggcccatacatagatgttgtgaaacttcaaactatgagatgtctttttgaagcatatgaacatgttctttcccttttggagaatgtatttactcctatgttctgccatagtgatgagtatttcagacaacttttaagaggtgcagaatcaccaacacgcaattcaaaattgaacagaggtagcctaagtttggatgattttcggaacacacagaaaaggggagaatcatttggaatcagcagaataggtagcaaaattaaaggagtattcaaaagtaccacaatggagggagctatgttgcctaattatggtgtagctgaaggtgaagatgattttattgaagaaggtattgttgtaatggaagatgattctccagtggaggctgtgagcacacctaatactccccgaaaccttgctgcatggaaaattagcattccatatgtagacttttttgaggatccctcctctgaaaggaaggagaaaaaagaaagaattcctgtgttttgtattgatgttgaaagaaatgatagaagagcagttggacacgagcctgaacattggtctgtctatagaagatatcttgaattctatgtacttgaatcaaaactaacagaatttcatggtgcatttcctgatgcccagcttccttctaagaggatcattggccccaaaaattatgaattcttaaagtcaaagagggaagagttccaagaatatctacagaaacttctgcagcatccagaactgagtaatagtcaacttctggcagactttctttcccctaatggtggggaaacacaatttcttgataagatactaccagatgtaaatcttgggaaaattataaaatctgttcctggaaaactaatgaaagagaaaggtcagcatttggaaccttttatcatgaatttcattaattcttgtgagtctccaaagcctaaaccaagtagaccagaactgaccattctcagccctacttcagaaaacaacaagaagcttttcaatgatctgtttaaaaataatgcaaaccgtgctgaaaatacagagagaaagcaaaatcagaattattttatggaggtgatgactgtagaaggagtctatgattacctgatgtatgtagatgctatattctgtgaaaacactgaacctcgctctctccaagataagcaaaaaggagcaaaacagacttttgaagaaatgatgaattacattccagatctgttagtcaagtgtattggtgaagaaaccaagtatgaaagcatcagacttctgtttgatggcttacagcaaccagtactcaacaagcagctgacttatgttttattggacattgtgatacaggaactgtttccagagctcaataaggtacaaaaggaagttacctctgtgacatcttggatgtaaacacttggatttggtatagaataacccattgaaatttctgctgtgcgagggtggtagaaatttacttttttgggtatattcttatatatattatgtacatcgctgtctgaaattttagttattttttgtttttaataaagactaacacaaacttaatgattaaaagtga

SEQ ID NO: 369858 - DNA, 4745 bp, Homo sapiens
attgaaactatagtactgtacctacaccatggggtgaatgcatgaaggtcaaatgaaagtgcttagtgtctgtaccgcctaagtaaattttcgcgataatagtcttcctgcatctctcactgtagcggacaatacagaaaaaaaaatttagaaatgtgatgaattagtaaagggaaaaccccatgagactctataagagggattttacctaatctgccaacctgcctcttccaagcactcggattttggttgggctcccggagccggcgtgaattgagctctacccttgcccgtgagcgcgcaaaagagattttgttggtggggtggcggcctgatgagttgtagtctttattctagggctgttttactcgccacccccccagcccccaacacaccccttttaaaataccgactcaaaggcgtcctcctatccccctctcccttaggcgtcacgcaaagctcggacctgctcccacccggagccgagtgtacggtgaggcgcggagcgttgcggggtcggggaagcgctaccacccgctccatccctctgcgggttcgtgtcacgaagactacagttcccagcgggctccacgagctccggttgcccctcaggcagcgcccggcggctacgggggtgctgtagtttcttccgggctccctacaaccttcttccctctcctccgcaatacaggcagttactgggtgctggggctgtcctttgatttccggaaatggccggtcgccagtgttgtcagagtttccacggaagactgcgcgctactccggccaggagggcggagcggcgagacgctagaggctttgcgctgggtgacgacttcgggcacgttctacggccgttcctctggtcggctggggaccgcggccgcgcacgcgcggcggggggcgtggggctgggcccagccggacgcgacctcagcctgcggcggctaactgccggtaggcgtctgtgtgcgccgccaagtcggtggggcggggacgcgaggtgtggatggggggtcgccttgacctctgcctcagccagtagcgcagtctcggcctcgccgttacggagatggtgccctgggtgcggacgatggggcagaagctgaagcagcggctgcgactggacgtgggacgcgagatctgccgccagtacccgctgttctgcttcctgctgctctgtctcagcgccgcctccctgcttcttaacaggtatattcatattttaatgatcttctggtcatttgttgctggagttgtcacattctactgctcactaggacctgattctctcttaccaaatatattcttcacaataaaatacaaacccaagcagttaggacttcaggaattatttcctcaaggtcatagctgtgctgtttgtggtaaagtgaaatgtaaacgacataggccttctttgctacttgaaaactaccagccatggctagacctgaaaatttcttccaaggttgatgcatctctctcagaggttcttgaattagtgttggaaaactttgtttatccgtggtacagggatgtgacagatgatgaatcctttgttgatgaactgagaataacattacgtttttttgcatctgtcttaataagaaggattcacaaggtggatattccatctattataaccaagaaactattaaaagcagcaatgaagcatatagaagtgatagttaaagccagacagaaagtaaaaaatacagagtttttacagcaagctgctttagaagaatatggtccagagcttcatgttgctttgagaagtcgaagagatgaattgcactatttaaggaaacttactgaactgctttttccttatattttgcctcctaaagcaacagactgcagatctctgaccttacttataagagagattctgtctggctctgtgttccttccttctttggatttcctagctgatccagatactgtgaatcatttgcttatcatcttcatagatgacagtccacctgaaaaagcaactgaaccggcttctcctttggttccattcttgcagaaatttgcagaacctagaaataaaaagccatctgtgctgaagttagaattgaagcaaatcagagagcaacaagatcttttatttcgttttatgaactttctgaaacaagaaggcgcagtgcacgtgttgcagttttgtttgactgtggaggaatttaatgatagaattttacgaccagaattatcaaatgatgaaatgctgtctcttcatgaagaattgcagaagatttataaaacatactgtttggatgaaagtattgacaaaattagatttgatcccttcattgtagaagagattcaaagaattgctgaaggcccatacatagatgttgtgaaacttcaaactatgagatgtctttttgaagcatatgaacatgttctttcccttttggagaatgtatttactcctatgttctgccatagtgatgagtatttcagacaacttttaagaggtgcagaatcaccaacacgcaattcaaaattgaacagaggtagcctaagtttggatgattttcggaacacacagaaaaggggagaatcatttggaatcagcagaataggtagcaaaattaaaggagtattcaaaagtaccacaatggagggagctatgttgcctaattatggtgtagctgaaggtgaagatgattttattgaagaaggtattgttgtaatggaagatgattctccagtggaggctgtgagcacacctaatactccccgaaaccttgctgcatggaaaattagcattccatatgtagacttttttgaggatccctcctctgaaaggaaggagaaaaaagaaagaattcctgtgttttgtattgatgttgaaagaaatgatagaagagcagttggacacgagcctgaacattggtctgtctatagaagatatcttgaattctatgtacttgaatcaaaactaacagaatttcatggtgcatttcctgatgcccagcttccttctaagaggatcattggccccaaaaattatgaattcttaaagtcaaagagggaagagttccaagaatatctacagaaacttctgcagcatccagaactgagtaatagtcaacttctggcagactttctttcccctaatggtggggaaacacaatttcttgataagatactaccagatgtaaatcttgggaaaattataaaatctgttcctggaaaactaatgaaagagaaaggtcagcatttggaaccttttatcatgaatttcattaattcttgtgagtctccaaagcctaaaccaagtagaccagaactgaccattctcagccctacttcagaaaacaacaagaagcttttcaatgatctgtttaaaaataatgcaaaccgtgctgaaaatacagagagaaagcaaaatcagaattattttatggaggtgatgactgtagaaggagtctatgattacctgatgtatgtaggacgggtagttttccaggttcctgactggcttcatcatctcttaatgggaactcgaatcctctttaaaaacaccctggaaatgtatactgattactatcttcagtgtaaactagaacagctatttcaggagcaccgtttggtctcactcataacacttctcagagatgctatattctgtgaaaacactgaacctcgctctctccaagataagcaaaaaggagcaaaacagacttttgaagaaatgatgaattacattccaggtgtaatatttaagaagtaacttaatttcatatagattagcagtccgttgaggtcacaatgtatagtaattattgaagctaattttttactgtgagttttcattttacaaatagttgcaaagatcagttaaaattaacacactagttaaataattctttcagatgttagcactaagactaagatattaggactttaaggcaaggctgtttctactcacataatagccagattcattcaaaaataacttatagtcagactggtcaaagtgacatgtgggacaattgaaggcctgtgtccacgacaccataagaatagctcactagtgtgtatgataaaagatcagaattcattcattccaaatttattgagcaccttccatattccaggcactatgcaaaatgcaaggcatataaaaaatgcacttgagtaggtcagtctagcaggaagacaggcatatagacaaaacatacatgtgataatagaggcattttcaagttacagagatatcacaaaggaggaggatggtcacctcctctgtaaagttggtaggtttgggccactaaggaaatgagtggtagtaacctcttaactgtgacgggaaataacaaggaagaaatgtcaagggatcaaagcaggtgattcttagtttagaacattttgaatgagaagtgcctataaattactcaggaggaagtgtctgttaaacacttagacaccgaggttcaaaagttggagaaaaggtggtataggatagattagtagagatatgggagccatgtgtgagtagatactaaagcatagggagaaagtatggagtaagaagagaaaagggtgacttccagtttctggtctggcacataagaacctggccatcatcactccatcctagtaacaagcaaaaacctgaatgaactaaaaaaactaaacaactcttagattcaccagagagtgaggtcatacggcaagccactgccccccaaggttggagagaatcatagctagctgcagcagaaacccgt

SEQ ID NO: 369859 - DNA, 3711 bp, Homo sapiens
  misc_feature (3633)..(3633): n is a, c, g, or t
  misc_feature (3640)..(3640): n is a, c, g, or t
attgaaactatagtactgtacctacaccatggggtgaatgcatgaaggtcaaatgaaagtgcttagtgtctgtaccgcctaagtaaattttcgcgataatagtcttcctgcatctctcactgtagcggacaatacagaaaaaaaaatttagaaatgtgatgaattagtaaagggaaaaccccatgagactctataagagggattttacctaatctgccaacctgcctcttccaagcactcggattttggttgggctcccggagccggcgtgaattgagctctacccttgcccgtgagcgcgcaaaagagattttgttggtggggtggcggcctgatgagttgtagtctttattctagggctgttttactcgccacccccccagcccccaacacaccccttttaaaataccgactcaaaggcgtcctcctatccccctctcccttaggcgtcacgcaaagctcggacctgctcccacccggagccgagtgtacggtgaggcgcggagcgttgcggggtcggggaagcgctaccacccgctccatccctctgcgggttcgtgtcacgaagactacagttcccagcgggctccacgagctccggttgcccctcaggcagcgcccggcggctacgggggtgctgtagtttcttccgggctccctacaaccttcttccctctcctccgcaatacaggcagttactgggtgctggggctgtcctttgatttccggaaatggccggtcgccagtgttgtcagagtttccacggaagactgcgcgctactccggccaggagggcggagcggcgagacgctagaggctttgcgctgggtgacgacttcgggcacgttctacggccgttcctctggtcggctggggaccgcggccgcgcacgcgcggcggggggcgtggggctgggcccagccggacgcgacctcagcctgcggcggctaactgccggtaggcgtctgtgtgcgccgccaagtcggtggggcggggacgcgaggtgtggatggggggtcgccttgacctctgcctcagccagtagcgcagtctcggcctcgccgttacggagatggtgccctgggtgcggacgatggggcagaagctgaagcagcggctgcgactggacgtgggacgcgagatctgccgccagtacccgctgttctgcttcctgctgctctgtctcagcgccgcctccctgcttcttaacaggtatattcatattttaatgatcttctggtcatttgttgctggagttgtcacattctactgctcactaggacctgattctctcttaccaaatatattcttcacaataaaatacaaacccaagcagttaggacttcaggaattatttcctcaaggtcatagctgtgctgtttgtggtaaagtgaaatgtaaacgacataggccttctttgctacttgaaaactaccagccatggctagacctgaaaatttcttccaaggttgatgcatctctctcagaggttcttgaattagtgttggaaaactttgtttatccgtggtacagggatgtgacagatgatgaatcctttgttgatgaactgagaataacattacgtttttttgcatctgtcttaataagaaggattcacaaggtggatattccatctattataaccaagaaactattaaaagcagcaatgaagcatatagaagtgatagttaaagccagacagaaagtaaaaaatacagagtttttacagcaagctgctttagaagaatatggtccagagcttcatgttgctttgagaagtcgaagagatgaattgcactatttaaggaaacttactgaactgctttttccttatattttgcctcctaaagcaacagactgcagatctctgaccttacttataagagagattctgtctggctctgtgttccttccttctttggatttcctagctgatccagatactgtgaatcatttgcttatcatcttcatagatgacagtccacctgaaaaagcaactgaaccggcttctcctttggttccattcttgcagaaatttgcagaacctagaaataaaaagccatctgtgctgaagttagaattgaagcaaatcagagagcaacaagatcttttatttcgttttatgaactttctgaaacaagaaggcgcagtgcacgtgttgcagttttgtttgactgtggaggaatttaatgatagaattttacgaccagaattatcaaatgatgaaatgctgtctcttcatgaagaattgcagaagatttataaaacatactgtttggatgaaagtattgacaaaattagatttgatcccttcattgtagaagagattcaaagaattgctgaaggcccatacatagatgttgtgaaacttcaaactatgagatgtctttttgaagcatatgaacatgttctttcccttttggagaatgtatttactcctatgttctgccatagtgatgagtatttcagacaacttttaagaggtgcagaatcaccaacacgcaattcaaaattgaacagaggtagcctaagtttggatgattttcggaacacacagaaaaggggagaatcatttggaatcagcagaataggtagcaaaattaaaggagtattcaaaagtaccacaatggagggagctatgttgcctaattatggtgtagctgaaggtgaagatgattttattgaagaaggtattgttgtaatggaagatgattctccagtggaggctgtgagcacacctaatactccccgaaaccttgctgcatggaaaattagcattccatatgtagacttttttgaggatccctcctctgaaaggaaggagaaaaaagaaagaattcctgtgttttgtattgatgttgaaagaaatgatagaagagcagttggacacgagcctgaacattggtctgtctatagaagatatcttgaattctatgtacttgaatcaaaactaacagaatttcatggtgcatttcctgatgcccagcttccttctaagaggatcattggccccaaaaattatgaattcttaaagtcaaagagggaagagttccaagaatatctacagaaacttctgcagcatccagaactgagtaatagtcaacttctggcagactttctttcccctaatggtggggaaacacaatttcttgataagatactaccagatgtaaatcttgggaaaattataaaatctgttcctggaaaactaatgaaagagaaaggtcagcatttggaaccttttatcatgaatttcattaattcttgtgagtctccaaagcctaaaccaagtagaccagaactgaccattctcagccctacttcagaaaacaacaagaagcttttcaatgatctgtttaaaaataatgcaaaccgtgctgaaaatacagagagaaagcaaaatcagaattattttatggaggtgatgactgtagaaggagtctatgattacctgatgtatgtaggacgggtagttttccaggttcctgactggcttcatcatctcttaatgggaactcgaatcctctttaaaaacaccctggaaatgtatactgattactatcttcagtgtaaactagaacagctatttcaggagcaccgtttggtctcactcataacacttctcagaggacntctcaanatgctttttctgggaaacactgacctcttttccaaaaacgcaaggggcaaacaactttgagaatgggattc

SEQ ID NO: 369860 - DNA, 3529 bp, Homo sapiens
attgaaactatagtactgtacctacaccatggggtgaatgcatgaaggtcaaatgaaagtgcttagtgtctgtaccgcctaagtaaattttcgcgataatagtcttcctgcatctctcactgtagcggacaatacagaaaaaaaaatttagaaatgtgatgaattagtaaagggaaaaccccatgagactctataagagggattttacctaatctgccaacctgcctcttccaagcactcggattttggttgggctcccggagccggcgtgaattgagctctacccttgcccgtgagcgcgcaaaagagattttgttggtggggtggcggcctgatgagttgtagtctttattctagggctgttttactcgccacccccccagcccccaacacaccccttttaaaataccgactcaaaggcgtcctcctatccccctctcccttaggcgtcacgcaaagctcggacctgctcccacccggagccgagtgtacggtgaggcgcggagcgttgcggggtcggggaagcgctaccacccgctccatccctctgcgggttcgtgtcacgaagactacagttcccagcgggctccacgagctccggttgcccctcaggcagcgcccggcggctacgggggtgctgtagtttcttccgggctccctacaaccttcttccctctcctccgcaatacaggcagttactgggtgctggggctgtcctttgatttccggaaatggccggtcgccagtgttgtcagagtttccacggaagactgcgcgctactccggccaggagggcggagcggcgagacgctagaggctttgcgctgggtgacgacttcgggcacgttctacggccgttcctctggtcggctggggaccgcggccgcgcacgcgcggcggggggcgtggggctgggcccagccggacgcgacctcagcctgcggcggctaactgccggtaggcgtctgtgtgcgccgccaagtcggtggggcggggacgcgaggtgtggatggggggtcgccttgacctctgcctcagccagtagcgcagtctcggcctcgccgttacggagatggtgccctgggtgcggacgatggggcagaagctgaagcagcggctgcgactggacgtgggacgcgagatctgccgccagtacccgctgttctgcttcctgctgctctgtctcagcgccgcctccctgcttcttaacaggtatattcatattttaatgatcttctggtcatttgttgctggagttgtcacattctactgctcactaggacctgattctctcttaccaaatatattcttcacaataaaatacaaacccaagcagttaggacttcaggaattatttcctcaaggtcatagctgtgctgtttgtggtaaagtgaaatgtaaacgacataggccttctttgctacttgaaaactaccagccatggctagacctgaaaatttcttccaaggttgatgcatctctctcagaggttcttgaattagtgttggaaaactttgtttatccgtggtacagggatgtgacagatgatgaatcctttgttgatgaactgagaataacattacgtttttttgcatctgtcttaataagaaggattcacaaggtggatattccatctattataaccaagaaactattaaaagcagcaatgaagcatatagaagtgatagttaaagccagacagaaagtaaaaaatacagagtttttacagcaagctgctttagaagaatatggtccagagcttcatgttgctttgagaagtcgaagagatgaattgcactatttaaggaaacttactgaactgctttttccttatattttgcctcctaaagcaacagactgcagatctctgaccttacttataagagagattctgtctggctctgtgttccttccttctttggatttcctagctgatccagatactgtgaatcatttgcttatcatcttcatagatgacagtccacctgaaaaagcaactgaaccggcttctcctttggttccattcttgcagaaatttgcagaacctagaaataaaaagccatctgtgctgaagttagaattgaagcaaatcagagagcaacaagatcttttatttcgttttatgaactttctgaaacaagaaggcgcagtgcacgtgttgcagttttgtttgactgtggaggaatttaatgatagaattttacgaccagaattatcaaatgatgaaatgctgtctcttcatgaagaattgcagaagatttataaaacatactgtttggatgaaagtattgacaaaattagatttgatcccttcattgtagaagagattcaaagaattgctgaaggcccatacatagatgttgtgaaacttcaaactatgagatgtctttttgaagcatatgaacatgttctttcccttttggagaatgtatttactcctatgttctgccatagtgatgagtatttcagacaacttttaagaggtgcagaatcaccaacacgcaattcaaaattgaacagaggtagcctaagtttggatgattttcggaacacacagaaaaggggagaatcatttggaatcagcagaataggtagcaaaattaaaggagtattcaaaagtaccacaatggagggagctatgttgcctaattatggtgtagctgaaggtgaagatgattttattgaagaaggtattgttgtaatggaagatgattctccagtggaggctgtgagcacacctaatactccccgaaaccttgctgcatggaaaattagcattccatatgtagacttttttgaggatccctcctctgaaaggaaggagaaaaaagaaagaattcctgtgttttgtattgatgttgaaagaaatgatagaagagcagttggacacgagcctgaacattggtctgtctatagaagatatcttgaattctatgtacttgaatcaaaactaacagaatttcatggtgcatttcctgatgcccagcttccttctaagaggatcattggccccaaaaattatgaattcttaaagtcaaagagggaagagttccaagaatatctacagaaacttctgcagcatccagaactgagtaatagtcaacttctggcagactttctttcccctaatggtggggaaacacaatttcttgataagatactaccagatgtaaatcttgggaaaattataaaatctgttcctggaaaactaatgaaagagaaaggtcagcatttggaaccttttatcatgaatttcattaattcttgtgagtctccaaagcctaaaccaagtagaccagaactgaccattctcagccctacttcagaaaacaacaagaaggtactgcacattgcattaaagaactattaagttttaagttgccctacttgagattactttttcattgtcgagagaatgaatactttgttaatgaaatggattgagctatacatttcctttatgtggaaatcagttgaacggtatacagagggtattgtgtgtaattacttggttctttgctttaatgtg

SEQ ID NO: 369861 - DNA, 2545 bp, Homo sapiens
attgaaactatagtactgtacctacaccatggggtgaatgcatgaaggtcaaatgaaagtgcttagtgtctgtaccgcctaagtaaattttcgcgataatagtcttcctgcatctctcactgtagcggacaatacagaaaaaaaaatttagaaatgtgatgaattagtaaagggaaaaccccatgagactctataagagggattttacctaatctgccaacctgcctcttccaagcactcggattttggttgggctcccggagccggcgtgaattgagctctacccttgcccgtgagcgcgcaaaagagattttgttggtggggtggcggcctgatgagttgtagtctttattctagggctgttttactcgccacccccccagcccccaacacaccccttttaaaataccgactcaaaggcgtcctcctatccccctctcccttaggcgtcacgcaaagctcggacctgctcccacccggagccgagtgtacggtgaggcgcggagcgttgcggggtcggggaagcgctaccacccgctccatccctctgcgggttcgtgtcacgaagactacagttcccagcgggctccacgagctccggttgcccctcaggcagcgcccggcggctacgggggtgctgtagtttcttccgggctccctacaaccttcttccctctcctccgcaatacaggcagttactgggtgctggggctgtcctttgatttccggaaatggccggtcgccagtgttgtcagagtttccacggaagactgcgcgctactccggccaggagggcggagcggcgagacgctagaggctttgcgctgggtgacgacttcgggcacgttctacggccgttcctctggtcggctggggaccgcggccgcgcacgcgcggcggggggcgtggggctgggcccagccggacgcgacctcagcctgcggcggctaactgccggtaggcgtctgtgtgcgccgccaagtcggtggggcggggacgcgaggtgtggatggggggtcgccttgacctctgcctcagccagtagcgcagtctcggcctcgccgttacggagatggtgccctgggtgcggacgatggggcagaagctgaagcagcggctgcgactggacgtgggacgcgagatctgccgccagtacccgctgttctgcttcctgctgctctgtctcagcgccgcctccctgcttcttaacaggtatattcatattttaatgatcttctggtcatttgttgctggagttgtcacattctactgctcactaggacctgattctctcttaccaaatatattcttcacaataaaatacaaacccaagcagttaggacttcaggaattatttcctcaaggtcatagctgtgctgtttgtggtaaagtgaaatgtaaacgacataggccttctttgctacttgaaaactaccagccatggctagacctgaaaatttcttccaaggttgatgcatctctctcagaggttcttgaattagtgttggaaaactttgtttatccgtggtacagggatgtgacagatgatgaatcctttgttgatgaactgagaataacattacgtttttttgcatctgtcttaataagaaggattcacaaggtggatattccatctattataaccaagaaactattaaaagcagcaatgaagcatatagaagtgatagttaaagccagacagaaagtaaaaaatacagagtttttacagcaagctgctttagaagaatatggtccagagcttcatgttgctttgagaagtcgaagagatgaattgcactatttaaggaaacttactgaactgctttttccttatattttgcctcctaaagcaacagactgcagatctctgaccttacttataagagagattctgtctggctctgtgttccttccttctttggatttcctagctgatccagatactgtgaatcatttgcttatcatcttcatagatgacagtccacctgaaaaagcaactgaaccggcttctcctttggttccattcttgcagaaatttgcagaacctagaaataaaaagccatctgtgctgaagttagaattgaagcaaatcagagagcaacaagatcttttatttcgttttatgaactttctgaaacaagaaggcgcagtgcacgtgttgcagttttgtttgactgtgggtgaggcttacctgtgtattttacgaaagtaatttttaaaccttttaatgtatttgaatattttaaatcagatctgattttttttttgtttgaggcggaatttcactctcgttgcccaggctggagtgcaatggtgtgatcttggctcactgcaacctccgcctcctgggttcaagcgattctcctgcctcagtctcccaagtagctgggattacaggcatgtgccagcaccccagctaattttgtatttttagtagagatggggtttctccatgttggtcaggctggtcttgaattcccgacctcaggtgatccacccacctcggcctcccaaagtgctggggttacaggcgtgagccaccgcg

SEQ ID NO: 369862 - DNA, 3835 bp, Homo sapiens
tttgtagtggctgaaggtctgacatgtttgatcaaggtgggagctgaggctgatcagaactatcagaactacatcttaagggctttgggccagattatgttgtatgtggatggaatgaatggagtaataaaccgcaatgaaaccattcagtggctgtacactctcattgggtcaaagttccgcctggtggtgaagacagccctgaagctgctgctcgtctttgtagagtactcggagtccaacgcacctctcctaattcaggctgtcactgctgttgacacgaaaagaggggtcaaaccttggtcaaatatcatggaaatcctggaggaaaaagatggagttgatacggagctactggtttatgcaatgactttggtgaacaagacgttatcaggactaccagaccaagacaccttctacgacgtcgtggactgcctggaggagctgggcattgctgctgtgtcccagaggcacttgaacaagaaagggactgacctggacttagtggagcaactcaacatttatgaggtggcgctcaggcacgaggatggcgatgagaccacggagccaccccccagtgggtgccgggaccggaggagggccagcgtgtgttccagtggcggaggcgagcaccggggcctggaccgcagaaggagccgcaggcactcggtgcagagcatcaagagcaccctgtcggcccccaccagtccctgctcccagtcagctcccagcttcaagcccaaccaagtgcgagatctgcgtgaaaagtcatcaccgagtggtcttctcacatcatccttcaggcagcaccaagagtcactggcagcagagagagagaggcggcggcaggagagagaagaaaggttgcagagaatagagcgggaagaaagaaacaaattcagccgagattatttagacaaaagagaggagcaaaggcaagcaagagaagaaagatacaaatacttggaacagttggcagctgaggagcacgagaaggagctgagaagccggagtgtgagccggggcagagccgacctctccttggacctgacctcgccagcagccccagcctgcctggctcctctgagccatagcccctcatcttcagactctcaagaggctctcacggtgtctgcctcctccccaggaacccctcaccatccccaagcaagtgccggggatcctgaacccgaatcagaggcagaaccggaagcagaggcaggggcggggcaggttgctgatgaagctggccaggacatagcctctgcccacgagggtgcagagactgaagtggagcaggcactagagcaagagccggaagaaagagcctccctcagtgaaaaagagaggcagaacgagggggtgaacgagagggacaactgctctgcctccagcgtctcgtcctccagcagcacgttggagagggaggagaaggaggacaagctctccagggacaggacaactggtttgtggcccgcaggtgtccaggatgcaggtgtaaatggacagtgtggcgacatcctcaccaacaaacggttcatgcttgacatgctgtatgcccataacaggaagtctccggatgatgaggagaagggggatggggaggctgggaggacccagcaggaggcagaggcggtagccagccttgctaccaggatatccaccctgcaggccaactctcagacccaggatgagagtgtcaggagggtggatgtcggctgtttggacaatcggggcagtgtgaaagcatttgctgagaaattcaacagtggggacctggggagaggttccatctcccctgatgctgagcccaatgacaaggtcccagaaacagcgccggtgcagccgaagacagagtctgattacatctgggaccagctcatggccaatccaagagagctcagaatccaagacatggatttcactgacctgggggaggaggatgacattgatgtcctagatgtggacctgggtcacagggaggcccctgggccacctcccccacccccacccacctttctgggtttgccgcccccaccccctccgcccctgttggacagcattcctccccctcctgtccctggtaatttattggttcctcctcctccagtgttcaacgctcctcagggcttagggtggtcccaggtacccaggggtcagcccacattcactaagaaaaagaagaccatccgtttgttctggaatgaagttcggccttttgactggccatgtaaaaacaaccgacgctgcagagaattcctgtggtcaaaactggaacccattaaggtggacacttccagactggagcacctgtttgagtctaaatccaaggaactgtctgtctcaaagaaaactgctgcagatggaaaaaggcaagagatcattgttctggattccaagaggagtaacgccatcaatattggtctgacggtgctgccccctccaaggacgattaagatcgccattttgaattttgatgagtatgccttaaacaaagaaggaatcgagaaaattctaacgatgattcccaccgatgaggagaagcagaaaatccaggaagctcagctggccaaccctgaaatccccctgggcagtgcagagcagttcctcctcaccctgtcctccatcagcgagctctctgcacgacttcacctctgggcattcaaaatggattatgaaactacagaaaaggaagtagcagaaccactcctggacctgaaggaaggaatagaccagttggagaacaataaaaccttgggctttatcctgtctactctcttagccattgggaactttctaaatggaactaatgccaaagcgtttgagttaagctacctcgagaaggttccagaagtcaaagacacagtgcacaagcagtcgcttctccaccatgtgtgcaccatggtggtagaaaacttcccagacagctccgatctgtactcggagatcggggccatcaccaggtcagccaaggttgactttgatcaacttcaggataatttatgtcagatggagagaagatgcaaagcttcatgggatcacctcaaggcaattgcaaaacatgaaatgaaaccagttttaaaacaacggatgtcagagttcctgaaagactgtgcagagcgaattataattttaaagattgtccatagaaggataatcaacagattccactcctttttactctttatgggccatccaccttatgcaattcgggaagtgaacataaacaaattctgcaggattattagtgaatttgcactagagtatcgcacaaccagggaaagggttttgcagcagaaacagaaacgggccaaccacagagagagaaataagaccagagggaagatgatcaccgattctggcaagttctccggcagttctccggcgcccccaagccagccgcagggtctgagctatgcggaggacgcggctgagcacgagaacatgaaggctgtgctgaaaacctcgtccccctccaggagtcccctgcacataccttctccatcgtgtcagctgtgtttctcttgattccgtgacacccggtttattagttcaaaagtgtgacaccttttctgggcaaggaacagcccctttaaggagcaaatcacttctgtcacagttattatggtaatatgaggcaatctgattagcttcacagactgagtctccacaacaccaaaatatccagatgtaaaccccaaacttgtacacaaaagaaagcacagattgtttacctgttgtggattttagatgtaacaaatgtttatacaaatacatacatgtacaccatgtttcaaatactaaataaatagagtttaatgccaaaaaaaaaaac

SEQ ID NO: 369863 - DNA, 1069 bp, Homo sapiens
tttgtagtggctgaaggtctgacatgtttgatcaaggtgggagctgaggctgatcagaactatcagaactacatcttaagggctttgggccagattatgttgtatgtggatggaatgaatggagtaataaaccgcaatgaaaccattcagtggctgtacactctcattgggtcaaagttccgcctggtggtgaagacagccctgaagctgctgctcgtctttgtagagtactcggagtccaacgcacctctcctaattcaggctgtcactgctgttgacacgaaaagaggggtcaaaccttggtcaaatatcatggaaatcctggaggaaaaagatggagttgatacggagctactggtttatgcaatgactttggtgaacaagacgttatcaggactaccagaccaagacaccttctacgacgtcgtggactgcctggaggagctgggcattgctgctgtgtcccagaggcacttgaacaagaaagggactgacctggacttagtggagcaactcaacatttatgaggtaccagaccatgccttttgtaaggtatcgtacagctttggcaattgtcaaaggctgagatggcgcctactttagaccacgcgtaaagcgtatgagcaccaccagcttattagaaactcagcatcgtaggcttcaccccagacctactgaatcagaaactctgagggcccagcagaccatgttatgacaagccttccaggagagtctgatgcatattcaagctcaagaacccttgatataggggaaattggttagctattttcctttaaagaacatgccgtttgtcagcggcaccttcactcaaggagacggggagagaaagagatagagacagaaatcacatttcttatacctgagtggggtggaacttcaggcagggccagatacatgatttgtagcaaccaatgcaaaacgaaaatgaaggaccatttatggaacactcaagcaaaagtgctgttaaagatactgaaacaactcttcactttcttctgtggtttctcccaccttgttatggtgattttctaatttggtatgtaattgt

SEQ ID NO: 369864 - DNA, 4314 bp, Homo sapiens
tttgtagtggctgaaggtctgacatgtttgatcaaggtgggagctgaggctgatcagaactatcagaactacatcttaagggctttgggccagattatgttgtatgtggatggaatgaatggagtaataaaccgcaatgaaaccattcagtggctgtacactctcattgggtcaaagttccgcctggtggtgaagacagccctgaagctgctgctcgtctttgtagagtactcggagtccaacgcacctctcctaattcaggctgtcactgctgttgacacgaaaagaggggtcaaaccttggtcaaatatcatggaaatcctggaggaaaaagatggagttgatacggagctactggtttatgcaatgactttggtgaacaagacgttatcaggactaccagaccaagacaccttctacgacgtcgtggactgcctggaggagctgggcattgctgctgtgtcccagaggcacttgaacaagaaagggactgacctggacttagtggagcaactcaacatttatgaggtggcgctcaggcacgaggatggcgatgagaccacggagccaccccccagtgggtgccgggaccggaggagggccagcgtgtgttccagtggcggaggcgagcaccggggcctggaccgcagaaggagccgcaggcactcggtgcagagcatcaagagcaccctgtcggcccccaccagtccctgctcccagtcagctcccagcttcaagcccaaccaagtgcgagatctgcgtgaaaagtcatcaccgagtggtcttctcacatcatccttcaggcagcaccaagagtcactggcagcagagagagagaggcggcggcaggagagagaagaaaggttgcagagaatagagcgggaagaaagaaacaaattcagccgagattatttagacaaaagagaggagcaaaggcaagcaagagaagaaagatacaaatacttggaacagttggcagctgaggagcacgagaaggagctgagaagccggagtgtgagccggggcagagccgacctctccttggacctgacctcgccagcagccccagcctgcctggctcctctgagccatagcccctcatcttcagactctcaagaggctctcacggtgtctgcctcctccccaggaacccctcaccatccccaagcaagtgccggggatcctgaacccgaatcagaggcagaaccggaagcagaggcaggggcggggcaggttgctgatgaagctggccaggacatagcctctgcccacgagggtgcagagactgaagtggagcaggcactagagcaagagccggaagaaagagcctccctcagtgaaaaagagaggcagaacgagggggtgaacgagagggacaactgctctgcctccagcgtctcgtcctccagcagcacgttggagagggaggagaaggaggacaagctctccagggacaggacaactggtttgtggcccgcaggtgtccaggatgcaggtgtaaatggacagtgtggcgacatcctcaccaacaaacggttcatgcttgacatgctgtatgcccataacaggaagtctccggatgatgaggagaagggggatggggaggctgggaggacccagcaggaggcagaggcggtagccagccttgctaccaggatatccaccctgcaggccaactctcagacccaggatgagagtgtcaggagggtggatgtcggctgtttggacaatcggggcagtgtgaaagcatttgctgagaaattcaacagtggggacctggggagaggttccatctcccctgatgctgagcccaatgacaaggtcccagaaacagcgccggtgcagccgaagacagagtctgattacatctgggaccagctcatggccaatccaagagagctcagaatccaagacatggatttcactgacctgggggaggaggatgacattgatgtcctagatgtggacctgggtcacagggaggcccctgggccacctcccccacccccacccacctttctgggtttgccgcccccaccccctccgcccctgttggacagcattcctccccctcctgtccctggtaatttattggttcctcctcctccagtgttcaacgctcctcagggcttagggtggtcccaggtacccaggggtcagcccacattcactaagaaaaagaagaccatccgtttgttctggaatgaagttcggccttttgactggccatgtaaaaacaaccgacgctgcagagaattcctgtggtcaaaactggaacccattaaggtggacacttccagactggagcacctgtttgagtctaaatccaaggaactgtctgtctcaaagaaaactgctgcagatggaaaaaggcaagagatcattgttctggattccaagaggagtaacgccatcaatattggtctgacggtgctgccccctccaaggacgattaagatcgccattttgaattttgatgagtatgccttaaacaaagaaggaatcgagaaaattctaacgatgattcccaccgatgaggagaagcagaaaatccaggaagctcagctggccaaccctgaaatccccctgggcagtgcagagcagttcctcctcaccctgtcctccatcagcgagctctctgcacgacttcacctctgggcattcaaaatggattatgaaactacagaaaaggaagtagcagaaccactcctggacctgaaggaaggaatagaccagttggagaacaataaaaccttgggctttatcctgtctactctcttagccattgggaactttctaaatggaactaatgccaaagcgtttgagttaagctacctcgagaaggttccagaagtcaaagacacagtgcacaagcagtcgcttctccaccatgtgtgcaccatggtggtagaaaacttcccagacagctccgatctgtactcggagatcggggccatcaccaggtcagccaaggttgactttgatcaacttcaggataatttatgtcagatggagagaagatgcaaagcttcatgggatcacctcaaggcaattgcaaaacatgaaatgaaaccagttttaaaacaacggatgtcagagttcctgaaagactgtgcagagcgaattataattttaaagattgtccatagaaggataatcaacagattccactcctttttactctttatgggccatccaccttatgcaattcgggaagtgaacataaacaaattctgcaggattattagtgaatttgcactagagtatcgcacaaccagggaaagggttttgcagcagaaacagaaacgggccaaccacagagagagaaataagaccagagggaagatgatcaccgattctggcaagttctccggcagttctccggcgcccccaagccagccgcagggtctgagctatgcggaggacgcggctgagcacgagaacatgaaggctgtgctgaaaacctcgtccccctccgtggaggacgccacccccgcgctgggcgtccgcacacgcagccgagcaagccgaggatccactagttcctggactatgggaactgatgactcgcccaatgtcacagatgatgcagctgatgagatcatggaccgcatcgtcaagtcagccacccaagtgcccagtcagcgagtggtgccgagggagaggaaacgatcccgggccaaccggaaatctttgcgaagaaccctgaagagcggcctgaccccagaagaagccagagccctgggcttggttggcacctcggagttgcagctgtgacactcataggttactcccaggagtgtgctgagcagaaggcaagctcttgctggatgaaacccctccaggtggggttggggagacttgatattcacatccaacagtttgaaaagggagagctcaattcccagcgtcaccccatggcttgtgttgcctgctacgcattgacttggatctccaggagtcccctgcacataccttctccatcgtgtcagctgtgtttctcttgattccgtgacacccggtttattagttcaaaagtgtgacaccttttctgggcaaggaacagcccctttaaggagcaaatcacttctgtcacagttattatggtaatatgaggcaatctgattagcttcacagactgagtctccacaacaccaaaatatccagatgtaaaccccaaacttgtacacaaaagaaagcacagattgtttacctgttgtggattttagatgtaacaaatgtttatacaaatacatacatgtacaccatgtttcaaatactaaataaatagagtttaatgccaaaaaaaaaaac

SEQ ID NO: 369865 - DNA, 1692 bp, Homo sapiens
gtttactagaggatccccattcgcgaatcacgtctggcattcaaaatggattatgatactacagaaaaggaagtagcagaaccactcctggacctgaaggaaggaatagaccagttggagaacaataaaaccttgggctttatcctgtctactctcttagccattgggaactttctaaatggaactaatgccaaagcgtttgagttaagctacctcgagaaggttccagaagtcaaagacacagtgcacaagcagtcgcttctccaccatgtgtgcaccatggtggtagaaaacttcccagacagctccgatctgtactcggagatcggggccatcaccaggtcagccaaggttgactttgatcaacttcaggataatttatgtcagatggagagaagatgcaaagcttcatgggatcacctcaaggcaattgcaaaacatgaaatgaaaccagttttaaaacaacggatgtcagagttcctgaaagactgtgcagagcgaattataattttaaagattgtccatagaaggataatcaacagattccactcctttttactctttatgggccatccaccttatgcaattcgggaagtgaacataaacaaattctgcaggattattagtgaatttgcactagagtatcgcacaaccagggaaagggttttgcagcagaaacagaaacgggccaaccacagagagagaaataagaccagagggaagatgatcaccgattctggcaagttctccggcagttctccggcgcccccaagccagccgcagggtctgagctatgcggaggacgcggctgagcacgagaacatgaaggctgtgctgaaaacctcgtccccctccgtggaggacgccacccccgcgctgggcgtccgcacacgcagccgagcaagccgaggatccactagttcctggactatgggaactgatgactcgcccaatgtcacagatgatgcagctgatgagatcatggaccgcatcgtcaagtcagccacccaagtgcccagtcagcgagtggtgccgagggagaggaaacgatcccgggccaaccggaaatctttgcgaagaaccctgaagagcggcctgaccccagaagaagccagagccctgggcttggttggcacctcggagttgcagctgtgacactcataggttactcccaggagtgtgctgagcagaaggcaagctcttgctggatgaaacccctccaggtggggttggggagacttgatattcacatccaacagtttgaaaagggagagctcaattcccagcgtcaccccatggcttgtgttgcctgctacgcattgacttggatctccaggagtcccctgcacataccttctccatcgtgtcagctgtgtttctcttgattccgtgacacccggtttattagttcaaaagtgtgacaccttttctgggcaaggaacagcccctttaaggagcaaatcacttctgtcacagttattatggtaatatgaggcaatctgattagcttcacagactgagtctccacaacaccaaaatatccagatgtaaaccccaaacttgtacacaaaagaaagcacagattgtttacctgttgtggattttagatgtaacaaatgtttatacaaatacatacatgtacaccatgtttcaaatactaaataaatagagtttaatgccaaaaaaaaaaac

SEQ ID NO: 369866 - DNA, 2732 bp, Homo sapiens
tttgtagtggctgaaggtctgacatgtttgatcaaggtgggagctgaggctgatcagaactatcagaactacatcttaagggctttgggccagattatgttgtatgtggatggaatgaatggagtaataaaccgcaatgaaaccattcagtggctgtacactctcattgggtcaaagttccgcctggtggtgaagacagccctgaagctgctgctcgtctttgtagagtactcggagtccaacgcacctctcctaattcaggctgtcactgctgttgacacgaaaagaggggtcaaaccttggtcaaatatcatggaaatcctggaggaaaaagatggagttgatacggagctactggtttatgcaatgactttggtgaacaagacgttatcaggactaccagaccaagacaccttctacgacgtcgtggactgcctggaggagctgggcattgctgctgtgtcccagaggcacttgaacaagaaagggactgacctggacttagtggagcaactcaacatttatgaggtggcgctcaggcacgaggatggcgatgagaccacggagccaccccccagtgggtgccgggaccggaggagggccagcgtgtgttccagtggcggaggcgagcaccggggcctggaccgcagaaggagccgcaggcactcggtgcagagcatcaagagcaccctgtcggcccccaccagtccctgctcccagtcagctcccagcttcaagcccaaccaagtgcgagatctgcgtgaaaagtcatcaccgagtggtcttctcacatcatccttcaggcagcaccaagagtcactggcagcagagagagagaggcggcggcaggagagagaagaaaggttgcagagaatagagcgggaagaaagaaacaaattcagccgagattatttagacaaaagagaggagcaaaggcaagcaagagaagaaagatacaaatacttggaacagttggcagctgaggagcacgagaaggagctgagaagccggagtgtgagccggggcagagccgacctctccttggacctgacctcgccagcagccccagcctgcctggctcctctgagccatagcccctcatcttcagactctcaagaggctctcacggtgtctgcctcctccccaggaacccctcaccatccccaagcaagtgccggggatcctgaacccgaatcagaggcagaaccggaagcagaggcaggggcggggcaggttgctgatgaagctggccaggacatagcctctgcccacgagggtgcagagactgaagtggagcaggcactagagcaagagccggaagaaagagcctccctcagtgaaaaagagaggcagaacgagggggtgaacgagagggacaactgctctgcctccagcgtctcgtcctccagcagcacgttggagagggaggagaaggaggacaagctctccagggacaggacaactggtttgtggcccgcaggtgtccaggatgcaggtgtaaatggacagtgtggcgacatcctcaccaacaaacggttcatgcttgacatgctgtatgcccataacaggaagtctccggatgatgaggagaagggggatggggaggctgggaggacccagcaggaggcagaggcggtagccagccttgctaccaggatatccaccctgcaggccaactctcagacccaggatgagagtgtcaggagggtggatgtcggctgtttggacaatcggggcagtgtgaaagcatttgctgagaaattcaacagtggggacctggggagaggttccatctcccctgatgctgagcccaatgacaaggtcccagaaacagcgccggtgcagccgaagacagagtctgattacatctgggaccagctcatggccaatccaagagagctcagaatccaagacatggatttcactgacctgggggaggaggatgacattgatgtcctagatgtggacctgggtcacagggaggcccctgggccacctcccccacccccacccacctttctgggtttgccgcccccaccccctccgcccctgttggacagcattcctccccctcctgtccctggtaatttattggttcctcctcctccagtgttcaacgctcctcagggcttagggtggtcccagaagaagccagagccctgggcttggttggcacctcggagttgcagctgtgacactcataggttactcccaggagtgtgctgagcagaaggcaagctcttgctggatgaaacccctccaggtggggttggggagacttgatattcacatccaacagtttgaaaagggagagctcaattcccagcgtcaccccatggcttgtgttgcctgctacgcattgacttggatctccaggagtcccctgcacataccttctccatcgtgtcagctgtgtttctcttgattccgtgacacccggtttattagttcaaaagtgtgacaccttttctgggcaaggaacagcccctttaaggagcaaatcacttctgtcacagttattatggtaatatgaggcaatctgattagcttcacagactgagtctccacaacaccaaaatatccagatgtaaaccccaaacttgtacacaaaagaaagcacagattgtttacctgttgtggattttagatgtaacaaatgtttatacaaatacatacatgtacaccatgtttcaaatactaaataaatagagtttaatgccaaaaaaaaaaac

SEQ ID NO: 369867 - DNA, 2105 bp, Homo sapiens
tttgtagtggctgaaggtctgacatgtttgatcaaggtgggagctgaggctgatcagaactatcagaactacatcttaagggctttgggccagattatgttgtatgtggatggaatgaatggagtaataaaccgcaatgaaaccattcagtggctgtacactctcattgggtcaaagttccgcctggtggtgaagacagccctgaagctgctgctcgtctttgtagagtactcggagtccaacgcacctctcctaattcaggctgtcactgctgttgacacgaaaagaggggtcaaaccttggtcaaatatcatggaaatcctggaggaaaaagatggagttgatacggagctactggtttatgcaatgactttggtgaacaagacgttatcaggactaccagaccaagacaccttctacgacgtcgtggactgcctggaggagctgggcattgctgctgtgtcccagaggcacttgaacaagaaagggactgacctggacttagtggagcaactcaacatttatgaggtggcgctcaggcacgaggatggcgatgagaccacggagccaccccccagtgggtgccgggaccggaggagggccagcgtgtgttccagtggcggaggcgagcaccggggcctggaccgcagaaggagccgcaggcactcggtgcagagcatcaagagcaccctgtcggcccccaccagtccctgctcccagtcagctcccagcttcaagcccaaccaagtgcgagatctgcgtgaaaagtcatcaccgagtggtcttctcacatcatccttcaggcagcaccaagagtcactggcagcagagagagagaggcggcggcaggagagagaagaaaggttgcagagaatagagcgggaagaaagaaacaaattcagccgagattatttagacaaaagagaggagcaaaggcaagcaagagaagaaagatacaaatacttggaacagttggcagctgaggagcacgagaaggagctgagaagccggagtgtgagccggggcagagccgacctctccttggacctgacctcgccagcagccccagcctgcctggctcctctgagccatagcccctcatcttcagactctcaagaggctctcacggtgtctgcctcctccccaggaacccctcaccatccccaagcaagtgccggggatcctgaacccgaatcagaggcagaaccggaagcagaggcaggggcggggcaggttgctgatgaagctggccaggacatagcctctgcccacgagggtgcagagactgaagtggagcaggcactagagcaagagccggaagaaagagcctccctcagtgaaaaagagaggcagaacgagggggtgaacgagagggacaactgctctgcctccagcgtctcgtcctccagcagcacgttggagagggaggagaaggaggacaagctctccagggacaggacaactggtaaatgaagccccttgtttcagtcggcatgtgccagggaggcctggggtgcaggggctggttctctaagagcttgtccacaggctggcctctgaggtgacctgggtcaacccactcatgtggctgtgtcacccagtgtctggggacaaggagtgtggccacgctggcagccagccagcagccttctgccctgtagaaagacagcccccaaactgtctgccacaccatcacattcatcacctccacacctggggaaaagggccccgataaggagggcttttcctgaggaataagccccagaagagaaacctctcacttccccctgactgttccattgtgaataatagtaaggttgataatagtaaggctttttccgtttttgatataagtttagaaactgtcacattgtcatctattcctttaaaaatgtgtttactgaagtgtgttaatcattttgactggacatttcagactgggaaagatttgtttaaatggattgaatgagtatttccaaaaaattgtacacagtttactgaggtcaatttgatgtactggaatatagataatttgttttctatattacactcataactattcttttctttgtataaagtatatgcttttccttatggaagtatat

SEQ ID NO: 369868 - DNA, 2671 bp, Homo sapiens
ggaagggaaaaagggggactgcagtatgcgtcacacccggaagcggcgagccggaagtggggttagccaggttatccccaggggtggagaagcggaggcccaggaggagggggaataaagaaggtggaggatcctggctaccactctgaatccgataccgcttctcttagacctcagcgacagaaaaagggaagggtgtctcatcccccttcctcctctcctccctgtcctgagccttagccatggccgaggcaggggctgggctgagcgagaccgtcactgagacaacggttaccgtgacaaccgagcccgagaaccggagccttaccatcaaacttcggaaacggaagccagagaaaaaggtagaatggacaagtgacactgtggacaatgaacacatgggccgccgctcatccaaatgctgctgtatttatgagaaacctcgggcctttggcgagagctccacggaaagtgatgaggaggaagaagagggctgtggtcatacacactgtgtacgtggccaccgcaaaggacggcgtcgtgcaaccctaggaccgacccccaccacccctccccagcctcctgacccttcccagccccctccagggccaatgcagcactaaatccctctctcctccagcattcctgtgtctgtctggccctaaatgtatccatgtggctacttctccagccccctccttccctctcttctgcctgatagagggaagaggaagaggaggacgaacagagatcctgaaattctgacttgctgctattccagaacccagcctcctgggtttccccagtcctcatttttcctcccaatacccacccttctctctcgagggatctaggcaccttggtcccagtgtcttccttttgttctcactgccaaactgcctgtcctgggatctagttatcttggccctgcactctcaacatgagtagcgaacacttaaattgggttttcaacagtcccagctttcactgccagggtcccagtcagattccaggaatttgcgccctaactttgcttgctaatcctggtttagagctatcccactaaaatatttaatcctaattcttagtccttgcctgtgagatatgaggtcttacaggagacctcagagctcccagcccttctcctcctgctaacccttctcacaccctcaagaggagttagaaaagaggtccttgtcattctcacctcttatggaaaatggaataagaaataatcatatcctttcttcccacccttctcctgttatttaggatttctgacaaagctggcttgagattggtcacttagagccgactgtctcctctgccttttgtttttcagcttcagagacagatccaatatagtcccagggacctgggtctctgggagaggaaggaagagggagggagcaaagagattggggtatgtcccctgtagtacactcttacctcttacttcctagactttgatttctccggcagcccagatgttcagttctcttggcccctctctaccccttactgggatctggttttcattttccggtccttttgccatacacagttacagagatcagtcaaatccataccaccactgagatctcatttattgccacagatgcacaaaataaataacccaaaatcacaaaatgtgttaaatatgggcccatttatacttatggggaagggtgtgagactatacacaaggatgagtttggagatgtctgaagtattcccaggttgaggaggagagaggggaaatagcaccattggttcctttccgtgagtatgtgcggggagaagtttcaagaaggttcttatggaaaaaaggctgtgagcatagaaagcagtcataggaggttggggaactagcttgtccctccccacccccagatcctgcaaaagaggtacaaagcttcccagagggccacagggcccagaccagagtcaagcctcttgttttaggagaaacctcagtggacaggcagggtagcccagtccttagatctgtggggaaggccctgagcccttctggagctaggagtggcaagagtgggagtcaagtatttgaccagcagagcctctatgtaggaatcatggtcactttaccaatactgatggggagggcctgttccccattgcaggcctagaatggtttgaatgggagaagtcaggaagtactgtagtagctgtaggggagagaagattctgagagccagaaggcaggaatggatttggttttgagcagggacgtggaaacgtggagaccaggtgaggtctcattattttggggcgaaaatgtgggttgctattaatactcctgcaatgggcgtgtgaatgtgttcccagaaatgagtggggaattccacccccaaaaagcagctgcagggccagtggccgggccaaacttctagttggagacgagactcagctttccgctggtacaatgcggagcggagcacgagggtcgcaggtgcagaacagcgggaagatgcgctcccccagggggccaggcgcctggaaggcgtaaagcaggtcgagtgagcggccgtcgtagaaggccacgcggccccgctcccagtccaggtccacgcgaatgcgccgcggcgggggctcaacaccgcccagcagggtgggttcgggtgccgtgagggcccacaggcggccgccg

SEQ ID NO: 369869 - DNA, 2284 bp, Homo sapiens
ggaagggaaaaagggggactgcagtatgcgtcacacccggaagcggcgagccggaagtggggttagccaggttatccccaggggtggagaagcggaggcccaggaggagggggaataaagaaggtggaggatcctggctaccactctgaatccgataccgcttctcttagacctcagcgacagaaaaagggaagggtgtctcatcccccttcctcctctcctccctgtcctgagccttagccatggccgaggcaggggctgggctgagcgagaccgtcactgagacaacggttaccgtgacaaccgagcccgagaaccggagccttaccatcaaacttcggaaacggaagccagagaaaaaggtagaatggacaagtgacactgtggacaatgaacacatgggccgccgctcatccaaatgctgctgtatttatgagaaacctcgggcctttggcgagagctccacggaaagtgatgaggaggaagaagagggctgtggtcatacacactgtgtacgtggccaccgcaaaggacggcgtcgtgcaaccctaggaccgacccccaccacccctccccagcctcctgacccttcccagccccctccagggccaatgcagcactaaatccctctctcctccagcattcctgtgtctgtctggccctaaatgtatccatgtggctacttctccagccccctccttccctctcttctgcctgatagagggaagaggaagaggaggacgaacagagatcctgaaattctgacttgctgctattccagaacccagcctcctgggtttccccagtcctcatttttcctcccaatacccacccttctctctcgagggatctaggcaccttggtcccagtgtcttccttttgttctcactgccaaactgcctgtcctgggatctagttatcttggccctgcactctcaacatgagtagcgaacacttaaattgggttttcaacagtcccagctttcactgccagggtcccagtcagattccaggaatttgcgccctaactttgcttgctaatcctggtttagagctatcccactaaaatatttaatcctaattcttagtccttgcctgtgagatatgaggtcttacaggagacctcagagctcccagcccttctcctcctgctaacccttctcacaccctcaagaggagttagaaaagaggtccttgtcattctcacctcttatggaaaatggaataagaaataatcatatcctttcttcccacccttctcctgttatttaggatttctgacaaagctggcttgagattggtcacttagagccgactgtctcctctgccttttgtttttcagcttcagagacagatccaatatagtcccagggacctgggtctctgggagaggaaggaagagggagggagcaaagagattggggtatgtcccctgtagtacactcttacctcttacttcctagactttgatttctccggcagcccagatgttcagttctcttggcccctctctaccccttactgggatctggttttcattttccggtccttttgccatacacagttacagagatcagtcaaatccataccaccactgagatctcatttattgccacagatgcacaaaataaataacccaaaatcacaaaaaaaaaaaaacaaaacaaaaaaaacaaaaaaacaaaaaaaaaaaaaaaaaaaaaaaaaaaaaaaaaaaaaaaaaaaaaaaaagagagagggggggggcggcaaatccccgggggggccagacacaagaacgagccacacacccatttgttgagtcaaaaaaaggggccacacgaaaaagaggggcagaggataaaaaagaagaagaacagcggatgacgcgggagggtaaaaaaacagcagccgctgtgcgataaagaacaaggaagaggcagcagagaacgaacgtagtagaacaaggacaacagccaactctggcaggtgggggggggcgaagcacacaccctgggcggcggaggcaaaaacccactcccacgcgaagagagaaataacaagacgcccgcacgagagaggagagcaaacaaacctaccaccgctcgcggagggagacagagcgtgatagacggaggcggcgtaacacaccacgccgaggcgcactgcatcaagaagcgcgcgacaggcggaggagagaaaaaggaggaacagcccacagaggcaaaagagtcaccgcagcagaagaccaaaagtctacagccaacgcgggagccggcggctgcgagcacccaaacccgaaggc

SEQ ID NO: 369870 - DNA, 2885 bp, Homo sapiens
aggagcgagtaaatgatgtatgagtgcgatacgcggttgtaatttcagtcacgaggcaggcggaggcccaggaggagggggaataaagaaggtggaggatcctggctaccactctgaatccgataccgcttctcttagacctcagcgacagaaaaagggaagggtgtctcatcccccttcctcctctcctccctgtcctgagccttagccatggccgaggcaggggctgggctgagcgagaccgtcactgagacaacggttaccgtgacaaccgagcccgagaaccggagccttaccatcaaacttcggaaacggaagccagagaaaaaggtagaatggacaagtgacactgtggacaatgaacacatgggccgccgctcatccaaatgctgctgtatttatgagaaacctcgggcctttggcgagagctccacggaaagtgatgaggaggaagaagagggctgtggtcatacacactgtgtacgtggccaccgcaaaggacggcgtcgtgcaaccctaggaccgacccccaccacccctccccagcctcctgacccttcccagccccctccagggccaatgcagcactaaatccctctctcctccagcattcctgtgtctgtctggccctaaatgtatccatgtggctacttctccagccccctccttccctctcttctgcctgatagagggaagaggaagaggaggacgaacagagatcctgaaattctgacttgctgctattccagaacccagcctcctgggtttccccagtcctcatttttcctcccaatacccacccttctctctcgagggatctaggcaccttggtcccagtgtcttccttttgttctcactgccaaactgcctgtcctgggatctagttatcttggccctgcactctcaacatgagtagcgaacacttaaattgggttttcaacagtcccagctttcactgccagggtcccagtcagattccaggaatttgcgccctaactttgcttgctaatcctggtttagagctatcccactaaaatatttaatcctaattcttagtccttgcctgtgagatatgaggtcttacaggagacctcagagctcccagcccttctcctcctgctaacccttctcacaccctcaagaggagttagaaaagaggtccttgtcattctcacctcttatggaaaatggaataagaaataatcatatcctttcttcccacccttctcctgttatttaggatttctgacaaagctggcttgagattggtcacttagagccgactgtctcctctgccttttgtttttcagcttcagagacagatccaatatagtcccagggacctgggtctctgggagaggaaggaagagggagggagcaaagagattggggtatgtcccctgtagtacactcttacctcttacttcctagactttgatttctccggcagcccagatgttcagttctcttggcccctctctaccccttactgggatctggttttcattttccggtccttttgccatacacagttacagagatcagtcaaatccataccaccactgagatctcatttattgccacagatgcacaaaataaataacccaaaatcacaaaatgtgttaaatatgggcccatttatacttatggggaagggtgtgagactatacacaaggatgagtttggagatgtctgaagtattcccaggttgaggaggagagaggggaaatagcaccattggttcctttccgtgagtatgtgcggggagaagtttcaagaaggttcttatggaaaaaaggctgtgagcatagaaagcagtcataggaggttggggaactagcttgtccctccccacccccagatcctgcaaaagaggtacaaagcttcccagagggccacagggcccagaccagagtcaagcctcttgttttaggagaaacctcagtggacaggcagggtagcccagtccttagatctgtggggaaggccctgagcccttctggagctaggagtggcaagagtgggagtcaagtatttgaccagcagagcctctatgtaggaatcatggtcactttaccaatactgatggggagggcctgttccccattgcaggcctagaatggtttgaatgggagaagtcaggaagtactgtagtagctgtaggggagagaagattctgagagccagaaggcaggaatggatttggttttgagcagggacgtggaaacgtggagaccaggtgaggtctcattattttggggcgaaaatgtgggttgctattaatactcctgcaatgggcgtgtgaatgtgttcccagaaatgagtggggaattccacccccaaaaagcactcgcggctgattcgcacctccaccgccagccgcacattagacctcaggctgcggcggggacacggcaggccgcagcagggacaggcggtgggggaagcctcggtgccggtcgccggcggagtcccccagcggcgggccagacacgcgcggcagaagctgtgctcgcacgccagaagcaccgggtcctcgaaggagcccccgcacagaggacacgtcgccagctgctccagacgctccaccagccccgggcccagctcgggcgcatccatggaaagccaggatctggacgccgccccttccgcgaccaccgtgaccgccttcgagcgcgcagatggcgggccgcccctgctgcttgctgtgtagatgcccttctctccgactcccgcattaacttttgccgctttccgcccctctcctgggattgcctctctcttcaaccagagtctcagtctcgtcaaatctctccaccacatcaggctttatagggagggaggaggctcccacgggaggtaaacaccaggccttgcgtaacgcc

SEQ ID NO: 369871 - DNA, 2992 bp, Homo sapiens
ggaagggaaaaagggggactgcagtatgcgtcacacccggaagcggcgagccggaagtggggttagccaggttatccccaggggtggagaagcggaggcccaggaggagggggaataaagaaggtggaggatcctggctaccactctgaatccgataccgcttctcttagacctcagcgacagaaaaagggaagggtgtctcatcccccttcctcctctcctccctgtcctgagccttagccatggccgaggcaggggctgggctgagcgagaccgtcactgagacaacggttaccgtgacaaccgagcccgatgatttggggaggaagacggagaaacagcaaggattatattttcctttgaagagttgctgggacctttcctaggagaaccggagccttaccatcaaacttcggaaacggaagccagagaaaaaggtagaatggacaagtgacactgtggacaatgaacacatgggccgccgctcatccaaatgctgctgtatttatgagaaacctcgggcctttggcgagagctccacggaaagtgatgaggaggaagaagagggctgtggtcatacacactgtgtacgtggccaccgcaaaggacggcgtcgtgcaaccctaggaccgacccccaccacccctccccagcctcctgacccttcccagccccctccagggccaatgcagcactaaatccctctctcctccagcattcctgtgtctgtctggccctaaatgtatccatgtggctacttctccagccccctccttccctctcttctgcctgatagagggaagaggaagaggaggacgaacagagatcctgaaattctgacttgctgctattccagaacccagcctcctgggtttccccagtcctcatttttcctcccaatacccacccttctctctcgagggatctaggcaccttggtcccagtgtcttccttttgttctcactgccaaactgcctgtcctgggatctagttatcttggccctgcactctcaacatgagtagcgaacacttaaattgggttttcaacagtcccagctttcactgccagggtcccagtcagattccaggaatttgcgccctaactttgcttgctaatcctggtttagagctatcccactaaaatatttaatcctaattcttagtccttgcctgtgagatatgaggtcttacaggagacctcagagctcccagcccttctcctcctgctaacccttctcacaccctcaagaggagttagaaaagaggtccttgtcattctcacctcttatggaaaatggaataagaaataatcatatcctttcttcccacccttctcctgttatttaggatttctgacaaagctggcttgagattggtcacttagagccgactgtctcctctgccttttgtttttcagcttcagagacagatccaatatagtcccagggacctgggtctctgggagaggaaggaagagggagggagcaaagagattggggtatgtcccctgtagtacactcttacctcttacttcctagactttgatttctccggcagcccagatgttcagttctcttggcccctctctaccccttactgggatctggttttcattttccggtccttttgccatacacagttacagagatcagtcaaatccataccaccactgagatctcatttattgccacagatgcacaaaataaataacccaaaatcacaaaatgtgttaaatatgggcccatttatacttatggggaagggtgtgagactatacacaaggatgagtttggagatgtctgaagtattcccaggttgaggaggagagaggggaaatagcaccattggttcctttccgtgagtatgtgcggggagaagtttcaagaaggttcttatggaaaaaaggctgtgagcatagaaagcagtcataggaggttggggaactagcttgtccctccccacccccagatcctgcaaaagaggtacaaagcttcccagagggccacagggcccagaccagagtcaagcctcttgttttaggagaaacctcagtggacaggcagggtagcccagtccttagatctgtggggaaggccctgagcccttctggagctaggagtggcaagagtgggagtcaagtatttgaccagcagagcctctatgtaggaatcatggtcactttaccaatactgatggggagggcctgttccccattgcaggcctagaatggtttgaatgggagaagtcaggaagtactgtagtagctgtaggggagagaagattctgagagccagaaggcaggaatggatttggttttgagcagggacgtggaaacgtggagaccaggtgaggtctcattattttggggcgaaaatgtgggttgctattaatactcctgcaatgggcgtgtgaatgtgttcccagaaatgagtggggaattccacccccaaaaagcactcgcggctgattcgcacctccaccgccagccgcacattagacctcaggctgcggcggggacacggcaggccgcagcagggacaggcggtgggggaagcctcggtgccggtcgccggcggagtcccccagcggcgggccagacacgcgcggcagaagctgtgctcgcacgccagaagcaccgggtcctcgaaggagcccccgcacagaggacacgtcgccagctgctccagacgctccaccagccccgggcccagctcgggcgcatccatggaaagccaggatctggacgccgccccttccgcgaccaccgtgaccgccttcgagcgcgcagatggcgggccgcccctgctgcttgctgtgtagatgcccttctctccgactcccgcattaacttttgccgctttccgcccctctcctgggattgcctctctcttcaaccagagtctcagtctcgtcaaatctctccaccacatcaggctttatagggagggaggaggctcccacgggaggtaaacaccaggccttgcgtaacgcc

SEQ ID NO: 369872 - DNA, 3419 bp, Homo sapiens
ggaagatgttgggaggaaatcaaaggtagtgtaagaaagcatggttggaggccaacttatcaatattatcaatattgatattcgaataaatatttattgaatggatgaatgtaaaaggaagtggcaggaatgaggaaacaagaaaaggagatgaaaagaggtattttgagaaatcagagagcaaagatgtaaatggagaaacaagaagtatttatccaaaaacatgttaagttgccttcaaagggagaaggttgcattgggcttaatactcttggattaaaggaagtttagtaattaatagattagtaatacttgctactagagatgccaggatgccagagaataggtggataagaggtagggagggctggagcttgagaatgagagaggttttgtttgtttttttaagagaaaaagaataggggatctggaaaaaggaagggagatcaaagattaggtgctggggactgaaaaataattttcatgtattaatactaccaaggatgatttggggaggaagacggagaaacagcaaggattatattttcctttgaagagttgctgggacctttcctaggttaggaattgtgtcttctcttatactggtggtataagaacaggaaataatacttattcctcaagggactatctgaggtaaaagacctgttctgttttatcttctgtcagctcctctggtgctatgcctatggtactgattgagctaaagaagaaaagagaggaggttccctgggagggagtgggaaaggttagtaagaggggactagataggtatgctcatccttaaccttctaggagaaccggagccttaccatcaaacttcggaaacggaagccagagaaaaaggtagaatggacaagtgacactgtggacaatgaacacatgggccgccgctcatccaaatgctgctgtatttatgagaaacctcgggcctttggcgagagctccacggaaagtgatgaggaggaagaagagggctgtggtcatacacactgtgtacgtggccaccgcaaaggacggcgtcgtgcaaccctaggaccgacccccaccacccctccccagcctcctgacccttcccagccccctccagggccaatgcagcactaaatccctctctcctccagcattcctgtgtctgtctggccctaaatgtatccatgtggctacttctccagccccctccttccctctcttctgcctgatagagggaagaggaagaggaggacgaacagagatcctgaaattctgacttgctgctattccagaacccagcctcctgggtttccccagtcctcatttttcctcccaatacccacccttctctctcgagggatctaggcaccttggtcccagtgtcttccttttgttctcactgccaaactgcctgtcctgggatctagttatcttggccctgcactctcaacatgagtagcgaacacttaaattgggttttcaacagtcccagctttcactgccagggtcccagtcagattccaggaatttgcgccctaactttgcttgctaatcctggtttagagctatcccactaaaatatttaatcctaattcttagtccttgcctgtgagatatgaggtcttacaggagacctcagagctcccagcccttctcctcctgctaacccttctcacaccctcaagaggagttagaaaagaggtccttgtcattctcacctcttatggaaaatggaataagaaataatcatatcctttcttcccacccttctcctgttatttaggatttctgacaaagctggcttgagattggtcacttagagccgactgtctcctctgccttttgtttttcagcttcagagacagatccaatatagtcccagggacctgggtctctgggagaggaaggaagagggagggagcaaagagattggggtatgtcccctgtagtacactcttacctcttacttcctagactttgatttctccggcagcccagatgttcagttctcttggcccctctctaccccttactgggatctggttttcattttccggtccttttgccatacacagttacagagatcagtcaaatccataccaccactgagatctcatttattgccacagatgcacaaaataaataacccaaaatcacaaaatgtgttaaatatgggcccatttatacttatggggaagggtgtgagactatacacaaggatgagtttggagatgtctgaagtattcccaggttgaggaggagagaggggaaatagcaccattggttcctttccgtgagtatgtgcggggagaagtttcaagaaggttcttatggaaaaaaggctgtgagcatagaaagcagtcataggaggttggggaactagcttgtccctccccacccccagatcctgcaaaagaggtacaaagcttcccagagggccacagggcccagaccagagtcaagcctcttgttttaggagaaacctcagtggacaggcagggtagcccagtccttagatctgtggggaaggccctgagcccttctggagctaggagtggcaagagtgggagtcaagtatttgaccagcagagcctctatgtaggaatcatggtcactttaccaatactgatggggagggcctgttccccattgcaggcctagaatggtttgaatgggagaagtcaggaagtactgtagtagctgtaggggagagaagattctgagagccagaaggcaggaatggatttggttttgagcagggacgtggaaacgtggagaccaggtgaggtctcattattttggggcgaaaatgtgggttgctattaatactcctgcaatgggcgtgtgaatgtgttcccagaaatgagtggggaattccacccccaaaaagcactcgcggctgattcgcacctccaccgccagccgcacattagacctcaggctgcggcggggacacggcaggccgcagcagggacaggcggtgggggaagcctcggtgccggtcgccggcggagtcccccagcggcgggccagacacgcgcggcagaagctgtgctcgcacgccagaagcaccgggtcctcgaaggagcccccgcacagaggacacgtcgccagctgctccagacgctccaccagccccgggcccagctcgggcgcatccatggaaagccaggatctggacgccgccccttccgcgaccaccgtgaccgccttcgagcgcgcagatggcgggccgcccctgctgcttgctgtgtagatgcccttctctccgactcccgcattaacttttgccgctttccgcccctctcctgggattgcctctctcttcaaccagagtctcagtctcgtcaaatctctccaccacatcaggctttatagggagggaggaggctcccacgggaggtaaacaccaggccttgcgtaacgcc

SEQ ID NO: 369873 - DNA, 2763 bp, Homo sapiens
aggagcgagtaaatgatgtatgagtgcgatacgcggttgtaatttcagtcacgaggcaggcggaggcccaggaggagggggaataaagaaggtggaggatcctggctaccactctgaatccgataccgcttctcttagacctcagcgacagaaaaaggagaaccggagccttaccatcaaacttcggaaacggaagccagagaaaaaggtagaatggacaagtgacactgtggacaatgaacacatgggccgccgctcatccaaatgctgctgtatttatgagaaacctcgggcctttggcgagagctccacggaaagtgatgaggaggaagaagagggctgtggtcatacacactgtgtacgtggccaccgcaaaggacggcgtcgtgcaaccctaggaccgacccccaccacccctccccagcctcctgacccttcccagccccctccagggccaatgcagcactaaatccctctctcctccagcattcctgtgtctgtctggccctaaatgtatccatgtggctacttctccagccccctccttccctctcttctgcctgatagagggaagaggaagaggaggacgaacagagatcctgaaattctgacttgctgctattccagaacccagcctcctgggtttccccagtcctcatttttcctcccaatacccacccttctctctcgagggatctaggcaccttggtcccagtgtcttccttttgttctcactgccaaactgcctgtcctgggatctagttatcttggccctgcactctcaacatgagtagcgaacacttaaattgggttttcaacagtcccagctttcactgccagggtcccagtcagattccaggaatttgcgccctaactttgcttgctaatcctggtttagagctatcccactaaaatatttaatcctaattcttagtccttgcctgtgagatatgaggtcttacaggagacctcagagctcccagcccttctcctcctgctaacccttctcacaccctcaagaggagttagaaaagaggtccttgtcattctcacctcttatggaaaatggaataagaaataatcatatcctttcttcccacccttctcctgttatttaggatttctgacaaagctggcttgagattggtcacttagagccgactgtctcctctgccttttgtttttcagcttcagagacagatccaatatagtcccagggacctgggtctctgggagaggaaggaagagggagggagcaaagagattggggtatgtcccctgtagtacactcttacctcttacttcctagactttgatttctccggcagcccagatgttcagttctcttggcccctctctaccccttactgggatctggttttcattttccggtccttttgccatacacagttacagagatcagtcaaatccataccaccactgagatctcatttattgccacagatgcacaaaataaataacccaaaatcacaaaatgtgttaaatatgggcccatttatacttatggggaagggtgtgagactatacacaaggatgagtttggagatgtctgaagtattcccaggttgaggaggagagaggggaaatagcaccattggttcctttccgtgagtatgtgcggggagaagtttcaagaaggttcttatggaaaaaaggctgtgagcatagaaagcagtcataggaggttggggaactagcttgtccctccccacccccagatcctgcaaaagaggtacaaagcttcccagagggccacagggcccagaccagagtcaagcctcttgttttaggagaaacctcagtggacaggcagggtagcccagtccttagatctgtggggaaggccctgagcccttctggagctaggagtggcaagagtgggagtcaagtatttgaccagcagagcctctatgtaggaatcatggtcactttaccaatactgatggggagggcctgttccccattgcaggcctagaatggtttgaatgggagaagtcaggaagtactgtagtagctgtaggggagagaagattctgagagccagaaggcaggaatggatttggttttgagcagggacgtggaaacgtggagaccaggtgaggtctcattattttggggcgaaaatgtgggttgctattaatactcctgcaatgggcgtgtgaatgtgttcccagaaatgagtggggaattccacccccaaaaagcactcgcggctgattcgcacctccaccgccagccgcacattagacctcaggctgcggcggggacacggcaggccgcagcagggacaggcggtgggggaagcctcggtgccggtcgccggcggagtcccccagcggcgggccagacacgcgcggcagaagctgtgctcgcacgccagaagcaccgggtcctcgaaggagcccccgcacagaggacacgtcgccagctgctccagacgctccaccagccccgggcccagctcgggcgcatccatggaaagccaggatctggacgccgccccttccgcgaccaccgtgaccgccttcgagcgcgcagatggcgggccgcccctgctgcttgctgtgtagatgcccttctctccgactcccgcattaacttttgccgctttccgcccctctcctgggattgcctctctcttcaaccagagtctcagtctcgtcaaatctctccaccacatcaggctttatagggagggaggaggctcccacgggaggtaaacaccaggccttgcgtaacgcc

SEQ ID NO: 369874 - DNA, 2724 bp, Homo sapiens
ggaagggaaaaagggggactgcagtatgcgtcacacccggaagcggcgagccggaagtggggttagccaggttatccccaggggtggagaagcggaggcccaggaggagggggaataagagaaccggagccttaccatcaaacttcggaaacggaagccagagaaaaaggtagaatggacaagtgacactgtggacaatgaacacatgggccgccgctcatccaaatgctgctgtatttatgagaaacctcgggcctttggcgagagctccacggaaagtgatgaggaggaagaagagggctgtggtcatacacactgtgtacgtggccaccgcaaaggacggcgtcgtgcaaccctaggaccgacccccaccacccctccccagcctcctgacccttcccagccccctccagggccaatgcagcactaaatccctctctcctccagcattcctgtgtctgtctggccctaaatgtatccatgtggctacttctccagccccctccttccctctcttctgcctgatagagggaagaggaagaggaggacgaacagagatcctgaaattctgacttgctgctattccagaacccagcctcctgggtttccccagtcctcatttttcctcccaatacccacccttctctctcgagggatctaggcaccttggtcccagtgtcttccttttgttctcactgccaaactgcctgtcctgggatctagttatcttggccctgcactctcaacatgagtagcgaacacttaaattgggttttcaacagtcccagctttcactgccagggtcccagtcagattccaggaatttgcgccctaactttgcttgctaatcctggtttagagctatcccactaaaatatttaatcctaattcttagtccttgcctgtgagatatgaggtcttacaggagacctcagagctcccagcccttctcctcctgctaacccttctcacaccctcaagaggagttagaaaagaggtccttgtcattctcacctcttatggaaaatggaataagaaataatcatatcctttcttcccacccttctcctgttatttaggatttctgacaaagctggcttgagattggtcacttagagccgactgtctcctctgccttttgtttttcagcttcagagacagatccaatatagtcccagggacctgggtctctgggagaggaaggaagagggagggagcaaagagattggggtatgtcccctgtagtacactcttacctcttacttcctagactttgatttctccggcagcccagatgttcagttctcttggcccctctctaccccttactgggatctggttttcattttccggtccttttgccatacacagttacagagatcagtcaaatccataccaccactgagatctcatttattgccacagatgcacaaaataaataacccaaaatcacaaaatgtgttaaatatgggcccatttatacttatggggaagggtgtgagactatacacaaggatgagtttggagatgtctgaagtattcccaggttgaggaggagagaggggaaatagcaccattggttcctttccgtgagtatgtgcggggagaagtttcaagaaggttcttatggaaaaaaggctgtgagcatagaaagcagtcataggaggttggggaactagcttgtccctccccacccccagatcctgcaaaagaggtacaaagcttcccagagggccacagggcccagaccagagtcaagcctcttgttttaggagaaacctcagtggacaggcagggtagcccagtccttagatctgtggggaaggccctgagcccttctggagctaggagtggcaagagtgggagtcaagtatttgaccagcagagcctctatgtaggaatcatggtcactttaccaatactgatggggagggcctgttccccattgcaggcctagaatggtttgaatgggagaagtcaggaagtactgtagtagctgtaggggagagaagattctgagagccagaaggcaggaatggatttggttttgagcagggacgtggaaacgtggagaccaggtgaggtctcattattttggggcgaaaatgtgggttgctattaatactcctgcaatgggcgtgtgaatgtgttcccagaaatgagtggggaattccacccccaaaaagcactcgcggctgattcgcacctccaccgccagccgcacattagacctcaggctgcggcggggacacggcaggccgcagcagggacaggcggtgggggaagcctcggtgccggtcgccggcggagtcccccagcggcgggccagacacgcgcggcagaagctgtgctcgcacgccagaagcaccgggtcctcgaaggagcccccgcacagaggacacgtcgccagctgctccagacgctccaccagccccgggcccagctcgggcgcatccatggaaagccaggatctggacgccgccccttccgcgaccaccgtgaccgccttcgagcgcgcagatggcgggccgcccctgctgcttgctgtgtagatgcccttctctccgactcccgcattaacttttgccgctttccgcccctctcctgggattgcctctctcttcaaccagagtctcagtctcgtcaaatctctccaccacatcaggctttatagggagggaggaggctcccacgggaggtaaacaccaggccttgcgtaacgcc

SEQ ID NO: 369875 - DNA, 2907 bp, Homo sapiens
ctacaggcacagggcgaggggtagaaccacatcgcttgactcttaagtgtgtttccaactgctcccacttcccgttttctttagagaaacccagaccaaacaaggaaagggaaataggccacggtagggtcattactattgctccttaagcttcctcgccggtccacctacccagacaaggcaaacggaaatctgcagcaggactcagcttggtgcacacaactccgccctcgccacacccactctgcagcgtctggcccggcaatacccatctgggcgcccctcctgcttcctctaggctgagaaccggagccttaccatcaaacttcggaaacggaagccagagaaaaaggtagaatggacaagtgacactgtggacaatgaacacatgggccgccgctcatccaaatgctgctgtatttatgagaaacctcgggcctttggcgagagctccacggaaagtgatgaggaggaagaagagggctgtggtcatacacactgtgtacgtggccaccgcaaaggacggcgtcgtgcaaccctaggaccgacccccaccacccctccccagcctcctgacccttcccagccccctccagggccaatgcagcactaaatccctctctcctccagcattcctgtgtctgtctggccctaaatgtatccatgtggctacttctccagccccctccttccctctcttctgcctgatagagggaagaggaagaggaggacgaacagagatcctgaaattctgacttgctgctattccagaacccagcctcctgggtttccccagtcctcatttttcctcccaatacccacccttctctctcgagggatctaggcaccttggtcccagtgtcttccttttgttctcactgccaaactgcctgtcctgggatctagttatcttggccctgcactctcaacatgagtagcgaacacttaaattgggttttcaacagtcccagctttcactgccagggtcccagtcagattccaggaatttgcgccctaactttgcttgctaatcctggtttagagctatcccactaaaatatttaatcctaattcttagtccttgcctgtgagatatgaggtcttacaggagacctcagagctcccagcccttctcctcctgctaacccttctcacaccctcaagaggagttagaaaagaggtccttgtcattctcacctcttatggaaaatggaataagaaataatcatatcctttcttcccacccttctcctgttatttaggatttctgacaaagctggcttgagattggtcacttagagccgactgtctcctctgccttttgtttttcagcttcagagacagatccaatatagtcccagggacctgggtctctgggagaggaaggaagagggagggagcaaagagattggggtatgtcccctgtagtacactcttacctcttacttcctagactttgatttctccggcagcccagatgttcagttctcttggcccctctctaccccttactgggatctggttttcattttccggtccttttgccatacacagttacagagatcagtcaaatccataccaccactgagatctcatttattgccacagatgcacaaaataaataacccaaaatcacaaaatgtgttaaatatgggcccatttatacttatggggaagggtgtgagactatacacaaggatgagtttggagatgtctgaagtattcccaggttgaggaggagagaggggaaatagcaccattggttcctttccgtgagtatgtgcggggagaagtttcaagaaggttcttatggaaaaaaggctgtgagcatagaaagcagtcataggaggttggggaactagcttgtccctccccacccccagatcctgcaaaagaggtacaaagcttcccagagggccacagggcccagaccagagtcaagcctcttgttttaggagaaacctcagtggacaggcagggtagcccagtccttagatctgtggggaaggccctgagcccttctggagctaggagtggcaagagtgggagtcaagtatttgaccagcagagcctctatgtaggaatcatggtcactttaccaatactgatggggagggcctgttccccattgcaggcctagaatggtttgaatgggagaagtcaggaagtactgtagtagctgtaggggagagaagattctgagagccagaaggcaggaatggatttggttttgagcagggacgtggaaacgtggagaccaggtgaggtctcattattttggggcgaaaatgtgggttgctattaatactcctgcaatgggcgtgtgaatgtgttcccagaaatgagtggggaattccacccccaaaaagcactcgcggctgattcgcacctccaccgccagccgcacattagacctcaggctgcggcggggacacggcaggccgcagcagggacaggcggtgggggaagcctcggtgccggtcgccggcggagtcccccagcggcgggccagacacgcgcggcagaagctgtgctcgcacgccagaagcaccgggtcctcgaaggagcccccgcacagaggacacgtcgccagctgctccagacgctccaccagccccgggcccagctcgggcgcatccatggaaagccaggatctggacgccgccccttccgcgaccaccgtgaccgccttcgagcgcgcagatggcgggccgcccctgctgcttgctgtgtagatgcccttctctccgactcccgcattaacttttgccgctttccgcccctctcctgggattgcctctctcttcaaccagagtctcagtctcgtcaaatctctccaccacatcaggctttatagggagggaggaggctcccacgggaggtaaacaccaggccttgcgtaacgcc

SEQ ID NO: 369876 - DNA, 2806 bp, Homo sapiens
cagggattagaagagttgttggaggagctaggcctagggatatgggaggtgtggggttgaatatctagggctgggagaatcggaaggtattggagctatttggagtggcagagatggtgcaggaggatgatttggggaggaagacggagaaacagcaaggattatattttcctttgaagagttgctgggacctttcctaggagaaccggagccttaccatcaaacttcggaaacggaagccagagaaaaaggtagaatggacaagtgacactgtggacaatgaacacatgggccgccgctcatccaaatgctgctgtatttatgagaaacctcgggcctttggcgagagctccacggaaagtgatgaggaggaagaagagggctgtggtcatacacactgtgtacgtggccaccgcaaaggacggcgtcgtgcaaccctaggaccgacccccaccacccctccccagcctcctgacccttcccagccccctccagggccaatgcagcactaaatccctctctcctccagcattcctgtgtctgtctggccctaaatgtatccatgtggctacttctccagccccctccttccctctcttctgcctgatagagggaagaggaagaggaggacgaacagagatcctgaaattctgacttgctgctattccagaacccagcctcctgggtttccccagtcctcatttttcctcccaatacccacccttctctctcgagggatctaggcaccttggtcccagtgtcttccttttgttctcactgccaaactgcctgtcctgggatctagttatcttggccctgcactctcaacatgagtagcgaacacttaaattgggttttcaacagtcccagctttcactgccagggtcccagtcagattccaggaatttgcgccctaactttgcttgctaatcctggtttagagctatcccactaaaatatttaatcctaattcttagtccttgcctgtgagatatgaggtcttacaggagacctcagagctcccagcccttctcctcctgctaacccttctcacaccctcaagaggagttagaaaagaggtccttgtcattctcacctcttatggaaaatggaataagaaataatcatatcctttcttcccacccttctcctgttatttaggatttctgacaaagctggcttgagattggtcacttagagccgactgtctcctctgccttttgtttttcagcttcagagacagatccaatatagtcccagggacctgggtctctgggagaggaaggaagagggagggagcaaagagattggggtatgtcccctgtagtacactcttacctcttacttcctagactttgatttctccggcagcccagatgttcagttctcttggcccctctctaccccttactgggatctggttttcattttccggtccttttgccatacacagttacagagatcagtcaaatccataccaccactgagatctcatttattgccacagatgcacaaaataaataacccaaaatcacaaaatgtgttaaatatgggcccatttatacttatggggaagggtgtgagactatacacaaggatgagtttggagatgtctgaagtattcccaggttgaggaggagagaggggaaatagcaccattggttcctttccgtgagtatgtgcggggagaagtttcaagaaggttcttatggaaaaaaggctgtgagcatagaaagcagtcataggaggttggggaactagcttgtccctccccacccccagatcctgcaaaagaggtacaaagcttcccagagggccacagggcccagaccagagtcaagcctcttgttttaggagaaacctcagtggacaggcagggtagcccagtccttagatctgtggggaaggccctgagcccttctggagctaggagtggcaagagtgggagtcaagtatttgaccagcagagcctctatgtaggaatcatggtcactttaccaatactgatggggagggcctgttccccattgcaggcctagaatggtttgaatgggagaagtcaggaagtactgtagtagctgtaggggagagaagattctgagagccagaaggcaggaatggatttggttttgagcagggacgtggaaacgtggagaccaggtgaggtctcattattttggggcgaaaatgtgggttgctattaatactcctgcaatgggcgtgtgaatgtgttcccagaaatgagtggggaattccacccccaaaaagcactcgcggctgattcgcacctccaccgccagccgcacattagacctcaggctgcggcggggacacggcaggccgcagcagggacaggcggtgggggaagcctcggtgccggtcgccggcggagtcccccagcggcgggccagacacgcgcggcagaagctgtgctcgcacgccagaagcaccgggtcctcgaaggagcccccgcacagaggacacgtcgccagctgctccagacgctccaccagccccgggcccagctcgggcgcatccatggaaagccaggatctggacgccgccccttccgcgaccaccgtgaccgccttcgagcgcgcagatggcgggccgcccctgctgcttgctgtgtagatgcccttctctccgactcccgcattaacttttgccgctttccgcccctctcctgggattgcctctctcttcaaccagagtctcagtctcgtcaaatctctccaccacatcaggctttatagggagggaggaggctcccacgggaggtaaacaccaggccttgcgtaacgcc

SEQ ID NO: 369877 - DNA, 2767 bp, Homo sapiens
cagggattagaagagttgttggaggagctaggcctagggatatgggaggtgtggggttgaatatctagggctgggagaatcggaaggatgatttggggaggaagacggagaaacagcaaggattatattttcctttgaagagttgctgggacctttcctaggagaaccggagccttaccatcaaacttcggaaacggaagccagagaaaaaggtagaatggacaagtgacactgtggacaatgaacacatgggccgccgctcatccaaatgctgctgtatttatgagaaacctcgggcctttggcgagagctccacggaaagtgatgaggaggaagaagagggctgtggtcatacacactgtgtacgtggccaccgcaaaggacggcgtcgtgcaaccctaggaccgacccccaccacccctccccagcctcctgacccttcccagccccctccagggccaatgcagcactaaatccctctctcctccagcattcctgtgtctgtctggccctaaatgtatccatgtggctacttctccagccccctccttccctctcttctgcctgatagagggaagaggaagaggaggacgaacagagatcctgaaattctgacttgctgctattccagaacccagcctcctgggtttccccagtcctcatttttcctcccaatacccacccttctctctcgagggatctaggcaccttggtcccagtgtcttccttttgttctcactgccaaactgcctgtcctgggatctagttatcttggccctgcactctcaacatgagtagcgaacacttaaattgggttttcaacagtcccagctttcactgccagggtcccagtcagattccaggaatttgcgccctaactttgcttgctaatcctggtttagagctatcccactaaaatatttaatcctaattcttagtccttgcctgtgagatatgaggtcttacaggagacctcagagctcccagcccttctcctcctgctaacccttctcacaccctcaagaggagttagaaaagaggtccttgtcattctcacctcttatggaaaatggaataagaaataatcatatcctttcttcccacccttctcctgttatttaggatttctgacaaagctggcttgagattggtcacttagagccgactgtctcctctgccttttgtttttcagcttcagagacagatccaatatagtcccagggacctgggtctctgggagaggaaggaagagggagggagcaaagagattggggtatgtcccctgtagtacactcttacctcttacttcctagactttgatttctccggcagcccagatgttcagttctcttggcccctctctaccccttactgggatctggttttcattttccggtccttttgccatacacagttacagagatcagtcaaatccataccaccactgagatctcatttattgccacagatgcacaaaataaataacccaaaatcacaaaatgtgttaaatatgggcccatttatacttatggggaagggtgtgagactatacacaaggatgagtttggagatgtctgaagtattcccaggttgaggaggagagaggggaaatagcaccattggttcctttccgtgagtatgtgcggggagaagtttcaagaaggttcttatggaaaaaaggctgtgagcatagaaagcagtcataggaggttggggaactagcttgtccctccccacccccagatcctgcaaaagaggtacaaagcttcccagagggccacagggcccagaccagagtcaagcctcttgttttaggagaaacctcagtggacaggcagggtagcccagtccttagatctgtggggaaggccctgagcccttctggagctaggagtggcaagagtgggagtcaagtatttgaccagcagagcctctatgtaggaatcatggtcactttaccaatactgatggggagggcctgttccccattgcaggcctagaatggtttgaatgggagaagtcaggaagtactgtagtagctgtaggggagagaagattctgagagccagaaggcaggaatggatttggttttgagcagggacgtggaaacgtggagaccaggtgaggtctcattattttggggcgaaaatgtgggttgctattaatactcctgcaatgggcgtgtgaatgtgttcccagaaatgagtggggaattccacccccaaaaagcactcgcggctgattcgcacctccaccgccagccgcacattagacctcaggctgcggcggggacacggcaggccgcagcagggacaggcggtgggggaagcctcggtgccggtcgccggcggagtcccccagcggcgggccagacacgcgcggcagaagctgtgctcgcacgccagaagcaccgggtcctcgaaggagcccccgcacagaggacacgtcgccagctgctccagacgctccaccagccccgggcccagctcgggcgcatccatggaaagccaggatctggacgccgccccttccgcgaccaccgtgaccgccttcgagcgcgcagatggcgggccgcccctgctgcttgctgtgtagatgcccttctctccgactcccgcattaacttttgccgctttccgcccctctcctgggattgcctctctcttcaaccagagtctcagtctcgtcaaatctctccaccacatcaggctttatagggagggaggaggctcccacgggaggtaaacaccaggccttgcgtaacgcc

SEQ ID NO: 369878 - DNA, 2583 bp, Homo sapiens
aggagcgagtaaatgatgtatgagtgcgatacgcggttgtaatttcagtcacgaggcaggcggaggcccaggaggagggggaataagctgctgtatttatgagaaacctcgggcctttggcgagagctccacggaaagtgatgaggaggaagaagagggctgtggtcatacacactgtgtacgtggccaccgcaaaggacggcgtcgtgcaaccctaggaccgacccccaccacccctccccagcctcctgacccttcccagccccctccagggccaatgcagcactaaatccctctctcctccagcattcctgtgtctgtctggccctaaatgtatccatgtggctacttctccagccccctccttccctctcttctgcctgatagagggaagaggaagaggaggacgaacagagatcctgaaattctgacttgctgctattccagaacccagcctcctgggtttccccagtcctcatttttcctcccaatacccacccttctctctcgagggatctaggcaccttggtcccagtgtcttccttttgttctcactgccaaactgcctgtcctgggatctagttatcttggccctgcactctcaacatgagtagcgaacacttaaattgggttttcaacagtcccagctttcactgccagggtcccagtcagattccaggaatttgcgccctaactttgcttgctaatcctggtttagagctatcccactaaaatatttaatcctaattcttagtccttgcctgtgagatatgaggtcttacaggagacctcagagctcccagcccttctcctcctgctaacccttctcacaccctcaagaggagttagaaaagaggtccttgtcattctcacctcttatggaaaatggaataagaaataatcatatcctttcttcccacccttctcctgttatttaggatttctgacaaagctggcttgagattggtcacttagagccgactgtctcctctgccttttgtttttcagcttcagagacagatccaatatagtcccagggacctgggtctctgggagaggaaggaagagggagggagcaaagagattggggtatgtcccctgtagtacactcttacctcttacttcctagactttgatttctccggcagcccagatgttcagttctcttggcccctctctaccccttactgggatctggttttcattttccggtccttttgccatacacagttacagagatcagtcaaatccataccaccactgagatctcatttattgccacagatgcacaaaataaataacccaaaatcacaaaatgtgttaaatatgggcccatttatacttatggggaagggtgtgagactatacacaaggatgagtttggagatgtctgaagtattcccaggttgaggaggagagaggggaaatagcaccattggttcctttccgtgagtatgtgcggggagaagtttcaagaaggttcttatggaaaaaaggctgtgagcatagaaagcagtcataggaggttggggaactagcttgtccctccccacccccagatcctgcaaaagaggtacaaagcttcccagagggccacagggcccagaccagagtcaagcctcttgttttaggagaaacctcagtggacaggcagggtagcccagtccttagatctgtggggaaggccctgagcccttctggagctaggagtggcaagagtgggagtcaagtatttgaccagcagagcctctatgtaggaatcatggtcactttaccaatactgatggggagggcctgttccccattgcaggcctagaatggtttgaatgggagaagtcaggaagtactgtagtagctgtaggggagagaagattctgagagccagaaggcaggaatggatttggttttgagcagggacgtggaaacgtggagaccaggtgaggtctcattattttggggcgaaaatgtgggttgctattaatactcctgcaatgggcgtgtgaatgtgttcccagaaatgagtggggaattccacccccaaaaagcactcgcggctgattcgcacctccaccgccagccgcacattagacctcaggctgcggcggggacacggcaggccgcagcagggacaggcggtgggggaagcctcggtgccggtcgccggcggagtcccccagcggcgggccagacacgcgcggcagaagctgtgctcgcacgccagaagcaccgggtcctcgaaggagcccccgcacagaggacacgtcgccagctgctccagacgctccaccagccccgggcccagctcgggcgcatccatggaaagccaggatctggacgccgccccttccgcgaccaccgtgaccgccttcgagcgcgcagatggcgggccgcccctgctgcttgctgtgtagatgcccttctctccgactcccgcattaacttttgccgctttccgcccctctcctgggattgcctctctcttcaaccagagtctcagtctcgtcaaatctctccaccacatcaggctttatagggagggaggaggctcccacgggaggtaaacaccaggccttgcgtaacgcc

SEQ ID NO: 369879 - DNA, 2912 bp, Homo sapiens
ggaagggaaaaagggggactgcagtatgcgtcacacccggaagcggcgagccggaagtggggttagccaggttatccccaggggtggagaagcggaggcccaggaggagggggaataaagaaggtggaggatcctggctaccactctgaatccgataccgcttctcttagacctcagcgacagaaaaagggaagggtgtctcatcccccttcctcctctcctccctgtcctgagccttagccatggccgaggcaggggctgggctgagcgagaccgtcactgagacaacggttaccgtgacaaccgagcccgagaaccggagccttaccatcaaacttcggaaacggaagccagagaaaaaggtagaatggacaagtgacactgtggacaatgaacacatgggccgccgctcatccaaatgctgctgtatttatgagaaacctcgggcctttggcgagagctccacggaaagtgatgaggaggaagaagagggctgtggtcatacacactgtgtacgtggccaccgcaaaggacggcgtcgtgcaaccctaggaccgacccccaccacccctccccagcctcctgacccttcccagccccctccagggccaatgcagcactaaatccctctctcctccagcattcctgtgtctgtctggccctaaatgtatccatgtggctacttctccagccccctccttccctctcttctgcctgatagagggaagaggaagaggaggacgaacagagatcctgaaattctgacttgctgctattccagaacccagcctcctgggtttccccagtcctcatttttcctcccaatacccacccttctctctcgagggatctaggcaccttggtcccagtgtcttccttttgttctcactgccaaactgcctgtcctgggatctagttatcttggccctgcactctcaacatgagtagcgaacacttaaattgggttttcaacagtcccagctttcactgccagggtcccagtcagattccaggaatttgcgccctaactttgcttgctaatcctggtttagagctatcccactaaaatatttaatcctaattcttagtccttgcctgtgagatatgaggtcttacaggagacctcagagctcccagcccttctcctcctgctaacccttctcacaccctcaagaggagttagaaaagaggtccttgtcattctcacctcttatggaaaatggaataagaaataatcatatcctttcttcccacccttctcctgttatttaggatttctgacaaagctggcttgagattggtcacttagagccgactgtctcctctgccttttgtttttcagcttcagagacagatccaatatagtcccagggacctgggtctctgggagaggaaggaagagggagggagcaaagagattggggtatgtcccctgtagtacaccttcgccgtagacagcacaataaaaaaacccaaaaccaaaaaacaaaacaaaaacccaacaaaaaaaaaataaatgggatctggttttcattttccggtccttttgccatacacagttacagagatcagtcaaatccataccaccactgagatctcatttattgccacagatgcacaaaataaataacccaaaatcacaaaatgtgttaaatatgggcccatttatacttatggggaagggtgtgagactatacacaaggatgagtttggagatgtctgaagtattcccaggttgaggaggagagaggggaaatagcaccattggttcctttccgtgagtatgtgcggggagaagtttcaagaaggttcttatggaaaaaaggctgtgagcatagaaagcagtcataggaggttggggaactagcttgtccctccccacccccagatcctgcaaaagaggtacaaagcttcccagagggccacagggcccagaccagagtcaagcctcttgttttaggagaaacctcagtggacaggcagggtagcccagtccttagatctgtggggaaggccctgagcccttctggagctaggagtggcaagagtgggagtcaagtatttgaccagcagagcctctatgtaggaatcatggtcactttaccaatactgatggggagggcctgttccccattgcaggcctagaatggtttgaatgggagaagtcaggaagtactgtagtagctgtaggggagagaagattctgagagccagaaggcaggaatggatttggttttgagcagggacgtggaaacgtggagaccaggtgaggtctcattattttggggcgaaaatgtgggttgctattaatactcctgcaatgggcgtgtgaatgtgttcccagaaatgagtggggaattccacccccaaaaagcactcgcggctgattcgcacctccaccgccagccgcacattagacctcaggctgcggcggggacacggcaggccgcagcagggacaggcggtgggggaagcctcggtgccggtcgccggcggagtcccccagcggcgggccagacacgcgcggcagaagctgtgctcgcacgccagaagcaccgggtcctcgaaggagcccccgcacagaggacacgtcgccagctgctccagacgctccaccagccccgggcccagctcgggcgcatccatggaaagccaggatctggacgccgccccttccgcgaccaccgtgaccgccttcgagcgcgcagatggcgggccgcccctgctgcttgctgtgtagatgcccttctctccgactcccgcattaacttttgccgctttccgcccctctcctgggattgcctctctcttcaaccagagtctcagtctcgtcaaatctctccaccacatcaggctttatagggagggaggaggctcccacgggaggtaaacaccaggccttgcgtaacgcc

SEQ ID NO: 369880 - DNA, 906 bp, Homo sapiens
  misc_feature (837)..(837): n is a, c, g, or t
ggaagggaaaaagggggactgcagtatgcgtcacacccggaagcggcgagccggaagtggggttagccaggttatccccaggggtggagaagcggaggcccaggaggagggggaataaagaaggtggaggatcctggctaccactctgaatccgataccgcttctcttagacctcagcgacagaaaaagggaagggtgtctcatcccccttcctcctctcctccctgtcctgagccttagccatggccgaggcaggggctgggctgagcgagaccgtcactgagacaacggttaccgtgacaaccgagcccgagaaccggagccttaccatcaaacttcggaaacggaagccagagaaaaaggtagaatggacaagtgacactgtggacaatgaacacatgggccgccgctcatccaaatgctgctgtatttatgagaaacctcgggcctttggcgagagctccacggaaagtgatgaggaggaagaagagggctgtggtcatacacactgtgtacgtggccaccgcaaaggacggcgtcgtgcaaccctaggaccgacccccaccacccctccccagcctcctgacccttcccagccccctccagggccaatgcagcactaaatccctctctcctccagcattcctgtgtctgtctggccctaaatgtatccatgtggctacttctccagccccctccttccctctcttctgcctgatagagggaagaggaagaggaggacgaacagagatcctgaaattctgacttgctgctattccagaacccagcctcctgggtttccccagtcctcatttttcctcccaatacccacctttnccgcggggtcacgccctggcccggtgtccttgtgtcgccccgcgcctcgggtatttgggcggccatggg

SEQ ID NO: 369881 - DNA, 1785 bp, Homo sapiens
ggaagggaaaaagggggactgcagtatgcgtcacacccggaagcggcgagccggaagtggggttagccaggttatccccaggggtggagaagcggaggcccaggaggagggggaataaagaaggtggaggatcctggctaccactctgaatccgataccgcttctcttagacctcagcgacagaaaaagggaagggtgtctcatcccccttcctcctctcctccctgtcctgagccttagccatggccgaggcaggggctgggctgagcgagaccgtcactgagacaacggttaccgtgacaaccgagccctcttacctcttacttcctagactttgatttctccggcagcccagatgttcagttctcttggcccctctctaccccttactgggatctggttttcattttccggtccttttgccatacacagttacagagatcagtcaaatccataccaccactgagatctcatttattgccacagatgcacaaaataaataacccaaaatcacaaaatgtgttaaatatgggcccatttatacttatggggaagggtgtgagactatacacaaggatgagtttggagatgtctgaagtattcccaggttgaggaggagagaggggaaatagcaccattggttcctttccgtgagtatgtgcggggagaagtttcaagaaggttcttatggaaaaaaggctgtgagcatagaaagcagtcataggaggttggggaactagcttgtccctccccacccccagatcctgcaaaagaggtacaaagcttcccagagggccacagggcccagaccagagtcaagcctcttgttttaggagaaacctcagtggacaggcagggtagcccagtccttagatctgtggggaaggccctgagcccttctggagctaggagtggcaagagtgggagtcaagtatttgaccagcagagcctctatgtaggaatcatggtcactttaccaatactgatggggagggcctgttccccattgcaggcctagaatggtttgaatgggagaagtcaggaagtactgtagtagctgtaggggagagaagattctgagagccagaaggcaggaatggatttggttttgagcagggacgtggaaacgtggagaccaggtgaggtctcattattttggggcgaaaatgtgggttgctattaatactcctgcaatgggcgtgtgaatgtgttcccagaaatgagtggggaattccacccccaaaaagcactcgcggctgattcgcacctccaccgccagccgcacattagacctcaggctgcggcggggacacggcaggccgcagcagggacaggcggtgggggaagcctcggtgccggtcgccggcggagtcccccagcggcgggccagacacgcgcggcagaagctgtgctcgcacgccagaagcaccgggtcctcgaaggagcccccgcacagaggacacgtcgccagctgctccagacgctccaccagccccgggcccagctcgggcgcatccatggaaagccaggatctggacgccgccccttccgcgaccaccgtgaccgccttcgagcgcgcagatggcgggccgcccctgctgcttgctgtgtagatgcccttctctccgactcccgcattaacttttgccgctttccgcccctctcctgggattgcctctctcttcaaccagagtctcagtctcgtcaaatctctccaccacatcaggctttatagggagggaggaggctcccacgggaggtaaacaccaggccttgcgtaacgcc

SEQ ID NO: 369882 - DNA, 2917 bp, Homo sapiens
ggaagggaaaaagggggactgcagtatgcgtcacacccggaagcggcgagccggaagtggggttagccaggttatccccaggggtggagaagcggaggcccaggaggagggggaataaagaaggtggaggatcctggctaccactctgaatccgataccgcttctcttagacctcagcgacagaaaaagggaagggtgtctcatcccccttcctcctctcctccctgtcctgagccttagccatggccgaggcaggggctgggctgagcgagaccgtcactgagacaacggttaccgtgacaaccgagcccgagaaccggagccttaccatcaaacttcggaaacggaagccagagaaaaaggtagaatggacaagtgacactgtggacaatgaacacatgggccgccgctcatccaaatgctgctgtatttatgagaaacctcgggcctttggcgagagctccacggaaagtgatgaggaggaagaagagggctgtggtcatacacactgtgtacgtggccaccgcaaaggacggcgtcgtgcaaccctaggaccgacccccaccacccctccccagcctcctgacccttcccagccccctccagggccaatgcagcactaaatccctctctcctccagcattcctgtgtctgtctggccctaaatgtatccatgtggctacttctccagccccctccttccctctcttctgcctgatagagggaagaggaagaggaggacgaacagagatcctgaaattctgacttgctgctattccagaacccagcctcctgggtttccccagtcctcatttttcctcccaatacccacccttctctctcgagggatctaggcaccttggtcccagtgtcttccttttgttctcactgccaaactgcctgtcctgggatctagttatcttggccctgcactctcaacatgagtagcgaacacttaaattgggttttcaacagtcccagctttcactgccagggtcccagtcagattccaggaatttgcgccctaactttgcttgctaatcctggtttagagctatcccactaaaatatttaatcctaattcttagtccttgcctgtgagatatgaggtcttacaggagacctcagagctcccagcccttctcctcctgctaacccttctcacaccctcaagaggagttagaaaagaggtccttgtcattctcacctcttatggaaaatggaataagaaataatcatatcctttcttcccacccttctcctgttatttaggatttctgacaaagctggcttgagattggtcacttagagccgactgtctcctctgccttttgtttttcagcttcagagacagatccaatatagtcccagggacctgggtctctgggagaggaaggaagagggagggagcaaagagattggggtatgtcccctgtagtacactcttacctcttacttcctagactttgatttctccggcagcccagatgttcagttctcttggcccctctctaccccttactgggatctggttttcattttccggtccttttgccatacacagttacagagatcagtcaaatccataccaccactgagatctcatttattgccacagatgcacaaaataaataacccaaaatcacaaaatgtgttaaatatgggcccatttatacttatggggaagggtgtgagactatacacaaggatgagtttggagatgtctgaagtattcccaggttgaggaggagagaggggaaatagcaccattggttcctttccgtgagtatgtgcggggagaagtttcaagaaggttcttatggaaaaaaggctgtgagcatagaaagcagtcataggaggttggggaactagcttgtccctccccacccccagatcctgcaaaagaggtacaaagcttcccagagggccacagggcccagaccagagtcaagcctcttgttttaggagaaacctcagtggacaggcagggtagcccagtccttagatctgtggggaaggccctgagcccttctggagctaggagtggcaagagtgggagtcaagtatttgaccagcagagcctctatgtaggaatcatggtcactttaccaatactgatggggagggcctgttccccattgcaggcctagaatggtttgaatgggagaagtcaggaagtactgtagtagctgtaggggagagaagattctgagagccagaaggcaggaatggatttggttttgagcagggacgtggaaacgtggagaccaggtgaggtctcattattttggggcgaaaatgtgggttgctattaatactcctgcaatgggcgtgtgaatgtgttcccagaaatgagtggggaattccacccccaaaaagcactcgcggctgattcgcacctccaccgccagccgcacattagacctcaggctgcggcggggacacggcaggccgcagcagggacaggcggtgggggaagcctcggtgccggtcgccggcggagtcccccagcggcgggccagacacgcgcggcagaagctgtgctcgcacgccagaagcaccgggtcctcgaaggagcccccgcacagaggacacgtcgccagctgctccagacgctccaccagccccgggcccagctcgggcgcatccatggaaagccaggatctggacgccgccccttccgcgaccaccgtgaccgccttcgagcgcgcagatggcgggccgcccctgctgcttgctgtgtagatgcccttctctccgactcccgcattaacttttgccgctttccgcccctctcctgggattgcctctctcttcaaccagagtctcagtctcgtcaaatctctccaccacatcaggctttatagggagggaggaggctcccacgggaggtaaacaccaggccttgcgtaacgcc

SEQ ID NO: 369883 - DNA, 2306 bp, Homo sapiens
ggaagggaaaaagggggactgcagtatgcgtcacacccggaagcggcgagccggaagtggggttagccaggttatccccaggggtggagaagcggaggcccaggaggagggggaataaagaaggtggaggatcctggctaccactctgaatccgataccgcttctcttagacctcagcgacagaaaaagggaagggtgtctcatcccccttcctcctctcctccctgtcctgagccttagccatggccgaggcaggggctgggctgagcgagaccgtcactgagacaacggttaccgtgacaaccgagcccgagaaccggagccttaccatcaaacttcggaaacggaagccagagaaaaaggtagaatggacaagtgacactgtggacaatgaacacatgggccgccgctcatccaaatgctgctgtatttatgagaaacctcgggcctttggcgagagctccacggaaagtgatgaggaggaagaagagggctgtggtcatacacactgtgtacgtggccaccgcaaaggacggcgtcgtgcaaccctaggaccgacccccaccacccctccccagcctcctgacccttcccagccccctccagggccaatgcagcactaaatccctctctcctccagcattcctgtgtctgtctggccctaaatgtatccatgtggctacttctccagccccctccttccctctcttctgcctgatagagggaagaggaagaggaggacgaacagagatcctgaaattctgacttgctgctattccagaacccagcctcctgggtttccccagtcctcatttttcctcccaatacccacccttctctctcgagggatctaggcaccttggtcccagtgtcttccttttgttctcactgccaaactgcctgtcctgggatctagttatcttggccctgcactctcaacatgagtagcgaacacttaaattgggttttcaacagtcccagctttcactgccagggtcccagtcagattccaggaatttgcgccctaactttgcttgctaatcctggtttagagctatcccactaaaatatttaatcctaattcttagtccttgcctgtgagatatgaggtcttacaggagacctcagagctcccagcccttctcctcctgctaacccttctcacaccctcaagaggagttagaaaagaggtccttgtcattctcacctcttatggaaaatggaataagaaataatcatatcctttcttcccacccttctcctgttatttaggatttctgacaaagctggcttgagattggtcacttagagccgactgtctcctctgccttttgtttttcagcttcagagacagatccaatatagtcccagggacctgggtctctgggagaggaaggaagagggagggagcaaagagattggggtatgtcccctgtagtacactcttacctcttacttcctagactttgatttctccggcagcccagatgttcagttctcttggcccctctctaccccttactgggatctggttttcattttccggtccttttgccatacacagttacagagatcagtcaaatccataccaccactgagatctcatttattgccacagatgcacaaaataaataacccaaaatcacaaaaaaaaaaaaaaaaaaacacaacaaaaaaaaaacaaaacaaaaaaaacaaaaaaacaaaaaaaaaaaaaaaaaaaaaaaaaaaaaaaaaaaaaaaaaaaaaaaaagagagagggggggggcggcaaatccccgggggggccagacacaagaacgagccacacacccatttgttgagtcaaaaaaaggggccacacgaaaaagaggggcagaggataaaaaagaagaagaacagcggatgacgcgggagggtaaaaaaacagcagccgctgtgcgataaagaacaaggaagaggcagcagagaacgaacgtagtagaacaaggacaacagccaactctggcaggtgggggggggcgaagcacacaccctgggcggcggaggcaaaaacccactcccacgcgaagagagaaataacaagacgcccgcacgagagaggagagcaaacaaacctaccaccgctcgcggagggagacagagcgtgatagacggaggcggcgtaacacaccacgccgaggcgcactgcatcaagaagcgcgcgacaggcggaggagagaaaaaggaggaacagcccacagaggcaaaagagtcaccgcagcagaagaccaaaagtctacagccaacgcgggagccggcggctgcgagcacccaaacccgaaggc

SEQ ID NO: 369884 - DNA, 2612 bp, Homo sapiens
ggaagggaaaaagggggactgcagtatgcgtcacacccggaagcggcgagccggaagtggggttagccaggttatccccaggggtggagaagcggaggcccaggaggagggggaataaagaaggtggaggatcctggctaccactctgaatccgataccgcttctcttagacctcagcgacagaaaaagggaagggtgtctcatcccccttcctcctctcctccctgtcctgagccttagccatggccgaggcaggggctgggctgagcgagaccgtcactgagacaacggttaccgtgacaaccgagcccgagaaccggagccttaccatcaaacttcggaaacggaagccagagaaaaaggtagaatggacaagtgacactgtggacaatgaacacatgggccgccgctcatccaaatgctgctgtatttatgagaaacctcgggcctttggcgagagctccacggaaagtgatgaggaggaagaagagggctgtggtcatacacactgtgtacgtggccaccgcaaaggacggcgtcgtgcaaccctaggaccgacccccaccacccctccccagcctcctgacccttcccagccccctccagggccaatgcagcactaaatccctctctcctccagcattcctgtgtctgtctggccctaaatgtatccatgtggctacttctccagccccctccttccctctcttctgcctgatagagggaagaggaagaggaggacgaacagagatcctgaaattctgacttgctgctattccagaacccagcctcctgggtttccccagtcctcatttttcctcccaatacccaccccttctcctcctgctaacccttctcacaccctcaagaggagttagaaaagaggtccttgtcattctcacctcttatggaaaatggaataagaaataatcatatcctttcttcccacccttctcctgttatttaggatttctgacaaagctggcttgagattggtcacttagagccgactgtctcctctgccttttgtttttcagcttcagagacagatccaatatagtcccagggacctgggtctctgggagaggaaggaagagggagggagcaaagagattggggtatgtcccctgtagtacactcttacctcttacttcctagactttgatttctccggcagcccagatgttcagttctcttggcccctctctaccccttactgggatctggttttcattttccggtccttttgccatacacagttacagagatcagtcaaatccataccaccactgagatctcatttattgccacagatgcacaaaataaataacccaaaatcacaaaatgtgttaaatatgggcccatttatacttatggggaagggtgtgagactatacacaaggatgagtttggagatgtctgaagtattcccaggttgaggaggagagaggggaaatagcaccattggttcctttccgtgagtatgtgcggggagaagtttcaagaaggttcttatggaaaaaaggctgtgagcatagaaagcagtcataggaggttggggaactagcttgtccctccccacccccagatcctgcaaaagaggtacaaagcttcccagagggccacagggcccagaccagagtcaagcctcttgttttaggagaaacctcagtggacaggcagggtagcccagtccttagatctgtggggaaggccctgagcccttctggagctaggagtggcaagagtgggagtcaagtatttgaccagcagagcctctatgtaggaatcatggtcactttaccaatactgatggggagggcctgttccccattgcaggcctagaatggtttgaatgggagaagtcaggaagtactgtagtagctgtaggggagagaagattctgagagccagaaggcaggaatggatttggttttgagcagggacgtggaaacgtggagaccaggtgaggtctcattattttggggcgaaaatgtgggttgctattaatactcctgcaatgggcgtgtgaatgtgttcccagaaatgagtggggaattccacccccaaaaagcactcgcggctgattcgcacctccaccgccagccgcacattagacctcaggctgcggcggggacacggcaggccgcagcagggacaggcggtgggggaagcctcggtgccggtcgccggcggagtcccccagcggcgggccagacacgcgcggcagaagctgtgctcgcacgccagaagcaccgggtcctcgaaggagcccccgcacagaggacacgtcgccagctgctccagacgctccaccagccccgggcccagctcgggcgcatccatggaaagccaggatctggacgccgccccttccgcgaccaccgtgaccgccttcgagcgcgcagatggcgggccgcccctgctgcttgctgtgtagatgcccttctctccgactcccgcattaacttttgccgctttccgcccctctcctgggattgcctctctcttcaaccagagtctcagtctcgtcaaatctctccaccacatcaggctttatagggagggaggaggctcccacgggaggtaaacaccaggccttgcgtaacgcc

SEQ ID NO: 369885 - DNA, 1658 bp, Homo sapiens
  misc_feature (1646)..(1646): n is a, c, g, or t
ggaagggaaaaagggggactgcagtatgcgtcacacccggaagcggcgagccggaagtggggttagccaggttatccccaggggtggagaagcggaggcccaggaggagggggaataaagaaggtggaggatcctggctaccactctgaatccgataccgcttctcttagacctcagcgacagaaaaagggaagggtgtctcatcccccttcctcctctcctccctgtcctgagccttagccatggccgaggcaggggctgggctgagcgagaccgtcactgagacaacggttaccgtgacaaccgagcccgagaaccggagccttaccatcaaacttcggaaacggaagccagagaaaaaggtagaatggacaagtgacactgtggacaatgaacacatgggccgccgctcatccaaatgctgctgtatttatgagaaacctcgggcctttggcgagagctccacggaaagtgatgaggaggaagaagagggctgtggtcatacacactgtgtacgtggccaccgcaaaggacggcgtcgtgcaaccctaggaccgacccccaccacccctccccagcctcctgacccttcccagccccctccagggccaatgcagcactaaatccctctctcctccagcattcctgtgtctgtctggccctaaatgtatccatgtggctacttctccagccccctccttccctctcttctgcctgatagagggaagaggaagaggaggacgaacagagatcctgaaattctgacttgctgctattccagaacccagcctcctgggtttccccagtcctcatttttcctcccaatacccacccttctctctcgagggatctaggcaccttggtcccagtgtcttccttttgttctcactgccaaactgcctgtcctgggatctagttatcttggccctgcactctcaacatgagtagcgaacacttaaattgggttttcaacagtcccagctttcactgccagggtcccagtcagattccaggaatttgcgccctaactttgcttgctaatcctggtttagagctatcccactaaaatatttaatcctaattcttagtccttgcctgtgagatatgaggtcttacaggagacctcagagctcccagcccttctcctcctgctaacccttctcacaccctcaagaggagttagaaaagaggtccttgtcattctcacctcttatggaaaatggaataagaaataatcatatcctttcttcccacccttctcctgttatttaggatttctgacaaagctggcttgagattggtcacttagagccgactgtctcctctgccttttgtttttcagcttcagagacagatccaatatagtcccagggacctgggtctctgggagaggaaggaagagggagggagcaaagagattggggtatgtcccctgtagtacactcttacctcttacttcctagactttgatttctccggcagcccagatgttcagttctcttggcccctctctaccccttactgggatctggttttcattttccggtccttttgccatacacagttacagagatcagtcaaatccataccaccactgagatctcatttattgccacagatgcaccaacccggacagggatcctctngaacagcctacc

SEQ ID NO: 369886 - DNA, 1015 bp, Homo sapiens
gtttcccagcctggagtacagtggtgtgatctcggctcactgcaaccttcgcctcccaggttcaagtgattctcctgcctcagccttccgagtagctgggactacaggcacctgcaaccacgcccagctaattttttgtatttttagtaaagacggagtttcaccatgttggccaggctagtctcgaactcctgacctcaggtgatccacccgcctcaacctcccaaagtgctgggattacaggtgtgagccaccacgcccagcctcttgtgaaatttttttctcagaatagcaatagcttatccaaagaaagctagtgtacatcttccaaagcttttaaaataaaaaagaggaggagttacacttgcagaatgtatatcttctgggatgcttctccctactccactggacactgtttgaaagtttgtagtttataatattcttacctaggctgtgttggtcagcttagaatatctaagtgataggataaaactaaagctgagtggcaaactgccagtctatatactgcatttagtctataggcttgttttgtttggcccacaaagcattttattatttaagtttatgccaacatttaagaatcaagaatttcccagacattcagatttctgacttcaattgaaaatctgacagtataaaccctattatattcctgcatggcataaaatcttcagttgctgaatggtgatatccacttttagaaagagtactctaccctgttctgcattcatacaacctaagccaacccgcccttcaccatcccacttctctttcaggttatctgcttaggctggtaggcatttgtgtttataaaccttgaactcaagctgctagatggtcagttgcattgtgaactgaactatctgaatgatttttcattgtaaatatatagctatagaaacactttaaattcctctttctataaaaagtgaagtagcaaaatttttggaccattcccaaggacaaacaataaaatagagggaaaatacagcaa

SEQ ID NO: 369887 - DNA, 209 bp, Homo sapiens
gtcttgaactcttggcctcaagcaatcctcccaaagtgctgggattacaggtgtgagccaccgtgtgtagtgttttttggtgtggtccaaaggctgactggttcagaacaatgtgaatgctcagaaaatagcagatttctggggtccactacaacacacttgccaaaccatgatctgtgaaagtgggagtcaggaatctgctaaaaaaa

SEQ ID NO: 369888 - DNA, 512 bp, Homo sapiens
tttgagacggagtctcgctctgtcgcccaggccagactgcggactgcagtggtgcaatctcggctcactgcaagctccgcttcccgggttcacgccattctcctgcctcagcctcccgagtagctgggactacaggcgcccgccaccgcgcccggctaattttttgtatttttagtagagacggggtgagtgtgtgcttttttaaggaattgcaaacgctccctgggaccagcaggtgggaggcagcctcatcgtcactcctggctgaaataatttaccccaagtcattgctgggtccctgagcacctgccttcattcaccctcatgccccagaatctcagggctacctccacagccctgtccacagacccctcctgacccgtctccaggggcctgggacccaccggcaggatgtggccctgttgaggccatgtcagggatgggtctggctgagagccgggctccagcccagggccctgtgtgagggttgggcacccagtgcacggaggggc

SEQ ID NO: 369889 - DNA, 435 bp, Homo sapiens
gctggccagacctccaactggtgggtaaaacgcagacatttccaaacaccaggaaatattttcttgggtgggtgggagttgggggacaaactgaatttctccctctgcagctgtctttattgccccagttgggaaacactgttttatacatcactatcttatgtgtctgctgatggagtttgctgatgctaaacaatgtctccaggtctccaggatggttttcttcctgtctgggtctctttctacacctcctgccaagtcctgcctgccccagtccttctctggggaatgggtctagttttcaggaccagatgcattgccagagattgtcagactgtgtcgagctccttttctcacatttgatggaaacagtctacacacatcagcaagccctgaatgcactgtgttaaattaaaaataactataagcttccca

SEQ ID NO: 369890 - DNA, 2342 bp, Homo sapiens
  misc_feature (1255)..(1255): n is a, c, g, or t
gcctggtgcacagagtctgcaggtcgggcggtagcgacaggtcagagctgcggcctgagcagccagcgtccggcatgaaggtctggggtctggctgctgcctgcttcttgctccagcaccatggaatgcctgcgcagtttaccctgcctcctgccccgcgcgatgagacttccccggcggacgctgtgtgccctggccttggacgtgacctctgtgggtcctcccgttgctgcctgcggccgccgagccaacctgattggaaggagccgagcggcgcagctttgcgggcccgaccggctccgcgtggcaggtgaagtgcaccggtttagaacctctgacgtctctcaagccactttagccagtgtagccccagtatttactgtgacaaaatttgacaaacagggaaacgttacttcttttgtatttgaaagctgtgataactccagagtgtcttctgatattagattatcgtaatttaaacttagagcaatggctgttccgggaactcccttcacagttgtctggagagggtcaactcgttacataccctttaccttttgagtttagagctatagaagcactcctgcaatattggatcaacacccttcaggggaaacttagcattttgcagccactgatccttgagaccttggatgctttggtggaccccaaacattcttctgtagacagaagcaaactgcacattttactacagaatggcaaaagtctatcagagttagaaacagatattaaaattttcaaagagtcaattttggagatcttggatgaggaagagttgctagaagagctctgtgtatcaaaatggagtgacccacaagtctttgaaaagagcagtgctgggattgaccatgcagaagagatggagttgctgttggaaaactactaccgattggctgacgatctctccaatgcagctcgtgagcttagggtgctgattgatgattcacaaagtattattttcattaatctggacagccaccgaaacgtgatgatgaggttgaatctacagctgaccatgggaaccttctctctttcgctctttggactaatgggagttgctttggaatgaatttggaatcttcccttgaagaggtgagaatgtattattatttctaaaacttgggggttttggccgggcatggtggctcatgtcagtaatcctagcactttaggaggctgaggcaggtggatcacctgaggtcaggagtttgagaccaacctggccaacatggcnaaaccctgtctctactaaaaatacaaaaattagacaggcacggtggcaggcacctgtaatcccagctacttgggaggctgaggcaggagaatcacttgaacccgggaggcggaggttgcagtgagctgagatcgcgccgttgcactccagcctgggagacagagtgagactctgtctccaaaaaaaaagattgggttttgaagatcgatatttttaatggatttaaaaaataaaggctgggcaccttggctcaacgcctgtaatcccagcactttgggaggctgaggcaggtagatcacgaggtcaggagatcgaggccatcctggctaacccggtgaaaccctgtctctactaaaaatacaaaaaattagccgggcgtggtggcagacgcctgtagtcccagctactccggaggctgaggcaggagaatggcatgaacctgggaggcggagcttgcagtgagccaggatcacaccactgcactccagcctgggcgacaggacagagtgagactctgtctcaaaaaataaataaataaaaagtctaacctgtaaactaccatggtgaaataaaatatataatgtaactcacaattcaggcagtactgttggaccatgttataacctagataaatacagcctaggttactttgtttcccaaaacatataattacagatgggaaaggtgtgataaaacagtgtctctgtgaagcagtgttaatgaagagtttttattttttaattcttacatgtctggcaacgtaccaggcggtttgcatactttatttggctcaatcattgcaactctgaaaatagatatattatccctactttgtagatgagaagactgaggctcagaacatttaacttgcccacaggcatagagctggaaaaataacagaattaggacatgaccccaaagacttgcactttctactgctctgttgcctttctgtattaagataatacttaactcccagagtttttcatttcactgtggttttgtacagtcatccctcagtatccaagaagaattggttacaggatccccacagataccaaagtctgtgggtattcaagtctctgat

SEQ ID NO: 369891 - DNA, 3343 bp, Homo sapiens
gcctggtgcacagagtctgcaggtcgggcggtagcgacaggtcagagctgcggcctgagcagccagcgtccggcatgaaggtctggggtctggctgctgcctgcttcttgctccagcaccatggaatgcctgcgcagtttaccctgcctcctgccccgcgcgatgagacttccccggcggacgctgtgtgccctggccttggacgtgacctctgtgggtcctcccgttgctgcctgcggccgccgagccaacctgattggaaggagccgagcggcgcagctttgcgggcccgaccggctccgcgtggcaggtgaagtgcaccggtttagaacctctgacgtctctcaagccactttagccagtgtagccccagtatttactgtgacaaaatttgacaaacagggaaacgttacttcttttgaaaggaagaaaactgaattataccaagagttaggtcttcaagccagagatttgagatttcagcatgtaatgagtatcacagtcagaaacaataggattatcatgagaatggagtatttgaaagctgtgataactccagagtgtcttctgatattagattatcgtaatttaaacttagagcaatggctgttccgggaactcccttcacagttgtctggagagggtcaactcgttacataccctttaccttttgagtttagagctatagaagcactcctgcaatattggatcaacacccttcaggggaaacttagcattttgcagccactgatccttgagaccttggatgctttggtggaccccaaacattcttctgtagacagaagcaaactgcacattttactacagaatggcaaaagtctatcagagttagaaacagatattaaaattttcaaagagtcaattttggagatcttggatgaggaagagttgctagaagagctctgtgtatcaaaatggagtgacccacaagtctttgaaaagagcagtgctgggattgaccatgcagaagagatggagttgctgttggaaaactactaccgattggctgacgatctctccaatgcagctcgtgagcttagggtgctgattgatgattcacaaagtattattttcattaatctggacagccaccgaaacgtgatgatgaggttgaatctacagctgaccatgggaaccttctctctttcgctctttggactaatgggagttgctttggaatgaatttggaatcttcccttgaagaggaccatagaattttttggctgattacaggaattatgttcatgggaagtggcctcatctggaggcgcctgctttcattccttggacgacagctagaagctccattgcctcctatgatggcttctttacctaaaaagactcttctggcagatagaagcatggaattgaaaaatagcctcagactggatggacttggatcaggaaggagcatcctaacaaaccgttaggaacagccccgtggatactgaagttttttttatggtagttacaggaaacttctgatactctttttattattttcttgtatagagtcagacacttgaaaaaaactaatgtttgaagacaaaaatattttggcagtcacaataccagaactggattgcatttccagaattctgagttaaagaaacaaagtatttgctttgtaaaaggccaaaattctatttcctacaaactttaaatgctgtttttatagatgtgatatgaggcaacacaagcacagacagttgcatagattttaatttatacatatcaagaaaagtgcaatttcatgctgaatgaagcgtaggaacttgacaagcccataggtagctatagttctttgtcagtatagggaattatgttcatgtgaatttcctgattctcaggtgactaaaaagctagcattctatgtattaaccttacaacagactctgtaagtttgagctttaaaaaccaaactttgacataaccttatttcttgtatttgcccccttttttttataaaaggtgaataaaaagaaataatttaatatcaccattgtatggattcctaatcaagatttcacgttctcagcccctgagactagttttctttgctctctgtaattagagcctttggaagcaaagttgaaaggaagtatttccattctgttactgttttgtagcactttgtccatttattgatttttaaagtagatatttagataccacccctgccctgccctgccccaaaaagaaaaatgtttattgtcctgctaatctatatgcctacacctcagaagctgacagatgagcttcctaaaacatgaggatgaataaatgttagaactgtgatatcttctcatttccacagagatttgggtttaaaacaaatggctaatatttgtaagcctgaaagctgccatcctctttaacatcctacctaccttttaaaatattttctggaggttaagtacagttaggcactagaacatttgttaagcctcccaaagtagtgtgcatggaagattctagagtgtccagctcttgcactacaaatgtaataataacagaataaatacacttaccctgatgatattgagggtacatgattagcctaatgtgatgtcatatgaggaagtttaggagtccatttttcaggtggtttggtgataggaataaaaatgttactcccgtcgctgatttggaagaaaaccgatgaagtacaagtaaggtttccccactcctgtgtgtggtcatgggaagccattagagggaagctggagaacagaatggaacaggacaggctgggctagactcgagcacgcagtggcccctgtgccaccacactgtgggtcaggaacacgcgtcatggtgttcttgtcggaatgtgaacatacagcaccctctagcattacgaatctcttaggatttttaagattgtatttgataatacttatatttcacagggcacacttttggcacacctcagagcacactgctgctattttgggtcgtatcactgtaaaatacataataagtactacttaactgtgacatgaagaattggaatcccagagggcaacatttgatttgactaagatcaggcataagatagaatttttgtcatttttccttgcagttttattgacttagtttatgagcttggataaaataattttttgatgaatcatgtcaataaaaggaaaaataatgtaactacctcataagtctgataaaaggaagttgctagtgttttatagaatttctgaaggtggttaaatcaagtatgatttcaaaatatcaactagttccacttttgtgattgcaggatgcttcttatactaaagttctcataaataataaatcagcttatgcc

SEQ ID NO: 369892 - DNA, 2024 bp, Homo sapiens
gcctggtgcacagagtctgcaggtcgggcggtagcgacaggtcagagctgcggcctgagcagccagcgtccggcatgaaggtctggggtctggctgctgcctgcttcttgctccagcaccatggaatgcctgcgcagtttaccctgcctcctgccccgcgcgatgagacttccccggcggacgctgtgtgccctggccttggacgtgacctctgtgggtcctcccgttgctgcctgcggccgccgagccaacctgattggaaggagccgagcggcgcagctttgcgggcccgaccggctccgcgtggcaggtgaagtgcaccggtttagaacctctgacgtctctcaagccactttagccagtgtagccccagtatttactgtgacaaaatttgacaaacagggaaacgttacttcttttgaaaggaagaaaactgaattataccaagagttaggtcttcaagccagagatttgagatttcagcatgtaatgagtatcacagtcagaaacaataggattatcatgagaatggagtatttgaaagctgtgataactccagagtgtcttctgatattagattatcgtaatttaaacttagagcaatggctgttccgggaactcccttcacagttgtctggagagggtcaactcgttacataccctttaccttttgagtttagagctatagaagcactcctgcaatattggatcaacacccttcaggggaaacttagcattttgcagccactgatccttgagaccttggatgctttggtggaccccaaacattcttctgtagacagaagcaaactgcacattttactacagaatggcaaaagtctatcagagttagaaacagatattaaaattttcaaagagtcaattttggagatcttggatgaggaagagttgctagaagagctctgtgtatcaaaatggagtgacccacaagtctttgaaaagagcagtgctgggattgaccatgcagaagagatggagttgctgttggaaaactactaccgattggctgacgatctctccaatgcagctcgtgagcttagggtgctgattgatgattcacaaagtattattttcattaatctggacagccaccgaaacgtgatgatgaggttgaatctacagctgaccatgggaaccttctctctttcgctctttggactaatgggagttgctttggaatgaatttggaatcttcccttgaagaggaccatagaattttttggctgattacaggaattatgttcatgggaagtggcctcatctggaggcgcctgctttcattccttggacgacagctagaagctccattgcctcctatgatggcttctttacctaaaaagactcttctggcagatagaagcatggaattgaaaaatagcctcagactggatggacttggatcaggaaggagcatcctaacaaaccgttaggaacagccccgtggatactgaagttttttttatggtagttacaggaaacttctgatactctttttattattttcttgtatagagtcagacacttgaaaaaaactaatgtttgaagacaaaaatattttggcagtcacaataccagaactggattgcatttccagaattctgagttaaagaaacaaagtatttgctttgtaaaaggccaaaattctatttcctacaaactttaaatgctgtttttatagatgtgatatgaggcaacacaagcacagacagttgcatagattttaatttatacatatcaagaaaagtgcaatttcatgctgaatgaagcgtaggaacttgacaagcccataggtagctatagttctttgtcagtatagggaattatgttcatgtgaatttcctgattctcaggtgactaaaaagctagcattctatgtattaaccttacaacagactctgtaagtttgagctttaaaaaccaaactttgacataaccttatttcttgtatttgcccccttttttttataaaaggtgagatggagtcttgctctgtcacccaggct

SEQ ID NO: 369893 - DNA, 3230 bp, Homo sapiens
gcctggtgcacagagtctgcaggtcgggcggtagcgacaggtcagagctgcggcctgagcagccagcgtccggcatgaaggtctggggtctggctgctgcctgcttcttgctccagcaccatggaatgcctgcgcagtttaccctgcctcctgccccgcgcgatgagacttccccggcggacgctgtgtgccctggccttggacgtgacctctgtgggtcctcccgttgctgcctgcggccgccgagccaacctgattggaaggagccgagcggcgcagctttgcgggcccgaccggctccgcgtggcaggtgaagtgcaccggtttagaacctctgacgtctctcaagccactttagccagtgtagccccagtatttactgtgacaaaatttgacaaacagggaaacgttacttcttttgtatttgaaagctgtgataactccagagtgtcttctgatattagattatcgtaatttaaacttagagcaatggctgttccgggaactcccttcacagttgtctggagagggtcaactcgttacataccctttaccttttgagtttagagctatagaagcactcctgcaatattggatcaacacccttcaggggaaacttagcattttgcagccactgatccttgagaccttggatgctttggtggaccccaaacattcttctgtagacagaagcaaactgcacattttactacagaatggcaaaagtctatcagagttagaaacagatattaaaattttcaaagagtcaattttggagatcttggatgaggaagagttgctagaagagctctgtgtatcaaaatggagtgacccacaagtctttgaaaagagcagtgctgggattgaccatgcagaagagatggagttgctgttggaaaactactaccgattggctgacgatctctccaatgcagctcgtgagcttagggtgctgattgatgattcacaaagtattattttcattaatctggacagccaccgaaacgtgatgatgaggttgaatctacagctgaccatgggaaccttctctctttcgctctttggactaatgggagttgctttggaatgaatttggaatcttcccttgaagaggaccatagaattttttggctgattacaggaattatgttcatgggaagtggcctcatctggaggcgcctgctttcattccttggacgacagctagaagctccattgcctcctatgatggcttctttacctaaaaagactcttctggcagatagaagcatggaattgaaaaatagcctcagactggatggacttggatcaggaaggagcatcctaacaaaccgttaggaacagccccgtggatactgaagttttttttatggtagttacaggaaacttctgatactctttttattattttcttgtatagagtcagacacttgaaaaaaactaatgtttgaagacaaaaatattttggcagtcacaataccagaactggattgcatttccagaattctgagttaaagaaacaaagtatttgctttgtaaaaggccaaaattctatttcctacaaactttaaatgctgtttttatagatgtgatatgaggcaacacaagcacagacagttgcatagattttaatttatacatatcaagaaaagtgcaatttcatgctgaatgaagcgtaggaacttgacaagcccataggtagctatagttctttgtcagtatagggaattatgttcatgtgaatttcctgattctcaggtgactaaaaagctagcattctatgtattaaccttacaacagactctgtaagtttgagctttaaaaaccaaactttgacataaccttatttcttgtatttgcccccttttttttataaaaggtgaataaaaagaaataatttaatatcaccattgtatggattcctaatcaagatttcacgttctcagcccctgagactagttttctttgctctctgtaattagagcctttggaagcaaagttgaaaggaagtatttccattctgttactgttttgtagcactttgtccatttattgatttttaaagtagatatttagataccacccctgccctgccctgccccaaaaagaaaaatgtttattgtcctgctaatctatatgcctacacctcagaagctgacagatgagcttcctaaaacatgaggatgaataaatgttagaactgtgatatcttctcatttccacagagatttgggtttaaaacaaatggctaatatttgtaagcctgaaagctgccatcctctttaacatcctacctaccttttaaaatattttctggaggttaagtacagttaggcactagaacatttgttaagcctcccaaagtagtgtgcatggaagattctagagtgtccagctcttgcactacaaatgtaataataacagaataaatacacttaccctgatgatattgagggtacatgattagcctaatgtgatgtcatatgaggaagtttaggagtccatttttcaggtggtttggtgataggaataaaaatgttactcccgtcgctgatttggaagaaaaccgatgaagtacaagtaaggtttccccactcctgtgtgtggtcatgggaagccattagagggaagctggagaacagaatggaacaggacaggctgggctagactcgagcacgcagtggcccctgtgccaccacactgtgggtcaggaacacgcgtcatggtgttcttgtcggaatgtgaacatacagcaccctctagcattacgaatctcttaggatttttaagattgtatttgataatacttatatttcacagggcacacttttggcacacctcagagcacactgctgctattttgggtcgtatcactgtaaaatacataataagtactacttaactgtgacatgaagaattggaatcccagagggcaacatttgatttgactaagatcaggcataagatagaatttttgtcatttttccttgcagttttattgacttagtttatgagcttggataaaataattttttgatgaatcatgtcaataaaaggaaaaataatgtaactacctcataagtctgataaaaggaagttgctagtgttttatagaatttctgaaggtggttaaatcaagtatgatttcaaaatatcaactagttccacttttgtgattgcaggatgcttcttatactaaagttctcataaataataaatcagcttatgcc

SEQ ID NO: 369894 - DNA, 2958 bp, Homo sapiens
gcctggtgcacagagtctgcaggtcgggcggtagcgacaggtcagagctgcggcctgagcagccagcgtccggcatgaaggtctggggtctggctgctgcctgcttcttgctccagcaccatggaatgcctgcgcagtttaccctgcctcctgccccgcgcgatgagacttccccggcggacgctgtgtgccctggccttggacgtgacctctgtgggtcctcccgttgctgcctgcggccgccgagccaacctgattggaaggagccgagcggcgcagctttgcgggcccgaccggctccgcgtggcaggtgaagtgcaccggtttagaacctctgacgtctctcaagccactttagccagtgtagccccagtatttactgtgacaaaatttgacaaacagggaaacgttacttcttttgaaaggaagaaaactgaattataccaagagttagtctatcagagttagaaacagatattaaaattttcaaagagtcaattttggagatcttggatgaggaagagttgctagaagagctctgtgtatcaaaatggagtgacccacaagtctttgaaaagagcagtgctgggattgaccatgcagaagagatggagttgctgttggaaaactactaccgattggctgacgatctctccaatgcagctcgtgagcttagggtgctgattgatgattcacaaagtattattttcattaatctggacagccaccgaaacgtgatgatgaggttgaatctacagctgaccatgggaaccttctctctttcgctctttggactaatgggagttgctttggaatgaatttggaatcttcccttgaagaggaccatagaattttttggctgattacaggaattatgttcatgggaagtggcctcatctggaggcgcctgctttcattccttggacgacagctagaagctccattgcctcctatgatggcttctttacctaaaaagactcttctggcagatagaagcatggaattgaaaaatagcctcagactggatggacttggatcaggaaggagcatcctaacaaaccgttaggaacagccccgtggatactgaagttttttttatggtagttacaggaaacttctgatactctttttattattttcttgtatagagtcagacacttgaaaaaaactaatgtttgaagacaaaaatattttggcagtcacaataccagaactggattgcatttccagaattctgagttaaagaaacaaagtatttgctttgtaaaaggccaaaattctatttcctacaaactttaaatgctgtttttatagatgtgatatgaggcaacacaagcacagacagttgcatagattttaatttatacatatcaagaaaagtgcaatttcatgctgaatgaagcgtaggaacttgacaagcccataggtagctatagttctttgtcagtatagggaattatgttcatgtgaatttcctgattctcaggtgactaaaaagctagcattctatgtattaaccttacaacagactctgtaagtttgagctttaaaaaccaaactttgacataaccttatttcttgtatttgcccccttttttttataaaaggtgaataaaaagaaataatttaatatcaccattgtatggattcctaatcaagatttcacgttctcagcccctgagactagttttctttgctctctgtaattagagcctttggaagcaaagttgaaaggaagtatttccattctgttactgttttgtagcactttgtccatttattgatttttaaagtagatatttagataccacccctgccctgccctgccccaaaaagaaaaatgtttattgtcctgctaatctatatgcctacacctcagaagctgacagatgagcttcctaaaacatgaggatgaataaatgttagaactgtgatatcttctcatttccacagagatttgggtttaaaacaaatggctaatatttgtaagcctgaaagctgccatcctctttaacatcctacctaccttttaaaatattttctggaggttaagtacagttaggcactagaacatttgttaagcctcccaaagtagtgtgcatggaagattctagagtgtccagctcttgcactacaaatgtaataataacagaataaatacacttaccctgatgatattgagggtacatgattagcctaatgtgatgtcatatgaggaagtttaggagtccatttttcaggtggtttggtgataggaataaaaatgttactcccgtcgctgatttggaagaaaaccgatgaagtacaagtaaggtttccccactcctgtgtgtggtcatgggaagccattagagggaagctggagaacagaatggaacaggacaggctgggctagactcgagcacgcagtggcccctgtgccaccacactgtgggtcaggaacacgcgtcatggtgttcttgtcggaatgtgaacatacagcaccctctagcattacgaatctcttaggatttttaagattgtatttgataatacttatatttcacagggcacacttttggcacacctcagagcacactgctgctattttgggtcgtatcactgtaaaatacataataagtactacttaactgtgacatgaagaattggaatcccagagggcaacatttgatttgactaagatcaggcataagatagaatttttgtcatttttccttgcagttttattgacttagtttatgagcttggataaaataattttttgatgaatcatgtcaataaaaggaaaaataatgtaactacctcataagtctgataaaaggaagttgctagtgttttatagaatttctgaaggtggttaaatcaagtatgatttcaaaatatcaactagttccacttttgtgattgcaggatgcttcttatactaaagttctcataaataataaatcagcttatgcc

SEQ ID NO: 369895 - DNA, 2904 bp, Homo sapiens
acaacaaaaagaggaggcagatttctgttcaataagtgacatgcatttcccatcagtgatagctggatccagttgtgtaacaggctatctttgaggaagtgagctctcaatcattggagccaatgataacagcatagctataaatgggattccttccttgtgagagattaaatttaaattctgtgattctgtacattaactaaaaacagtgtgctgcaaaatattaccactctgaaaatgacggtgaggaagaatgtttttctaagtctgaggttcccaaacttccttggatcacgatgcccttagtgtcttagtaattttttcacagtatcggaagacaaaaaatttattatgttacagattcctttatgttatttcccttgcaactttaaaatattctgaggtgctatcgtgcccagcatagcaccagacattcagctcacagtttgagaactgtggatataagcaaagaccttaaattgcgtgtcctctggcatcatgacttaagatttgcacgcatgtaaacaaaggctgcaaagaaacacaaagtaaaagcagtacatttggcatatagatgattttaaaatatttaaaaccttttaaatcatgttcttctcctgctttattctgtgggtgctatcaaggcccttgtttttcttagttcctttctacaggaaagagctgtacaaataacataaggctttcaaactctggggcagtaacaattcaaggaatcttctaaggaacctggcgttttgcgatggaaatgaactgtgttctcttttaggaccatagaattttttggctgattacaggaattatgttcatgggaagtggcctcatctggaggcgcctgctttcattccttggacgacagctagaagctccattgcctcctatgatggcttctttacctaaaaagactcttctggcagatagaagcatggaattgaaaaatagcctcagactggatggacttggatcaggaaggagcatcctaacaaaccgttaggaacagccccgtggatactgaagttttttttatggtagttacaggaaacttctgatactctttttattattttcttgtatagagtcagacacttgaaaaaaactaatgtttgaagacaaaaatattttggcagtcacaataccagaactggattgcatttccagaattctgagttaaagaaacaaagtatttgctttgtaaaaggccaaaattctatttcctacaaactttaaatgctgtttttatagatgtgatatgaggcaacacaagcacagacagttgcatagattttaatttatacatatcaagaaaagtgcaatttcatgctgaatgaagcgtaggaacttgacaagcccataggtagctatagttctttgtcagtatagggaattatgttcatgtgaatttcctgattctcaggtgactaaaaagctagcattctatgtattaaccttacaacagactctgtaagtttgagctttaaaaaccaaactttgacataaccttatttcttgtatttgcccccttttttttataaaaggtgaataaaaagaaataatttaatatcaccattgtatggattcctaatcaagatttcacgttctcagcccctgagactagttttctttgctctctgtaattagagcctttggaagcaaagttgaaaggaagtatttccattctgttactgttttgtagcactttgtccatttattgatttttaaagtagatatttagataccacccctgccctgccctgccccaaaaagaaaaatgtttattgtcctgctaatctatatgcctacacctcagaagctgacagatgagcttcctaaaacatgaggatgaataaatgttagaactgtgatatcttctcatttccacagagatttgggtttaaaacaaatggctaatatttgtaagcctgaaagctgccatcctctttaacatcctacctaccttttaaaatattttctggaggttaagtacagttaggcactagaacatttgttaagcctcccaaagtagtgtgcatggaagattctagagtgtccagctcttgcactacaaatgtaataataacagaataaatacacttaccctgatgatattgagggtacatgattagcctaatgtgatgtcatatgaggaagtttaggagtccatttttcaggtggtttggtgataggaataaaaatgttactcccgtcgctgatttggaagaaaaccgatgaagtacaagtaaggtttccccactcctgtgtgtggtcatgggaagccattagagggaagctggagaacagaatggaacaggacaggctgggctagactcgagcacgcagtggcccctgtgccaccacactgtgggtcaggaacacgcgtcatggtgttcttgtcggaatgtgaacatacagcaccctctagcattacgaatctcttaggatttttaagattgtatttgataatacttatatttcacagggcacacttttggcacacctcagagcacactgctgctattttgggtcgtatcactgtaaaatacataataagtactacttaactgtgacatgaagaattggaatcccagagggcaacatttgatttgactaagatcaggcataagatagaatttttgtcatttttccttgcagttttattgacttagtttatgagcttggataaaataattttttgatgaatcatgtcaataaaaggaaaaataatgtaactacctcataagtctgataaaaggaagttgctagtgttttatagaatttctgaaggtggttaaatcaagtatgatttcaaaatatcaactagttccacttttgtgattgcaggatgcttcttatactaaagttctcataaataataaatcagcttatgcc

SEQ ID NO: 369896 - DNA, 1778 bp, Homo sapiens
gcctggtgcacagagtctgcaggtcgggcggtagcgacaggtcagagctgcggcctgagcagccagcgtccggcatgaaggtctggggtctggctgctgcctgcttcttgctccagcaccatggaatgcctgcgcagtttaccctgcctcctgccccgcgcgatgagacttccccggcggacgctgtgtgccctggccttggacgtgacctctgtgggtcctcccgttgctgcctgcggccgccgagccaacctgattggaaggagccgagcggcgcagctttgcgggcccgaccggctccgcgtggcaggtgaagtgcaccggtttagaacctctgacgtctctcaagccactttagccagtgtagccccagtatttactgtgacaaaatttgacaaacagggaaacgttacttcttttgaaaggaagaaaactgaattataccaagagttaggtcttcaagccagagatttgagatttcagcatgtaatgagtatcacagtcagaaacaataggattatcatgagaatggagtatttgaaagctgtgataactccagagtgtcttctgatattagattatcgtaatttaaacttagagcaatggctgttccgggaactcccttcacagttgtctggagagggtcaactcgttacataccctttaccttttgagtttagagctatagaagcactcctgcaatattggatcaacacccttcaggggaaacttagcattttgcagccactgatccttgagaccttggatgctttggtggaccccaaacattcttctgtagacagaagcaaactgcacattttactacagaatggcaaaagtctatcagagttagaaacagatattaaaattttcaaagagtcaattttggagatcttggatgaggaagagttgctagaagagctctgtgtatcaaaatggagtgacccacaagtctttgaaaagagcagtgctgggattgaccatgcagaagagatggagttgctgttggaaaactactaccgattggctgacgatctctccaatgcagctcgtgagcttagggtgctgattgatgattcacaaagtattattttcattaatctggacagccaccgaaacgtgatgatgaggttgaatctacagctgaccatgggaaccttctctctttcgctctttggactaatgggagttgctttggaatgaatttggaatcttcccttgaagaggaccatagaattttttggctgattacaggaattatgttcatgggaagtggcctcatctggaggcgcctgctttcattccttggacgacagctagaagctccattgcctcctatggtatgaaggatatggttcacggcggtattgtggaagggttatgatcatgggccctaaagtcagagcgcctgggattaagttgtcacaggcactatggcccttgcgagttgctttctcaaacttccttcagtttccctatctgtcagttaagtcggtattacctgcttcatagggttatgggaagaattaaacaatatgtgtaaagcacttactagcacactgcctaacacaataagttagaaatataatttgtgtagaactctgacaacatacatttaaacagatgttagtaattctggtataaggtttgtcataaccaaatggaaatgtaggaaacatttataatgttcttaaaagatagaaaattcacctccattttctttgtacttgaagatggcaccactggaataaatacttaagacactgaaaaaaattata

SEQ ID NO: 369897 - DNA, 2455 bp, Homo sapiens
  misc_feature (1368)..(1368): n is a, c, g, or t
gcctggtgcacagagtctgcaggtcgggcggtagcgacaggtcagagctgcggcctgagcagccagcgtccggcatgaaggtctggggtctggctgctgcctgcttcttgctccagcaccatggaatgcctgcgcagtttaccctgcctcctgccccgcgcgatgagacttccccggcggacgctgtgtgccctggccttggacgtgacctctgtgggtcctcccgttgctgcctgcggccgccgagccaacctgattggaaggagccgagcggcgcagctttgcgggcccgaccggctccgcgtggcaggtgaagtgcaccggtttagaacctctgacgtctctcaagccactttagccagtgtagccccagtatttactgtgacaaaatttgacaaacagggaaacgttacttcttttgaaaggaagaaaactgaattataccaagagttaggtcttcaagccagagatttgagatttcagcatgtaatgagtatcacagtcagaaacaataggattatcatgagaatggagtatttgaaagctgtgataactccagagtgtcttctgatattagattatcgtaatttaaacttagagcaatggctgttccgggaactcccttcacagttgtctggagagggtcaactcgttacataccctttaccttttgagtttagagctatagaagcactcctgcaatattggatcaacacccttcaggggaaacttagcattttgcagccactgatccttgagaccttggatgctttggtggaccccaaacattcttctgtagacagaagcaaactgcacattttactacagaatggcaaaagtctatcagagttagaaacagatattaaaattttcaaagagtcaattttggagatcttggatgaggaagagttgctagaagagctctgtgtatcaaaatggagtgacccacaagtctttgaaaagagcagtgctgggattgaccatgcagaagagatggagttgctgttggaaaactactaccgattggctgacgatctctccaatgcagctcgtgagcttagggtgctgattgatgattcacaaagtattattttcattaatctggacagccaccgaaacgtgatgatgaggttgaatctacagctgaccatgggaaccttctctctttcgctctttggactaatgggagttgctttggaatgaatttggaatcttcccttgaagaggtgagaatgtattattatttctaaaacttgggggttttggccgggcatggtggctcatgtcagtaatcctagcactttaggaggctgaggcaggtggatcacctgaggtcaggagtttgagaccaacctggccaacatggcnaaaccctgtctctactaaaaatacaaaaattagacaggcacggtggcaggcacctgtaatcccagctacttgggaggctgaggcaggagaatcacttgaacccgggaggcggaggttgcagtgagctgagatcgcgccgttgcactccagcctgggagacagagtgagactctgtctccaaaaaaaaagattgggttttgaagatcgatatttttaatggatttaaaaaataaaggctgggcaccttggctcaacgcctgtaatcccagcactttgggaggctgaggcaggtagatcacgaggtcaggagatcgaggccatcctggctaacccggtgaaaccctgtctctactaaaaatacaaaaaattagccgggcgtggtggcagacgcctgtagtcccagctactccggaggctgaggcaggagaatggcatgaacctgggaggcggagcttgcagtgagccaggatcacaccactgcactccagcctgggcgacaggacagagtgagactctgtctcaaaaaataaataaataaaaagtctaacctgtaaactaccatggtgaaataaaatatataatgtaactcacaattcaggcagtactgttggaccatgttataacctagataaatacagcctaggttactttgtttcccaaaacatataattacagatgggaaaggtgtgataaaacagtgtctctgtgaagcagtgttaatgaagagtttttattttttaattcttacatgtctggcaacgtaccaggcggtttgcatactttatttggctcaatcattgcaactctgaaaatagatatattatccctactttgtagatgagaagactgaggctcagaacatttaacttgcccacaggcatagagctggaaaaataacagaattaggacatgaccccaaagacttgcactttctactgctctgttgcctttctgtattaagataatacttaactcccagagtttttcatttcactgtggttttgtacagtcatccctcagtatccaagaagaattggttacaggatccccacagataccaaagtctgtgggtattcaagtctctgat

SEQ ID NO: 369898 - DNA, 1876 bp, Homo sapiens
  misc_feature (65)..(65): n is a, c, g, or t
  misc_feature (67)..(67): n is a, c, g, or t
tgggacccccgggaacggagtttttatgtagtacgggaatttggaattttttatatttttggaangnttcagacacttgaaaaaaactaatgtttgaagacaaaaatattttggcagtcacaataccagaactggattgcatttccagaattctgagttaaagaaacaaagtatttgctttgtaaaaggccaaaattctatttcctacaaactttaaatgctgtttttatagatgtgatatgaggcaacacaagcacagacagttgcatagattttaatttatacatatcaagaaaagtgcaatttcatgctgaatgaagcgtaggaacttgacaagcccataggtagctatagttctttgtcagtatagggaattatgttcatgtgaatttcctgattctcaggtgactaaaaagctagcattctatgtattaaccttacaacagactctgtaagtttgagctttaaaaaccaaactttgacataaccttatttcttgtatttgcccccttttttttataaaaggtgaataaaaagaaataatttaatatcaccattgtatggattcctaatcaagatttcacgttctcagcccctgagactagttttctttgctctctgtaattagagcctttggaagcaaagttgaaaggaagtatttccattctgttactgttttgtagcactttgtccatttattgatttttaaagtagatatttagataccacccctgccctgccctgccccaaaaagaaaaatgtttattgtcctgctaatctatatgcctacacctcagaagctgacagatgagcttcctaaaacatgaggatgaataaatgttagaactgtgatatcttctcatttccacagagatttgggtttaaaacaaatggctaatatttgtaagcctgaaagctgccatcctctttaacatcctacctaccttttaaaatattttctggaggttaagtacagttaggcactagaacatttgttaagcctcccaaagtagtgtgcatggaagattctagagtgtccagctcttgcactacaaatgtaataataacagaataaatacacttaccctgatgatattgagggtacatgattagcctaatgtgatgtcatatgaggaagtttaggagtccatttttcaggtggtttggtgataggaataaaaatgttactcccgtcgctgatttggaagaaaaccgatgaagtacaagtaaggtttccccactcctgtgtgtggtcatgggaagccattagagggaagctggagaacagaatggaacaggacaggctgggctagactcgagcacgcagtggcccctgtgccaccacactgtgggtcaggaacacgcgtcatggtgttcttgtcggaatgtgaacatacagcaccctctagcattacgaatctcttaggatttttaagattgtatttgataatacttatatttcacagggcacacttttggcacacctcagagcacactgctgctattttgggtcgtatcactgtaaaatacataataagtactacttaactgtgacatgaagaattggaatcccagagggcaacatttgatttgactaagatcaggcataagatagaatttttgtcatttttccttgcagttttattgacttagtttatgagcttggataaaataattttttgatgaatcatgtcaataaaaggaaaaataatgtaactacctcataagtctgataaaaggaagttgctagtgttttatagaatttctgaaggtggttaaatcaagtatgatttcaaaatatcaactagttccacttttgtgattgcaggatgcttcttatactaaagttctcataaataataaatcagcttatgcc

SEQ ID NO: 369899 - DNA, 1393 bp, Homo sapiens
gcctggtgcacagagtctgcaggtcgggcggtagcgacaggtcagagctgcggcctgagcagccagcgtccggcatgaaggtctggggtctggctgctgcctgcttcttgctccagcaccatggaatgcctgcgcagtttaccctgcctcctgccccgcgcgatgagacttccccggcggacgctgtgtgccctggccttggacgtgacctctgtgggtcctcccgttgctgcctgcggccgccgagccaacctgattggaaggagccgagcggcgcagctttgcgggcccgaccggctccgcgtggcaggtgaagtgcaccggtttagaacctctgacgtctctcaagccactttagccagtgtagccccagtatttactgtgacaaaatttgacaaacagggaaacgttacttcttttgaaaggaagaaaactgaattataccaagagttagtctatcagagttagaaacagatattaaaattttcaaagagtcaattttggagatcttggatgaggaagagttgctagaagagctctgtgtatcaaaatggagtgacccacaagtctttgaaaagagcagtgctgggattgaccatgcagaagagatggagttgctgttggaaaactactaccgattggctgacgatctctccaatgcagctcgtgagcttagggtgctgattgatgattcacaaagtattattttcattaatctggacagccaccgaaacgtgatgatgaggttgaatctacagctgaccatgggaaccttctctctttcgctctttggactaatgggagttgctttggaatgaatttggaatcttcccttgaagaggaccatagaattttttggctgattacaggaattatgttcatgggaagtggcctcatctggaggcgcctgctttcattccttggacgacagctagaagctccattgcctcctatggtatgaaggatatggttcacggcggtattgtggaagggttatgatcatgggccctaaagtcagagcgcctgggattaagttgtcacaggcactatggcccttgcgagttgctttctcaaacttccttcagtttccctatctgtcagttaagtcggtattacctgcttcatagggttatgggaagaattaaacaatatgtgtaaagcacttactagcacactgcctaacacaataagttagaaatataatttgtgtagaactctgacaacatacatttaaacagatgttagtaattctggtataaggtttgtcataaccaaatggaaatgtaggaaacatttataatgttcttaaaagatagaaaattcacctccattttctttgtacttgaagatggcaccactggaataaatacttaagacactgaaaaaaattata

SEQ ID NO: 369900 - DNA, 1339 bp, Homo sapiens
acaacaaaaagaggaggcagatttctgttcaataagtgacatgcatttcccatcagtgatagctggatccagttgtgtaacaggctatctttgaggaagtgagctctcaatcattggagccaatgataacagcatagctataaatgggattccttccttgtgagagattaaatttaaattctgtgattctgtacattaactaaaaacagtgtgctgcaaaatattaccactctgaaaatgacggtgaggaagaatgtttttctaagtctgaggttcccaaacttccttggatcacgatgcccttagtgtcttagtaattttttcacagtatcggaagacaaaaaatttattatgttacagattcctttatgttatttcccttgcaactttaaaatattctgaggtgctatcgtgcccagcatagcaccagacattcagctcacagtttgagaactgtggatataagcaaagaccttaaattgcgtgtcctctggcatcatgacttaagatttgcacgcatgtaaacaaaggctgcaaagaaacacaaagtaaaagcagtacatttggcatatagatgattttaaaatatttaaaaccttttaaatcatgttcttctcctgctttattctgtgggtgctatcaaggcccttgtttttcttagttcctttctacaggaaagagctgtacaaataacataaggctttcaaactctggggcagtaacaattcaaggaatcttctaaggaacctggcgttttgcgatggaaatgaactgtgttctcttttaggaccatagaattttttggctgattacaggaattatgttcatgggaagtggcctcatctggaggcgcctgctttcattccttggacgacagctagaagctccattgcctcctatggtatgaaggatatggttcacggcggtattgtggaagggttatgatcatgggccctaaagtcagagcgcctgggattaagttgtcacaggcactatggcccttgcgagttgctttctcaaacttccttcagtttccctatctgtcagttaagtcggtattacctgcttcatagggttatgggaagaattaaacaatatgtgtaaagcacttactagcacactgcctaacacaataagttagaaatataatttgtgtagaactctgacaacatacatttaaacagatgttagtaattctggtataaggtttgtcataaccaaatggaaatgtaggaaacatttataatgttcttaaaagatagaaaattcacctccattttctttgtacttgaagatggcaccactggaataaatacttaagacactgaaaaaaattata

SEQ ID NO: 369901 - DNA, 541 bp, Homo sapiens
  misc_feature (470)..(470): n is a, c, g, or t
  misc_feature (482)..(482): n is a, c, g, or t
  misc_feature (489)..(489): n is a, c, g, or t
  misc_feature (491)..(491): n is a, c, g, or t
  misc_feature (508)..(509): n is a, c, g, or t
  misc_feature (533)..(533): n is a, c, g, or t
gcctggtgcacagagtctgcaggtcgggcggtagcgacaggtcagagctgcggcctgagcagccagcgtccggcatgaaggtctggggtctggctgctgcctgcttcttgctccagcaccatggaatgcctgcgcagtttaccctgcctcctgccccgcgcgatgagacttccccggcggacgctgtgtgccctggccttggacgtgacctctgtgggtcctcccgttgctgcctgcggccgccgagccaacctgattggaaggagccgagcggcgcagctttgcgggcccgaccggctccgcgtggcaggtgaagtgcaccggtttagaacctctgacgtctctcaagccactttagccagtgtagccccagtatttactgtgacaaaatttgacaaacagggaaacgttacttcttttgtgaaaaggaagaaaaacttgaattattaccaaagagttaagggtctttnaaagcccagaanattttgnanaatttccaagccattgnnaaatggggggtattcaaaaggtcnaggaaaaa

SEQ ID NO: 369902 - DNA, 3290 bp, Homo sapiens
gcctggtgcacagagtctgcaggtcgggcggtagcgacaggtcagagctgcggcctgagcagccagcgtccggcatgaaggtctggggtctggctgctgcctgcttcttgctccagcaccatggaatgcctgcgcagtttaccctgcctcctgccccgcgcgatgagacttccccggcggacgctgtgtgccctggccttggacgtgacctctgtgggtcctcccgttgctgcctgcggccgccgagccaacctgattggaaggagccgagcggcgcagctttgcgggcccgaccggctccgcgtggcaggtgaagtgcaccggtttagaacctctgacgtctctcaagccactttagccagtgtagccccagtatttactgtgacaaaatttgacaaacagggaaacgttacttcttttgaaaggaagaaaactgaattataccaagagttaggtcttcaagccagagatttgagatttcagcatgtaatgagtatcacagtcagaaacaataggattatcatgagaatggagtatttgaaagctgtgataactccagagtgtcttctgatattagattatcgtaatttaaacttagagcaatggctgttccgggaactcccttcacagttgtctggagagggtcaactcgttacataccctttaccttttgagtttagagctatagaagcactcctgcaatattggatcaacacccttcaggggaaacttagcattttgcagccactgatccttgagaccttggatgctttggtggaccccaaacattcttctgtagacagaagcaaactgcacattttactacagaatggcaaaagtctatcagagttagaaacagatattaaaattttcaaagagtcaattttggagatcttggatgaggaagagttgctagaagagctctgtgtatcaaaatggagtgacccacaagtctttgaaaagagcagtgctgggattgaccatgcagaagagatggagttgctgttggaaaactactaccgattggctgacgatctctccaatgcagctcgtgagcttagggtgctgattgatgattcacaaagtattattttcattaatctggacagccaccgaaacgtgatgatgaggttgaatctacagctgaccatgggaaccttctctctttcgctctttggactaatgggagttgctttggaatgaatttggaatcttcccttgaagaggaccatagaattttttggctgattacaggaattatgttcatgggaagtggcctcatctggaggcgcctgctttcattccttggacgacagctagaagctccattgcctcctatgatggcttctttacctaaaaagactcttctggcagatagaagcatggaattgacgttaggaacagccccgtggatactgaagttttttttatggtagttacaggaaacttctgatactctttttattattttcttgtatagagtcagacacttgaaaaaaactaatgtttgaagacaaaaatattttggcagtcacaataccagaactggattgcatttccagaattctgagttaaagaaacaaagtatttgctttgtaaaaggccaaaattctatttcctacaaactttaaatgctgtttttatagatgtgatatgaggcaacacaagcacagacagttgcatagattttaatttatacatatcaagaaaagtgcaatttcatgctgaatgaagcgtaggaacttgacaagcccataggtagctatagttctttgtcagtatagggaattatgttcatgtgaatttcctgattctcaggtgactaaaaagctagcattctatgtattaaccttacaacagactctgtaagtttgagctttaaaaaccaaactttgacataaccttatttcttgtatttgcccccttttttttataaaaggtgaataaaaagaaataatttaatatcaccattgtatggattcctaatcaagatttcacgttctcagcccctgagactagttttctttgctctctgtaattagagcctttggaagcaaagttgaaaggaagtatttccattctgttactgttttgtagcactttgtccatttattgatttttaaagtagatatttagataccacccctgccctgccctgccccaaaaagaaaaatgtttattgtcctgctaatctatatgcctacacctcagaagctgacagatgagcttcctaaaacatgaggatgaataaatgttagaactgtgatatcttctcatttccacagagatttgggtttaaaacaaatggctaatatttgtaagcctgaaagctgccatcctctttaacatcctacctaccttttaaaatattttctggaggttaagtacagttaggcactagaacatttgttaagcctcccaaagtagtgtgcatggaagattctagagtgtccagctcttgcactacaaatgtaataataacagaataaatacacttaccctgatgatattgagggtacatgattagcctaatgtgatgtcatatgaggaagtttaggagtccatttttcaggtggtttggtgataggaataaaaatgttactcccgtcgctgatttggaagaaaaccgatgaagtacaagtaaggtttccccactcctgtgtgtggtcatgggaagccattagagggaagctggagaacagaatggaacaggacaggctgggctagactcgagcacgcagtggcccctgtgccaccacactgtgggtcaggaacacgcgtcatggtgttcttgtcggaatgtgaacatacagcaccctctagcattacgaatctcttaggatttttaagattgtatttgataatacttatatttcacagggcacacttttggcacacctcagagcacactgctgctattttgggtcgtatcactgtaaaatacataataagtactacttaactgtgacatgaagaattggaatcccagagggcaacatttgatttgactaagatcaggcataagatagaatttttgtcatttttccttgcagttttattgacttagtttatgagcttggataaaataattttttgatgaatcatgtcaataaaaggaaaaataatgtaactacctcataagtctgataaaaggaagttgctagtgttttatagaatttctgaaggtggttaaatcaagtatgatttcaaaatatcaactagttccacttttgtgattgcaggatgcttcttatactaaagttctcataaataataaatcagcttatgcc

SEQ ID NO: 369903 - DNA, 3315 bp, Homo sapiens
gcctggtgcacagagtctgcaggtcgggcggtagcgacaggtcagagctgcggcctgagcagccagcgtccggcatgaaggtctggggtctggctgctgcctgcttcttgctccagcaccatggaatgcctgcgcagtttaccctgcctcctgccccgcgcgatgagacttccccggcggacgctgtgtgccctggccttggacgtgacctctgtgggtcctcccgttgctgcctgcggccgccgagccaacctgattggaaggagccgagcggcgcagctttgcgggcccgaccggctccgcgtggcaggtgaagtgcaccggtttagaacctctgacgtctctcaagccactttagccagtgtagccccagtatttactgtgacaaaatttgacaaacagggaaacgttacttcttttgaaaggaagaaaactgaattataccaagagttaggtcttcaagccagagatttgagatttcagcatgtaatgagtatcacagtcagaaacaataggattatcatgagaatggagtatttgaaagctgtgataactccagagtgtcttctgatattagattatcgtaatttaaacttagagcaatggctgttccgggaactcccttcacagttgtctggagagggtcaactcgttacataccctttaccttttgagtttagagctatagaagcactcctgcaatattggatcaacacccttcaggggaaacttagcattttgcagccactgatccttgagaccttggatgctttggtggaccccaaacattcttctgtagacagaagcaaactgcacattttactacagaatggcaaaagtctatcagagttagaaacagatattaaaattttcaaagagtcaattttggagatcttggatgaggaagagttgctagaagagctctgtgtatcaaaatggagtgacccacaagtctttgaaaagagcagtgctgggattgaccatgcagaagagatggagttgctgttggaaaactactaccgattggctgacgatctctccaatgcagctcgtgagcttagggtgctgattgatgattcacaaagtattattttcattaatctggacagccaccgaaacgtgatgatgaggttgaatctacagctgaccatgggaaccttctctctttcgctctttggactaatgggagttgctttggaatgaatttggaatcttcccttgaagaggaattatgttcatgggaagtggcctcatctggaggcgcctgctttcattccttggacgacagctagaagctccattgcctcctatgatggcttctttacctaaaaagactcttctggcagatagaagcatggaattgaaaaatagcctcagactggatggacttggatcaggaaggagcatcctaacaaaccgttaggaacagccccgtggatactgaagttttttttatggtagttacaggaaacttctgatactctttttattattttcttgtatagagtcagacacttgaaaaaaactaatgtttgaagacaaaaatattttggcagtcacaataccagaactggattgcatttccagaattctgagttaaagaaacaaagtatttgctttgtaaaaggccaaaattctatttcctacaaactttaaatgctgtttttatagatgtgatatgaggcaacacaagcacagacagttgcatagattttaatttatacatatcaagaaaagtgcaatttcatgctgaatgaagcgtaggaacttgacaagcccataggtagctatagttctttgtcagtatagggaattatgttcatgtgaatttcctgattctcaggtgactaaaaagctagcattctatgtattaaccttacaacagactctgtaagtttgagctttaaaaaccaaactttgacataaccttatttcttgtatttgcccccttttttttataaaaggtgaataaaaagaaataatttaatatcaccattgtatggattcctaatcaagatttcacgttctcagcccctgagactagttttctttgctctctgtaattagagcctttggaagcaaagttgaaaggaagtatttccattctgttactgttttgtagcactttgtccatttattgatttttaaagtagatatttagataccacccctgccctgccctgccccaaaaagaaaaatgtttattgtcctgctaatctatatgcctacacctcagaagctgacagatgagcttcctaaaacatgaggatgaataaatgttagaactgtgatatcttctcatttccacagagatttgggtttaaaacaaatggctaatatttgtaagcctgaaagctgccatcctctttaacatcctacctaccttttaaaatattttctggaggttaagtacagttaggcactagaacatttgttaagcctcccaaagtagtgtgcatggaagattctagagtgtccagctcttgcactacaaatgtaataataacagaataaatacacttaccctgatgatattgagggtacatgattagcctaatgtgatgtcatatgaggaagtttaggagtccatttttcaggtggtttggtgataggaataaaaatgttactcccgtcgctgatttggaagaaaaccgatgaagtacaagtaaggtttccccactcctgtgtgtggtcatgggaagccattagagggaagctggagaacagaatggaacaggacaggctgggctagactcgagcacgcagtggcccctgtgccaccacactgtgggtcaggaacacgcgtcatggtgttcttgtcggaatgtgaacatacagcaccctctagcattacgaatctcttaggatttttaagattgtatttgataatacttatatttcacagggcacacttttggcacacctcagagcacactgctgctattttgggtcgtatcactgtaaaatacataataagtactacttaactgtgacatgaagaattggaatcccagagggcaacatttgatttgactaagatcaggcataagatagaatttttgtcatttttccttgcagttttattgacttagtttatgagcttggataaaataattttttgatgaatcatgtcaataaaaggaaaaataatgtaactacctcataagtctgataaaaggaagttgctagtgttttatagaatttctgaaggtggttaaatcaagtatgatttcaaaatatcaactagttccacttttgtgattgcaggatgcttcttatactaaagttctcataaataataaatcagcttatgcc

SEQ ID NO: 369904 - DNA, 3034 bp, Homo sapiens
gcctggtgcacagagtctgcaggtcgggcggtagcgacaggtcagagctgcggcctgagcagccagcgtccggcatgaaggtctggggtctggctgctgcctgcttcttgctccagcaccatggaatgcctgcgcagtttaccctgcctcctgccccgcgcgatgagacttccccggcggacgctgtgtgccctggccttggacgtgacctctgtgggtcctcccgttgctgcctgcggccgccgagccaacctgattggaaggagccgagcggcgcagctttgcgggcccgaccggctccgcgtggcaggtgaagtgcaccggtttagaacctctgacgtctctcaagccactttagccagtgtagccccagtatttactgtgacaaaatttgacaaacagggaaacgttacttcttttgttagcattttgcagccactgatccttgagaccttggatgctttggtggaccccaaacattcttctgtagacagaagcaaactgcacattttactacagaatggcaaaagtctatcagagttagaaacagatattaaaattttcaaagagtcaattttggagatcttggatgaggaagagttgctagaagagctctgtgtatcaaaatggagtgacccacaagtctttgaaaagagcagtgctgggattgaccatgcagaagagatggagttgctgttggaaaactactaccgattggctgacgatctctccaatgcagctcgtgagcttagggtgctgattgatgattcacaaagtattattttcattaatctggacagccaccgaaacgtgatgatgaggttgaatctacagctgaccatgggaaccttctctctttcgctctttggactaatgggagttgctttggaatgaatttggaatcttcccttgaagaggaccatagaattttttggctgattacaggaattatgttcatgggaagtggcctcatctggaggcgcctgctttcattccttggacgacagctagaagctccattgcctcctatgatggcttctttacctaaaaagactcttctggcagatagaagcatggaattgaaaaatagcctcagactggatggacttggatcaggaaggagcatcctaacaaaccgttaggaacagccccgtggatactgaagttttttttatggtagttacaggaaacttctgatactctttttattattttcttgtatagagtcagacacttgaaaaaaactaatgtttgaagacaaaaatattttggcagtcacaataccagaactggattgcatttccagaattctgagttaaagaaacaaagtatttgctttgtaaaaggccaaaattctatttcctacaaactttaaatgctgtttttatagatgtgatatgaggcaacacaagcacagacagttgcatagattttaatttatacatatcaagaaaagtgcaatttcatgctgaatgaagcgtaggaacttgacaagcccataggtagctatagttctttgtcagtatagggaattatgttcatgtgaatttcctgattctcaggtgactaaaaagctagcattctatgtattaaccttacaacagactctgtaagtttgagctttaaaaaccaaactttgacataaccttatttcttgtatttgcccccttttttttataaaaggtgaataaaaagaaataatttaatatcaccattgtatggattcctaatcaagatttcacgttctcagcccctgagactagttttctttgctctctgtaattagagcctttggaagcaaagttgaaaggaagtatttccattctgttactgttttgtagcactttgtccatttattgatttttaaagtagatatttagataccacccctgccctgccctgccccaaaaagaaaaatgtttattgtcctgctaatctatatgcctacacctcagaagctgacagatgagcttcctaaaacatgaggatgaataaatgttagaactgtgatatcttctcatttccacagagatttgggtttaaaacaaatggctaatatttgtaagcctgaaagctgccatcctctttaacatcctacctaccttttaaaatattttctggaggttaagtacagttaggcactagaacatttgttaagcctcccaaagtagtgtgcatggaagattctagagtgtccagctcttgcactacaaatgtaataataacagaataaatacacttaccctgatgatattgagggtacatgattagcctaatgtgatgtcatatgaggaagtttaggagtccatttttcaggtggtttggtgataggaataaaaatgttactcccgtcgctgatttggaagaaaaccgatgaagtacaagtaaggtttccccactcctgtgtgtggtcatgggaagccattagagggaagctggagaacagaatggaacaggacaggctgggctagactcgagcacgcagtggcccctgtgccaccacactgtgggtcaggaacacgcgtcatggtgttcttgtcggaatgtgaacatacagcaccctctagcattacgaatctcttaggatttttaagattgtatttgataatacttatatttcacagggcacacttttggcacacctcagagcacactgctgctattttgggtcgtatcactgtaaaatacataataagtactacttaactgtgacatgaagaattggaatcccagagggcaacatttgatttgactaagatcaggcataagatagaatttttgtcatttttccttgcagttttattgacttagtttatgagcttggataaaataattttttgatgaatcatgtcaataaaaggaaaaataatgtaactacctcataagtctgataaaaggaagttgctagtgttttatagaatttctgaaggtggttaaatcaagtatgatttcaaaatatcaactagttccacttttgtgattgcaggatgcttcttatactaaagttctcataaataataaatcagcttatgcc

SEQ ID NO: 369905 - DNA, 2950 bp, Homo sapiens
gcctggtgcacagagtctgcaggtcgggcggtagcgacaggtcagagctgcggcctgagcagccagcgtccggcatgaaggtctggggtctggctgctgcctgcttcttgctccagcaccatggaatgcctgcgcagtttaccctgcctcctgccccgcgcgatgagacttccccggcggacgctgtgtgccctggccttggacgtgacctctgtgggtcctcccgttgctgcctgcggccgccgagccaacctgattggaaggagccgagcggcgcagctttgcgggcccgaccggctccgcgtggcaggtgaagtgcaccggtttagaacctctgacgtctctcaagccactttagccagtgtagccccagtatttactgtgtctatcagagttagaaacagatattaaaattttcaaagagtcaattttggagatcttggatgaggaagagttgctagaagagctctgtgtatcaaaatggagtgacccacaagtctttgaaaagagcagtgctgggattgaccatgcagaagagatggagttgctgttggaaaactactaccgattggctgacgatctctccaatgcagctcgtgagcttagggtgctgattgatgattcacaaagtattattttcattaatctggacaggtttcatccatgtggtctgtatagatttgatgaatgtgctgtatatagttagtgggcccttctaatctgaataggtgttctcctctccagccaccgaaacgtgatgatgaggttgaatctacagctgaccatgggaaccttctctctttcgctctttggactaatgggagttgctttggaatgaatttggaatcttcccttgaagaggaattatgttcatgggaagtggcctcatctggaggcgcctgctttcattccttggacgacagctagaagctccattgcctcctatgatggcttctttacctaaaaagactcttctggcagatagaagcatggaattgaaaaatagcctcagactggatggacttggatcaggaaggagcatcctaacaaaccgttaggaacagccccgtggatactgaagttttttttatggtagttacaggaaacttctgatactctttttattattttcttgtatagagtcagacacttgaaaaaaactaatgtttgaagacaaaaatattttggcagtcacaataccagaactggattgcatttccagaattctgagttaaagaaacaaagtatttgctttgtaaaaggccaaaattctatttcctacaaactttaaatgctgtttttatagatgtgatatgaggcaacacaagcacagacagttgcatagattttaatttatacatatcaagaaaagtgcaatttcatgctgaatgaagcgtaggaacttgacaagcccataggtagctatagttctttgtcagtatagggaattatgttcatgtgaatttcctgattctcaggtgactaaaaagctagcattctatgtattaaccttacaacagactctgtaagtttgagctttaaaaaccaaactttgacataaccttatttcttgtatttgcccccttttttttataaaaggtgaataaaaagaaataatttaatatcaccattgtatggattcctaatcaagatttcacgttctcagcccctgagactagttttctttgctctctgtaattagagcctttggaagcaaagttgaaaggaagtatttccattctgttactgttttgtagcactttgtccatttattgatttttaaagtagatatttagataccacccctgccctgccctgccccaaaaagaaaaatgtttattgtcctgctaatctatatgcctacacctcagaagctgacagatgagcttcctaaaacatgaggatgaataaatgttagaactgtgatatcttctcatttccacagagatttgggtttaaaacaaatggctaatatttgtaagcctgaaagctgccatcctctttaacatcctacctaccttttaaaatattttctggaggttaagtacagttaggcactagaacatttgttaagcctcccaaagtagtgtgcatggaagattctagagtgtccagctcttgcactacaaatgtaataataacagaataaatacacttaccctgatgatattgagggtacatgattagcctaatgtgatgtcatatgaggaagtttaggagtccatttttcaggtggtttggtgataggaataaaaatgttactcccgtcgctgatttggaagaaaaccgatgaagtacaagtaaggtttccccactcctgtgtgtggtcatgggaagccattagagggaagctggagaacagaatggaacaggacaggctgggctagactcgagcacgcagtggcccctgtgccaccacactgtgggtcaggaacacgcgtcatggtgttcttgtcggaatgtgaacatacagcaccctctagcattacgaatctcttaggatttttaagattgtatttgataatacttatatttcacagggcacacttttggcacacctcagagcacactgctgctattttgggtcgtatcactgtaaaatacataataagtactacttaactgtgacatgaagaattggaatcccagagggcaacatttgatttgactaagatcaggcataagatagaatttttgtcatttttccttgcagttttattgacttagtttatgagcttggataaaataattttttgatgaatcatgtcaataaaaggaaaaataatgtaactacctcataagtctgataaaaggaagttgctagtgttttatagaatttctgaaggtggttaaatcaagtatgatttcaaaatatcaactagttccacttttgtgattgcaggatgcttcttatactaaagttctcataaataataaatcagcttatgcc

SEQ ID NO: 369906 - DNA, 1724 bp, Homo sapiens
gcctggtgcacagagtctgcaggtcgggcggtagcgacaggtcagagctgcggcctgagcagccagcgtccggcatgaaggtctggggtctggctgctgcctgcttcttgctccagcaccatggaatgcctgcgcagtttaccctgcctcctgccccgcgcgatgagacttccccggcggacgctgtgtgccctggccttggacgtgacctctgtgggtcctcccgttgctgcctgcggccgccgagccaacctgattggaaggagccgagcggcgcagctttgcgggcccgaccggctccgcgtggcaggtgaagtgcaccggtttagaacctctgacgtctctcaagccactttagccagtgtagccccagtatttactgtgacaaaatttgacaaacagggaaacgttacttcttttgaaaggaagaaaactgaattataccaagagttaggtcttcaagccagagatttgagatttcagcatgtaatgagtatcacagtcagaaacaataggattatcatgagaatggagtatttgaaagctgtgataactccagagtgtcttctgatattagattatcgtaatttaaacttagagcaatggctgttccgggaactcccttcacagttgtctggagagggtcaactcgttacataccctttaccttttgagtttagagctatagaagcactcctgcaatattggatcaacacccttcaggggaaacttagcattttgcagccactgatccttgagaccttggatgctttggtggaccccaaacattcttctgtagacagaagcaaactgcacattttactacagaatggcaaaagtctatcagagttagaaacagatattaaaattttcaaagagtcaattttggagatcttggatgaggaagagttgctagaagagctctgtgtatcaaaatggagtgacccacaagtctttgaaaagagcagtgctgggattgaccatgcagaagagatggagttgctgttggtgctgattgatgattcacaaagtattattttcattaatctggacagccaccgaaacgtgatgatgaggttgaatctacagctgaccatgggaaccttctctctttcgctctttggactaatgggagttgctttggaatgaatttggaatcttcccttgaagaggaccatagaattttttggctgattacaggaattatgttcatgggaagtggcctcatctggaggcgcctgctttcattccttggacgacagctagaagctccattgcctcctatggtatgaaggatatggttcacggcggtattgtggaagggttatgatcatgggccctaaagtcagagcgcctgggattaagttgtcacaggcactatggcccttgcgagttgctttctcaaacttccttcagtttccctatctgtcagttaagtcggtattacctgcttcatagggttatgggaagaattaaacaatatgtgtaaagcacttactagcacactgcctaacacaataagttagaaatataatttgtgtagaactctgacaacatacatttaaacagatgttagtaattctggtataaggtttgtcataaccaaatggaaatgtaggaaacatttataatgttcttaaaagatagaaaattcacctccattttctttgtacttgaagatggcaccactggaataaatacttaagacactgaaaaaaattata

SEQ ID NO: 369907 - DNA, 3050 bp, Homo sapiens
gttatttaaggaaggtattagtggcaaattataggttataatagtattagtgaattttctttataatagtttttgtgtctgtgtgtgacatccataaaaactggatactctatttttgcattttatttggttgtaagattattttagagtattgttgactttggggacaagaagcttaaggatgaaatcagcaaatgtttattatgagtagtttgtgctaggaagtatgtaggatccaaaaaaagaaaaatctaatactgttgccttaataattttgcggcagcggctgcgagaggcggcggcacgacgacggtccctcagcccagccaccatgagcaccaagcagatcacttgcaggtattttatgcatggtgtgtgtcgggaaggaagtcagtgcctattctcacatgacttggcaaacagcaaaccgtccaccatctgcaagtactaccagaagggctactgtgcctatggaactcggtgcagatatgaccacacgaggccctctgctgcagctggaggtgctgtgggcaccatggcccacagtgtgccctccccagctttccacagtcctcaccctccttccgaggtcactgcatccattgtgaaaactaactcacatgaacccggaaagcgtgaaaagagaacattggttcttagagaccgaaatctctctggcatggctgaaaggaagacccagccgagcatggtgagtaatccaggcagctgcagcgacccccagcccagccccgagatgaagccgcattcctacctggatgccatcaggagtggccttgatgacgtggaggccagcagctcctacagcaacgagcagcagctgtgcccctacgcagctgctggggagtgccggtttggggatgcctgtgtctacctgcacggggaggtgtgtgaaatctgtaggctgcaagtcttgcacccattcgacccagagcagaggaaggctcacgaaaagatctgcatgttgacgttcgaacacgagatggaaaaggcctttgccttccaggcaagccaggacaaagtgtgcagtatctgcatggaagtgatcctggagaaggcctctgcttctgagaggagatttgggattctctccaattgcaatcacacgtactgtttgtcctgcatccggcagtggcggtgtgccaaacagtttgaaaacccaatcattaagtcttgtccagaatgccgtgtgatatcagagtttgtaattccaagtgtgtattgggtggaagatcagaataaaaagaacgagttgattgaagctttcaaacaggggatggggaaaaaagcctgtaaatactttgagcaaggcaaggggacctgcccatttggaagcaaatgtctttatcgccatgcttaccccgatgggcggctagcagagcctgagaaacctcggaaacagctcagttctcaaggcactgtgaggttctttaattcagtgcggctctgggatttcatcgagaaccgagaaagccggcatgtccccaacaatgaagatgtcgacatgacagagctcggggacctcttcatgcacctttctggagtggaatcatcagaaccctaaagagtagatggttgccctgcatcttgggctccatcggccgaaactttcccaagccagggtgtgcggagcttccctgtactgcagccaaggtgacgtgtgacttggatttgagtggagttgggcttagccttagtctcattcaatctccattattacagccatggggaagagtgaaagatataaagtaacctaattaaatgtatggaattgctatttttatagctgatatagttacacctcaagcccctcaggggtaacaactaacaaacacccaaactgtttggattgattgctttaaaaaacaaacctggctcttacctttgatcttttcttccccagaaatagtaaacttgcagctgcccctaatgcagcatatttttcttaccaaaggagtcttcagccctataaaaggattcctctatagtgtatttctctagtgtatttagtgtgtcgtcaaaattttgatttatacagagctttcaagaacacacaatgcaaagtgagcgcagcatagctgttaacaaacatacaacttttttctagggctttaagggtggtcatttttttcaagttctctcaagtgtcccaaatcagggtagcaatcttgttgccacatgtgcagcaaacaaagtggaagtatagatcttcttctcccttagggaggctcttgaaggagcaggaggtacagtactgggtagcagtctggccctcctgtcgtctggttggtgttggggcctccagccagggccctctaggggaaccaagcctctgctctcacctgtgggttcttgcccatcagggtaattgtattgagaactcaaatatacgtgcacttacatgtgtggttcgtactcaagtgatctattatctagctgcaaagcctggctttgatttgaaattttgtaaaaatttcatggcacccaaggtttctgattctgacccagcagtggtcctgaagagagctgatggcaagtcttgtagtcattttgattttaattgaagggtgagcataaccttgtgaaccagcactagcttgttccaagctggaatttatctaatctatttttgtgtttaaaaaagctgtacctaccaaataaataaatagtttataaaatgtattacttaaggtattagctgagtttagagtactttctgcttaattaatttttatacttaactcttcagtagaggtttacaaagagtacaaaggttaaattacaaattcattcccagcctaggctctgggcacatttcctgttcttgaattctgctcctgaagagggtgaacaaatggggcattcaagttgtgagctcagaattactttaaaaggaggtaacagccagccattacacctaaatttaatttattttattaaaataacataattgagggaccatcagataactgtattttgtcaggtgcaataaaaacaaaattaaaacccaaatcatcaagaaaaaaaaaaaa

SEQ ID NO: 369908 - DNA, 2502 bp, Homo sapiens
accggaggggcggcgtgcgccggcgtgcgccggcgtgacgcggctacgcgggatgggccgggccaggccaaggccgaggcggcagcggctgcgagaggcggcggcacgacgacggtccctcagcccagccaccatgagcaccaagcagatcacttgcaggtattttatgcatggtgtgtgtcgggaaggaagtcagtgcctattctcacatgacttggcaaacagcaaaccgtccaccatctgcaagtactaccagaagggctactgtgcctatggaactcggtgcagatatgaccacacgaggccctctgctgcagctggaggtgctgtgggcaccatggcccacagtgtgccctccccagctttccacagtcctcaccctccttccgaggtcactgcatccattgtgaaaactaactcacatgaacccggaaagcgtgaaaagagaacattggttcttagagaccgaaatctctctggcatggctgaaaggaagacccagccgagcatggtgagtaatccaggcagctgcagcgacccccagcccagccccgagatgaagccgcattcctacctggatgccatcaggagtggccttgatgacgtggaggccagcagctcctacagcaacgagcagcagctgtgcccctacgcagctgctggggagtgccggtttggggatgcctgtgtctacctgcacggggaggtgtgtgaaatctgtaggctgcaagtcttgcacccattcgacccagagcagaggaaggctcacgaaaagatctgcatgttgacgttcgaacacgagatggaaaaggcctttgccttccaggcaagccaggacaaagtgtgcagtatctgcatggaagtgatcctggagaaggcctctgcttctgagaggagatttgggattctctccaattgcaatcacacgtactgtttgtcctgcatccggcagtggcggtgtgccaaacagtttgaaaacccaatcattaagtcttgtccagaatgccgtgtgatatcagagtttgtaattccaagtgtgtattgggtggaagatcagaataaaaagaacgagttgattgaagctttcaaacaggggatggggaaaaaagcctgtaaatactttgagcaaggcaaggggacctgcccatttggaagcaaatgtctttatcgccatgcttaccccgatgggcggctagcagagcctgagaaacctcggaaacagctcagttctcaaggcactgtgaggttctttaattcagtgcggctctgggatttcatcgagaaccgagaaagccggcatgtccccaacaatgaagatgtcgacatgacagagctcggggacctcttcatgcacctttctggagtggaatcatcagaaccctaaagagtagatggttgccctgcatcttgggctccatcggccgaaactttcccaagccagggtgtgcggagcttccctgtactgcagccaaggtgacgtgtgacttggatttgagtggagttgggcttagccttagtctcattcaatctccattattacagccatggggaagagtgaaagatataaagtaacctaattaaatgtatggaattgctatttttatagctgatatagttacacctcaagcccctcaggggtaacaactaacaaacacccaaactgtttggattgattgctttaaaaaacaaacctggctcttacctttgatcttttcttccccagaaatagtaaacttgcagctgcccctaatgcagcatatttttcttaccaaaggagtcttcagccctataaaaggattcctctatagtgtatttctctagtgtatttagtgtgtcgtcaaaattttgatttatacagagctttcaagaacacacaatgcaaagtgagcgcagcatagctgttaacaaacatacaacttttttctagggctttaagggtggtcatttttttcaagttctctcaagtgtcccaaatcagggtagcaatcttgttgccacatgtgcagcaaacaaagtggaagtatagatcttcttctcccttagggaggctcttgaaggagcaggaggtacagtactgggtagcagtctggccctcctgtcgtctggttggtgttggggcctccagccagggccctctaggggaaccaagcctctgctctcacctgtgggttcttgcccatcagggtaattgtattgagaactcaaatatacgtgcacttacatgtgtggttcgtactcaagtgatctattatctagctgcaaagcctggctttgatttgaaattttgtaaaaatttcatggcacccaaggtttctgattctgacccagcagtggtcctgaagagagctgatggcaagtcttgtagtcattttgattttaattgaagggtgagcataaccttgtgaaccagcactagcttgttccaagctggaatttatctaatctatttttgtgtttaaaaaagctgtacctaccaaataaataaatagtttataaaatgta

SEQ ID NO: 369909 - DNA, 613 bp, Homo sapiens
  misc_feature (25)..(25): n is a, c, g, or t
ctcaacgctttatactttctcaacngctttacttccgtattgaattcaagtataatattaagtatgcatggaagtataaagcgttgagctcaacgctttatacttccacatgtgcagcaaacaaagtggaagtatagatcttcttctcccttagggaggctcttgaaggagcaggaggtacagtactgggtagcagtctggccctcctgtcgtctggttggtgttggggcctccagccagggccctctaggggaaccaagcctctgctctcacctgtgggttcttgcccatcagggtaattgtattgagaactcaaatatacgtgcacttacatgtgtggttcgtactcaagtgatctattatctagctgcaaagcctggctttgatttgaaattttgtaaaaatttcatggcacccaaggtttctgattctgacccagcagtggtcctgaagagagctgatggcaagtcttgtagtcattttgattttaattgaagggtgagcataaccttgtgaaccagcactagcttgttccaagctggaatttatctaatctatttttgtgtttaaaaaagctgtacctaccaaataaataaatagtttataaaatgta

SEQ ID NO: 369910 - DNA, 728 bp, Homo sapiens
gttatttaaggaaggtattagtggcaaattataggttataatagtattagtgaattttctttataatagtttttgtgtctgtgtgtgacatccataaaaactggatactctatttttgcattttatttggttgtaagattattttagagtattgttgactttggggacaagaagcttaaggatgaaatcagcaaatgtttattatgagtagtttgtgctaggaagtatgtaggatccaaaaaaagaaaaatctaatactgttgccttaataattttgcggcagcggctgcgagaggcggcggcacgacgacggtccctcagcccagccaccatgagcaccaagcagatcacttgcagccacagtcctcaccctccttccgaggtcactgcatccattgtgaaaactaactcacatgaacccggaaagcgtgaaaagagaacattggttcttagagaccgaagtgagtaagcggaagccttttgttgcgtctttttgcatagcactcttgttaatgcttggtgctcctttctagcctcctcttgtcaagaggactcctaacctaatacacctccagattgtctgcgcggagagacttcagaactgttctgaagaggctccatgtggctgcagatcattcaaatgatacattcgccctcgtgcccaaggctgggttgagctccaagactggcctggtaaaacataaaaacacaatctttttgtcaacatg

SEQ ID NO: 369911 - DNA, 966 bp, Homo sapiens
aaaacagtggctttattgggatgtaactccatcattagtcaaggagcatctgtgtatatcttttgataccacactatggtatttgatcctcaccacgaccagttaagtgggtagtataatcttcattttatagggaaaggtagcaaggcccagggaagttggttttgtgacatgttcttaagtggcagagctgggtcttgagcccagatcttctggtttcgttagtcatgccctttaagctccttgagaacagagagaacagtttttcacagagtgttttctcaattatgtggctcacattgaacatatctcaaatcaggaagatatatcttcacatagaaatatatgggatcatttgtttttctttcagaaaagctgtcattgaatcagttgtagtgcctctgaaatcactgttgtagaatcaaggaaatatatagatctctctccagtgcctaatagagcctttatacataatatatgcctggtaaatgtttgtatgctaagttcaagaataagctgattttataaagcaaaatgtgcttctaaaagttgtatgcctgtgcttgtctctgcaggtattttatgcatggtgtgtgtcgggaaggaagtcagtgcctattctcacatgacttggcaaacagcaaaccgtccaccatctgcaagtactaccagaagggctactgtgcctatggaactcggtgcaggcaaggactctgcaacagattccagctgtgacactgatttcatttggagaatgggtcttgataagggggaaattttaatgtaaaagtaatatggcaacatcacaaaaagtatggcaaataagtttaaaacctcagtttcagtaccctaaaactaattttcttttctttttttttttgagatagagtctctcactgttgcccaggctggagggcagtggtgcgatctcagttctctgcaacctccgcctccagggttctcctg

SEQ ID NO: 369912 - DNA, 2852 bp, Homo sapiens
accggaggggcggcgtgcgccggcgtgcgccggcgtgacgcggctacgcgggatgggccgggccaggccaaggccgaggcggcagcggctgcgagaggcggcggcacgacgacggtccctcagcccagccaccatgagcaccaagcagatcacttgcaggtattttatgcatggtgtgtgtcgggaaggaagtcagtgcctattctcacatgacttggcaaacagcaaaccgtccaccatctgcaagtactaccagaagggctactgtgcctatggaactcggtgcagatatgaccacacgaggccctctgctgcagctggaggtgctgtgggcaccatggcccacagtgtgccctccccagctttccacagtcctcaccctccttccgaggtcactgcatccattgtgaaaactaactcacatgaacccggaaagcgtgaaaagagaacattggttcttagagaccgaaatctctctggcatggctgaaaggaagacccagccgagcatggtgagtaatccaggcagctgcagcgacccccagcccagccccgagatgaagccgcattcctacctggatgccatcaggagtggccttgatgacgtggaggccagcagctcctacagcaacgagcagcagctgtgcccctacgcagctgctggggagtgccggtttggggatgcctgtgtctacctgcacggggaggtgtgtgaaatctgtaggctgcaagtcttgcacccattcgacccagagcagaggaaggctcacgaaaagatctgcatgttgacgttcgaacacgagatggaaaaggcctttgccttccaggcaagccaggacaaagtgtgcagtatctgcatggaagtgatcctggagaaggcctctgcttctgagaggagatttgggattctctccaattgcaatcacacgtactgtttgtcctgcatccggcagtggcggtgtgccaaacagtttgaaaacccaatcattaagtcttgtccagaatgccgtgtgatatcagagtttgtaattccaagtgtgtattgggtggaagatcagaataaaaagaacgagttgattgaagctttcaaacaggggatggggaaaaaagcctgtaaatactttgagcaaggcaaggggacctgcccatttggaagcaaatgtctttatcgccatgcttaccccgatgggcggctagcagagcctgagaaacctcggaaacagctcagttctcaaggcactgtgaggttctttaattcagtgcggctctgggatttcatcgagaaccgagaaagccggcatgtccccaacaatgaagatgtcgacatgacagagctcggggacctcttcatgcacctttctggagtggaatcatcagaaccctaaagagtagatggttgccctgcatcttgggctccatcggccgaaactttcccaagccagggtgtgcggagcttccctgtactgcagccaaggtgacgtgtgacttggatttgagtggagttgggcttagccttagtctcattcaatctccattattacagccatggggaagagtgaaagatataaagtaacctaattaaatgtatggaattgctatttttatagctgatatagttacacctcaagcccctcaggggtaacaactaacaaacacccaaactgtttggattgattgctttaaaaaacaaacctggctcttacctttgatcttttcttccccagaaatagtaaacttgcagctgcccctaatgcagcatatttttcttaccaaaggagtcttcagccctataaaaggattcctctatagtgtatttctctagtgtatttagtgtgtcgtcaaaattttgatttatacagagctttcaagaacacacaatgcaaagtgagcgcagcatagctgttaacaaacatacaacttttttctagggctttaagggtggtcatttttttcaagttctctcaagtgtcccaaatcagggtagcaatcttgttgccacatgtgcagcaaacaaagtggaagtatagatcttcttctcccttagggaggctcttgaaggagcaggaggtacagtactgggtagcagtctggccctcctgtcgtctggttggtgttggggcctccagccagggccctctaggggaaccaagcctctgctctcacctgtgggttcttgcccatcagggtaattgtattgagaactcaaatatacgtgcacttacatgtgtggttcgtactcaagtgatctattatctagctgcaaagcctggctttgatttgaaattttgtaaaaatttcatggcacccaaggtttctgattctgacccagcagtggtcctgaagagagctgatggcaagtcttgtagtcattttgattttaattgaagggtgagcataaccttgtgaaccagcactagcttgttccaagctggaatttatctaatctatttttgtgtttaaaaaagctgtacctaccaaataaataaatagtttataaaatgtattacttaaggtattagctgagtttagagtactttctgcttaattaatttttatacttaactcttcagtagaggtttacaaagagtacaaaggttaaattacaaattcattcccagcctaggctctgggcacatttcctgttcttgaattctgctcctgaagagggtgaacaaatggggcattcaagttgtgagctcagaattactttaaaaggaggtaacagccagccattacacctaaatttaatttattttattaaaataacataattgagggaccatcagataactgtattttgtcaggtgcaataaaaacaaaattaaaacccaaatcatcaagaaaaaaaaaaaa

SEQ ID NO: 369913 - DNA, 1164 bp, Homo sapiens
gtaaaaagcaagaatcatagtatttattgaaggctgatatgtgtcagtgacagttctcagctcttcacaagaatcagtccattgttttcctacaattctatgagataggtactatcactgtgctccttttataggtgagtcaatgaggtgtacagagagtttcagtaacgagttggtggtagatctgagacttggactcaggcttgcaggcaccagcacccccacactttaagtaagaagttagttattgccgggcgcggtggctcaatcctgtaatcccagcactttgggagaccgaggtaggaggatcacgaggtcaggagtatgagaccatcctggccaacatggtgaaaccccatctctactaaaatacaaaaaattagcggggtgtggtggtgcacacctgtagtcccagctactcaggagggtgaggcaggagaatcccttgaacctgggaggcagagattgcgccactgcactccagcctgggcgacagagcgagactccgtctcaaaaaaaaaaaagaaaaaaaaagtcagttattcagaagaaggaacaaaaaattatatactagagtaatgaattggctgggctttgaaaaatggatatgattatgagtttaaagggagagaggacattttaggttcttgaacccctatgatgaaagatacagaggtcttccaagacagtgggaggacattgagtaaacctgcctggttagagtagaatacaggagtgatgaggttggaaagatccgaaaggggtggagtatggaataaatgctaaatttaaagtatttagtggaaagtatattttaagcagggagataatgtgtaaagatgggttttaggaagattaatatgaaggaagtgatgattcccagagatttaaataataaagatgtcttaggagtatcctgtctcactatctttatagtttaattaagaagtactttaggtagaacatttcaagtacttatgcgagggaaatgaggaaatgaccagattccaagaagccaagagagattagtttataatatactgaattagccagaacagatcatttataatgtttgagtctaggatcccattttgcactcagatggacatgtgcttttctaggattgtttgaacttgtcgttagtataattctttcctctttttc

SEQ ID NO: 369914 - DNA, 780 bp, Homo sapiens
gtaaaaagcaagaatcatagtatttattgaaggctgatatgtgtcagtgacagttctcagctcttcacaagaatcagtccattgttttcctacaattctatgagataggtactatcactgtgctccttttataggtgagtcaatgaggtgtacagagagtttcagtaacgagttggtggtagatctgagacttggactcaggcttgcaggcaccagcacccccacactttaagtaagaagttagttattgccgggcgcggtggctcaatcctgtaatcccagcactttgggagaccgaggtaggaggatcacgaggtcaggagtatgagaccatcctggccaacatggtgaaaccccatctctactaaaatacaaaaaattagcggggtgtggtggtgcacacctgtagtcccagctactcaggagggtgaggcaggagaatcccttgaacctgggaggcagagattgcgccactgcactccagcctgggcgacagagcgagactccgtctcaaaaaaaaaaaagaaaaaaaaagtcagttattcagaagaaggaacaaaaaattatatactagagtaatgaattggctgggctttgaaaaatggatatgattatgagtttaaagggagagaggacattttaggttcttgaacccctatgatgaaagatacagaggtaaaacttccaaggtgtgtgaatcgcttgagcccaggagttggagaccatcctgggcaacatagtgagacctcgcctctactaaataaaaatattagccaagca

SEQ ID NO: 369915 - DNA, 1115 bp, Homo sapiens
gtaaaaagcaagaatcatagtatttattgaaggctgatatgtgtcagtgacagttctcagctcttcacaagaatcagtccattgttttcctacaattctatgagataggtactatcactgtgctccttttataggtgagtcaatgaggtgtacagagagtttcagtaacgagttggtggtagatctgagacttggactcaggcttgcaggcaccagcacccccacactttaagtaagaagttagttattgccgggcgcggtggctcaatcctgtaatcccagcactttgggagaccgaggtaggaggatcacgaggtcaggagtatgagaccatcctggccaacatggtgaaaccccatctctactaaaatacaaaaaattagcggggtgtggtggtgcacacctgtagtcccagctactcaggagggtgaggcaggagaatcccttgaacctgggaggcagagattgcgccactgcactccagcctgggcgacagagcgagactccgtctcaaaaaaaaaaaagaaaaaaaaagtcagttattcagaagaaggaacaaaaaattatatactagagtaatgaattggctgggctttgaaaaatggatatgattatgagtttaaagggagagaggacattttaggttcttgaacccctatgatgaaagatacagaggtaatacaggagtgatgaggttggaaagatccgaaaggggtggagtatggaataaatgctaaatttaaagtatttagtggaaagtatattttaagcagggagataatgtgtaaagatgggttttaggaagattaatatgaaggaagtgatgattcccagagatttaaataataaagatgtcttaggagtatcctgtctcactatctttatagtttaattaagaagtactttaggtagaacatttcaagtacttatgcgagggaaatgaggaaatgaccagattccaagaagccaagagagattagtttataatatactgaattagccagaacagatcatttataatgtttgagtctaggatcccattttgcactcagatggacatgtgcttttctaggattgtttgaacttgtcgttagtataattctttcctctttttc

SEQ ID NO: 369916 - DNA, 1062 bp, Homo sapiens
ggccgcatgggccgccgggatgtgtagtccgcaggagtccggcatgaccgccttgagcgcgaggatgctgacccggagccggagcctgggacccggggctgggccgcgggggtgtagggaggagcccgggcctctccggagaagagaggctgcagcagaagcgaggaaaagccacagccccgtgaagcgtccgcggaaagcacagagactgcgtgtggcctatgagggctcggacagtgagaaaggtgagggggctgagcccctcaaggtgccagtctgggagccccaggactggcagcaacagctggtcaacatccgtgccatgaggaacaaaaaggatgcacctgtggaccatctggggactgagcactgctatgactccagtgcccccccaaaggtacgcaggtaccaggtgctgctgtcactgatgctctccagccaaaccaaagaccaggtgacggcgggcgccatgcagcgactgcgggcgcggggcctgacggtggacagcatcctgcagacagatgatgccacgctgggcaagctcatctaccccgtcggtttctggaggagcaaggtgaaatacatcaagcagaccagcgccatcctgcagcagcactacggtggggacatcccagcctctgtggccgagctggtggcgctgccgggtgttgggcccaagatggcacacctggctatggctgtggcctggggcactgtgtcaggcattgcagtggacacgcatgtgcacagaatcgccaacaggctgaggtggaccaagaaggcaaccaagtccccagaggagacccgcgccgccctggaggagtggctgcctagggagctgtggcacgagatcaatggactcttggtgggcttcggccagcagacctgtctgcctgtgcaccctcgctgccacgcctgcctcaaccaagccctctgcccggccgcccagggtctctgatggccgcatggctctggccgaggtgccgctgtggccaccgtctgtgaagtggctttacgcttcaggaagccacgcctgttgaataaagctttggtgtgtttgca

SEQ ID NO: 369917 - DNA, 491 bp, Homo sapiens
caagatggtcacatgtaggcttgcagccagggctttgcggttccaatgtctaactggagggccacgggggtggtggcagactcgcctctgggcggggaggggcacgggctaggctggtggagtgtgcccctgttcaccccgcttggcctcccagcagcagtggacacgcatgtgcacagaatcgccaacaggctgaggtggaccaagaaggcaaccaagtccccagaggagacccgcgccgccctggaggagtggctgcctagggagctgtggcacgagatcaatggactcttggtgggcttcggccagcagacctgtctgcctgtgcaccctcgctgccacgcctgcctcaaccaagccctctgcccggccgcccagggtctctgatggccgcatggctctggccgaggtgccgctgtggccaccgtctgtgaagtggctttacgcttcaggaagccacgcctgttgaataaagctttggtgtgtttgca

SEQ ID NO: 369918 - DNA, 910 bp, Homo sapiens
ggccgcatgggccgccgggatgtgtagtccgcaggagtccggcatgaccgccttgagcgcgaggatgctgacccggagccggagcctgggacccggggctgggccgcgggggtgtagggaggagcccgggcctctccggagaagagaggctgcagcagaagcgaggaaaagccacagccccgtgaagcgtccgcggaaagcacagagactgcgtgtggcctatgagggctcggacagtgagaaaggtacgcaggtaccaggtgctgctgtcactgatgctctccagccaaaccaaagaccaggtgacggcgggcgccatgcagcgactgcgggcgcggggcctgacggtggacagcatcctgcagacagatgatgccacgctgggcaagctcatctaccccgtcggtttctggaggagcaaggtgaaatacatcaagcagaccagcgccatcctgcagcagcactacggtggggacatcccagcctctgtggccgagctggtggcgctgccgggtgttgggcccaagatggcacacctggctatggctgtggcctggggcactgtgtcaggcattgcagtggacacgcatgtgcacagaatcgccaacaggctgaggtggaccaagaaggcaaccaagtccccagaggagacccgcgccgccctggaggagtggctgcctagggagctgtggcacgagatcaatggactcttggtgggcttcggccagcagacctgtctgcctgtgcaccctcgctgccacgcctgcctcaaccaagccctctgcccggccgcccagggtctctgatggccgcatggctctggccgaggtgccgctgtggccaccgtctgtgaagtggctttacgcttcaggaagccacgcctgttgaataaagctttggtgtgtttgca

SEQ ID NO: 369919 - DNA, 535 bp, Homo sapiens
ggccgcatgggccgccgggatgtgtagtccgcaggagtccggcatgaccgccttgagcgcgaggatgctgacccggagccggagcctgggacccggggctgggccgcgggggtgtagggaggagcccgggcctctccggagaagagaggctgcagcagaagcgaggaaaagccacagccccgtgaagcgtccgcggaaagcacagagactgcgtgtggcctatgagggctcggacagtgagaaaggtgagggggctgagcccctcaaggtgccagtctgggagccccaggactggcagcaacagctggtcaacatccgtgccatgaggaacaaaaaggatgcacctgtggaccatctggggactgagcactgctatgactccagtgcccccccaaaggtaggcaggggccccatctgcccagatgacccccatcttagcaaggtccttgttttctttctacccggtggcttttggctggcaccctcccctgcagacagcaccttgggaggatggacacccggtgccccagagcat

SEQ ID NO: 369920 - DNA, 249 bp, Homo sapiens
tgacccagcccccacccccacagggagctgtggcacgagatcaatggactcttggtgggcttcggccagcagacctgtctgcctgtgcaccctcgctgccacgcctgcctcaaccaagccctctgcccggccgcccagggtctctgatggccgcatggctctggccgaggtgccgctgtggccaccgtctgtgaagtggctttacgcttcaggaagccacgcctgttgaataaagctttggtgtgtttg

SEQ ID NO: 369921 - DNA, 1693 bp, Homo sapiens
ggccgcatgggccgccgggatgtgtagtccgcaggagtccggcatgaccgccttgagcgcgaggatgctgacccggagccggagcctgggacccggggctgggccgcgggggtgtagggaggagcccgggcctctccggagaagagaggctgcagcagaagcgaggaaaagccacagccccgtgaagcgtccgcggaaagcacagagactgcgtgtggcctatgagggctcggacagtgagaaaggtgagggggctgagcccctcaaggtgccagtctgggagccccaggactggcagcaacagctggtcaacatccgtgccatgaggaacaaaaaggatgcacctgtggaccatctggggactgagcactgctatgactccagtgcccccccaaaggtacgcaggtaccaggtgctgctgtcactgatgctctccagccaaaccaaagaccaggtgacggcgggcgccatgcagcgactgcgggcgcggggcctgacggtggacagcatcctgcagacagatgatgccacgctgggcaagctcatctaccccgtcggtttctggaggagcaaggtgaaatacatcaagcagaccagcgccatcctgcagcagcactacggtggggacatcccagcctctgtggccgagctggtggcgctgccgggtgttgggcccaagatggcacacctggctatggctgtggcctggggcactgtgtcaggcattgcagtggacacgcatgtgcacagaatcgccaacaggctgaggtggaccaagaaggcaaccaagtccccagaggagacccgcgccgccctggaggagtggctgcctagggagctgtggcacgagatcaatggactcttggtgggcttcggccagcagacctgtctgcctgtgcaccctcgctgccacgcctgcctcaaccaagccctctgcccggccgcccagggtctctgatggccgcatggctctggccgaggtgccgctgtggccaccgtctgtgaagtggctttacgcttcaggaagccacgcctgttgaataaagctttggtgtgtttgcaaaaaaaaaaaaaaaagaagcatgagagacagacacataagccacgaagaaaaaaacaaacccggaggtgagagagaaacaagacaagacaaagcggtgacagaaacacgaagaaacacaaaaaacagcgtggaagaaagcgacacaccaacgaaggggatgacgaaaccaatgcaaccacaagatgagagagaaaagcacatcataacaccaaacacgcacacgacacaacaaaccagcgcacgaagaggaaaatagatcgaatcacccccccacgggagaagggcaactcaacgtgagagagaacccaaaaccgaaaggaacgcacacagcgacaatgtaggggatcaaactatgaaaaaacacccaaccccaaaagaagagaaaaaaataaggagaccataggaacgcaaggcccccaccgtagacagagcaaacgaacacaattaccctgaacaagaacccccaccaagaaagacaaagagccccgacaaaagtgcgacagacaaagcgatgcaagtcaaacaataagcaccggagcataaatggcaataaagacacccaagaaagggaacacaacgaagaacagcgaacagcgccgatacaagacagctgaaagtaagaagacgaag

SEQ ID NO: 369922 - DNA, 891 bp, Homo sapiens
ggccgcatgggccgccgggatgtgtagtccgcaggagtccggcatgaccgccttgagcgcgaggatgctgacccggagccggagcctgggacccggggctgggccgcgggggtgtagggaggagcccgggcctctccggagaagagaggctgcagcagaagcgaggaaaagccacagccccgtgaagcgtccgcggaaagcacagagactgcgtgtggcctatgagggctcggacagtgagaaaggtgagggggctgagcccctcaaggtgccagtctgggagccccaggactggcagcaacagctggtcaacatccgtgccatgaggaacaaaaaggatgcacctgtggaccatctggggactgagcactgctatgactccagtgcccccccaaagagcaaggtgaaatacatcaagcagaccagcgccatcctgcagcagcactacggtggggacatcccagcctctgtggccgagctggtggcgctgccgggtgttgggcccaagatggcacacctggctatggctgtggcctggggcactgtgtcaggcattgcagtggacacgcatgtgcacagaatcgccaacaggctgaggtggaccaagaaggcaaccaagtccccagaggagacccgcgccgccctggaggagtggctgcctagggagctgtggcacgagatcaatggactcttggtgggcttcggccagcagacctgtctgcctgtgcaccctcgctgccacgcctgcctcaaccaagccctctgcccggccgcccagggtctctgatggccgcatggctctggccgaggtgccgctgtggccaccgtctgtgaagtggctttacgcttcaggaagccacgcctgttgaataaagctttggtgtgtttgca

SEQ ID NO: 369923 - DNA, 638 bp, Homo sapiens
cgcgcccggccggccaggattttttaaaagggagtgacacaacctgatgtgggtgttagcagactgtctctggtgcagtatagaagatgtattgggggcaccttggtacaggctgttgctagagtcctcatgagctaacatggaccttgtcagggtcgctggcataaggagggcccacataccccagactgcagagggcagagcaccccaagtgtattagatgatggacagttgtggcatgaacgagtgaggggtgagctagcaggcgggatggcacccctaccctaccttcacctgtggccccaccagagggactgcgtggtgctttttgcagaagcgaggaaaagccacagccccgtgaagcgtccgcggaaagcacagagactgcgtgtggcctatgagggctcggacagtgagaaaggtgagggggctgagcccctcaaggtgccagtctgggagccccaggactggcagcaacagctggtcaacatccgtgccatgaggaacaaaaaggatgcacctgtggaccatctggggactgagcactgctatgactccagtgcccccccaaaggtaggcaggggccccatctgcccagatgacccccatcttagcaaggtccttgttttctttctacc

SEQ ID NO: 369924 - DNA, 302 bp, Homo sapiens
acaaccataaagcactgtactaagctcctgacacacattatcccttttaatcctcagaatatcttaggtgtagccactattaatatcccagtttttcaaatgaggaaactgacacccagaaaggctaagtcatttgtccaacatgacacactggaagggctgcagctagtatctgaaccccagtagtcttactgccccaacagtcttgctgcggaggagggaaggggcataccaataacaatgatgataatggtgatgatcatgctaaataacagcaactaacccccattagagttgtacat

SEQ ID NO: 369925 - DNA, 763 bp, Homo sapiens
tgattacagtaatgctgctttttaatatccctcatgatttgacaccttgtcagggttactttggaatactgtcgaagtcttaggcagggtaaacacctttgtagattgagctagctctgtacttaattaaagctaacactttgatcagatcagtgtcagaagattacttctccattgccttcagaaatactctagtaactctttccttactgcttcacagcctcccctggtgaagacacaaactgtcaccatctcagataatgccaatgctgtgaaaagtgaaatcccaaccaaagacgtccctattgtccacactgagaccaagaccatcacttatgaggctgcccagactgacgacaacagtggagacttggacccaggagtcttgctgacagctcaaactatcacatctgagaccccaagcagcaccaccacaactcaaattaccaaggtaacagaccagctagaacctctttatggaacccaggggcaggctaagcttgctgccacctctctgcaagaaggaccctagtccataagcaaatattttcagctccatccctagtaagccacattattcaaagagtcctggatggaaaggccctgctgccttccccagcaataaatctagggagataccctgagagtatccctgcctacttagtagtctcctaaaggtaggtgtggttgttctctttacacatctgtctctctggtcagtgagtcccctgtctggctgtggaagtaagtttaaaaagtcagc

SEQ ID NO: 369926 - DNA, 675 bp, Homo sapiens
ttttgctgggataggcaaagtcttttgggacacgagttcttcaaaggtggtggaagatgaacaaaaccatcctcggggctgaaaagtgagggcttctgaactatgcaattgcagagggactttctttccaagtacggcattcccgatataccagaaaggggtggaagaatgtcagaagaatggcaagcatgaacatcacattcacctgcagggagagcagaagtgaggtgaaatccaggaattctgaacaacagaactgttgctcaatgaagcaagcactggtccattccatgaccaatgaagggaccagaagtctaccgagtttatattctacttttcacccagacactatggtgccctggaggaaggactttcagttacttttcattctgcactatcggttggggtagaggaggaatatcaagcccatttcacagataaagaaacagaggcctagcgagcattcaatgacatgttcaaggtcacatgggaagctggtagaggcaccagctagaatacacagctgattactaggtcacctgatgcaataatcaagtctgctgttttggcctttcgtagtagaagtggttgtagtgtttagatatctgtttggtcttgcttcttgtattgcatttttttcaataaacaacaacaaaaagaactctctctgtgagg

SEQ ID NO: 369927 - DNA, 5986 bp, Homo sapiens
  misc_feature (694)..(694): n is a, c, g, or t
cagtgcaggtggaggccccggcggggcaaagtggcaggaacctcttaaagggcgagacgggcggcgaccgagaacgcggtcggcccggtccccgccgcacccagcccagtcatgacaacagagaagagtttagtgactgaggccgaaaattcacagcaccaacagaaggaagagggtgaggaagccataaactcaggccaacaagaacctcagcaggaggaatcttgtcaaacagcagctgaaggagataattggtgtgaacagaagctgaaagcttctaatggagacactcctacacatgaagacttgaccaagaacaaggagcggacatcagaaagcagaggactttcacgactattctcctcgtttctcaaaaggcccaaatctcaggtgtccgaggaagaaggcaaagaagtagagtcagataaagaaaaaggtgaaggaggtcagaaagagatagaatttggaaccagtcttgatgaagagatcattttaaaggccccaattgcagctcctgaaccggaactcaaaacagacccatctttggatcttcattcattaagcagtgcagaaacacagcctcaccattacaattaagaattatttttagagtcttcttatttctgaagcatgtgaatattatctcgatcgttaaaagtcctgctcaggaagaactcagagaagatccagattntgaaattaaggaaggagaaggacttgaagagtgctccaaaatagaagtaaaagaagaaagccctcaatcaaaagcagaaacagaattaaaagcttcccaaaaaccaatcagaaaacacaggaacatgcactgcaaggtttctttgttggatgacacagtttatgaatgtgttgtggagaaacatgctaagggacaagatttgcttaaacgagtatgtgagcatctcaatcttttggaagaagactattttggtctagccatttgggataacgcaacctctaagacatggctggattccgccaaagaaataaaaaagcaggttcgtggtgtcccttggaattttacatttaatgtaaagttttatccacctgacccagcacagttaacagaagacataacaagatattatttatgtcttcagcttcggcaggacatagttgcaggacgtctgccctgttcctttgcaaccttagcattattaggttcttacaccatccagtctgaactgggagactacgacccagaactccatggcgtggattatgttagtgattttaaactggccccgaatcagaccaaggaacttgaagagaaggtcatggaactgcataagtcatacaggtccatgactccagctcaggctgacttggagtttcttgagaatgccaaaaagttgtctatgtatggagttgatcttcataaagcaaaggacttggaaggagtagatatcatcctaggtgtctgctctagtggccttctggtttacaaagataagctgagaattaaccgcttcccttggcccaaagtgctgaagatttcttataaacgtagtagctttttcatcaagattcggcctggagagcaagagcagtatgaaagtaccatcggattcaaacttcccagttaccgagcagctaagaaattatggaaagtctgtgtagaacatcacacgtttttcagattgacatctacagacaccattcccaaaagcaaatttcttgcgctaggatccaaatttcgatacagtggccggactcaagctcagaccaggcaagctagtgctctaattgacaggcctgccccacacttcgagcgtacagcaagtaaacgggcgtcccggagcctcgatggagcagcagctgtcgattcggcagaccgaagtcctcggcccacttctgcacctgccattactcagggtcaggttgcagaaggtggcgtcctagatgcctctgctaaaaaaacagtggtccctaaagcacagaaggaaacagtgaaggctgaagtgaaaaaggaagacgagccacctgagcaagctgagccagagcccacagaagcatggaaggtggaaaaaacccacatcgaggtgacagtacccacctcaaatggtgaccaaacacagaaaaagagagaaagactagatggtgaaaacatttatatcagacatagcaatttaatgttggaggatttagacaagagtcaagaggagatcaaaaaacatcatgccagcatcagtgagctgaaaaagaacttcatggagtctgtaccagaaccacggcctagtgaatgggataaacgcttatccactcactcacccttccgaactcttaacatcaatgggcaaatccccacaggagaaggacctcccctggtgaagacacaaactgtcaccatctcagataatgccaatgctgtgaaaagtgaaatcccaaccaaagacgtccctattgtccacactgagaccaagaccatcacttatgaggctgcccagactgacgacaacagtggagacttggacccaggagtcttgctgacagctcaaactatcacatctgagaccccaagcagcaccaccacaactcaaattaccaagactgtaaaaggtgggatttcagagacacgtattgaaaagagaattgtgatcacaggagatgctgatattgaccatgatcaggtccttgtacaagccatcaaggaggcaaaggagcagcacccagacatgtcagtgaccaaggtggtcgtccaccaggagaccgagattgctgatgagtgagctcaggaactaacctaccccaactctgcccttctcccatccaagagaaaccagcaaaatgataaagaagctaacctgccatagtcagacttcagactttcaagattattctaaatcaccagaaaattaatttcagtttctattgggagtttataccaagagattcttctagatctcattgatccttttgaagagctttttctatattaggatatcagaattgttcaacttttcactctatagactgttttaagagttttggggtttttttaattgggtggtttgtaaccccttcagcctagcctctctgcccatttatttccaaccccaacagacactgacagggtccacggaattcttcgggaaatcctccaaggactcttgtcagctgtgttggaggccaaagccagcttagtgggacttccgcgtctctccctagtcttatcccctttggatgatggcagaaacttcatgaaccagccctttctcagagccagtgatgtgagtgtatcagaatgccagggagggcaccagccctgatccacagacctcggaaagatgcccctgttcctttgttgcgggtggttttggtaaggcagagccctctgctgagaatgtagtattgtttttcccctctccctcctgctttctttttggagcttctttgggtcaaagacatggaagttgcttcagatatctgatactgtgaatgtttgaacatatccgtggccttcacctctccagctacccttttacctcatcagaagcagtggctcagctaagtgctccccctagctcccatctcaggagaccaaatctcacagaaaaataggcactttgggccaaaagctctaatggaacatttttagtggtgatttggggaaggaaagttaatgaggtttttaaaataaggttttctagttttgagagtgtgcacttcacacaggggaatggggttacttctgtctgatcctgggcctttctttcatcccaaatgacaaggaatgtggctcagagaagggtttttcttttttgacctttcttctctcaacaggaacctgcctgaggacacccttctagagcaaggaattgacttttaggagccgttctccccacaagacaccacatgacaaggggtataagccccagccctgctcattcccactcaccagctgaggtctgtcaggttttgaaggcttgattttgtggtgggtttggggcttagttttcctttttttcattttgatttttgaaagtgaagatgatgccctaattcctggtaaggatttggggcatagttttttgtttttttgagacggagtttcgctcttgttgcccaagctggagtgcagtggcgcgatctcggctcactgcaacctccgcctcctgggttcaagcagttctcttgcctcagcctcccaagtagctgggatgacaggcgcacaccaccacgcccagcaaattttttgtatttttagtagaaacgggatttcaccttgttaggctggtctcgaactcctgacctcaggtgatccacccaccttggcctcccaaagtgctgggattacaggtgtgagccaccacgcccggccgatttggggcatttttatttaacagaacttctctaaccttccaactgcttcccacaaacacattggcctcaaggctccttagaatcccagttccagcttcctaaaatagacagtgggtatcgggcagcagtcactggggctcaagggcagtgagcaagagaaatgtctaaagctgcttctcccaacaccgtccaaagtctccactgcctgagttttgtttcggctggtttgaactcatttcgggtgtgtgcatttttcttttggtacccatgtgagacatgaacaacaggagggagggaaagagcccaggtgggacgtgggacaggcttaggggaaagagcttgtcctatctcaggaacaaaattataggctgtgggcagagggtctgaaaggtgggctttggggtagtgcccaagcctggtcgtgttgccaggagtggtgacaagaaatgcagcttacatcaaacgaacatgtagtgcatgcccactgcctgatggccagatggcctgtaggaagagctaccagggcttccagacctgtggaacgaagaggatggggaaaaggcagagggcactgagtgtccctttaaaaactaacacactgaatattccgtgtgatctagaacagtgtggcagctttcacagcacaggaccgttcatcgggggcctaaacgtttccctcagctctgtcaccaactcacttctctcggcttcgttgtctgtaaattggatgaaaagagctctaatgcctttcaggctcttagaagccatagatttggacaagcccagcaagatgggtgtccttccaggcctcttcccctttcctccatctctggcaacagttcttggggtttggcaattgtttggattttttttctttctgcagttgtgtgtatgtgtgtttgtgtgaagaaaaacagactctgtccaggtagaaatggtgaggagggggaagagaattacatttccagggtcagaaacttggcaacagttttcctagagtgactcagacacaccacagtaacaactctcgctgcaattttattttaatttgagaaataaagatttcctccaagccacatgaggactctggcacccacccacaaagcaagacctgtatttataagccgagggctcagggagcctaactgcgggacccgtcagggccccgtgacccatccccgtccccacccccccctccaccgctgggcccatcagtgtgtgttggggggatgcttggcagctgggggtgaggagacaacaaacctcgggaactggagccagagctgcggcctgactgacgccttttgatgctcacgggaaatttctgcccaggatctcagccccaggctggttgtttctacaaatctctctcaaatgtattattttggtgacaaaaatgaaggagctttgtaaatttttttaaaattatgaatcatatcaagtagttgtttacatttcttgaaaaaataggaactcgggcagcagaatcagattggcagaatctttagactacacaggcaataatcaagtctgctgttttggcctttcgtagtagaagtggttgtagtgtttagatatctgtttggtcttgcttcttgtattgcatttttttcaataaacaacaacaaaaagaactctctctgtgagg

SEQ ID NO: 369928 - DNA, 6031 bp, Homo sapiens
  misc_feature (697)..(697): n is a, c, g, or t
ggcgggagggcgcgcgccagggtcgctcgctcgctccctccctccgctggtgcgtttagtcagtcagccagcagcagccggcgggcccgcgagccgcagagggcccgagcctcggacgccggcgcctcctcctgccattgttcgtcgggctgcagcagtggcgggcgcaggagcccggccccggagccaccgtcatgacaacagagaagagtttagtgactgaggccgaaaattcacagcaccaacagaaggaagagggtgaggaagccataaactcaggccaacaagaacctcagcaggaggaatcttgtcaaacagcagctgaaggagataattggtgtgaacagaagctgaaagcttctaatggagacactcctacacatgaagacttgaccaagaacaaggagcggacatcagaaagcagaggactttcacgactattctcctcgtttctcaaaaggcccaaatctcaggtgtccgaggaagaaggcaaagaagtagagtcagataaagaaaaaggtgaaggaggtcagaaagagatagaatttggaaccagtcttgatgaagagatcattttaaaggccccaattgcagctcctgaaccggaactcaaaacagacccatctttggatcttcattcattaagcagtgcagaaacacagcctgctcaggaagaactcagagaagatccagattntgaaattaaggaaggagaaggacttgaagagtgctccaaaatagaagtaaaagaagaaagccctcaatcaaaagcagaaacagaattaaaagcttcccaaaaaccaatcagaaaacacaggaacatgcactgcaaggtttctttgttggatgacacagtttatgaatgtgttgtggagaaacatgctaagggacaagatttgcttaaacgagtatgtgagcatctcaatcttttggaagaagactattttggtctagccatttgggataacgcaacctctaagacatggctggattccgccaaagaaataaaaaagcaggttcgtggtgtcccttggaattttacatttaatgtaaagttttatccacctgacccagcacagttaacagaagacataacaagatattatttatgtcttcagcttcggcaggacatagttgcaggacgtctgccctgttcctttgcaaccttagcattattaggttcttacaccatccagtctgaactgggagactacgacccagaactccatggcgtggattatgttagtgattttaaactggccccgaatcagaccaaggaacttgaagagaaggtcatggaactgcataagtcatacaggtccatgactccagctcaggctgacttggagtttcttgagaatgccaaaaagttgtctatgtatggagttgatcttcataaagcaaaggacttggaaggagtagatatcatcctaggtgtctgctctagtggccttctggtttacaaagataagctgagaattaaccgcttcccttggcccaaagtgctgaagatttcttataaacgtagtagctttttcatcaagattcggcctggagagcaagagcagtatgaaagtaccatcggattcaaacttcccagttaccgagcagctaagaaattatggaaagtctgtgtagaacatcacacgtttttcagattgacatctacagacaccattcccaaaagcaaatttcttgcgctaggatccaaatttcgatacagtggccggactcaagctcagaccaggcaagctagtgctctaattgacaggcctgccccacacttcgagcgtacagcaagtaaacgggcgtcccggagcctcgatggagcagcagctgtcgattcggcagaccgaagtcctcggcccacttctgcacctgccattactcagggtcaggttgcagaaggtggcgtcctagatgcctctgctaaaaaaacagtggtccctaaagcacagaaggaaacagtgaaggctgaagtgaaaaaggaagacgagccacctgagcaagctgagccagagcccacagaagcatggaaggtggaaaaaacccacatcgaggtgacagtacccacctcaaatggtgaccaaacacagaagcttgcagaaaaaactgaagatctgataagaatgaggaagaaaaagagagaaagactagatggtgaaaacatttatatcagacatagcaatttaatgttggaggatttagacaagagtcaagaggagatcaaaaaacatcatgccagcatcagtgagctgaaaaagaacttcatggagtctgtaccagaaccacggcctagtgaatgggataaacgcttatccactcactcacccttccgaactcttaacatcaatgggcaaatccccacaggagaaggacctcccctggtgaagacacaaactgtcaccatctcagataatgccaatgctgtgaaaagtgaaatcccaaccaaagacgtccctattgtccacactgagaccaagaccatcacttatgaggctgcccagactgacgacaacagtggagacttggacccaggagtcttgctgacagctcaaactatcacatctgagaccccaagcagcaccaccacaactcaaattaccaagactgtaaaaggtgggatttcagagacacgtattgaaaagagaattgtgatcacaggagatgctgatattgaccatgatcaggtccttgtacaagccatcaaggaggcaaaggagcagcacccagacatgtcagtgaccaaggtggtcgtccaccaggagaccgagattgctgatgagtgagctcaggaactaacctaccccaactctgcccttctcccatccaagagaaaccagcaaaatgataaagaagctaacctgccatagtcagacttcagactttcaagattattctaaatcaccagaaaattaatttcagtttctattgggagtttataccaagagattcttctagatctcattgatccttttgaagagctttttctatattaggatatcagaattgttcaacttttcactctatagactgttttaagagttttggggtttttttaattgggtggtttgtaaccccttcagcctagcctctctgcccatttatttccaaccccaacagacactgacagggtccacggaattcttcgggaaatcctccaaggactcttgtcagctgtgttggaggccaaagccagcttagtgggacttccgcgtctctccctagtcttatcccctttggatgatggcagaaacttcatgaaccagccctttctcagagccagtgatgtgagtgtatcagaatgccagggagggcaccagccctgatccacagacctcggaaagatgcccctgttcctttgttgcgggtggttttggtaaggcagagccctctgctgagaatgtagtattgtttttcccctctccctcctgctttctttttggagcttctttgggtcaaagacatggaagttgcttcagatatctgatactgtgaatgtttgaacatatccgtggccttcacctctccagctacccttttacctcatcagaagcagtggctcagctaagtgctccccctagctcccatctcaggagaccaaatctcacagaaaaataggcactttgggccaaaagctctaatggaacatttttagtggtgatttggggaaggaaagttaatgaggtttttaaaataaggttttctagttttgagagtgtgcacttcacacaggggaatggggttacttctgtctgatcctgggcctttctttcatcccaaatgacaaggaatgtggctcagagaagggtttttcttttttgacctttcttctctcaacaggaacctgcctgaggacacccttctagagcaaggaattgacttttaggagccgttctccccacaagacaccacatgacaaggggtataagccccagccctgctcattcccactcaccagctgaggtctgtcaggttttgaaggcttgattttgtggtgggtttggggcttagttttcctttttttcattttgatttttgaaagtgaagatgatgccctaattcctggtaaggatttggggcatagttttttgtttttttgagacggagtttcgctcttgttgcccaagctggagtgcagtggcgcgatctcggctcactgcaacctccgcctcctgggttcaagcagttctcttgcctcagcctcccaagtagctgggatgacaggcgcacaccaccacgcccagcaaattttttgtatttttagtagaaacgggatttcaccttgttaggctggtctcgaactcctgacctcaggtgatccacccaccttggcctcccaaagtgctgggattacaggtgtgagccaccacgcccggccgatttggggcatttttatttaacagaacttctctaaccttccaactgcttcccacaaacacattggcctcaaggctccttagaatcccagttccagcttcctaaaatagacagtgggtatcgggcagcagtcactggggctcaagggcagtgagcaagagaaatgtctaaagctgcttctcccaacaccgtccaaagtctccactgcctgagttttgtttcggctggtttgaactcatttcgggtgtgtgcatttttcttttggtacccatgtgagacatgaacaacaggagggagggaaagagcccaggtgggacgtgggacaggcttaggggaaagagcttgtcctatctcaggaacaaaattataggctgtgggcagagggtctgaaaggtgggctttggggtagtgcccaagcctggtcgtgttgccaggagtggtgacaagaaatgcagcttacatcaaacgaacatgtagtgcatgcccactgcctgatggccagatggcctgtaggaagagctaccagggcttccagacctgtggaacgaagaggatggggaaaaggcagagggcactgagtgtccctttaaaaactaacacactgaatattccgtgtgatctagaacagtgtggcagctttcacagcacaggaccgttcatcgggggcctaaacgtttccctcagctctgtcaccaactcacttctctcggcttcgttgtctgtaaattggatgaaaagagctctaatgcctttcaggctcttagaagccatagatttggacaagcccagcaagatgggtgtccttccaggcctcttcccctttcctccatctctggcaacagttcttggggtttggcaattgtttggattttttttctttctgcagttgtgtgtatgtgtgtttgtgtgaagaaaaacagactctgtccaggtagaaatggtgaggagggggaagagaattacatttccagggtcagaaacttggcaacagttttcctagagtgactcagacacaccacagtaacaactctcgctgcaattttattttaatttgagaaataaagatttcctccaagccacatgaggactctggcacccacccacaaagcaagacctgtatttataagccgagggctcagggagcctaactgcgggacccgtcagggccccgtgacccatccccgtccccacccccccctccaccgctgggcccatcagtgtgtgttggggggatgcttggcagctgggggtgaggagacaacaaacctcgggaactggagccagagctgcggcctgactgacgccttttgatgctcacgggaaatttctgcccaggatctcagccccaggctggttgtttctacaaatctctctcaaatgtattattttggtgacaaaaatgaaggagctttgtaaatttttttaaaattatgaatcatatcaagtagttgtttacatttcttgaaaaaataggaactcgggcagcagaatcagattggcagaatctttagactacacaggcaataatcaagtctgctgttttggcctttcgtagtagaagtggttgtagtgtttagatatctgtttggtcttgcttcttgtattgcatttttttcaataaacaacaacaaaaagaactctctctgtgagg

SEQ ID NO: 369929 - DNA, 5821 bp, Homo sapiens
  misc_feature (697)..(697): n is a, c, g, or t
ggcgggagggcgcgcgccagggtcgctcgctcgctccctccctccgctggtgcgtttagtcagtcagccagcagcagccggcgggcccgcgagccgcagagggcccgagcctcggacgccggcgcctcctcctgccattgttcgtcgggctgcagcagtggcgggcgcaggagcccggccccggagccaccgtcatgacaacagagaagagtttagtgactgaggccgaaaattcacagcaccaacagaaggaagagggtgaggaagccataaactcaggccaacaagaacctcagcaggaggaatcttgtcaaacagcagctgaaggagataattggtgtgaacagaagctgaaagcttctaatggagacactcctacacatgaagacttgaccaagaacaaggagcggacatcagaaagcagaggactttcacgactattctcctcgtttctcaaaaggcccaaatctcaggtgtccgaggaagaaggcaaagaagtagagtcagataaagaaaaaggtgaaggaggtcagaaagagatagaatttggaaccagtcttgatgaagagatcattttaaaggccccaattgcagctcctgaaccggaactcaaaacagacccatctttggatcttcattcattaagcagtgcagaaacacagcctgctcaggaagaactcagagaagatccagattntgaaattaaggaaggagaaggacttgaagagtgctccaaaatagaagtaaaagaagaaagccctcaatcaaaagcagaaacagaattaaaagcttcccaaaaaccaatcagaaaacacaggaacatgcactgcaaggtttctttgttggatgacacagtttatgaatgtgttgtggagacatggctggattccgccaaagaaataaaaaagcaggttcgtggtgtcccttggaattttacatttaatgtaaagttttatccacctgacccagcacagttaacagaagacataacaagatattatttatgtcttcagcttcggcaggacatagttgcaggacgtctgccctgttcctttgcaaccttagcattattaggttcttacaccatccagtctgaactgggagactacgacccagaactccatggcgtggattatgttagtgattttaaactggccccgaatcagaccaaggaacttgaagagaaggtcatggaactgcataagtcatacaggtccatgactccagctcaggctgacttggagtttcttgagaatgccaaaaagttgtctatgtatggagttgatcttcataaagcaaaggacttggaaggagtagatatcatcctaggtgtctgctctagtggccttctggtttacaaagataagctgagaattaaccgcttcccttggcccaaagtgctgaagatttcttataaacgtagtagctttttcatcaagattcggcctggagagcaagagcagtatgaaagtaccatcggattcaaacttcccagttaccgagcagctaagaaattatggaaagtctgtgtagaacatcacacgtttttcagattgacatctacagacaccattcccaaaagcaaatttcttgcgctaggatccaaatttcgatacagtggccggactcaagctcagaccaggcaagctagtgctctaattgacaggcctgccccacacttcgagcgtacagcaagtaaacgggcgtcccggagcctcgatggagcagcagctgtcgattcggcagaccgaagtcctcggcccacttctgcacctgccattactcagggtcaggttgcagaaggtggcgtcctagatgcctctgctaaaaaaacagtggtccctaaagcacagaaggaaacagtgaaggctgaagtgaaaaaggaagacgagccacctgagcaagctgagccagagcccacagaagcatggaaggtggaaaaaacccacatcgaggtgacagtacccacctcaaatggtgaccaaacacaggatttagacaagagtcaagaggagatcaaaaaacatcatgccagcatcagtgagctgaaaaagaacttcatggagtctgtaccagaaccacggcctagtgaatgggataaacgcttatccactcactcacccttccgaactcttaacatcaatgggcaaatccccacaggagaaggacctcccctggtgaagacacaaactgtcaccatctcagataatgccaatgctgtgaaaagtgaaatcccaaccaaagacgtccctattgtccacactgagaccaagaccatcacttatgaggctgcccagactgacgacaacagtggagacttggacccaggagtcttgctgacagctcaaactatcacatctgagaccccaagcagcaccaccacaactcaaattaccaagactgtaaaaggtgggatttcagagacacgtattgaaaagagaattgtgatcacaggagatgctgatattgaccatgatcaggtccttgtacaagccatcaaggaggcaaaggagcagcacccagacatgtcagtgaccaaggtggtcgtccaccaggagaccgagattgctgatgagtgagctcaggaactaacctaccccaactctgcccttctcccatccaagagaaaccagcaaaatgataaagaagctaacctgccatagtcagacttcagactttcaagattattctaaatcaccagaaaattaatttcagtttctattgggagtttataccaagagattcttctagatctcattgatccttttgaagagctttttctatattaggatatcagaattgttcaacttttcactctatagactgttttaagagttttggggtttttttaattgggtggtttgtaaccccttcagcctagcctctctgcccatttatttccaaccccaacagacactgacagggtccacggaattcttcgggaaatcctccaaggactcttgtcagctgtgttggaggccaaagccagcttagtgggacttccgcgtctctccctagtcttatcccctttggatgatggcagaaacttcatgaaccagccctttctcagagccagtgatgtgagtgtatcagaatgccagggagggcaccagccctgatccacagacctcggaaagatgcccctgttcctttgttgcgggtggttttggtaaggcagagccctctgctgagaatgtagtattgtttttcccctctccctcctgctttctttttggagcttctttgggtcaaagacatggaagttgcttcagatatctgatactgtgaatgtttgaacatatccgtggccttcacctctccagctacccttttacctcatcagaagcagtggctcagctaagtgctccccctagctcccatctcaggagaccaaatctcacagaaaaataggcactttgggccaaaagctctaatggaacatttttagtggtgatttggggaaggaaagttaatgaggtttttaaaataaggttttctagttttgagagtgtgcacttcacacaggggaatggggttacttctgtctgatcctgggcctttctttcatcccaaatgacaaggaatgtggctcagagaagggtttttcttttttgacctttcttctctcaacaggaacctgcctgaggacacccttctagagcaaggaattgacttttaggagccgttctccccacaagacaccacatgacaaggggtataagccccagccctgctcattcccactcaccagctgaggtctgtcaggttttgaaggcttgattttgtggtgggtttggggcttagttttcctttttttcattttgatttttgaaagtgaagatgatgccctaattcctggtaaggatttggggcatagttttttgtttttttgagacggagtttcgctcttgttgcccaagctggagtgcagtggcgcgatctcggctcactgcaacctccgcctcctgggttcaagcagttctcttgcctcagcctcccaagtagctgggatgacaggcgcacaccaccacgcccagcaaattttttgtatttttagtagaaacgggatttcaccttgttaggctggtctcgaactcctgacctcaggtgatccacccaccttggcctcccaaagtgctgggattacaggtgtgagccaccacgcccggccgatttggggcatttttatttaacagaacttctctaaccttccaactgcttcccacaaacacattggcctcaaggctccttagaatcccagttccagcttcctaaaatagacagtgggtatcgggcagcagtcactggggctcaagggcagtgagcaagagaaatgtctaaagctgcttctcccaacaccgtccaaagtctccactgcctgagttttgtttcggctggtttgaactcatttcgggtgtgtgcatttttcttttggtacccatgtgagacatgaacaacaggagggagggaaagagcccaggtgggacgtgggacaggcttaggggaaagagcttgtcctatctcaggaacaaaattataggctgtgggcagagggtctgaaaggtgggctttggggtagtgcccaagcctggtcgtgttgccaggagtggtgacaagaaatgcagcttacatcaaacgaacatgtagtgcatgcccactgcctgatggccagatggcctgtaggaagagctaccagggcttccagacctgtggaacgaagaggatggggaaaaggcagagggcactgagtgtccctttaaaaactaacacactgaatattccgtgtgatctagaacagtgtggcagctttcacagcacaggaccgttcatcgggggcctaaacgtttccctcagctctgtcaccaactcacttctctcggcttcgttgtctgtaaattggatgaaaagagctctaatgcctttcaggctcttagaagccatagatttggacaagcccagcaagatgggtgtccttccaggcctcttcccctttcctccatctctggcaacagttcttggggtttggcaattgtttggattttttttctttctgcagttgtgtgtatgtgtgtttgtgtgaagaaaaacagactctgtccaggtagaaatggtgaggagggggaagagaattacatttccagggtcagaaacttggcaacagttttcctagagtgactcagacacaccacagtaacaactctcgctgcaattttattttaatttgagaaataaagatttcctccaagccacatgaggactctggcacccacccacaaagcaagacctgtatttataagccgagggctcagggagcctaactgcgggacccgtcagggccccgtgacccatccccgtccccacccccccctccaccgctgggcccatcagtgtgtgttggggggatgcttggcagctgggggtgaggagacaacaaacctcgggaactggagccagagctgcggcctgactgacgccttttgatgctcacgggaaatttctgcccaggatctcagccccaggctggttgtttctacaaatctctctcaaatgtattattttggtgacaaaaatgaaggagctttgtaaatttttttaaaattatgaatcatatcaagtagttgtttacatttcttgaaaaaataggaactcgggcagcagaatcagattggcagaatctttagactacacaggcaataatcaagtctgctgttttggcctttcgtagtagaagtggttgtagtgtttagatatctgtttggtcttgcttcttgtattgcatttttttcaataaacaacaacaaaaagaactctctctgtgagg

SEQ ID NO: 369930 - DNA, 3997 bp, Homo sapiens
tgcctgccgggcggattttagagaatcccctgtttgcggccggtggggtttgtggggttcactgccggagtccatcatgtagccagtatacatagagtcatgccaaaaagagagaaagactagatggtgaaaacatttatatcagacatagcaatttaatgttggaggatttagacaagagtcaagaggagatcaaaaaacatcatgccagcatcagtgagctgaaaaagaacttcatggagtctgtaccagaaccacggcctagtgaatgggataaacgcttatccactcactcacccttccgaactcttaacatcaatgggcaaatccccacaggagaaggacctcccctggtgaagacacaaactgtcaccatctcagataatgccaatgctgtgaaaagtgaaatcccaaccaaagacgtccctattgtccacactgagaccaagaccatcacttatgaggctgcccagactgacgacaacagtggagacttggacccaggagtcttgctgacagctcaaactatcacatctgagaccccaagcagcaccaccacaactcaaattaccaagactgtaaaaggtgggatttcagagacacgtattgaaaagagaattgtgatcacaggagatgctgatattgaccatgatcaggtccttgtacaagccatcaaggaggcaaaggagcagcacccagacatgtcagtgaccaaggtggtcgtccaccaggagaccgagattgctgatgagtgagctcaggaactaacctaccccaactctgcccttctcccatccaagagaaaccagcaaaatgataaagaagctaacctgccatagtcagacttcagactttcaagattattctaaatcaccagaaaattaatttcagtttctattgggagtttataccaagagattcttctagatctcattgatccttttgaagagctttttctatattaggatatcagaattgttcaacttttcactctatagactgttttaagagttttggggtttttttaattgggtggtttgtaaccccttcagcctagcctctctgcccatttatttccaaccccaacagacactgacagggtccacggaattcttcgggaaatcctccaaggactcttgtcagctgtgttggaggccaaagccagcttagtgggacttccgcgtctctccctagtcttatcccctttggatgatggcagaaacttcatgaaccagccctttctcagagccagtgatgtgagtgtatcagaatgccagggagggcaccagccctgatccacagacctcggaaagatgcccctgttcctttgttgcgggtggttttggtaaggcagagccctctgctgagaatgtagtattgtttttcccctctccctcctgctttctttttggagcttctttgggtcaaagacatggaagttgcttcagatatctgatactgtgaatgtttgaacatatccgtggccttcacctctccagctacccttttacctcatcagaagcagtggctcagctaagtgctccccctagctcccatctcaggagaccaaatctcacagaaaaataggcactttgggccaaaagctctaatggaacatttttagtggtgatttggggaaggaaagttaatgaggtttttaaaataaggttttctagttttgagagtgtgcacttcacacaggggaatggggttacttctgtctgatcctgggcctttctttcatcccaaatgacaaggaatgtggctcagagaagggtttttcttttttgacctttcttctctcaacaggaacctgcctgaggacacccttctagagcaaggaattgacttttaggagccgttctccccacaagacaccacatgacaaggggtataagccccagccctgctcattcccactcaccagctgaggtctgtcaggttttgaaggcttgattttgtggtgggtttggggcttagttttcctttttttcattttgatttttgaaagtgaagatgatgccctaattcctggtaaggatttggggcatagttttttgtttttttgagacggagtttcgctcttgttgcccaagctggagtgcagtggcgcgatctcggctcactgcaacctccgcctcctgggttcaagcagttctcttgcctcagcctcccaagtagctgggatgacaggcgcacaccaccacgcccagcaaattttttgtatttttagtagaaacgggatttcaccttgttaggctggtctcgaactcctgacctcaggtgatccacccaccttggcctcccaaagtgctgggattacaggtgtgagccaccacgcccggccgatttggggcatttttatttaacagaacttctctaaccttccaactgcttcccacaaacacattggcctcaaggctccttagaatcccagttccagcttcctaaaatagacagtgggtatcgggcagcagtcactggggctcaagggcagtgagcaagagaaatgtctaaagctgcttctcccaacaccgtccaaagtctccactgcctgagttttgtttcggctggtttgaactcatttcgggtgtgtgcatttttcttttggtacccatgtgagacatgaacaacaggagggagggaaagagcccaggtgggacgtgggacaggcttaggggaaagagcttgtcctatctcaggaacaaaattataggctgtgggcagagggtctgaaaggtgggctttggggtagtgcccaagcctggtcgtgttgccaggagtggtgacaagaaatgcagcttacatcaaacgaacatgtagtgcatgcccactgcctgatggccagatggcctgtaggaagagctaccagggcttccagacctgtggaacgaagaggatggggaaaaggcagagggcactgagtgtccctttaaaaactaacacactgaatattccgtgtgatctagaacagtgtggcagctttcacagcacaggaccgttcatcgggggcctaaacgtttccctcagctctgtcaccaactcacttctctcggcttcgttgtctgtaaattggatgaaaagagctctaatgcctttcaggctcttagaagccatagatttggacaagcccagcaagatgggtgtccttccaggcctcttcccctttcctccatctctggcaacagttcttggggtttggcaattgtttggattttttttctttctgcagttgtgtgtatgtgtgtttgtgtgaagaaaaacagactctgtccaggtagaaatggtgaggagggggaagagaattacatttccagggtcagaaacttggcaacagttttcctagagtgactcagacacaccacagtaacaactctcgctgcaattttattttaatttgagaaataaagatttcctccaagccacatgaggactctggcacccacccacaaagcaagacctgtatttataagccgagggctcagggagcctaactgcgggacccgtcagggccccgtgacccatccccgtccccacccccccctccaccgctgggcccatcagtgtgtgttggggggatgcttggcagctgggggtgaggagacaacaaacctcgggaactggagccagagctgcggcctgactgacgccttttgatgctcacgggaaatttctgcccaggatctcagccccaggctggttgtttctacaaatctctctcaaatgtattattttggtgacaaaaatgaaggagctttgtaaatttttttaaaattatgaatcatatcaagtagttgtttacatttcttgaaaaaataggaactcgggcagcagaatcagattggcagaatctttagactacacaggcaataatcaagtctgctgttttggcctttcgtagtagaagtggttgtagtgtttagatatctgtttggtcttgcttcttgtattgcatttttttcaataaacaacaacaaaaagaactctctctgtgagg

SEQ ID NO: 369931 - DNA, 3790 bp, Homo sapiens
  misc_feature (185)..(185): n is a, c, g, or t
cctcagatcgcatgagacttattcactatcactagaacagcacaggaaagacctgcccccatgattcaattacctcccacctgtccctcctacaacactgggaattcaagatgagatttagggggacacagccaaaccatatcattctgccccagtccctcccaaatctcatgtcctcacatttnaaaaccagtcatgccttcccaaccaaagacgtccctattgtccacactgagaccaagaccatcacttatgaggctgcccagactgacgacaacagtggagacttggacccaggagtcttgctgacagctcaaactatcacatctgagaccccaagcagcaccaccacaactcaaattaccaagactgtaaaaggtgggatttcagagacacgtattgaaaagagaattgtgatcacaggagatgctgatattgaccatgatcaggtccttgtacaagccatcaaggaggcaaaggagcagcacccagacatgtcagtgaccaaggtggtcgtccaccaggagaccgagattgctgatgagtgagctcaggaactaacctaccccaactctgcccttctcccatccaagagaaaccagcaaaatgataaagaagctaacctgccatagtcagacttcagactttcaagattattctaaatcaccagaaaattaatttcagtttctattgggagtttataccaagagattcttctagatctcattgatccttttgaagagctttttctatattaggatatcagaattgttcaacttttcactctatagactgttttaagagttttggggtttttttaattgggtggtttgtaaccccttcagcctagcctctctgcccatttatttccaaccccaacagacactgacagggtccacggaattcttcgggaaatcctccaaggactcttgtcagctgtgttggaggccaaagccagcttagtgggacttccgcgtctctccctagtcttatcccctttggatgatggcagaaacttcatgaaccagccctttctcagagccagtgatgtgagtgtatcagaatgccagggagggcaccagccctgatccacagacctcggaaagatgcccctgttcctttgttgcgggtggttttggtaaggcagagccctctgctgagaatgtagtattgtttttcccctctccctcctgctttctttttggagcttctttgggtcaaagacatggaagttgcttcagatatctgatactgtgaatgtttgaacatatccgtggccttcacctctccagctacccttttacctcatcagaagcagtggctcagctaagtgctccccctagctcccatctcaggagaccaaatctcacagaaaaataggcactttgggccaaaagctctaatggaacatttttagtggtgatttggggaaggaaagttaatgaggtttttaaaataaggttttctagttttgagagtgtgcacttcacacaggggaatggggttacttctgtctgatcctgggcctttctttcatcccaaatgacaaggaatgtggctcagagaagggtttttcttttttgacctttcttctctcaacaggaacctgcctgaggacacccttctagagcaaggaattgacttttaggagccgttctccccacaagacaccacatgacaaggggtataagccccagccctgctcattcccactcaccagctgaggtctgtcaggttttgaaggcttgattttgtggtgggtttggggcttagttttcctttttttcattttgatttttgaaagtgaagatgatgccctaattcctggtaaggatttggggcatagttttttgtttttttgagacggagtttcgctcttgttgcccaagctggagtgcagtggcgcgatctcggctcactgcaacctccgcctcctgggttcaagcagttctcttgcctcagcctcccaagtagctgggatgacaggcgcacaccaccacgcccagcaaattttttgtatttttagtagaaacgggatttcaccttgttaggctggtctcgaactcctgacctcaggtgatccacccaccttggcctcccaaagtgctgggattacaggtgtgagccaccacgcccggccgatttggggcatttttatttaacagaacttctctaaccttccaactgcttcccacaaacacattggcctcaaggctccttagaatcccagttccagcttcctaaaatagacagtgggtatcgggcagcagtcactggggctcaagggcagtgagcaagagaaatgtctaaagctgcttctcccaacaccgtccaaagtctccactgcctgagttttgtttcggctggtttgaactcatttcgggtgtgtgcatttttcttttggtacccatgtgagacatgaacaacaggagggagggaaagagcccaggtgggacgtgggacaggcttaggggaaagagcttgtcctatctcaggaacaaaattataggctgtgggcagagggtctgaaaggtgggctttggggtagtgcccaagcctggtcgtgttgccaggagtggtgacaagaaatgcagcttacatcaaacgaacatgtagtgcatgcccactgcctgatggccagatggcctgtaggaagagctaccagggcttccagacctgtggaacgaagaggatggggaaaaggcagagggcactgagtgtccctttaaaaactaacacactgaatattccgtgtgatctagaacagtgtggcagctttcacagcacaggaccgttcatcgggggcctaaacgtttccctcagctctgtcaccaactcacttctctcggcttcgttgtctgtaaattggatgaaaagagctctaatgcctttcaggctcttagaagccatagatttggacaagcccagcaagatgggtgtccttccaggcctcttcccctttcctccatctctggcaacagttcttggggtttggcaattgtttggattttttttctttctgcagttgtgtgtatgtgtgtttgtgtgaagaaaaacagactctgtccaggtagaaatggtgaggagggggaagagaattacatttccagggtcagaaacttggcaacagttttcctagagtgactcagacacaccacagtaacaactctcgctgcaattttattttaatttgagaaataaagatttcctccaagccacatgaggactctggcacccacccacaaagcaagacctgtatttataagccgagggctcagggagcctaactgcgggacccgtcagggccccgtgacccatccccgtccccacccccccctccaccgctgggcccatcagtgtgtgttggggggatgcttggcagctgggggtgaggagacaacaaacctcgggaactggagccagagctgcggcctgactgacgccttttgatgctcacgggaaatttctgcccaggatctcagccccaggctggttgtttctacaaatctctctcaaatgtattattttggtgacaaaaatgaaggagctttgtaaatttttttaaaattatgaatcatatcaagtagttgtttacatttcttgaaaaaataggaactcgggcagcagaatcagattggcagaatctttagactacacaggcaataatcaagtctgctgttttggcctttcgtagtagaagtggttgtagtgtttagatatctgtttggtcttgcttcttgtattgcatttttttcaataaacaacaacaaaaagaactctctctgtgagg

SEQ ID NO: 369932 - DNA, 2832 bp, Homo sapiens
  misc_feature (697)..(697): n is a, c, g, or t
ggcgggagggcgcgcgccagggtcgctcgctcgctccctccctccgctggtgcgtttagtcagtcagccagcagcagccggcgggcccgcgagccgcagagggcccgagcctcggacgccggcgcctcctcctgccattgttcgtcgggctgcagcagtggcgggcgcaggagcccggccccggagccaccgtcatgacaacagagaagagtttagtgactgaggccgaaaattcacagcaccaacagaaggaagagggtgaggaagccataaactcaggccaacaagaacctcagcaggaggaatcttgtcaaacagcagctgaaggagataattggtgtgaacagaagctgaaagcttctaatggagacactcctacacatgaagacttgaccaagaacaaggagcggacatcagaaagcagaggactttcacgactattctcctcgtttctcaaaaggcccaaatctcaggtgtccgaggaagaaggcaaagaagtagagtcagataaagaaaaaggtgaaggaggtcagaaagagatagaatttggaaccagtcttgatgaagagatcattttaaaggccccaattgcagctcctgaaccggaactcaaaacagacccatctttggatcttcattcattaagcagtgcagaaacacagcctgctcaggaagaactcagagaagatccagattntgaaattaaggaaggagaaggacttgaagagtgctccaaaatagaagtaaaagaagaaagccctcaatcaaaagcagaaacagaattaaaagcttcccaaaaaccaatcagaaaacacaggaacatgcactgcaaggtttctttgttggatgacacagtttatgaatgtgttgtggagaaacatgctaagggacaagatttgcttaaacgagtatgtgagcatctcaatcttttggaagaagactattttggtctagccatttgggataacgcaacctctaagacatggctggattccgccaaagaaataaaaaagcaggttcgtggtgtcccttggaattttacatttaatgtaaagttttatccacctgacccagcacagttaacagaagacataacaagatattatttatgtcttcagcttcggcaggacatagttgcaggacgtctgccctgttcctttgcaaccttagcattattaggttcttacaccatccagtctgaactgggagactacgacccagaactccatggcgtggattatgttagtgattttaaactggccccgaatcagaccaaggaacttgaagagaaggtcatggaactgcataagtcatacaggtccatgactccagctcaggctgacttggagtttcttgagaatgccaaaaagttgtctatgtatggagttgatcttcataaagcaaaggacttggaaggagtagatatcatcctaggtgtctgctctagtggccttctggtttacaaagataagctgagaattaaccgcttcccttggcccaaagtgctgaagatttcttataaacgtagtagctttttcatcaagattcggcctggagagcaagagcagtatgaaagtaccatcggattcaaacttcccagttaccgagcagctaagaaattatggaaagtctgtgtagaacatcacacgtttttcagattgacatctacagacaccattcccaaaagcaaatttcttgcgctaggatccaaatttcgatacagtggccggactcaagctcagaccaggcaagctagtgctctaattgacaggcctgccccacacttcgagcgtacagcaagtaaacgggcgtcccggagcctcgatggagcagcagctgtcgattcggcagaccgaagtcctcggcccacttctgcacctgccattactcagggtcaggttgcagaaggtggcgtcctagatgcctctgctaaaaaaacagtggtccctaaagcacagaaggaaacagtgaaggctgaagtgaaaaaggaagacgagccacctgagcaagctgagccagagcccacagaagcatggaaggtggaaaaaacccacatcgaggtgacagtacccacctcaaatggtgaccaaacacagaagcttgcagaaaaaactgaagatctgataagaatgaggaagaaaaagagagaaagactagatggtgaaaacatttatatcagacatagcaatttaatgttggaggatttagacaagagtcaagaggagatcaaaaaacatcatgccagcatcagtgagctgaaaaagaacttcatggagtctgtaccagaaccacggcctagtgaatgggataaacgcttatccactcactcacccttccgaactcttaacatcaatgggcaaatccccacaggagaaggacctcccctggtgaagacacaaactgtcaccatctcagataatgccaatgctgtgaaaagtgaaatcccaaccaaagacgtccctattgtccacactgagaccaagaccatcacttatgaggctgcccagactgacgacaacagtggagacttggacccaggagtcttgctgacagctcaaactatcacatctgagaccccaagcagcaccaccacaactcaaattaccaagactgtaaaaggtgggatttcagagacacgtattgaaaagagaattgtgatcacaggagatgctgatattgaccatgatcaggtccttgtacaagccatcaaggaggcaaaggagcagcacccagacatgtcagtgaccaaggtggtcgtccaccaggagaccgagattgctgatgagtgagctcaggaactaacctaccccctctaccccctctagagccaag

SEQ ID NO: 369933 - DNA, 2654 bp, Homo sapiens
  misc_feature (697)..(697): n is a, c, g, or t
ggcgggagggcgcgcgccagggtcgctcgctcgctccctccctccgctggtgcgtttagtcagtcagccagcagcagccggcgggcccgcgagccgcagagggcccgagcctcggacgccggcgcctcctcctgccattgttcgtcgggctgcagcagtggcgggcgcaggagcccggccccggagccaccgtcatgacaacagagaagagtttagtgactgaggccgaaaattcacagcaccaacagaaggaagagggtgaggaagccataaactcaggccaacaagaacctcagcaggaggaatcttgtcaaacagcagctgaaggagataattggtgtgaacagaagctgaaagcttctaatggagacactcctacacatgaagacttgaccaagaacaaggagcggacatcagaaagcagaggactttcacgactattctcctcgtttctcaaaaggcccaaatctcaggtgtccgaggaagaaggcaaagaagtagagtcagataaagaaaaaggtgaaggaggtcagaaagagatagaatttggaaccagtcttgatgaagagatcattttaaaggccccaattgcagctcctgaaccggaactcaaaacagacccatctttggatcttcattcattaagcagtgcagaaacacagcctgctcaggaagaactcagagaagatccagattntgaaattaaggaaggagaaggacttgaagagtgctccaaaatagaagtaaaagaagaaagccctcaatcaaaagcagaaacagaattaaaagcttcccaaaaaccaatcagaaaacacaggaacatgcactgcaaggtttctttgttggatgacacagtttatgaatgtgttgtggagacatggctggattccgccaaagaaataaaaaagcaggttcgtggtgtcccttggaattttacatttaatgtaaagttttatccacctgacccagcacagttaacagaagacataacaagatattatttatgtcttcagcttcggcaggacatagttgcaggacgtctgccctgttcctttgcaaccttagcattattaggttcttacaccatccagtctgaactgggagactacgacccagaactccatggcgtggattatgttagtgattttaaactggccccgaatcagaccaaggaacttgaagagaaggtcatggaactgcataagtcatacaggtccatgactccagctcaggctgacttggagtttcttgagaatgccaaaaagttgtctatgtatggagttgatcttcataaagcaaaggacttggaaggagtagatatcatcctaggtgtctgctctagtggccttctggtttacaaagataagctgagaattaaccgcttcccttggcccaaagtgctgaagatttcttataaacgtagtagctttttcatcaagattcggcctggagagcaagagcagtatgaaagtaccatcggattcaaacttcccagttaccgagcagctaagaaattatggaaagtctgtgtagaacatcacacgtttttcagattgacatctacagacaccattcccaaaagcaaatttcttgcgctaggatccaaatttcgatacagtggccggactcaagctcagaccaggcaagctagtgctctaattgacaggcctgccccacacttcgagcgtacagcaagtaaacgggcgtcccggagcctcgatggagcagcagctgtcgattcggcagaccgaagtcctcggcccacttctgcacctgccattactcagggtcaggttgcagaaggtggcgtcctagatgcctctgctaaaaaaacagtggtccctaaagcacagaaggaaacagtgaaggctgaagtgaaaaaggaagacgagccacctgagcaagctgagccagagcccacagaagcatggaaggatttagacaagagtcaagaggagatcaaaaaacatcatgccagcatcagtgagctgaaaaagaacttcatggagtctgtaccagaaccacggcctagtgaatgggataaacgcttatccactcactcacccttccgaactcttaacatcaatgggcaaatccccacaggagaaggacctcccctggtgaagacacaaactgtcaccatctcagataatgccaatgctgtgaaaagtgaaatcccaaccaaagacgtccctattgtccacactgagaccaagaccatcacttatgaggctgcccagactgacgacaacagtggagacttggacccaggagtcttgctgacagctcaaactatcacatctgagaccccaagcagcaccaccacaactcaaattaccaaggtaacagaccagctagaacctctttatggaacccaggggcaggctaagcttgctgccacctctctgcaagaaggaccctagtccataagcaaatattttcagctccatccctagtaagccacattattcaaagagtcctggatggaaaggccctgctgccttccccagcaataaatctagggagataccctgagagtatccctgcctacttagtagtctcctaaaggtaggtgtggttgttctctttacacatctgtctctctggtcagtgagtcccctgtctggctgtggaagtaagtttaaaaagtcagc

SEQ ID NO: 369934 - DNA, 399 bp, Homo sapiens
ttgtgacatagtgttgttaaactaaacacgagttgtgagtttatttgtcccaaaaaatgggaaaacattagtactgtaactcagactattttctgagaatgtcatttattttcagcctcaccattacaattaagaattatttttagagtcttcttatttctgaagcatgtgaatattatctcgatcgttaaaagtgtaagtccttctagaactctgacagtgttggggggaaaaaagtaaaagtcctacatgtttctattataggtctgagatttggactccatagttttattagagtcttattagaatattacatgtatttctagaactattacttgtatattcaaagtgctgagggtaaaatttaggataaaattataattgcacacttgctgttag

SEQ ID NO: 369935 - DNA, 5827 bp, Homo sapiens
  misc_feature (694)..(694): n is a, c, g, or t
cagtgcaggtggaggccccggcggggcaaagtggcaggaacctcttaaagggcgagacgggcggcgaccgagaacgcggtcggcccggtccccgccgcacccagcccagtcatgacaacagagaagagtttagtgactgaggccgaaaattcacagcaccaacagaaggaagagggtgaggaagccataaactcaggccaacaagaacctcagcaggaggaatcttgtcaaacagcagctgaaggagataattggtgtgaacagaagctgaaagcttctaatggagacactcctacacatgaagacttgaccaagaacaaggagcggacatcagaaagcagaggactttcacgactattctcctcgtttctcaaaaggcccaaatctcaggtgtccgaggaagaaggcaaagaagtagagtcagataaagaaaaaggtgaaggaggtcagaaagagatagaatttggaaccagtcttgatgaagagatcattttaaaggccccaattgcagctcctgaaccggaactcaaaacagacccatctttggatcttcattcattaagcagtgcagaaacacagcctcaccattacaattaagaattatttttagagtcttcttatttctgaagcatgtgaatattatctcgatcgttaaaagtcctgctcaggaagaactcagagaagatccagattntgaaattaaggaaggagaaggacttgaagagtgctccaaaatagaagtaaaagaagaaagccctcaatcaaaagcagaaacagaattaaaagcttcccaaaaaccaatcagaaaacacaggaacatgcactgcaaggtttctttgttggatgacacagtttatgaatgtgttgtggagaaacatgctaagggacaagatttgcttaaacgagtatgtgagcatctcaatcttttggaagaagactattttggtctagccatttgggataacgcaacctctaagacatggctggattccgccaaagaaataaaaaagcaggttcgtggtgtcccttggaattttacatttaatgtaaagttttatccacctgacccagcacagttaacagaagacataacaagatattatttatgtcttcagcttcggcaggacatagttgcaggacgtctgccctgttcctttgcaaccttagcattattaggttcttacaccatccagtctgaactgggagactacgacccagaactccatggcgtggattatgttagtgattttaaactggccccgaatcagaccaaggaacttgaagagaaggtcatggaactgcataagtcatacaggtccatgactccagctcaggctgacttggagtttcttgagaatgccaaaaagttgtctatgtatggagttgatcttcataaagcaaaggacttggaaggagtagatatcatcctaggtgtctgctctagtggccttctggtttacaaagataagctgagaattaaccgcttcccttggcccaaagtgctgaagatttcttataaacgtagtagctttttcatcaagattcggcctggagagcaagagcagtatgaaagtaccatcggattcaaacttcccagttaccgagcagctaagaaattatggaaagtctgtgtagaacatcacacgtttttcagattgacatctacagacaccattcccaaaagcaaatttcttgcgctaggatccaaatttcgatacagtggccggactcaagctcagaccaggcaagctagtgctctaattgacaggcctgccccacacttcgagcgtacagcaagtaaacgggcgtcccggagcctcgatggagcagcagctgtcgattcggcagaccgaagtcctcggcccacttctgcacctgccattactcagggtcaggttgcagaaggtggcgtcctagatgcctctgctaaaaaaacagtggtccctaaagcacagaaggaaacagtgaaggctgaagtgaaaaaggaagacgagccacctgagcaagctgagccagagcccacagaagcatggaagaaaaagagagaaagactagatggtgaaaacatttatatcagacatagcaatttaatgttggaggatttagacaagagtcaagaggagatcaaaaaacatcatgccagcatcagtgagctgaaaaagaacttcatggagtctgtaccagaaccacggcctagtgaatgggataaacgcttatccactcactcacccttccgaactcttaacatcaatgggcaaatccccacaggagaaggacctcccctggtgaagacacaaactgtcaccatctcagataatgccaatgctgtgaaaagtgaaatcccaaccaaagacgtccctattgtccacactgagaccaagaccatcacttatgaggctgcccagactgtaaaaggtgggatttcagagacacgtattgaaaagagaattgtgatcacaggagatgctgatattgaccatgatcaggtccttgtacaagccatcaaggaggcaaaggagcagcacccagacatgtcagtgaccaaggtggtcgtccaccaggagaccgagattgctgatgagtgagctcaggaactaacctaccccaactctgcccttctcccatccaagagaaaccagcaaaatgataaagaagctaacctgccatagtcagacttcagactttcaagattattctaaatcaccagaaaattaatttcagtttctattgggagtttataccaagagattcttctagatctcattgatccttttgaagagctttttctatattaggatatcagaattgttcaacttttcactctatagactgttttaagagttttggggtttttttaattgggtggtttgtaaccccttcagcctagcctctctgcccatttatttccaaccccaacagacactgacagggtccacggaattcttcgggaaatcctccaaggactcttgtcagctgtgttggaggccaaagccagcttagtgggacttccgcgtctctccctagtcttatcccctttggatgatggcagaaacttcatgaaccagccctttctcagagccagtgatgtgagtgtatcagaatgccagggagggcaccagccctgatccacagacctcggaaagatgcccctgttcctttgttgcgggtggttttggtaaggcagagccctctgctgagaatgtagtattgtttttcccctctccctcctgctttctttttggagcttctttgggtcaaagacatggaagttgcttcagatatctgatactgtgaatgtttgaacatatccgtggccttcacctctccagctacccttttacctcatcagaagcagtggctcagctaagtgctccccctagctcccatctcaggagaccaaatctcacagaaaaataggcactttgggccaaaagctctaatggaacatttttagtggtgatttggggaaggaaagttaatgaggtttttaaaataaggttttctagttttgagagtgtgcacttcacacaggggaatggggttacttctgtctgatcctgggcctttctttcatcccaaatgacaaggaatgtggctcagagaagggtttttcttttttgacctttcttctctcaacaggaacctgcctgaggacacccttctagagcaaggaattgacttttaggagccgttctccccacaagacaccacatgacaaggggtataagccccagccctgctcattcccactcaccagctgaggtctgtcaggttttgaaggcttgattttgtggtgggtttggggcttagttttcctttttttcattttgatttttgaaagtgaagatgatgccctaattcctggtaaggatttggggcatagttttttgtttttttgagacggagtttcgctcttgttgcccaagctggagtgcagtggcgcgatctcggctcactgcaacctccgcctcctgggttcaagcagttctcttgcctcagcctcccaagtagctgggatgacaggcgcacaccaccacgcccagcaaattttttgtatttttagtagaaacgggatttcaccttgttaggctggtctcgaactcctgacctcaggtgatccacccaccttggcctcccaaagtgctgggattacaggtgtgagccaccacgcccggccgatttggggcatttttatttaacagaacttctctaaccttccaactgcttcccacaaacacattggcctcaaggctccttagaatcccagttccagcttcctaaaatagacagtgggtatcgggcagcagtcactggggctcaagggcagtgagcaagagaaatgtctaaagctgcttctcccaacaccgtccaaagtctccactgcctgagttttgtttcggctggtttgaactcatttcgggtgtgtgcatttttcttttggtacccatgtgagacatgaacaacaggagggagggaaagagcccaggtgggacgtgggacaggcttaggggaaagagcttgtcctatctcaggaacaaaattataggctgtgggcagagggtctgaaaggtgggctttggggtagtgcccaagcctggtcgtgttgccaggagtggtgacaagaaatgcagcttacatcaaacgaacatgtagtgcatgcccactgcctgatggccagatggcctgtaggaagagctaccagggcttccagacctgtggaacgaagaggatggggaaaaggcagagggcactgagtgtccctttaaaaactaacacactgaatattccgtgtgatctagaacagtgtggcagctttcacagcacaggaccgttcatcgggggcctaaacgtttccctcagctctgtcaccaactcacttctctcggcttcgttgtctgtaaattggatgaaaagagctctaatgcctttcaggctcttagaagccatagatttggacaagcccagcaagatgggtgtccttccaggcctcttcccctttcctccatctctggcaacagttcttggggtttggcaattgtttggattttttttctttctgcagttgtgtgtatgtgtgtttgtgtgaagaaaaacagactctgtccaggtagaaatggtgaggagggggaagagaattacatttccagggtcagaaacttggcaacagttttcctagagtgactcagacacaccacagtaacaactctcgctgcaattttattttaatttgagaaataaagatttcctccaagccacatgaggactctggcacccacccacaaagcaagacctgtatttataagccgagggctcagggagcctaactgcgggacccgtcagggccccgtgacccatccccgtccccacccccccctccaccgctgggcccatcagtgtgtgttggggggatgcttggcagctgggggtgaggagacaacaaacctcgggaactggagccagagctgcggcctgactgacgccttttgatgctcacgggaaatttctgcccaggatctcagccccaggctggttgtttctacaaatctctctcaaatgtattattttggtgacaaaaatgaaggagctttgtaaatttttttaaaattatgaatcatatcaagtagttgtttacatttcttgaaaaaataggaactcgggcagcagaatcagattggcagaatctttagactacacaggcaataatcaagtctgctgttttggcctttcgtagtagaagtggttgtagtgtttagatatctgtttggtcttgcttcttgtattgcatttttttcaataaacaacaacaaaaagaactctctctgtgagg

SEQ ID NO: 369936 - DNA, 5681 bp, Homo sapiens
  misc_feature (614)..(614): n is a, c, g, or t
cagtgcaggtggaggccccggcggggcaaagtggcaggaacctcttaaagggcgagacgggcggcgaccgagaacgcggtcggcccggtccccgccgcacccagcccagtcatgacaacagagaagagtttagtgactgaggccgaaaattcacagcaccaacagaaggaagagggtgaggaagccataaactcaggccaacaagaacctcagcaggaggaatcttgtcaaacagcagctgaaggagataattggtgtgaacagaagctgaaagcttctaatggagacactcctacacatgaagacttgaccaagaacaaggagcggacatcagaaagcagaggactttcacgactattctcctcgtttctcaaaaggcccaaatctcaggtgtccgaggaagaaggcaaagaagtagagtcagataaagaaaaaggtgaaggaggtcagaaagagatagaatttggaaccagtcttgatgaagagatcattttaaaggccccaattgcagctcctgaaccggaactcaaaacagacccatctttggatcttcattcattaagcagtgcagaaacacagcctgctcaggaagaactcagagaagatccagattntgaaattaaggaaggagaaggacttgaagagtgctccaaaatagaagtaaaagaagaaagccctcaatcaaaagcagaaacagaattaaaagcttcccaaaaaccaatcagaaaacacaggaacatgcactgcaaggtttctttgttggatgacacagtttatgaatgtgttgtggagacatggctggattccgccaaagaaataaaaaagcaggttcgtggtgtcccttggaattttacatttaatgtaaagttttatccacctgacccagcacagttaacagaagacataacaagatattatttatgtcttcagcttcggcaggacatagttgcaggacgtctgccctgttcctttgcaaccttagcattattaggttcttacaccatccagtctgaactgggagactacgacccagaactccatggcgtggattatgttagtgattttaaactggccccgaatcagaccaaggaacttgaagagaaggtcatggaactgcataagtcatacaggtccatgactccagctcaggctgacttggagtttcttgagaatgccaaaaagttgtctatgtatggagttgatcttcataaagcaaaggacttggaaggagtagatatcatcctaggtgtctgctctagtggccttctggtttacaaagataagctgagaattaaccgcttcccttggcccaaagtgctgaagatttcttataaacgtagtagctttttcatcaagattcggcctggagagcaagagcagtatgaaagtaccatcggattcaaacttcccagttaccgagcagctaagaaattatggaaagtctgtgtagaacatcacacgtttttcagattgacatctacagacaccattcccaaaagcaaatttcttgcgctaggatccaaatttcgatacagtggccggactcaagctcagaccaggcaagctagtgctctaattgacaggcctgccccacacttcgagcgtacagcaagtaaacgggcgtcccggagcctcgatggagcagcagctgtcgattcggcagaccgaagtcctcggcccacttctgcacctgccattactcagggtcaggttgcagaaggtggcgtcctagatgcctctgctaaaaaaacagtggtccctaaagcacagaaggaaacagtgaaggctgaagtgaaaaaggaagacgagccacctgagcaagctgagccagagcccacagaagcatggaaggatttagacaagagtcaagaggagatcaaaaaacatcatgccagcatcagtgagctgaaaaagaacttcatggagtctgtaccagaaccacggcctagtgaatgggataaacgcttatccactcactcacccttccgaactcttaacatcaatgggcaaatccccacaggagaaggacctcccctggtgaagacacaaactgtcaccatctcagataatgccaatgctgtgaaaagtgaaatcccaaccaaagacgtccctattgtccacactgagaccaagaccatcacttatgaggctgcccagactgacgacaacagtggagacttggacccaggagtcttgctgacagctcaaactatcacatctgagaccccaagcagcaccaccacaactcaaattaccaagactgtaaaaggtgggatttcagagacacgtattgaaaagagaattgtgatcacaggagatgctgatattgaccatgatcaggtccttgtacaagccatcaaggaggcaaaggagcagcacccagacatgtcagtgaccaaggtggtcgtccaccaggagaccgagattgctgatgagtgagctcaggaactaacctaccccaactctgcccttctcccatccaagagaaaccagcaaaatgataaagaagctaacctgccatagtcagacttcagactttcaagattattctaaatcaccagaaaattaatttcagtttctattgggagtttataccaagagattcttctagatctcattgatccttttgaagagctttttctatattaggatatcagaattgttcaacttttcactctatagactgttttaagagttttggggtttttttaattgggtggtttgtaaccccttcagcctagcctctctgcccatttatttccaaccccaacagacactgacagggtccacggaattcttcgggaaatcctccaaggactcttgtcagctgtgttggaggccaaagccagcttagtgggacttccgcgtctctccctagtcttatcccctttggatgatggcagaaacttcatgaaccagccctttctcagagccagtgatgtgagtgtatcagaatgccagggagggcaccagccctgatccacagacctcggaaagatgcccctgttcctttgttgcgggtggttttggtaaggcagagccctctgctgagaatgtagtattgtttttcccctctccctcctgctttctttttggagcttctttgggtcaaagacatggaagttgcttcagatatctgatactgtgaatgtttgaacatatccgtggccttcacctctccagctacccttttacctcatcagaagcagtggctcagctaagtgctccccctagctcccatctcaggagaccaaatctcacagaaaaataggcactttgggccaaaagctctaatggaacatttttagtggtgatttggggaaggaaagttaatgaggtttttaaaataaggttttctagttttgagagtgtgcacttcacacaggggaatggggttacttctgtctgatcctgggcctttctttcatcccaaatgacaaggaatgtggctcagagaagggtttttcttttttgacctttcttctctcaacaggaacctgcctgaggacacccttctagagcaaggaattgacttttaggagccgttctccccacaagacaccacatgacaaggggtataagccccagccctgctcattcccactcaccagctgaggtctgtcaggttttgaaggcttgattttgtggtgggtttggggcttagttttcctttttttcattttgatttttgaaagtgaagatgatgccctaattcctggtaaggatttggggcatagttttttgtttttttgagacggagtttcgctcttgttgcccaagctggagtgcagtggcgcgatctcggctcactgcaacctccgcctcctgggttcaagcagttctcttgcctcagcctcccaagtagctgggatgacaggcgcacaccaccacgcccagcaaattttttgtatttttagtagaaacgggatttcaccttgttaggctggtctcgaactcctgacctcaggtgatccacccaccttggcctcccaaagtgctgggattacaggtgtgagccaccacgcccggccgatttggggcatttttatttaacagaacttctctaaccttccaactgcttcccacaaacacattggcctcaaggctccttagaatcccagttccagcttcctaaaatagacagtgggtatcgggcagcagtcactggggctcaagggcagtgagcaagagaaatgtctaaagctgcttctcccaacaccgtccaaagtctccactgcctgagttttgtttcggctggtttgaactcatttcgggtgtgtgcatttttcttttggtacccatgtgagacatgaacaacaggagggagggaaagagcccaggtgggacgtgggacaggcttaggggaaagagcttgtcctatctcaggaacaaaattataggctgtgggcagagggtctgaaaggtgggctttggggtagtgcccaagcctggtcgtgttgccaggagtggtgacaagaaatgcagcttacatcaaacgaacatgtagtgcatgcccactgcctgatggccagatggcctgtaggaagagctaccagggcttccagacctgtggaacgaagaggatggggaaaaggcagagggcactgagtgtccctttaaaaactaacacactgaatattccgtgtgatctagaacagtgtggcagctttcacagcacaggaccgttcatcgggggcctaaacgtttccctcagctctgtcaccaactcacttctctcggcttcgttgtctgtaaattggatgaaaagagctctaatgcctttcaggctcttagaagccatagatttggacaagcccagcaagatgggtgtccttccaggcctcttcccctttcctccatctctggcaacagttcttggggtttggcaattgtttggattttttttctttctgcagttgtgtgtatgtgtgtttgtgtgaagaaaaacagactctgtccaggtagaaatggtgaggagggggaagagaattacatttccagggtcagaaacttggcaacagttttcctagagtgactcagacacaccacagtaacaactctcgctgcaattttattttaatttgagaaataaagatttcctccaagccacatgaggactctggcacccacccacaaagcaagacctgtatttataagccgagggctcagggagcctaactgcgggacccgtcagggccccgtgacccatccccgtccccacccccccctccaccgctgggcccatcagtgtgtgttggggggatgcttggcagctgggggtgaggagacaacaaacctcgggaactggagccagagctgcggcctgactgacgccttttgatgctcacgggaaatttctgcccaggatctcagccccaggctggttgtttctacaaatctctctcaaatgtattattttggtgacaaaaatgaaggagctttgtaaatttttttaaaattatgaatcatatcaagtagttgtttacatttcttgaaaaaataggaactcgggcagcagaatcagattggcagaatctttagactacacaggcaataatcaagtctgctgttttggcctttcgtagtagaagtggttgtagtgtttagatatctgtttggtcttgcttcttgtattgcatttttttcaataaacaacaacaaaaagaactctctctgtgagg

SEQ ID NO: 369937 - DNA, 5773 bp, Homo sapiens
  misc_feature (694)..(694): n is a, c, g, or t
cagtgcaggtggaggccccggcggggcaaagtggcaggaacctcttaaagggcgagacgggcggcgaccgagaacgcggtcggcccggtccccgccgcacccagcccagtcatgacaacagagaagagtttagtgactgaggccgaaaattcacagcaccaacagaaggaagagggtgaggaagccataaactcaggccaacaagaacctcagcaggaggaatcttgtcaaacagcagctgaaggagataattggtgtgaacagaagctgaaagcttctaatggagacactcctacacatgaagacttgaccaagaacaaggagcggacatcagaaagcagaggactttcacgactattctcctcgtttctcaaaaggcccaaatctcaggtgtccgaggaagaaggcaaagaagtagagtcagataaagaaaaaggtgaaggaggtcagaaagagatagaatttggaaccagtcttgatgaagagatcattttaaaggccccaattgcagctcctgaaccggaactcaaaacagacccatctttggatcttcattcattaagcagtgcagaaacacagcctcaccattacaattaagaattatttttagagtcttcttatttctgaagcatgtgaatattatctcgatcgttaaaagtcctgctcaggaagaactcagagaagatccagattntgaaattaaggaaggagaaggacttgaagagtgctccaaaatagaagtaaaagaagaaagccctcaatcaaaagcagaaacagaattaaaagcttcccaaaaaccaatcagaaaacacaggaacatgcactgcaaggtttctttgttggatgacacagtttatgaatgtgttgtggagaaacatgctaagggacaagatttgcttaaacgagtatgtgagcatctcaatcttttggaagaagactattttggtctagccatttgggataacgcaacctctaagacatggctggattccgccaaagaaataaaaaagcaggttcgtggtgtcccttggaattttacatttaatgtaaagttttatccacctgacccagcacagttaacagaagacataacaagatattatttatgtcttcagcttcggcaggacatagttgcaggacgtctgccctgttcctttgcaaccttagcattattaggttcttacaccatccagtctgaactgggagactacgacccagaactccatggcgtggattatgttagtgattttaaactggccccgaatcagaccaaggaacttgaagagaaggtcatggaactgcataagtcatacaggtccatgactccagctcaggctgacttggagtttcttgagaatgccaaaaagttgtctatgtatggagttgatcttcataaagcaaaggacttggaaggagtagatatcatcctaggtgtctgctctagtggccttctggtttacaaagataagctgagaattaaccgcttcccttggcccaaagtgctgaagatttcttataaacgtagtagctttttcatcaagattcggcctggagagcaagagcagtatgaaagtaccatcggattcaaacttcccagttaccgagcagctaagaaattatggaaagtctgtgtagaacatcacacgtttttcagattgacatctacagacaccattcccaaaagcaaatttcttgcgctaggatccaaatttcgatacagtggccggactcaagctcagaccaggcaagctagtgctctaattgacaggcctgccccacacttcgagcgtacagcaagtaaacgggcgtcccggagcctcgatggagcagcagctgtcgattcggcagaccgaagtcctcggcccacttctgcacctgccattactcagggtcaggttgcagaaggtggcgtcctagatgcctctgctaaaaaaacagtggtccctaaagcacagaaggaaacagtgaaggctgaagtgaaaaaggaagacgagccacctgagcaagctgagccagagcccacagaagcatggaagaaaaagagagaaagactagatggtgaaaacatttatatcagacatagcaatttaatgttggaggatttagacaagagtcaagaggagatcaaaaaacatcatgccagcatcagtgagctgaaaaagaacttcatggagtctgtaccagaaccacggcctagtgaatgggataaacgcttatccactcactcacccttccgaactcttaacatcaatgggcaaatccccacaggagaaggacctcccctggtgaagacacaaactgtcaccatctcagataatgccaatgctgtgaaaagtgaaatcccaaccaaagacgtccctattgtccacactgagaccaagaccatcacttatgaggctgcccagactgtaaaaggtgggatttcagagacacgtattgaaaagagaattgtgatcacaggagatgctgatattgaccatgatcaggtccttgtacaagccatcaaggaggcaaaggagcagcacccagacatgtcagtgaccaaggtggtcgtccaccaggagaccgagattgctgatgagtgagctcaggaactaacctaccccaactctgcccttctcccatccaagagaaaccagcaaaatgataaagaagctaacctgccatagtcagacttcagactttcaagattattctaaatcaccagaaaattaatttcagtttctattgggagtttataccaagagattcttctagatctcattgatccttttgaagagctttttctatattaggatatcagaattgttcaacttttcactctatagactgttttaagagttttggggtttttttaattgggtggtttgtaaccccttcagcctagcctctctgcccatttatttccaaccccaacagacactgacagggtccacggaattcttcgggaaatcctccaaggactcttgtcagctgtgttggaggccaaagccagcttagtgggacttccgcgtctctccctagtcttatcccctttggatgatggcagaaacttcatgaaccagccctttctcagagccagtgatgtgagtgtatcagaatgccagggagggcaccagccctgatccacagacctcggaaagatgcccctgttcctttgttgcgggtggttttggtaaggcagagccctctgctgagaatgtagtattgtttttcccctctccctcctgctttctttttggagcttctttgggtcaaagacatggaagttgcttcagatatctgatactgtgaatgtttgaacatatccgtggccttcacctctccagctacccttttacctcatcagaagcagtggctcagctaagtgctccccctagctcccatctcaggagaccaaatctcacagaaaaataggcactttgggccaaaagctctaatggaacatttttagtggtgatttggggaaggaaagttaatgaggtttttaaaataaggttttctagttttgagagtgtgcacttcacacaggggaatggggttacttctgtctgatcctgggcctttctttcatcccaaatgacaaggaatgtggctcagagaagggtttttcttttttgacctttcttctctcaacaggaacctgcctgaggacacccttctagagcaaggaattgacttttaggagccgttctccccacaagacaccacatgacaaggggtataagccccagccctgctcattcccactcaccagctgaggtctgtcaggttttgaaggcttgattttgtggtgggtttggggcttagttttcctttttttcattttgatttttgaaagtgaagatgatgccctaattcctggtaaggatttggggcatagttttttgtttttttgagacggagtttcgctcttgttgcccaagctggagtgcagtggcgcgatctcggctcactgcaacctccgcctcctgggttcaagcagttctcttgcctcagcctcccaagtagctgggatgacaggcgcacaccaccacgcccagcaaattttttgtatttttagtagaaacgggatttcaccttgttaggctggtctcgaactcctgacctcaggtgatccacccaccttggcctcccaaagtgctgggattacaggtgtgagccaccacgcccggccgatttggggcatttttatttaacagaacttctctaaccttccaactgcttcccacaaacacattggcctcaaggctccttagaatcccagttccagcttcctaaaatagacagtgggtatcgggcagcagtcactggggctcaagggcagtgagcaagagaaatgtctaaagctgcttctcccaacaccgtccaaagtctccactgcctgagttttgtttcggctggtttgaactcatttcgggtgtgtgcatttttcttttggtacccatgtgagacatgaacaacaggagggagggaaagagcccaggtgggacgtgggacaggcttaggggaaagagcttgtcctatctcaggaacaaaattataggctgtgggcagagggtctgaaaggtgggctttggggtagtgcccaagcctggtcgtgttgccaggagtggtgacaagaaatgcagcttacatcaaacgaacatgtagtgcatgcccactgcctgatggccagatggcctgtaggaagagctaccagggcttccagacctgtggaacgaagaggatggggaaaaggcagagggcactgagtgtccctttaaaaactaacacactgaatattccgtgtgatctagaacagtgtggcagctttcacagcacaggaccgttcatcgggggcctaaacgtttccctcagctctgtcaccaactcacttctctcggcttcgttgtctgtaaattggatgaaaagagctctaatgcctttcaggctcttagaagccatagatttggacaagcccagcaagatgggtgtccttccaggcctcttcccctttcctccatctctggcaacagttcttggggtttggcaattgtttggattttttttctttctgcagttgtgtgtatgtgtgtttgtgtgaagaccagggtcagaaacttggcaacagttttcctagagtgactcagacacaccacagtaacaactctcgctgcaattttattttaatttgagaaataaagatttcctccaagccacatgaggactctggcacccacccacaaagcaagacctgtatttataagccgagggctcagggagcctaactgcgggacccgtcagggccccgtgacccatccccgtccccacccccccctccaccgctgggcccatcagtgtgtgttggggggatgcttggcagctgggggtgaggagacaacaaacctcgggaactggagccagagctgcggcctgactgacgccttttgatgctcacgggaaatttctgcccaggatctcagccccaggctggttgtttctacaaatctctctcaaatgtattattttggtgacaaaaatgaaggagctttgtaaatttttttaaaattatgaatcatatcaagtagttgtttacatttcttgaaaaaataggaactcgggcagcagaatcagattggcagaatctttagactacacaggcaataatcaagtctgctgttttggcctttcgtagtagaagtggttgtagtgtttagatatctgtttggtcttgcttcttgtattgcatttttttcaataaacaacaacaaaaagaactctctctgtgagg

SEQ ID NO: 369938 - DNA, 3863 bp, Homo sapiens
tattgttttgcatctttgtcctttcaactgtaggatttagacaagagtcaagaggagatcaaaaaacatcatgccagcatcagtgagctgaaaaagaacttcatggagtctgtaccagaaccacggcctagtgaatgggataaacgcttatccactcactcacccttccgaactcttaacatcaatgggcaaatccccacaggagaaggacctcccctggtgaagacacaaactgtcaccatctcagataatgccaatgctgtgaaaagtgaaatcccaaccaaagacgtccctattgtccacactgagaccaagaccatcacttatgaggctgcccagactgacgacaacagtggagacttggacccaggagtcttgctgacagctcaaactatcacatctgagaccccaagcagcaccaccacaactcaaattaccaagactgtaaaaggtgggatttcagagacacgtattgaaaagagaattgtgatcacaggagatgctgatattgaccatgatcaggtccttgtacaagccatcaaggaggcaaaggagcagcacccagacatgtcagtgaccaaggtggtcgtccaccaggagaccgagattgctgatgagtgagctcaggaactaacctaccccaactctgcccttctcccatccaagagaaaccagcaaaatgataaagaagctaacctgccatagtcagacttcagactttcaagattattctaaatcaccagaaaattaatttcagtttctattgggagtttataccaagagattcttctagatctcattgatccttttgaagagctttttctatattaggatatcagaattgttcaacttttcactctatagactgttttaagagttttggggtttttttaattgggtggtttgtaaccccttcagcctagcctctctgcccatttatttccaaccccaacagacactgacagggtccacggaattcttcgggaaatcctccaaggactcttgtcagctgtgttggaggccaaagccagcttagtgggacttccgcgtctctccctagtcttatcccctttggatgatggcagaaacttcatgaaccagccctttctcagagccagtgatgtgagtgtatcagaatgccagggagggcaccagccctgatccacagacctcggaaagatgcccctgttcctttgttgcgggtggttttggtaaggcagagccctctgctgagaatgtagtattgtttttcccctctccctcctgctttctttttggagcttctttgggtcaaagacatggaagttgcttcagatatctgatactgtgaatgtttgaacatatccgtggccttcacctctccagctacccttttacctcatcagaagcagtggctcagctaagtgctccccctagctcccatctcaggagaccaaatctcacagaaaaataggcactttgggccaaaagctctaatggaacatttttagtggtgatttggggaaggaaagttaatgaggtttttaaaataaggttttctagttttgagagtgtgcacttcacacaggggaatggggttacttctgtctgatcctgggcctttctttcatcccaaatgacaaggaatgtggctcagagaagggtttttcttttttgacctttcttctctcaacaggaacctgcctgaggacacccttctagagcaaggaattgacttttaggagccgttctccccacaagacaccacatgacaaggggtataagccccagccctgctcattcccactcaccagctgaggtctgtcaggttttgaaggcttgattttgtggtgggtttggggcttagttttcctttttttcattttgatttttgaaagtgaagatgatgccctaattcctggtaaggatttggggcatagttttttgtttttttgagacggagtttcgctcttgttgcccaagctggagtgcagtggcgcgatctcggctcactgcaacctccgcctcctgggttcaagcagttctcttgcctcagcctcccaagtagctgggatgacaggcgcacaccaccacgcccagcaaattttttgtatttttagtagaaacgggatttcaccttgttaggctggtctcgaactcctgacctcaggtgatccacccaccttggcctcccaaagtgctgggattacaggtgtgagccaccacgcccggccgatttggggcatttttatttaacagaacttctctaaccttccaactgcttcccacaaacacattggcctcaaggctccttagaatcccagttccagcttcctaaaatagacagtgggtatcgggcagcagtcactggggctcaagggcagtgagcaagagaaatgtctaaagctgcttctcccaacaccgtccaaagtctccactgcctgagttttgtttcggctggtttgaactcatttcgggtgtgtgcatttttcttttggtacccatgtgagacatgaacaacaggagggagggaaagagcccaggtgggacgtgggacaggcttaggggaaagagcttgtcctatctcaggaacaaaattataggctgtgggcagagggtctgaaaggtgggctttggggtagtgcccaagcctggtcgtgttgccaggagtggtgacaagaaatgcagcttacatcaaacgaacatgtagtgcatgcccactgcctgatggccagatggcctgtaggaagagctaccagggcttccagacctgtggaacgaagaggatggggaaaaggcagagggcactgagtgtccctttaaaaactaacacactgaatattccgtgtgatctagaacagtgtggcagctttcacagcacaggaccgttcatcgggggcctaaacgtttccctcagctctgtcaccaactcacttctctcggcttcgttgtctgtaaattggatgaaaagagctctaatgcctttcaggctcttagaagccatagatttggacaagcccagcaagatgggtgtccttccaggcctcttcccctttcctccatctctggcaacagttcttggggtttggcaattgtttggattttttttctttctgcagttgtgtgtatgtgtgtttgtgtgaagaaaaacagactctgtccaggtagaaatggtgaggagggggaagagaattacatttccagggtcagaaacttggcaacagttttcctagagtgactcagacacaccacagtaacaactctcgctgcaattttattttaatttgagaaataaagatttcctccaagccacatgaggactctggcacccacccacaaagcaagacctgtatttataagccgagggctcagggagcctaactgcgggacccgtcagggccccgtgacccatccccgtccccacccccccctccaccgctgggcccatcagtgtgtgttggggggatgcttggcagctgggggtgaggagacaacaaacctcgggaactggagccagagctgcggcctgactgacgccttttgatgctcacgggaaatttctgcccaggatctcagccccaggctggttgtttctacaaatctctctcaaatgtattattttggtgacaaaaatgaaggagctttgtaaatttttttaaaattatgaatcatatcaagtagttgtttacatttcttgaaaaaataggaactcgggcagcagaatcagattggcagaatctttagactacacaggcaataatcaagtctgctgttttggcctttcgtagtagaagtggttgtagtgtttagatatctgtttggtcttgcttcttgtattgcatttttttcaataaacaacaacaaaaagaactctctctgtgagg

SEQ ID NO: 369939 - DNA, 4202 bp, Homo sapiens
  misc_feature (694)..(694): n is a, c, g, or t
cagtgcaggtggaggccccggcggggcaaagtggcaggaacctcttaaagggcgagacgggcggcgaccgagaacgcggtcggcccggtccccgccgcacccagcccagtcatgacaacagagaagagtttagtgactgaggccgaaaattcacagcaccaacagaaggaagagggtgaggaagccataaactcaggccaacaagaacctcagcaggaggaatcttgtcaaacagcagctgaaggagataattggtgtgaacagaagctgaaagcttctaatggagacactcctacacatgaagacttgaccaagaacaaggagcggacatcagaaagcagaggactttcacgactattctcctcgtttctcaaaaggcccaaatctcaggtgtccgaggaagaaggcaaagaagtagagtcagataaagaaaaaggtgaaggaggtcagaaagagatagaatttggaaccagtcttgatgaagagatcattttaaaggccccaattgcagctcctgaaccggaactcaaaacagacccatctttggatcttcattcattaagcagtgcagaaacacagcctcaccattacaattaagaattatttttagagtcttcttatttctgaagcatgtgaatattatctcgatcgttaaaagtcctgctcaggaagaactcagagaagatccagattntgaaattaaggaaggagaaggacttgaagagtgctccaaaatagaagtaaaagaagaaagccctcaatcaaaagcagaaacagaattaaaagcttcccaaaaaccaatcagaaaacacaggaacatgcactgcaaggtttctttgttggatgacacagtttatgaatgtgttgtggagaaacatgctaagggacaagatttgcttaaacgagtatgtgagcatctcaatcttttggaagaagactattttggtctagccatttgggataacgcaacctctaagacatggctggattccgccaaagaaataaaaaagcaggttcgtggtgtcccttggaattttacatttaatgtaaagttttatccacctgacccagcacagttaacagaagacataacaagatattatttatgtcttcagcttcggcaggacatagttgcaggacgtctgccctgttcctttgcaaccttagcattattaggttcttacaccatccagtctgaactgggagactacgacccagaactccatggcgtggattatgttagtgattttaaactggccccgaatcagaccaaggaacttgaagagaaggtcatggaactgcataagtcatacaggtccatgactccagctcaggctgacttggagtttcttgagaatgccaaaaagttgtctatgtatggagttgatcttcataaagcaaaggacttggaaggagtagatatcatcctaggtgtctgctctagtggccttctggtttacaaagataagctgagaattaaccgcttcccttggcccaaagtgctgaagatttcttataaacgtagtagctttttcatcaagattcggcctggagagcaagagcagtatgaaagtaccatcggattcaaacttcccagttaccgagcagctaagaaattatggaaagtctgtgtagaacatcacacgtttttcagattgacatctacagacaccattcccaaaagcaaatttcttgcgctaggatccaaatttcgatacagtggccggactcaagctcagaccaggcaagctagtgctctaattgacaggcctgccccacacttcgagcgtacagcaagtaaacgggcgtcccggagcctcgatggagcagcagctgtcgattcggcagaccgaagtcctcggcccacttctgcacctgccattactcagggtcaggttgcagaaggtggcgtcctagatgcctctgctaaaaaaacagtggtccctaaagcacagaaggaaacagtgaaggctgaagtgaaaaaggaagacgagccacctgagcaagctgagccagagcccacagaagcatggaagaaaaagagagaaagactagatggtgaaaacatttatatcagacatagcaatttaatgttggaggatttagacaagagtcaagaggagatcaaaaaacatcatgccagcatcagtgagctgaaaaagaacttcatggagtctgtaccagaaccacggcctagtgaatgggataaacgcttatccactcactcacccttccgaactcttaacatcaatgggcaaatccccacaggagaaggacctcccctggtgaagacacaaactgtcaccatctcagataatgccaatgctgtgaaaagtgaaatcccaaccaaagacgtccctattgtccacactgagaccaagaccatcacttatgaggctgcccagactgtaaaaggtgggatttcagagacacgtattgaaaagagaattgtgatcacaggagatgctgatattgaccatgatcaggtccttgtacaagccatcaaggaggcaaaggagcagcacccagacatgtcagtgaccaaggtggtcgtccaccaggagaccgagattgctgatgagtgagctcaggaactaacctaccccaactctgcccttctcccatccaagagaaaccagcaaaatgataaagaagctaacctgccatagtcagacttcagactttcaagattattctaaatcaccagaaaattaatttcagtttctattgggagtttataccaagagattcttctagatctcattgatccttttgaagagctttttctatattaggatatcagaattgttcaacttttcactctatagactgttttaagagttttggggtttttttaattgggtggtttgtaaccccttcagcctagcctctctgcccatttatttccaaccccaacagacactgacagggtccacggaattcttcgggaaatcctccaaggactcttgtcagctgtgttggaggccaaagccagcttagtgggacttccgcgtctctccctagtcttatcccctttggatgatggcagaaacttcatgaaccagccctttctcagagccagtgatgtgagtgtatcagaatgccagggagggcaccagccctgatccacagacctcggaaagatgcccctgttcctttgttgcgggtggttttggtaaggcagagccctctgctgagaatgtagtattgtttttcccctctccctcctgctttctttttggagcttctttgggtcaaagacatggaagttgcttcagatatctgatactgtgaatgtttgaacatatccgtggccttcacctctccagctacccttttacctcatcagaagcagtggctcagctaagtgctccccctagctcccatctcaggagaccaaatctcacagaaaaataggcactttgggccaaaagctctaatggaacatttttagtggtgatttggggaaggaaagttaatgaggtttttaaaataaggttttctagttttgagagtgtgcacttcacacaggggaatggggttacttctgtctgatcctgggcctttctttcatcccaaatgacaaggaatgtggctcagagaagggtttttcttttttgacctttcttctctcaacaggaacctgcctgaggacacccttctagagcaaggaattgacttttaggagccgttctccccacaagacaccacatgacaaggggtataagccccagccctgctcattcccactcaccagctgaggtctgtcaggttttgaaggcttgattttgtggtgggtttggggcttagttttcctttttttcattttgatttttgaaagtgaagatgatgccctaattcctggtaaggatttggggcatagttttttgtttttttgagacggagtttcgctcttgttgcccaagctggagtgcagtgagccacagttgcgccattgcactccagctcttgggcaatgagtgaaactcctgtctccaacatatacacacacttccacactcacacctcactcgccgacttcccccctccactccacgctttcggacaacggactattggcacgcagtaccacgagcttatctctccagcaattacttcaacaacttagattggtcccaagcgtgacaggagactcctgtctgccacgatcctatcagatgccaccaagggacccactgtga

SEQ ID NO: 369940 - DNA, 3070 bp, Homo sapiens
  misc_feature (697)..(697): n is a, c, g, or t
ggcgggagggcgcgcgccagggtcgctcgctcgctccctccctccgctggtgcgtttagtcagtcagccagcagcagccggcgggcccgcgagccgcagagggcccgagcctcggacgccggcgcctcctcctgccattgttcgtcgggctgcagcagtggcgggcgcaggagcccggccccggagccaccgtcatgacaacagagaagagtttagtgactgaggccgaaaattcacagcaccaacagaaggaagagggtgaggaagccataaactcaggccaacaagaacctcagcaggaggaatcttgtcaaacagcagctgaaggagataattggtgtgaacagaagctgaaagcttctaatggagacactcctacacatgaagacttgaccaagaacaaggagcggacatcagaaagcagaggactttcacgactattctcctcgtttctcaaaaggcccaaatctcaggtgtccgaggaagaaggcaaagaagtagagtcagataaagaaaaaggtgaaggaggtcagaaagagatagaatttggaaccagtcttgatgaagagatcattttaaaggccccaattgcagctcctgaaccggaactcaaaacagacccatctttggatcttcattcattaagcagtgcagaaacacagcctgctcaggaagaactcagagaagatccagattntgaaattaaggaaggagaaggacttgaagagtgctccaaaatagaagtaaaagaagaaagccctcaatcaaaagcagaaacagaattaaaagcttcccaaaaaccaatcagaaaacacaggaacatgcactgcaaggtttctttgttggatgacacagtttatgaatgtgttgtggagaaacatgctaagggacaagatttgcttaaacgagtatgtgagcatctcaatcttttggaagaagactattttggtctagccatttgggataacgcaacctctaagacatggctggattccgccaaagaaataaaaaagcaggttcgtggtgtcccttggaattttacatttaatgtaaagttttatccacctgacccagcacagttaacagaagacataacaagatattatttatgtcttcagcttcggcaggacatagttgcaggacgtctgccctgttcctttgcaaccttagcattattaggttcttacaccatccagtctgaactgggagactacgacccagaactccatggcgtggattatgttagtgattttaaactggccccgaatcagaccaaggaacttgaagagaaggtcatggaactgcataagtcatacaggtccatgactccagctcaggctgacttggagtttcttgagaatgccaaaaagttgtctatgtatggagttgatcttcataaagcaaaggacttggaaggagtagatatcatcctaggtgtctgctctagtggccttctggtttacaaagataagctgagaattaaccgcttcccttggcccaaagtgctgaagatttcttataaacgtagtagctttttcatcaagattcggcctggagagcaagagcagtatgaaagtaccatcggattcaaacttcccagttaccgagcagctaagaaattatggaaagtctgtgtagaacatcacacgtttttcagattgacatctacagacaccattcccaaaagcaaatttcttgcgctaggatccaaatttcgatacagtggccggactcaagctcagaccaggcaagctagtgctctaattgacaggcctgccccacacttcgagcgtacagcaagtaaacgggcgtcccggagcctcgatggagcagcagctgtcgattcggcagaccgaagtcctcggcccacttctgcacctgccattactcagggtcaggttgcagaaggtggcgtcctagatgcctctgctaaaaaaacagtggtccctaaagcacagaaggaaacagtgaaggctgaagtgaaaaaggaagacgagccacctgagcaagctgagccagagcccacagaagcatggaaggtggaaaaaacccacatcgaggtgacagtacccacctcaaatggtgaccaaacacagaagcttgcagaaaaaactgaagatctgataagaatgaggaagaaaaagagagaaagactagatggtgaaaacatttatatcagacatagcaatttaatgttggaggatttagacaagagtcaagaggagatcaaaaaacatcatgccagcatcagtgagctgaaaaagaacttcatggagtctgtaccagaaccacggcctagtgaatgggataaacgcttatccactcactcacccttccgaactcttaacatcaatgggcaaatccccacaggagaaggacctcccctggtgaagacacaaactgtcaccatctcagataatgccaatgctgtgaaaagtgaaatcccaaccaaagacgtccctattgtccacactgagaccaagaccatcacttatgaggctgcccagactgacgacaacagtggagacttggacccaggagtcttgctgacagctcaaactatcacatctgagaccccaagcagcaccaccacaactcaaattaccaagactgtaaaaggtgggatttcagagacacgtattgaaaagagaattgtgatcacaggagatgctgatattgaccatgatcaggtccttgtacaagccatcaaggaggcaaaggagcagcacccagacatgtcagtgaccaaggtggtcgtccaccaggagaccgagattgctgatgagtgagctcagggaactaacctaccccaactctgcccttctcccaaacaagaaccaacatagacagctatctgccctacccggctgttctacccagctcagcctgcgggtctttcagtacctggtggggccgcaggggcgggcgcccctgacaccgcactcacgtcccagtgtcaagtcacaaaaggcaagctcatcaagcaaatggttctaggagcccagtccacgaggtgctgacatggtgaggatgagtctacagccatgtgtgtgccggtccgtatcctgag

SEQ ID NO: 369941 - DNA, 613 bp, Homo sapiens
agcacctaattactgctgtccttttcctagacccggcataaaaagaacctggtccggtagacctagcctctcagtatgctaggaacttacactttttagttgcctttaccaagtattgcagatactactgcaaataagtgaagaaagtaacagcatttaactgatttgggaacttggtttgatcttgttctaatgacccacttcgaatggtggttgaaagtaaaatctgtatcgccgtcttatgtttccatttacctagaaatactttacctttgagcacaggaaattaatccccttctggttgttctccccctggcattggttttaaatatataatgattatgtttgttgtaggaaaaatagaaaaacaactacaatagaaaattcttcccatatattattttgaaatacatatttccgatccgataatccattgctctagcatggaaaatgttggatttacttgtgtttgctttttccaaataaaatggaacttttgtggctacattatagaattgttttagactgcttaattctgtgtgttgttgagaaagggaggagtggggaaggtaaaaatcttgacatactttcttcgtgggtattttttcttgag

SEQ ID NO: 369942 - DNA, 1757 bp, Homo sapiens
gttatgcaatcaatgatctgggtttttctcttcagagaaatttgttgtacagaaaattgctgttgggatgaagctttgcagccttgcagtccttgtacccattgttctcttctgtgagcagcatgtcttcgcgtttcagagtggccaagttctagctgctcttcctagaacctctaggcaagttcaagttctacagaatcttactacaacatatgagattgttctctggcagccggtaacagctgaccttattgtgaagaaaaaacaagtccatttttttgtaaatgcatctgatgtcgacaatgtgaaagcccatttaaatgtgagcggaattccatgcagtgtcttgctggcagacgtggaagatcttattcaacagcagatttccaacgacacagtcagcccccgagcctccgcatcgtactatgaacagtatcactcactaaatgaaatctattcttggatagaatttataactgagaggcatcctgatatgcttacaaaaatccacattggatcctcatttgagaagtacccactctatgttttaaaggtttctggaaaagaacaagcagccaaaaatgccatatggattgactgtggaatccatgccagagaatggatctctcctgctttctgcttgtggttcataggccatataactcaattctatgggataatagggcaatataccaatctcctgaggcttgtggatttctatgttatgccggtggttaatgtggatggttatgactactcatggaaaaagaatcgaatgtggagaaagaaccgttctttctatgcgaacaatcattgcatcggaacagacctgaataggaactttgcttccaaacactggtgtgaggaaggtgcatccagttcctcatgctcggaaacctactgtggactttatcctgagtcagaaccagaagtgaaggcagtggctagtttcttgagaagaaatatcaaccagattaaagcatacatcagcatgcattcatactcccagcatatagtgtttccatattcctatacacgaagtaaaagcaaagaccatgaggaactgtctctagtagccagtgaagcagttcgtgctattgagaaaactagtaaaaataccaggtatacacatggccatggctcagaaaccttatacctagctcctggaggtggggacgattggatctatgatttgggcatcaaatattcgtttacaattgaacttcgagatacgggcacatacggattcttgctgccggagcgttacatcaaacccacctgtagagaagcttttgccgctgtctctaaaatagcttggcatgtcattaggaatgtttaatgcccctgattttatcattctgcttccgtattttaatttactgattccagcaagaccaaatcattgtatcagattatttttaagttttatccgtagttttgataaaagattttcctattccttggttctgtcagagaacctaataagtgctactttgccattaaggcagactagggttcatgtctttttaccctttaaaaaaaattgtaaaagtctagttacctactttttctttgattttcgacgtttgactagccatctcaagcaactttcgacgtttgactagccatctcaagcaagtttaatcaatgatcatctcacgctgatcattggatcctactcaacaaaaggaagggtggtcagaagtacattaaagatttctgctccaaattttcaataaatttctgcttgtgccttt

SEQ ID NO: 369943 - DNA, 1594 bp, Homo sapiens
gttatgcaatcaatgatctgggtttttctcttcagagaaatttgttgtacagaaaattgctgttgggatgaagctttgcagccttgcagtccttgtacccattgttctcttctgtgagcagcatgtcttcgcgtttcagagtggccaagttctagctgctcttcctagaacctctaggcaagttcaagttctacagaatcttactacaacatatgagattgttctctggcagccggtaacagctgaccttattgtgaagaaaaaacaagtccatttttttgtaaatgcatctgatgtcgacaatgtgaaagcccatttaaatgtgagcggaattccatgcagtgtcttgctggcagacgtggaagatcttattcaacagcagatttccaacgacacagtcagcccccgagcctccgcatcgtactatgaacagtatcactcactaaatgaaatctattcttggatagaatttataactgagaggcatcctgatatgcttacaaaaatccacattggatcctcatttgagaagtacccactctatgttttaaaggtttctggaaaagaacaagcagccaaaaatgccatatggattgactgtggaatccatgccagagaatggatctctcctgctttctgcttgtggttcataggccataatcgaatgtggagaaagaaccgttctttctatgcgaacaatcattgcatcggaacagacctgaataggaactttgcttccaaacactggtgtgaggaaggtgcatccagttcctcatgctcggaaacctactgtggactttatcctgagtcagaaccagaagtgaaggcagtggctagtttcttgagaagaaatatcaaccagattaaagcatacatcagcatgcattcatactcccagcatatagtgtttccatattcctatacacgaagtaaaagcaaagaccatgaggaactgtctctagtagccagtgaagcagttcgtgctattgagaaaactagtaaaaataccaggtatacacatggccatggctcagaaaccttatacctagctcctggaggtggggacgattggatctatgatttgggcatcaaatattcgtttacatcaaacccacctgtagagaagcttttgccgctgtctctaaaatagcttggcatgtcattaggaatgtttaatgcccctgattttatcattctgcttccgtattttaatttactgattccagcaagaccaaatcattgtatcagattatttttaagttttatccgtagttttgataaaagattttcctattccttggttctgtcagagaacctaataagtgctactttgccattaaggcagactagggttcatgtctttttaccctttaaaaaaaattgtaaaagtctagttacctactttttctttgattttcgacgtttgactagccatctcaagcaactttcgacgtttgactagccatctcaagcaagtttaatcaatgatcatctcacgctgatcattggatcctactcaacaaaaggaagggtggtcagaagtacattaaagatttctgctccaaattttcaataaatttctgcttgtgccttt

SEQ ID NO: 369944 - DNA, 1694 bp, Homo sapiens
gttatgcaatcaatgatctgggtttttctcttcagagaaatttgttgtacagaaaattgctgttgggatgaagctttgcagccttgcagtccttgtacccattgttctcttctgtgagcagcatgtcttcgcgtttcagagtggccaagttctagctgctcttcctagaacctctaggcaagttcaagttctacagaatcttactacaacatatgagattgttctctggcagccggtaacagctgaccttattgtgaagaaaaaacaagtccatttttttgtaaatgcatctgatgtcgacaatgtgaaagcccatttaaatgtgagcggaattccatgcagtgtcttgctggcagacgtggaagatcttattcaacagcagatttccaacgacacagtcagcccccgagcctccgcatcgtactatgaacagtatcactcactaaatgaaatctattcttggatagaatttataactgagaggcatcctgatatgcttacaaaaatccacattggatcctcatttgagaagtacccactctatgttttaaagttctgggaaccagccactttctgcttgtggttcataggccatataactcaattctatgggataatagggcaatataccaatctcctgaggcttgtggatttctatgttatgccggtggttaatgtggatggttatgactactcatggaaaaagaatcgaatgtggagaaagaaccgttctttctatgcgaacaatcattgcatcggaacagacctgaataggaactttgcttccaaacactggtgtgaggaaggtgcatccagttcctcatgctcggaaacctactgtggactttatcctgagtcagaaccagaagtgaaggcagtggctagtttcttgagaagaaatatcaaccagattaaagcatacatcagcatgcattcatactcccagcatatagtgtttccatattcctatacacgaagtaaaagcaaagaccatgaggaactgtctctagtagccagtgaagcagttcgtgctattgagaaaactagtaaaaataccaggtatacacatggccatggctcagaaaccttatacctagctcctggaggtggggacgattggatctatgatttgggcatcaaatattcgtttacaattgaacttcgagatacgggcacatacggattcttgctgccggagcgttacatcaaacccacctgtagagaagcttttgccgctgtctctaaaatagcttggcatgtcattaggaatgtttaatgcccctgattttatcattctgcttccgtattttaatttactgattccagcaagaccaaatcattgtatcagattatttttaagttttatccgtagttttgataaaagattttcctattccttggttctgtcagagaacctaataagtgctactttgccattaaggcagactagggttcatgtctttttaccctttaaaaaaaattgtaaaagtctagttacctactttttctttgattttcgacgtttgactagccatctcaagcaactttcgacgtttgactagccatctcaagcaagtttaatcaatgatcatctcacgctgatcattggatcctactcaacaaaaggaagggtggtcagaagtacattaaagatttctgctccaaattttcaataaatttctgcttgtgccttt

SEQ ID NO: 369945 - DNA, 1698 bp, Homo sapiens
  misc_feature (773)..(773): n is a, c, g, or t
  misc_feature (785)..(785): n is a, c, g, or t
  misc_feature (792)..(792): n is a, c, g, or t
gttatgcaatcaatgatctgggtttttctcttcagagaaatttgttgtacagaaaattgctgttgggatgaagctttgcagccttgcagtccttgtacccattgttctcttctgtgagcagcatgtcttcgcgtttcagagtggccaagttctagctgctcttcctagaacctctaggcaagttcaagttctacagaatcttactacaacatatgagattgttctctggcagccggtaacagctgaccttattgtgaagaaaaaacaagtccatttttttgtaaatgcatctgatgtcgacaatgtgaaagcccatttaaatgtgagcggaattccatgcagtgtcttgctggcagacgtggaagatcttattcaacagcagatttccaacgacacagtcagcccccgagcctccgcatcgtactatgaacagtatcactcactaaatgaaatctattcttggatagaatttataactgagaggcatcctgatatgcttacaaaaatccacattggatcctcatttgagaagtacccactctatgttttaaaggtttctggaaaagaacaagcagccaaaaatgccatatggattgactgtggaatccatgccagagaatggatctctcctgctttctgcttgtggttcataggccatataactcaattctatgggataatagggcaatataccaatctcctgaggcttgtggatttctatgttatgccggtggttaatgtggatggttatgactactcatggaaaaagcagncctgataggacnttgcttncaacactgggtgaggaaggtgcatccagttcctcatgctcggaaacctactgtggactttatcctgagtcagaaccagaagtgaaggcagtggctagtttcttgagaagaaatatcaaccagattaaagcatacatcagcatgcattcatactcccagcatatagtgtttccatattcctatacacgaagtaaaagcaaagaccatgaggaactgtctctagtagccagtgaagcagttcgtgctattgagaaaactagtaaaaataccaggtatacacatggccatggctcagaaaccttatacctagctcctggaggtggggacgattggatctatgatttgggcatcaaatattcgtttacaattgaacttcgagatacgggcacatacggattcttgctgccggagcgttacatcaaacccacctgtagagaagcttttgccgctgtctctaaaatagcttggcatgtcattaggaatgtttaatgcccctgattttatcattctgcttccgtattttaatttactgattccagcaagaccaaatcattgtatcagattatttttaagttttatccgtagttttgataaaagattttcctattccttggttctgtcagagaacctaataagtgctactttgccattaaggcagactagggttcatgtctttttaccctttaaaaaaaattgtaaaagtctagttacctactttttctttgattttcgacgtttgactagccatctcaagcaactttcgacgtttgactagccatctcaagcaagtttaatcaatgatcatctcacgctgatcattggatcctactcaacaaaaggaagggtggtcagaagtacattaaagatttctgctccaaattttcaataaatttctgcttgtgccttt

SEQ ID NO: 369946 - DNA, 1722 bp, Homo sapiens
gttatgcaatcaatgatctgggtttttctcttcagagaaatttgttgtacagaaaattgctgttgggatgaagctttgcagccttgcagtccttgtacccattgtttggccaagttctagctgctcttcctagaacctctaggcaagttcaagttctacagaatcttactacaacatatgagattgttctctggcagccggtaacagctgaccttattgtgaagaaaaaacaagtccatttttttgtaaatgcatctgatgtcgacaatgtgaaagcccatttaaatgtgagcggaattccatgcagtgtcttgctggcagacgtggaagatcttattcaacagcagatttccaacgacacagtcagcccccgagcctccgcatcgtactatgaacagtatcactcactaaatgaaatctattcttggatagaatttataactgagaggcatcctgatatgcttacaaaaatccacattggatcctcatttgagaagtacccactctatgttttaaaggtttctggaaaagaacaagcagccaaaaatgccatatggattgactgtggaatccatgccagagaatggatctctcctgctttctgcttgtggttcataggccatataactcaattctatgggataatagggcaatataccaatctcctgaggcttgtggatttctatgttatgccggtggttaatgtggatggttatgactactcatggaaaaagaatcgaatgtggagaaagaaccgttctttctatgcgaacaatcattgcatcggaacagacctgaataggaactttgcttccaaacactggtgtgaggaaggtgcatccagttcctcatgctcggaaacctactgtggactttatcctgagtcagaaccagaagtgaaggcagtggctagtttcttgagaagaaatatcaaccagattaaagcatacatcagcatgcattcatactcccagcatatagtgtttccatattcctatacacgaagtaaaagcaaagaccatgaggaactgtctctagtagccagtgaagcagttcgtgctattgagaaaactagtaaaaataccaggtatacacatggccatggctcagaaaccttatacctagctcctggaggtggggacgattggatctatgatttgggcatcaaatattcgtttacaattgaacttcgagatacgggcacatacggattcttgctgccggagcgttacatcaaacccacctgtagagaagcttttgccgctgtctctaaaatagcttggcatgtcattaggaatgtttaatgcccctgattttatcattctgcttccgtattttaatttactgattccagcaagaccaaatcattgtatcagattatttttaagttttatccgtagttttgataaaagattttcctattccttggttctgtcagagaacctaataagtgctactttgccattaaggcagactagggttcatgtctttttaccctttaaaaaaaattgtaaaagtctagttacctactttttctttgattttcgacgtttgactagccatctcaagcaactttcgacgtttgactagccatctcaagcaagtttaatcaatgatcatctcacgctgatcattggatcctactcaacaaaaggaagggtggtcagaagtacattaaagatttctgctccaaattttcaataaatttctgcttgtgccttt

SEQ ID NO: 369947 - DNA, 1937 bp, Homo sapiens
gttatgcaatcaatgatctgggtttttctcttcagagaaatttgttgtacagaaaattgctgttgggatgaagctttgcagccttgcagtccttgtacccattgttctcttctgtgagcagcatgtcttcgcgtttcagagtggccaagttctagctgctcttcctagaacctctaggcaagttcaagttctacagaatcttactacaacatatgagattgttctctggcagccggtaacagctgaccttattgtgaagaaaaaacaagtccatttttttgtaaatgcatctgatgtcgacaatgtgaaagcccatttaaatgtgagcggaattccatgcagtgtcttgctggcagacgtggaagatcttattcaacagcagatttccaacgacacagtcagcccccgagcctccgcatcgtactatgaacagtatcactcactaaatgaaatctattcttggatagaatttataactgagaggcatcctgatatgcttacaaaaatccacattggatcctcatttgagaagtacccactctatgttttaaaggtttctggaaaagaacaagcagccaaaaatgccatatggattgactgtggaatccatgccagagaatggatctctcctgctttctgcttgtggttcataggccatataactcaattctatgggataatagggcaatataccaatctcctgaggcttgtggatttctatgttatgccggtggttaatgtggatggttatgactactcatggaaaaagaatcgaatgtggagaaagaaccgttctttctatgcgaacaatcattgcatcggaacagacctgaataggaactttgcttccaaacactggtgtgaggaaggtgcatccagttcctcatgctcggaaacctactgtggactttatcctgagtcagaaccagaagtgaaggcagtggctagtttcttgagaagaaatatcaaccagattaaagcatacatcagcatgcattcatactcccagcatatagtgtttccatattcctatacacgaagtaaaagcaaagaccatgaggaactgtctctagtagccagtgaagcagttcgtgctattgagaaaactagtaaaaataccaggtatacacatggccatggctcagaaaccttatacctagctcctggaggtggggacgattggatctatgatttgggcatcaaatattcgtttacaattgaacttcgagatacgggcacatacggattcttgctgccggagcgttacatcaaacccacctgtagagaagcttttgccgctgtctctgcttccgtattttaatttactgattccagcaagaccaaatcattgtatcagattatttttaagttttatccgtagttttgataaaagattttcctattccttggttctgtcagagaacctaataagtgctactttgccattaaggcagactagggttcatgtctttttaccctttaaaaaaaattgtaaaagtctagttacctactttttctttgattttcgacgtttgactagccatctcaagcaactttcgacgtttgactagccatctcaagcaagtttaatcaatgatcatctcacgctgatcattggatcctactcaacaaaaggaagggtggtcagaagtacattaaagatttctgctccaaattttcaataaatttctgcttgtgcctttagaaatacaaccatgcattccgtttgctccacggtaattaggcgatggcccagaaaggggaggggtgtcaaaaacgacaaacatagcctctcattccagctcagctgctcaataaacactgttgaacgaatgaatgagtggctctaggtactgtcaacaaatgccgcattttgcgcatttacaacagctgtttatggtaaggaattatgtaataaaaagagaaaactcacttaa

SEQ ID NO: 369948 - DNA, 1727 bp, Homo sapiens
gttatgcaatcaatgatctgggtttttctcttcagagaaatttgttgtacagaaaattgctgttgggatgaagctttgcagccttgcagtccttgtacccattgttctcttctgtgagcagcatgtcttcgcgtttcagagtggccaagttctagctgctcttcctagaacctctaggcaagttcaagttctacagaatcttactacaacatatgagattgttctctggcagccggtaacagctgaccttattgtgaagaaaaaacaagtccatttttttgtaaatgcatctgatgtcgacaatgtgaaagcccatttaaatgtgagcggaattccatgcagtgtcttgctggcagacgtggaagatcttattcaacagcagatttccaacgacacagtcagcccccgagcctccgcatcgtactatgaacagtatcactcactaaatgaaatctattcttggatagaatttataactgagaggcatcctgatatgcttacaaaaatccacattggatcctcatttgagaagtacccactctatgttttaaaggtttctggaaaagaacaagcagccaaaaatgccatatggattgactgtggaatccatgccagagaatggatctctcctgctttctgcttgtggttcataggccatataactcaattctatgggataatagggcaatataccaatctcctgaggcttgtggatttctatgttatgccggtggttaatgtggatggttatgactactcatggaaaaagaatcgaatgtggagaaagaaccgttctttctatgcgaacaatcattgcatcggaacagacctgaataggaactttgcttccaaacactggtgtgaggaaggtgcatccagttcctcatgctcggaaacctactgtggactttatcctgagtcagaaccagaagtgaaggcagtggctagtttcttgagaagaaatatcaaccagattaaagcatacatcagcatgcattcatactcccagcatatagtgtttccatattcctatacacgaagtaaaagcaaagaccatgaggaactgtctctagtagccagtgaagcagttcgtgctattgagaaaactagtaaaaataccaggtatacacatggccatggctcagaaaccttatacctagctcctggaggtggggacgattggatctatgatttgggcatcaaatattcgtttacaattgaacttcgagatacgggcacatacggattcttgctgccggagcgttacatcaaacccacctgtagagaagcttttgccgctgtctctaaaatagcttggcatgtcattaggaatgtttaatgcccctgattttatcattctgcttccgtattttaatttactgattccagcaagaccaaatcattgtatcagattatttttaagttttatccgtagttttgataaaagattttcctattccttggttctgtcagagaacctaataagtgctactttgccattaaggcagactagggttcatgtctttttaccctttaaaaaaaattgtaaaagtctagttacctactttttctttgattttcgacgtttgactagccatctcaagcaactttcgacgtttgactagccatctcaagcaagtttaatcaatgatcatctcacgctgatcattggatcctactcaacaaaaggaagggtggtcagaagtacattaaagatttctgctcca

SEQ ID NO: 369949 - DNA, 730 bp, Homo sapiens
gttatgcaatcaatgatctgggtttttctcttcagagaaatttgttgtacagaaaattgctgttgggatgaagctttgcagccttgcagtccttgtacccattgttctcttctgtgagcagcatgtcttcgcgtttcagagtggccaagttctagctgctcttcctagaacctctaggcaagttcaagttctacagaatcttactacaacatatgagattgttctctggcagccggtaacagctgaccttattgtgaagaaaaaacaagtccatttttttgtaaatgcatctgatgtcgacaatgtgaaagcccatttaaatgtgagcggaattccatgcagtgtcttgctggcagacgtggaagatcttattcaacagcagatttccaacgacacagtcagcccccgagcctccgcatcgtactatgaacagtatcactcactaaatgaaatctattcttggatagaatttataactgagaggcatcctgatatgcttacaaaaatccacattggatcctcatttgagaagtacccactctatgttttaaaggtttctggaaaagaacaagcagccaaaaatgccatatggattgactgtggaatccatgccagagaatggatctctcctgctttctgcttgtggttcataggccatgtcacatcatgaagcttgggaatctacaattttcacaagtttcccaggtgacttttatgcattagtaagttg

SEQ ID NO: 369950 - DNA, 1991 bp, Homo sapiens
gttatgcaatcaatgatctgggtttttctcttcagagaaatttgttgtacagaaaattgctgttgggatgaagctttgcagccttgcagtccttgtacccattgttctcttctgtgagcagcatgtcttcgcgtttcagagtggccaagttctagctgctcttcctagaacctctaggcaagttcaagttctacagaatcttactacaacatatgagattgttctctggcagccggtaacagctgaccttattgtgaagaaaaaacaagtccatttttttgtaaatgcatctgatgtcgacaatgtgaaagcccatttaaatgtgagcggaattccatgcagtgtcttgctggcagacgtggaagatcttattcaacagcagatttccaacgacacagtcagcccccgagcctccgcatcgtactatgaacagtatcactcactaaatgaaatctattcttggatagaatttataactgagaggcatcctgatatgcttacaaaaatccacattggatcctcatttgagaagtacccactctatgttttaaaggtttctggaaaagaacaagcagccaaaaatgccatatggattgactgtggaatccatgccagagaatggatctctcctgctttctgcttgtggttcataggccatataactcaattctatgggataatagggcaatataccaatctcctgaggcttgtggatttctatgttatgccggtggttaatgtggatggttatgactactcatggaaaaagaatcgaatgtggagaaagaaccgttctttctatgcgaacaatcattgcatcggaacagacctgaataggaactttgcttccaaacactggtgtgaggaaggtgcatccagttcctcatgctcggaaacctactgtggactttatcctgagtcagaaccagaagtgaaggcagtggctagtttcttgagaagaaatatcaaccagattaaagcatacatcagcatgcattcatactcccagcatatagtgtttccatattcctatacacgaagtaaaagcaaagaccatgaggaactgtctctagtagccagtgaagcagttcgtgctattgagaaaactagtaaaaataccaggtatacacatggccatggctcagaaaccttatacctagctcctggaggtggggacgattggatctatgatttgggcatcaaatattcgtttacaattgaacttcgagatacgggcacatacggattcttgctgccggagcgttacatcaaacccacctgtagagaagcttttgccgctgtctctaaaatagcttggcatgtcattaggaatgtttaatgcccctgattttatcattctgcttccgtattttaatttactgattccagcaagaccaaatcattgtatcagattatttttaagttttatccgtagttttgataaaagattttcctattccttggttctgtcagagaacctaataagtgctactttgccattaaggcagactagggttcatgtctttttaccctttaaaaaaaattgtaaaagtctagttacctactttttctttgattttcgacgtttgactagccatctcaagcaactttcgacgtttgactagccatctcaagcaagtttaatcaatgatcatctcacgctgatcattggatcctactcaacaaaaggaagggtggtcagaagtacattaaagatttctgctccaaattttcaataaatttctgcttgtgcctttagaaatacaaccatgcattccgtttgctccacggtaattaggcgatggcccagaaaggggaggggtgtcaaaaacgacaaacatagcctctcattccagctcagctgctcaataaacactgttgaacgaatgaatgagtggctctaggtactgtcaacaaatgccgcattttgcgcatttacaacagctgtttatggtaaggaattatgtaataaaaagagaaaactcacttaa

SEQ ID NO: 369951 - DNA, 1703 bp, Homo sapiens
gttatgcaatcaatgatctgggtttttctcttcagagaaatttgttgtacagaaaattgctgttgggatgaagctttgcagccttgcagtccttgtacccattgttctcttctgtgagcagcatgtcttcgcgtttcagagtggccaagttctagctgctcttcctagaacctctaggcaagttcaagttctacagaatcttactacaacatatgagattgttctctggcagccggtaacagctgaccttattgtgaagaatttaaatgtgagcggaattccatgcagtgtcttgctggcagacgtggaagatcttattcaacagcagatttccaacgacacagtcagcccccgagcctccgcatcgtactatgaacagtatcactcactaaatgaaatctattcttggatagaatttataactgagaggcatcctgatatgcttacaaaaatccacattggatcctcatttgagaagtacccactctatgttttaaaggtttctggaaaagaacaagcagccaaaaatgccatatggattgactgtggaatccatgccagagaatggatctctcctgctttctgcttgtggttcataggccatataactcaattctatgggataatagggcaatataccaatctcctgaggcttgtggatttctatgttatgccggtggttaatgtggatggttatgactactcatggaaaaagaatcgaatgtggagaaagaaccgttctttctatgcgaacaatcattgcatcggaacagacctgaataggaactttgcttccaaacactggtgtgaggaaggtgcatccagttcctcatgctcggaaacctactgtggactttatcctgagtcagaaccagaagtgaaggcagtggctagtttcttgagaagaaatatcaaccagattaaagcatacatcagcatgcattcatactcccagcatatagtgtttccatattcctatacacgaagtaaaagcaaagaccatgaggaactgtctctagtagccagtgaagcagttcgtgctattgagaaaactagtaaaaataccaggtatacacatggccatggctcagaaaccttatacctagctcctggaggtggggacgattggatctatgatttgggcatcaaatattcgtttacaattgaacttcgagatacgggcacatacggattcttgctgccggagcgttacatcaaacccacctgtagagaagcttttgccgctgtctctaaaatagcttggcatgtcattaggaatgtttaatgcccctgattttatcattctgcttccgtattttaatttactgattccagcaagaccaaatcattgtatcagattatttttaagttttatccgtagttttgataaaagattttcctattccttggttctgtcagagaacctaataagtgctactttgccattaaggcagactagggttcatgtctttttaccctttaaaaaaaattgtaaaagtctagttacctactttttctttgattttcgacgtttgactagccatctcaagcaactttcgacgtttgactagccatctcaagcaagtttaatcaatgatcatctcacgctgatcattggatcctactcaacaaaaggaagggtggtcagaagtacattaaagatttctgctccaaattttcaataaatttctgcttgtgccttt

SEQ ID NO: 369952 - DNA, 1016 bp, Homo sapiens
gttatgcaatcaatgatctgggtttttctcttcagagaaatttgttgtacagaaaattgctgttgggatgaagctttgcagccttgcagtccttgtacccattgttctcttctgtgagcagcatgtcttcgcgtttcagagtggccaagttctagctgctcttcctagaacctctaggcaagttcaagttctacagaatcttactacaacatatgagattgttctctggcagccggtaacagctgaccttattgtgaagaaaaaacaagtccatttttttgtaaatgcatctgatgtcgacaatgtgaaagcccatttaaatgtgagcggaattccatgcagtgtcttgctggcagacgtggaagatcttattcaacagcagatttccaacgacacagtcagcccccgagcctccgcatcgtactatgaacagtatcactcactaaatgaaatctattcttggatagaatttataactgagaggcatcctgatatgcttacaaaaatccacattggatcctcatttgagaagtacccactctatgttttaaaggtttctggaaaagaacaagcagccaaaaatgccatatggattgactgtggaatccatgccagagaatggatctctcctgctttctgcttgtggttcataggccatataactcaattctatgggataatagggcaatataccaatctcctgaggcttgtggatttctatgttatgccggtggttaatgtggatggttatgactactcatggaaaaagaatcgaatgtggagaaagaaccgttctttctatgcgaacaatcattgcatcggaacagacctgaataggaactttgcttccaaacactggtgtgcactattcacaagagcaaagacatggaatcaatctaggtgtctgtcaatggcggattggataaagaaaatgtggtaaatatacatcatggaatactacacagccataaaaaagaacaaaattatgtcctttacagcaacatggatgcagctgg

SEQ ID NO: 369953 - DNA, 1135 bp, Homo sapiens
gttatgcaatcaatgatctgggtttttctcttcagagaaatttgttgtacagaaaattgctgttgggatgaagctttgcagccttgcagtccttgtacccattgttctcttctgtgagcagcatgtcttcgcgtttcagagtggccaagttctagctgctcttcctagaacctctaggcaagttcaagttctacagaatcttactacaacatatgagattgttctctggcagccggtaacagctgaccttattgtgaagaaaaaacaagtccatttttttgtaaatgcatctgatgtcgacaatgtgaaagcccatttaaatgtgagcggaattccatgcagatctattcttggatagaatttataactgagaggcatcctgatatgcttacaaaaatccacattggatcctcatttgagaagtacccactctatgttttaaagtctctagtagccagtgaagcagttcgtgctattgagaaaactagtaaaaataccaggtatacacatggccatggctcagaaaccttatacctagctcctggaggtggggacgattggatctatgatttgggcatcaaatattcgtttacaattgaacttcgagatacgggcacatacggattcttgctgccggagcgttacatcaaacccacctgtagagaagcttttgccgctgtctctaaaatagcttggcatgtcattaggaatgtttaatgcccctgattttatcattctgcttccgtattttaatttactgattccagcaagaccaaatcattgtatcagattatttttaagttttatccgtagttttgataaaagattttcctattccttggttctgtcagagaacctaataagtgctactttgccattaaggcagactagggttcatgtctttttaccctttaaaaaaaattgtaaaagtctagttacctactttttctttgattttcgacgtttgactagccatctcaagcaactttcgacgtttgactagccatctcaagcaagtttaatcaatgatcatctcacgctgatcattggatcctactcaacaaaaggaagggtggtcagaagtacattaaagatttctgctccaaattttcaataaatttctgcttgtgccttt

SEQ ID NO: 369954 - DNA, 3204 bp, Homo sapiens
cgccccctttccttacgcggattggtagctgcaggcttccctatctgattggccgaacgaacgcagcgcgtaatttaaaatattgtatctgtaacaaagctgcacctcgtgggcggagttgtgctctgcggctgcgaaagtccagcttcggcgactaggtgtgagtaagccagtatcccaggaggagcaagtggcacgtcttcggacctaggctgcccctgccgtcatgtcgcaagggatcctttctccgccagcgggcttgctgtccgatgacgatgtcgtagtttctcccatgtttgagtccacagctgcagatttggggtctgtggtacgcaagaacctgctatcagactgctctgtcgtctctacctccctagaggacaagcagcaggttccatctgaggacagtatggagaaggtgaaagtatacttgagggttaggcccttgttaccttcagagttggaacgacaggaagatcagggttgtgtccgtattgagaatgtggagacccttgttctacaagcacccaaggactcttttgccctgaagagcaatgaacggggaattggccaagccacacacaggttcaccttttcccagatctttgggccagaagtgggacaggcatccttcttcaacctaactgtgaaggagatggtaaaggatgtactcaaagggcagaactggctcatctatacatatggagtcactaactcagggaaaacccacacgattcaaggtaccatcaaggatggagggattctcccccggtccctggcgctgatcttcaatagcctccaaggccaacttcatccaacacctgatctgaagcccttgctctccaatgaggtaatctggctagacagcaagcagatccgacaggaggaaatgaagaagctgtccctgctaaatggaggcctccaagaggaggagctgtccacttccttgaagaggagtgtctacatcgaaagtcggataggtaccagcaccagcttcgacagtggcattgctgggctctcttctatcagtcagtgtaccagcagtagccagctggatgaaacaagtcatcgatgggcacagccagacactgccccactacctgtcccggcaaacattcgcttctccatctggatctcattctttgagatctacaacgaactgctttatgacctattagaaccgcctagccaacagcgcaagaggcagactttgcggctatgcgaggatcaaaatggcaatccctatgtgaaagatctcaactggattcatgtgcaagatgctgaggaggcctggaagctcctaaaagtgggtcgtaagaaccagagctttgccagcacccacctcaaccagaactccagccgcagtcacagcatcttctcaatcaggatcctacaccttcagggggaaggagatatagtccccaagatcagcgagctgtcactctgtgatctggctggctcagagcgctgcaaagatcagaagagtggtgaacggttgaaggaagcaggaaacattaacacctctctacacaccctgggccgctgtattgctgcccttcgtcaaaaccagcagaaccggtcaaagcagaacctggttcccttccgtgacagcaagttgactcgagtgttccaaggtttcttcacaggccgaggccgttcctgcatgattgtcaatgtgaatccctgtgcatctacctatgatgaaactcttcatgtggccaagttctcagccattgctagccagcttgtgcatgccccacctatgcaactgggattcccatccctgcactcgttcatcaaggaacatagtcttcaggtatcccccagcttagagaaaggggctaaggcagacacaggccttgatgatgatattgaaaatgaagctgacatctccatgtatggcaaagaggagctcctacaagttgtggaagccatgaagacactgcttttgaaggaacgacaggaaaagctacagctggagatgcatctccgagatgaaatttgcaatgagatggtagaacagatgcaacagcgggaacagtggtgcagtgaacatttggacacccaaaaggaactattggaggaaatgtatgaagaaaaactaaatatcctcaaggagtcactgacaagtttttaccaagaagagattcaggagcgggatgaaaagattgaagagctagaagctctcttgcaggaagccagacaacagtcagtggcccatcagcaatcagggtctgaattggccctacggcggtcacaaaggttggcagcttctgcctccacccagcagcttcaggaggttaaagctaaattacagcagtgcaaagcagagctaaactctaccactgaagagttgcataagtatcagaaaatgttagaaccaccaccctcagccaagcccttcaccattgatgtggacaagaagttagaagagggccagaagaatataaggctgttgcggacagagcttcagaaacttggtgagtctctccaatcagcagagagagcttgttgccacagcactggggcaggaaaacttcgtcaagccttgaccacttgtgatgacatcttaatcaaacaggaccagactctggctgaactgcagaacaacatggtgctagtgaaactggaccttcggaagaaggcagcatgtattgctgagcagtatcatactgtgttgaaactccaaggccaggtttctgccaaaaagcgccttggtaccaaccaggaaaatcagcaaccaaaccaacaaccaccagggaagaaaccattccttcgaaatttacttccccgaacaccaacctgccaaagctcaacagactgcagcccttatgcccggatcctacgctcacggcgttcccctttactcaaatctgggccttttggcaaaaagtactaaggctgtggggaaagagaagagcagtcatggccctgaggtgggtcagctactctcctgaagaaataggtctcttttatgctttaccatatatcaggaattatatccaggatgcaatactcagacactagcttttttctcacttttgtattataaccacctatgtaatctcatgttgttgtttttttttatttacttatatgatttctatgcacacaaaaacagttatattaaagatattattgttcacattttttattgaattccaaatgtagcaaaatcattaaaacaaattataaaagggacag

SEQ ID NO: 369955 - DNA, 4632 bp, Homo sapiens
cgccccctttccttacgcggattggtagctgcaggcttccctatctgattggccgaacgaacgcagcgcgtaatttaaaatattgtatctgtaacaaagctgcacctcgtgggcggagttgtgctctgcggctgcgaaagtccagcttcggcgactaggtgtgagtaagccagtatcccaggaggagcaagtggcacgtcttcggacctaggctgcccctgccgtcatgtcgcaagggatcctttctccgccagcgggcttgctgtccgatgacgatgtcgtagtttctcccatgtttgagtccacagctgcagatttggggtctgtggtacgcaagaacctgctatcagactgctctgtcgtctctacctccctagaggacaagcagcaggttccatctgaggacagtatggagaaggtgaaagtatacttgagggttaggcccttgttaccttcagagttggaacgacaggaagatcagggttgtgtccgtattgagaatgtggagacccttgttctacaagcacccaaggactcttttgccctgaagagcaatgaacggggaattggccaagccacacacaggttcaccttttcccagatctttgggccagaagtgggacaggcatccttcttcaacctaactgtgaaggagatggtaaaggatgtactcaaagggcagaactggctcatctatacatatggagtcactaactcagggaaaacccacacgattcaaggtaccatcaaggatggagggattctcccccggtccctggcgctgatcttcaatagcctccaaggccaacttcatccaacacctgatctgaagcccttgctctccaatgaggtaatctggctagacagcaagcagatccgacaggaggaaatgaagaagctgtccctgctaaatggaggcctccaagaggaggagctgtccacttccttgaagaggagtgtctacatcgaaagtcggataggtaccagcaccagcttcgacagtggcattgctgggctctcttctatcagtcagtgtaccagcagtagccagctggatgaaacaagtcatcgatgggcacagccagacactgccccactacctgtcccggcaaacattcgcttctccatctggatctcattctttgagatctacaacgaactgctttatgacctattagaaccgcctagccaacagcgcaagaggcagactttgcggctatgcgaggatcaaaatggcaatccctatgtgaaagatctcaactggattcatgtgcaagatgctgaggaggcctggaagctcctaaaagtgggtcgtaagaaccagagctttgccagcacccacctcaaccagaactccagccgcagtcacagcatcttctcaatcaggatcctacaccttcagggggaaggagatatagtccccaagatcagcgagctgtcactctgtgatctggctggctcagagcgctgcaaagatcagaagagtggtgaacggttgaaggaagcaggaaacattaacacctctctacacaccctgggccgctgtattgctgcccttcgtcaaaaccagcagaaccggtcaaagcagaacctggttcccttccgtgacagcaagttgactcgagtgttccaaggtttcttcacaggccgaggccgttcctgcatgattgtcaatgtgaatccctgtgcatctacctatgatgaaactcttcatgtggccaagttctcagccattgctagccagcttgtgcatgccccacctatgcaactgggattcccatccctgcactcgttcatcaaggaacatagtcttcaggtatcccccagcttagagaaaggggctaaggcagacacaggccttgatgatgatattgaaaatgaagctgacatctccatgtatggcaaagaggagctcctacaagttgtggaagccatgaagacactgcttttgaaggaacgacaggaaaagctacagctggagatgcatctccgagatgaaatttgcaatgagatggtagaacagatgcaacagcgggaacagtggtgcagtgaacatttggacacccaaaaggaactattggaggaaatgtatgaagaaaaactaaatatcctcaaggagtcactgacaagtttttaccaagaagagattcaggagcgggatgaaaagattgaagagctagaagctctcttgcaggaagccagacaacagtcagtggcccatcagcaatcagggtctgaattggccctacggcggtcacaaaggttggcagcttctgcctccacccagcagcttcaggaggttaaagctaaattacagcagtgcaaagcagagctaaactctaccactgaagagttgcataagtatcagaaaatgttagaaccaccaccctcagccaagcccttcaccattgatgtggacaagaagttagaagagggccagaagaatataaggctgttgcggacagagcttcagaaacttggtgagtctctccaatcagcagagagagcttgttgccacagcactggggcaggaaaacttcgtcaagccttgaccacttgtgatgacatcttaatcaaacaggaccagactctggctgaactgcagaacaacatggtgctagtgaaactggaccttcggaagaaggcagcatgtattgctgagcagtatcatactgtgttgaaactccaaggccaggtttctgccaaaaagcgccttggtaccaaccaggaaaatcagcaaccaaaccaacaaccaccagggaagaaaccattccttcgaaatttacttccccgaacaccaacctgccaaagctcaacagactgcagcccttatgcccggatcctacgctcacggcgttcccctttactcaaatctgggccttttggcaaaaagtactaaggctgtggggaaagagaagagcagtcatggccctgaggtgggtcagctactctcctgaagaaataggtctcttttatgctttaccatatatcaggaattatatccaggatgcaatactcagacactagcttttttctcacttttgtattataaccacctatgtaatctcatgttgttgtttttttttatttacttatatgatttctatgcacacaaaaacagttatattaaagatattattgttcacattttttattgaattccaaatgtagcaaaatcattaaaacaaattataaaagggacagaaaaattaagaatcaaacatcattctggaccatgggaaccttgaaaaggcatggcagtggagaccagtaactagtatacagcttgcctgagaaggcttagtaacaaatgaattcaagtcgtattagatattctaaaccttccttaatataagatgaagtgtcatatgttaggaggtaaaaacgtaacacaaaattctgggaataagaataaagtctggaccctgagctcagaatgatccatagcatctactgtgcaaatatattacagcagacattatagcatattacctcctgctgtacacacatgcacaggcctgaaactctccaagagcaccataagaatgattccctttacctcatctagataaaggctgaaaaaaatgtattctgttgcagatgggagggaaaaaaatagacaattacgttgaaaatttattaaaacagaccagcttgaagtgagtttattcttgtctgtataatcaccaatgttatttccaaatgtccgtgaaattatctataatcctatctccttgcttgctttggtaggagtatagctaacaatatagccatcttttgccctcagtaagggctatcagcagttccaagctctgtgagattatttttgcccttcttttattcaactctagttgaataaagttacttccaatttgaaagctttagaagacccccccaaaactgttttggaagattgtctccctagagagtaagaacaaatggatagctctattccatttaaacctaatctctgacatcagaatagggatcatgctcagcaaatccaagagcaaggtcatttgtataccattgctctgacttcttcctagggtactcagtgccctactgccagctcagggtagagtggcagactttcctcctttctttcactctcagcagcattgaaactttgttcctgtagcattgcctgtgctaaagtgctataaaagggactttcttgggggcccaaaaaaaaaaagcattcagggaagaaggccaagatctatagccactctttggacataagtgagacagaagtacttctaactggcaagataatgtctgttcctgccaggattctgtcagttggcctctgaaggtaattatacaagctgtccctatggagctgttgccatctgtagaaacaagaagagctgaggtccttggaacagacgtgctgttctttacatggaggtaaggcttaattaagatgggtctaacaatgtgctggcttgagagtagccaactatggcgtgacagaagacaagttgagtggagaaactctgcgtgtgggggtattgttagcagagagtgaagcaggtaggaaaaagggagcaggcacctcggtggtaggagtctcgccttggttccgaagctgtaggatttgccggagtaaggccttaccttcttccc

SEQ ID NO: 369956 - DNA, 4433 bp, Homo sapiens
cgccccctttccttacgcggattggtagctgcaggcttccctatctgattggccgaacgaacgcagcgcgtaatttaaaatattgtatctgtaacaaagctgcacctcgtgggcggagttgtgctctgcggctgcgaaagtccagcttcggcgactaggtgtgagtaagccagtatcccaggaggagcaagtggcacgtcttcggacctaggctgcccctgccgtcatgtcgcaagggatcctttctccgccagcgggcttgctgtccgatgacgatgtcgtagtttctcccatgtttgagtccacagctgcagatttggggtctgtggtacgcaagaacctgctatcagactgctctgtcgtctctacctccctagaggacaagcagcaggttccatctgaggacagtatggagaaggtgaaagtatacttgagggttaggcccttgttaccttcagagttggaacgacaggaagatcagggttgtgtccgtattgagaatgtggagacccttgttctacaagcacccaaggactcttttgccctgaagagcaatgaacggggaattggccaagccacacacaggttcaccttttcccagatctttgggccagaagtgggacaggcatccttcttcaacctaactgtgaaggagatggtaaaggatgtactcaaagggcagaactggctcatctatacatatggagtcactaactcagggaaaacccacacgattcaaggtaccatcaaggatggagggattctcccccggtccctggcgctgatcttcaatagcctccaaggccaacttcatccaacacctgatctgaagcccttgctctccaatgaggtaatctggctagacagcaagcagatccgacaggaggaaatgaagaagctgtccctgctaaatggaggcctccaagaggaggagctgtccacttccttgaagaggagtgtctacatcgaaagtcggataggtaccagcaccagcttcgacagtggcattgctgggctctcttctatcagtcagtgtaccagcagtagccagctggatgaaacaagtcatcgatgggcacagccagacactgccccactacctgtcccggcaaacattcgcttctccatctggatctcattctttgagatctacaacgaactgctttatgacctattagaaccgcctagccaacagcgcaagaggcagactttgcggctatgcgaggatcaaaatggcaatccctatgtgaaagatctcaactggattcatgtgcaagatgctgaggaggcctggaagctcctaaaagtgggtcgtaagaaccagagctttgccagcacccacctcaaccagaactccagccgcagtcacagcatcttctcaatcaggatcctacaccttcagggggaaggagatatagtccccaagatcagcgagctgtcactctgtgatctggctggctcagagcgctgcaaagatcagaagagtggtgaacggttgaaggaagcaggaaacattaacacctctctacacaccctgggccgctgtattgctgcccttcgtcaaaaccagcagaaccggtcaaagcagaacctggttcccttccgtgacagcaagttgactcgagtgttccaaggtttcttcacaggccgaggccgttcctgcatgattgtcaatgtgaatccctgtgcatctacctatgatgaaactcttcatgtggccaagttctcagccattgctagccagcttgtgcatgccccacctatgcaactgggattcccatccctgcactcgttcatcaaggaacatagtcttcaggtatcccccagcttagagaaaggggctaaggcagacacaggccttgatgatgatattgaaaatgaagctgacatctccatgtatggcaaagaggagctcctacaagttgtggaagccatgaagacactgcttttgaaggaacgacaggaaaagctacagctggagatgcatctccgagatgaaatttgcaatgagatggtagaacagatgcaacagcgggaacagtggtgcagtgaacatttggacacccaaaaggaactattggaggaaatgtatgaagaaaaactaaatatcctcaaggagtcactgacaagtttttaccaagaagagattcagagttgcataagtatcagaaaatgttagaaccaccaccctcagccaagcccttcaccattgatgtggacaagaagttagaagagggccagaagaatataaggctgttgcggacagagcttcagaaacttggtgagtctctccaatcagcagagagagcttgttgccacagcactggggcaggaaaacttcgtcaagccttgaccacttgtgatgacatcttaatcaaacaggaccagactctggctgaactgcagaacaacatggtgctagtgaaactggaccttcggaagaaggcagcatgtattgctgagcagtatcatactgtgttgaaactccaaggccaggtttctgccaaaaagcgccttggtaccaaccaggaaaatcagcaaccaaaccaacaaccaccagggaagaaaccattccttcgaaatttacttccccgaacaccaacctgccaaagctcaacagactgcagcccttatgcccggatcctacgctcacggcgttcccctttactcaaatctgggccttttggcaaaaagtactaaggctgtggggaaagagaagagcagtcatggccctgaggtgggtcagctactctcctgaagaaataggtctcttttatgctttaccatatatcaggaattatatccaggatgcaatactcagacactagcttttttctcacttttgtattataaccacctatgtaatctcatgttgttgtttttttttatttacttatatgatttctatgcacacaaaaacagttatattaaagatattattgttcacattttttattgaattccaaatgtagcaaaatcattaaaacaaattataaaagggacagaaaaattaagaatcaaacatcattctggaccatgggaaccttgaaaaggcatggcagtggagaccagtaactagtatacagcttgcctgagaaggcttagtaacaaatgaattcaagtcgtattagatattctaaaccttccttaatataagatgaagtgtcatatgttaggaggtaaaaacgtaacacaaaattctgggaataagaataaagtctggaccctgagctcagaatgatccatagcatctactgtgcaaatatattacagcagacattatagcatattacctcctgctgtacacacatgcacaggcctgaaactctccaagagcaccataagaatgattccctttacctcatctagataaaggctgaaaaaaatgtattctgttgcagatgggagggaaaaaaatagacaattacgttgaaaatttattaaaacagaccagcttgaagtgagtttattcttgtctgtataatcaccaatgttatttccaaatgtccgtgaaattatctataatcctatctccttgcttgctttggtaggagtatagctaacaatatagccatcttttgccctcagtaagggctatcagcagttccaagctctgtgagattatttttgcccttcttttattcaactctagttgaataaagttacttccaatttgaaagctttagaagacccccccaaaactgttttggaagattgtctccctagagagtaagaacaaatggatagctctattccatttaaacctaatctctgacatcagaatagggatcatgctcagcaaatccaagagcaaggtcatttgtataccattgctctgacttcttcctagggtactcagtgccctactgccagctcagggtagagtggcagactttcctcctttctttcactctcagcagcattgaaactttgttcctgtagcattgcctgtgctaaagtgctataaaagggactttcttgggggcccaaaaaaaaaaagcattcagggaagaaggccaagatctatagccactctttggacataagtgagacagaagtacttctaactggcaagataatgtctgttcctgccaggattctgtcagttggcctctgaaggtaattatacaagctgtccctatggagctgttgccatctgtagaaacaagaagagctgaggtccttggaacagacgtgctgttctttacatggaggtaaggcttaattaagatgggtctaacaatgtgctggcttgagagtagccaactatggcgtgacagaagacaagttgagtggagaaactctgcgtgtgggggtattgttagcagagagtgaagcaggtaggaaaaagggagcaggcacctcggtggtaggagtctcgccttggttccgaagctgtaggatttgccggagtaaggccttaccttcttccc

SEQ ID NO: 369957 - DNA, 3232 bp, Homo sapiens
cgccccctttccttacgcggattggtagctgcaggcttccctatctgattggccgaacgaacgcagcgcgtaatttaaaatattgtatctgtaacaaagctgcacctcgtgggcggagttgtgctctgcggctgcgaaagtccagcttcggcgactaggtgtgagtaagccagtatcccaggaggagcaagtggcacgtcttcggacctaggctgcccctgccgtcatgtcgcaagggatcctttctccgccagcgggcttgctgtccgatgacgatgtcgtagtttctcccatgtttgagtccacagctgcagatttggggtctgtggtacgcaagaacctgctatcagactgctctgtcgtctctacctccctagaggacaagcagcaggttccatctgaggacagtatggagaaggtgaaagtatacttgagggttaggcccttgttaccttcagagttggaacgacaggaagatcagggttgtgtccgtattgagaatgtggagacccttgttctacaagcacccaaggactcttttgccctgaagagcaatgaacggggaattggccaagccacacacaggttcaccttttcccagatctttgggccagaagtgggacaggcatccttcttcaacctaactgtgaaggagatggtaaaggatgtactcaaagggcagaactggctcatctatacatatggagtcactaactcagggaaaacccacacgattcaaggtaccatcaaggatggagggattctcccccggtccctggcgctgatcttcaatagcctccaaggccaacttcatccaacacctgatctgaagcccttgctctccaatgaggtaatctggctagacagcaagcagatccgacaggaggaaatgaagaagctgtccctgctaaatggaggcctccaagaggaggagctgtccacttccttgaagaggagtgtctacatcgaaagtcggataggtaccagcaccagcttcgacagtggcattgctgggctctcttctatcagtcagtgtaccagcagtagccagctggatgaaacaagtcatcgatgggcacagccagacactgccccactacctgtcccggcaaacattcgcttctccatctggatctcattctttgagatctacaacgaactgctttatgacctattagaaccgcctagccaacagcgcaagaggcagactttgcggctatgcgaggatcaaaatggcaatccctatgtgaaagatctcaactggattcatgtgcaagatgctgaggaggcctggaagctcctaaaagtgggtcgtaagaaccagagctttgccagcacccacctcaaccagaactccagccgcagtcacagcatcttctcaatcaggatcctacaccttcagggggaaggagatatagtccccaagatcagcgagctgtcactctgtgatctggctggctcagagcgctgcaaagatcagaagagtggtgaacggttgaaggaagcaggaaacattaacacctctctacacaccctgggccgctgtattgctgcccttcgtcaaaaccagcagaaccggtcaaagcagaacctggttcccttccgtgacagcaagttgactcgagtgttccaaggtttcttcacaggccgaggccgttcctgcatgattgtcaatgtgaatccctgtgcatctacctatgatgaaactcttcatgtggccaagttctcagccattgctagccagcttgtgcatgccccacctatgcaactgggattcccatccctgcactcgttcatcaaggaacatagtcttcaggtatcccccagcttagagaaaggggctaaggcagacacaggccttgatgatgatattgaaaatgaagctgacatctccatgtatggcaaagaggagctcctacaagttgtggaagccatgaagacactgcttttgaaggaacgacaggaaaagctacagctggagatgcatctccgagatgaaatttgcaatgagatggtagaacagatgcaacagcgggaacagtggtgcagtgaacatttggacacccaaaaggaactattggaggaaatgtatgaagaaaaactaaatatcctcaaggagtcactgacaagtttttaccaagaagagattcaggagcgggatgaaaagattgaagagctagaagctctcttgcaggaagccagacaacagtcagtggcccatcagcaatcagggtctgaattggccctacggcggtcacaaaggttggcagcttctgcctccacccagcagcttcaggaggttaaagctaaattacagcagtgcaaagcagagctaaactctaccactgaagagttgcataagtatcagaaaatgttagaaccaccaccctcagccaagcccttcaccattgatgtggacaagaagttagaagagggccagaagaatataaggctgttgcggacagagcttcagaaacttggtgagtctctccaatcagcagagagagcttgttgccacagcactggggcaggaaaacttcgtcaagccttgaccacttgtgatgacatcttaatcaaacaggaccagactctggctgaactgcagaacaacatggtgctagtgaaactggaccttcggaagaaggcagcatgtattgctgagcagtatcatactgtgttgaaactccaaggccaggtttctgccaaaaagcgccttggtaccaaccaggaaaatcagcaaccaaaccaacaaccaccagggaagaaaccattccttcgaaatttacttccccgaacaccaacctgccaaagctcaacagactgcagcccttatgcccggatcctacgctcacggcgttcccctttactcaaatctgggccttttggcaaaaagtactaaggctgtggggaaagagaagagcagtcatggccctgaggtgggtcagctactctcctgaagaaataggtctcttttatgctttaccatatatcaggaattatatccaggatgcaatactcagacactagcttttttctcacttttgtattataaccacctatgtaatctcatgttgttgtttttttttatttacttatatgatttctatgcacacaaaaacagttatattaaaaatgtgaacgataatatctttaatataactgttttgtgtgcatgaaatcatatcacgtcaatgaagaacagttatattaaagatattattgttcacatttt

SEQ ID NO: 369958 - DNA, 2120 bp, Homo sapiens
tcagctaattcgtgggatgggaacctgcgtctgtggcaataccgccaggctgagtacttccatgattacgtgatcagcagtctcaggaatgtgcaagcgcccctgccccagtgccccaatcctctacacccttttcctcaccccagtagatccaacctccagccccatatagggtgaacctcttgataagctctctgcctcctcctccctttcttcccggattggcgaccatttcaacaaccaccagggaagaaaccattccttcgaaatttacttccccgaacaccaacctgccaaagctcaacagactgcagcccttatgcccggatcctacgctcacggcgttcccctttactcaaatctgggccttttggcaaaaagtactaaggctgtggggaaagagaagagcagtcatggccctgaggtgggtcagctactctcctgaagaaataggtctcttttatgctttaccatatatcaggaattatatccaggatgcaatactcagacactagcttttttctcacttttgtattataaccacctatgtaatctcatgttgttgtttttttttatttacttatatgatttctatgcacacaaaaacagttatattaaagatattattgttcacattttttattgaattccaaatgtagcaaaatcattaaaacaaattataaaagggacagaaaaattaagaatcaaacatcattctggaccatgggaaccttgaaaaggcatggcagtggagaccagtaactagtatacagcttgcctgagaaggcttagtaacaaatgaattcaagtcgtattagatattctaaaccttccttaatataagatgaagtgtcatatgttaggaggtaaaaacgtaacacaaaattctgggaataagaataaagtctggaccctgagctcagaatgatccatagcatctactgtgcaaatatattacagcagacattatagcatattacctcctgctgtacacacatgcacaggcctgaaactctccaagagcaccataagaatgattccctttacctcatctagataaaggctgaaaaaaatgtattctgttgcagatgggagggaaaaaaatagacaattacgttgaaaatttattaaaacagaccagcttgaagtgagtttattcttgtctgtataatcaccaatgttatttccaaatgtccgtgaaattatctataatcctatctccttgcttgctttggtaggagtatagctaacaatatagccatcttttgccctcagtaagggctatcagcagttccaagctctgtgagattatttttgcccttcttttattcaactctagttgaataaagttacttccaatttgaaagctttagaagacccccccaaaactgttttggaagattgtctccctagagagtaagaacaaatggatagctctattccatttaaacctaatctctgacatcagaatagggatcatgctcagcaaatccaagagcaaggtcatttgtataccattgctctgacttcttcctagggtactcagtgccctactgccagctcagggtagagtggcagactttcctcctttctttcactctcagcagcattgaaactttgttcctgtagcattgcctgtgctaaagtgctataaaagggactttcttgggggcccaaaaaaaaaaagcattcagggaagaaggccaagatctatagccactctttggacataagtgagacagaagtacttctaactggcaagataatgtctgttcctgccaggattctgtcagttggcctctgaaggtaattatacaagctgtccctatggagctgttgccatctgtagaaacaagaagagctgaggtccttggaacagacgtgctgttctttacatggaggtaaggcttaattaagatgggtctaacaatgtgctggcttgagagtagccaactatggcgtgacagaagacaagttgagtggagaaactctgcgtgtgggggtattgttagcagagagtgaagcaggtaggaaaaagggagcaggcacctcggtggtaggagtctcgccttggttccgaagctgtaggatttgccggagtaaggccttaccttcttccc

SEQ ID NO: 369959 - DNA, 393 bp, Homo sapiens
gccccttctgtccctaaaggttcttctccctgcccactttttggtctctttttagacctaggctgcccctgccgtcatgtcgcaagggatcctttctccgccagcgggcttgctgtccgatgacgatgtcgtagtttctcccatgtttgagtccacagctgcagatttggggtctgtggtacgcaagaacctgctatcagactgctctgtcgtctctacctccctagaggacaagcagcaggtaaaggaactggggagtggctggggcggaaagtgatatcctcaggccaataattgtccatacagggtagtatgaggtcaaagactagcaatcctaaaggtctgagatcaattcaaaattaagggcatttaggacaaaatggctatgaaaag

SEQ ID NO: 369960 - DNA, 5089 bp, Homo sapiens
cgccccctttccttacgcggattggtagctgcaggcttccctatctgattggccgaacgaacgcagcgcgtaatttaaaatattgtatctgtaacaaagctgcacctcgtgggcggagttgtgctctgcggctgcgaaagtccagcttcggcgactaggtgtgagtaagccagtatcccaggaggagcaagtggcacgtcttcgggtgagtgtgcggctgtgctggagcccgggttaccagctcttgcccgcgcggaataggctttaagaaatcggagctgcagccatctgtttttctcttaatgctgcatctctgttctcacggtggtccttggggtgaggttagagaaggagccgagggatcctgacaccacctccacagcaccggcgggcgaggtgccctactttaggcgtagccttctgcttttggagccagatgtctgtggacttctgttcgcgttcagaaatgccgcctcaaacttctctcaattgttcattaagtgaacttctctcattcccttcccctttgccgataattggaggggaaaagaagtaggaagcgggacacggtgtcctggggcaagggacttattacctaaaattcgcggccccttctgtccctaaaggttcttctccctgcccactttttggtctctttttagacctaggctgcccctgccgtcatgtcgcaagggatcctttctccgccagcgggcttgctgtccgatgacgatgtcgtagtttctcccatgtttgagtccacagctgcagatttggggtctgtggtacgcaagaacctgctatcagactgctctgtcgtctctacctccctagaggacaagcagcaggttccatctgaggacagtatggagaaggtgaaagtatacttgagggttaggcccttgttaccttcagagttggaacgacaggaagatcagggttgtgtccgtattgagaatgtggagacccttgttctacaagcacccaaggactcttttgccctgaagagcaatgaacggggaattggccaagccacacacaggttcaccttttcccagatctttgggccagaagtgggacaggcatccttcttcaacctaactgtgaaggagatggtaaaggatgtactcaaagggcagaactggctcatctatacatatggagtcactaactcagggaaaacccacacgattcaaggtaccatcaaggatggagggattctcccccggtccctggcgctgatcttcaatagcctccaaggccaacttcatccaacacctgatctgaagcccttgctctccaatgaggtaatctggctagacagcaagcagatccgacaggaggaaatgaagaagctgtccctgctaaatggaggcctccaagaggaggagctgtccacttccttgaagaggagtgtctacatcgaaagtcggataggtaccagcaccagcttcgacagtggcattgctgggctctcttctatcagtcagtgtaccagcagtagccagctggatgaaacaagtcatcgatgggcacagccagacactgccccactacctgtcccggcaaacattcgcttctccatctggatctcattctttgagatctacaacgaactgctttatgacctattagaaccgcctagccaacagcgcaagaggcagactttgcggctatgcgaggatcaaaatggcaatccctatgtgaaagatctcaactggattcatgtgcaagatgctgaggaggcctggaagctcctaaaagtgggtcgtaagaaccagagctttgccagcacccacctcaaccagaactccagccgcagtcacagcatcttctcaatcaggatcctacaccttcagggggaaggagatatagtccccaagatcagcgagctgtcactctgtgatctggctggctcagagcgctgcaaagatcagaagagtggtgaacggttgaaggaagcaggaaacattaacacctctctacacaccctgggccgctgtattgctgcccttcgtcaaaaccagcagaaccggtcaaagcagaacctggttcccttccgtgacagcaagttgactcgagtgttccaaggtttcttcacaggccgaggccgttcctgcatgattgtcaatgtgaatccctgtgcatctacctatgatgaaactcttcatgtggccaagttctcagccattgctagccagcttgtgcatgccccacctatgcaactgggattcccatccctgcactcgttcatcaaggaacatagtcttcaggtatcccccagcttagagaaaggggctaaggcagacacaggccttgatgatgatattgaaaatgaagctgacatctccatgtatggcaaagaggagctcctacaagttgtggaagccatgaagacactgcttttgaaggaacgacaggaaaagctacagctggagatgcatctccgagatgaaatttgcaatgagatggtagaacagatgcaacagcgggaacagtggtgcagtgaacatttggacacccaaaaggaactattggaggaaatgtatgaagaaaaactaaatatcctcaaggagtcactgacaagtttttaccaagaagagattcaggagcgggatgaaaagattgaagagctagaagctctcttgcaggaagccagacaacagtcagtggcccatcagcaatcagggtctgaattggccctacggcggtcacaaaggttggcagcttctgcctccacccagcagcttcaggaggttaaagctaaattacagcagtgcaaagcagagctaaactctaccactgaagagttgcataagtatcagaaaatgttagaaccaccaccctcagccaagcccttcaccattgatgtggacaagaagttagaagagggccagaagaatataaggctgttgcggacagagcttcagaaacttggtgagtctctccaatcagcagagagagcttgttgccacagcactggggcaggaaaacttcgtcaagccttgaccacttgtgatgacatcttaatcaaacaggaccagactctggctgaactgcagaacaacatggtgctagtgaaactggaccttcggaagaaggcagcatgtattgctgagcagtatcatactgtgttgaaactccaaggccaggtttctgccaaaaagcgccttggtaccaaccaggaaaatcagcaaccaaaccaacaaccaccagggaagaaaccattccttcgaaatttacttccccgaacaccaacctgccaaagctcaacagactgcagcccttatgcccggatcctacgctcacggcgttcccctttactcaaatctgggccttttggcaaaaagtactaaggctgtggggaaagagaagagcagtcatggccctgaggtgggtcagctactctcctgaagaaataggtctcttttatgctttaccatatatcaggaattatatccaggatgcaatactcagacactagcttttttctcacttttgtattataaccacctatgtaatctcatgttgttgtttttttttatttacttatatgatttctatgcacacaaaaacagttatattaaagatattattgttcacattttttattgaattccaaatgtagcaaaatcattaaaacaaattataaaagggacagaaaaattaagaatcaaacatcattctggaccatgggaaccttgaaaaggcatggcagtggagaccagtaactagtatacagcttgcctgagaaggcttagtaacaaatgaattcaagtcgtattagatattctaaaccttccttaatataagatgaagtgtcatatgttaggaggtaaaaacgtaacacaaaattctgggaataagaataaagtctggaccctgagctcagaatgatccatagcatctactgtgcaaatatattacagcagacattatagcatattacctcctgctgtacacacatgcacaggcctgaaactctccaagagcaccataagaatgattccctttacctcatctagataaaggctgaaaaaaatgtattctgttgcagatgggagggaaaaaaatagacaattacgttgaaaatttattaaaacagaccagcttgaagtgagtttattcttgtctgtataatcaccaatgttatttccaaatgtccgtgaaattatctataatcctatctccttgcttgctttggtaggagtatagctaacaatatagccatcttttgccctcagtaagggctatcagcagttccaagctctgtgagattatttttgcccttcttttattcaactctagttgaataaagttacttccaatttgaaagctttagaagacccccccaaaactgttttggaagattgtctccctagagagtaagaacaaatggatagctctattccatttaaacctaatctctgacatcagaatagggatcatgctcagcaaatccaagagcaaggtcatttgtataccattgctctgacttcttcctagggtactcagtgccctactgccagctcagggtagagtggcagactttcctcctttctttcactctcagcagcattgaaactttgttcctgtagcattgcctgtgctaaagtgctataaaagggactttcttgggggcccaaaaaaaaaaagcattcagggaagaaggccaagatctatagccactctttggacataagtgagacagaagtacttctaactggcaagataatgtctgttcctgccaggattctgtcagttggcctctgaaggtaattatacaagctgtccctatggagctgttgccatctgtagaaacaagaagagctgaggtccttggaacagacgtgctgttctttacatggaggtaaggcttaattaagatgggtctaacaatgtgctggcttgagagtagccaactatggcgtgacagaagacaagttgagtggagaaactctgcgtgtgggggtattgttagcagagagtgaagcaggtaggaaaaagggagcaggcacctcggtggtaggagtctcgccttggttccgaagctgtaggatttgccggagtaaggccttaccttcttccc

SEQ ID NO: 369961 - DNA, 3047 bp, Homo sapiens
tgggggcgggccgggggcggagcgcggggcgccggctgctctggcggctcccgcggctccggctggcggcttcgggccctgcacctgtgactctcggccgcgctcgccctcggcccgcccggcgccgcagccccatggccccgtccaggctgcagctcggcctccgcgccgcctactccggcatcagctccgtggccggcttctccatcttcctcgtctggacggtggtctaccgacagccggggaccgcggccatgggagggctcgcaggggtgctggcactgtgggtcctggtgacgcacgtgatgtacatgcaagattattggaggacctggctcaaggggctgcgcggcttcttcttcgtgggcgtcctcttctcggccgtctccatcgctgccttctgcaccttcctcgtgctggccatcacccggcatcagagcctcacagaccccaccagctactacctctccagcgtctggagcttcatttccttcaagtgggccttcctgctcagcctctatgcccaccgctaccgggctgactttgctgacatcagcatcctcagcgatttctgacccagggggtgaggtctctgcaccctgggggggccttaggacctggactcagcctctgagatgttgggagaggctactcccaccccctggtgaccccagaactgtggcagaaaatacacagcaggacgagtgtggtctcccaggaagctgtcctgcccgtcccctttcgaggaaacctgagtgtggtagagaggggatcctgccatgttgctcctcatcagcctggccagagggcagctttagaccttttcaaatgaatctgttttcttttctttcttttttttttcttttttttttttttttgagatggagtcttactctgtcacccaggctggagtgcagtagtgcgatctcagctcactgcaacctccgcctcccaggttcaagcaattctcctgccttggcctctcaagtagctgggattacaggcatctgccaccatgcccggcaaatttttgtgtttttagtagagacagggttttgccatgttggccaggctggtctcgaactcctgatctcaggtgattcacccgcctcagccttccaaagtgctgggattataggtgtgagccaccgtgcccggcctggatctgttttcttagcacgcagtgaggaatctttgtacttaaggccagggcaacaaagtcaagaggtcaaggtgtagggccatgaggcctggacctatgctgcaggcaagggtttccatccccgctgccctaggcactctcttcccaaggccaggttgggcacctggggaggtcagttcagaaatatctagcagagacctcttaaacccccatcccagcaccccatcctgttgttcccagagctggtctcccatgagtgtgctagagccagatagccgtggccccccacccatctcactcacacacacaggcatccatacaccccagaagacttcccaaatgaggccagactcagggtcacggggaatgtgcttctgcccctgtaagggctttggggaagggggcaacatagtagaggctggaaagagcccccaaacctgtacccatgcccctccagccctgcgtttccattctgccttctcagagtgcccttgctgcacccagaccaccggccaggagagaccttctctcccactccagcccctctcactgcccttcaactagagctttcacctttttacatttcccttctgaaggacacaaatctgcttttctgcccatacactggcccaagggctcacctaacttgggagggaaggggctgttggtacaaggatgattttctgttagactgccattttgcacggtctcccccttcccatctgatgtgtcctgcccctcagctctttgccttatctgtgtcactgtcactttagcaaaaatacagcggccatttgtatcagcctctggtggttgcttgtgaggtgggactcttgcgggaacaggtggactttgggaggagtgggcagggagggagtggtagtggcagttctcgagctatctgattaagccattccgctagttcagttgtgccctggagggcaggggacagagtcagtatctctggggctgcaggccctcttgccttggccctcctggcatggggtaaccaccagctcagctctcctcctccagctttcctctctctagcacaccccagccagggcaaggatgcccacgggcatagctacagcaacccctgcgggatttggtgtccacacccgagaggccaggccagatgggaaagggattagcgcctcttccctcacactctgccaggctgccaggagcttgggccaggtctaaggtaatgaggtgctcctcttcctgctggaaaaaccggacagactcagaaccacaaaggcaggtgctgccagcctggcgccttcctctctgcttaggctgggtgagcttgtccaggcctgtgcctcaccccttctctcttctaggctcagtgtatgcttaatcaggcatggtgcatcagagcgggaaggagccatcaacagtgtatacttctggagccttctactgataaacagaggccccagaagacgatttgacttacctgagctcccagctgggacttaaacccaggtgtgtctgagtcacaactcttcggggatgccgtggtgagctggggctgagctcctgtattcccactcccccaccccacccccactcctgccatatcagggctggtctctgtggactcagcccagggctgcctcctctttgtcaccccaaagtggggcagccagggacagccagggtgtgttcagaatgggttcttcctgcagggcaggaagggcagattgttaaaggggctgcggcccagaccaccctggtccctcctccggcagtgactcagacccacactgtgccgtgcagctgtgtgccctgcacacccgcttgacggcgcactgctcacttctggggggccctttcagaggcacttttaaagcaaataaaacatttattgttcaaa

SEQ ID NO: 369962 - DNA, 3237 bp, Homo sapiens
ccaccttacccaccttcatgtttcttttcaagctcgcacagccgtgcaggctctagcaaaaggctggggggtccccagcgacccccatcagctttgataaggggatccggagggtgccagtgggtcatctgctgtgtccacacattaagaaacgctggtggagttttaaatgcctctccggggaaggaggaaagcctgagaatgaatctgacctcagacccaaatccattcaacggagttctggtaatttggaagaaggaagagcaacctggaaactgacaggaaaggatgacaagttgggagtcacaggtatatgatgggcctccccatgtggatccttagtgctgtggcagagcccttgttattgtgctgggattttccctccagctcccggccggaagctgggctcacgtgggagctcagtgccctcctgctacagatctgtctcttccttacaatggggtgctggcactgtgggtcctggtgacgcacgtgatgtacatgcaagattattggaggacctggctcaaggggctgcgcggcttcttcttcgtgggcgtcctcttctcggccgtctccatcgctgccttctgcaccttcctcgtgctggccatcacccggcatcagagcctcacagaccccaccagctactacctctccagcgtctggagcttcatttccttcaagtgggccttcctgctcagcctctatgcccaccgctaccgggctgactttgctgacatcagcatcctcagcgatttctgacccagggggtgaggtctctgcaccctgggggggccttaggacctggactcagcctctgagatgttgggagaggctactcccaccccctggtgaccccagaactgtggcagaaaatacacagcaggacgagtgtggtctcccaggaagctgtcctgcccgtcccctttcgaggaaacctgagtgtggtagagaggggatcctgccatgttgctcctcatcagcctggccagagggcagctttagaccttttcaaatgaatctgttttcttttctttcttttttttttcttttttttttttttttgagatggagtcttactctgtcacccaggctggagtgcagtagtgcgatctcagctcactgcaacctccgcctcccaggttcaagcaattctcctgccttggcctctcaagtagctgggattacaggcatctgccaccatgcccggcaaatttttgtgtttttagtagagacagggttttgccatgttggccaggctggtctcgaactcctgatctcaggtgattcacccgcctcagccttccaaagtgctgggattataggtgtgagccaccgtgcccggcctggatctgttttcttagcacgcagtgaggaatctttgtacttaaggccagggcaacaaagtcaagaggtcaaggtgtagggccatgaggcctggacctatgctgcaggcaagggtttccatccccgctgccctaggcactctcttcccaaggccaggttgggcacctggggaggtcagttcagaaatatctagcagagacctcttaaacccccatcccagcaccccatcctgttgttcccagagctggtctcccatgagtgtgctagagccagatagccgtggccccccacccatctcactcacacacacaggcatccatacaccccagaagacttcccaaatgaggccagactcagggtcacggggaatgtgcttctgcccctgtaagggctttggggaagggggcaacatagtagaggctggaaagagcccccaaacctgtacccatgcccctccagccctgcgtttccattctgccttctcagagtgcccttgctgcacccagaccaccggccaggagagaccttctctcccactccagcccctctcactgcccttcaactagagctttcacctttttacatttcccttctgaaggacacaaatctgcttttctgcccatacactggcccaagggctcacctaacttgggagggaaggggctgttggtacaaggatgattttctgttagactgccattttgcacggtctcccccttcccatctgatgtgtcctgcccctcagctctttgccttatctgtgtcactgtcactttagcaaaaatacagcggccatttgtatcagcctctggtggttgcttgtgaggtgggactcttgcgggaacaggtggactttgggaggagtgggcagggagggagtggtagtggcagttctcgagctatctgattaagccattccgctagttcagttgtgccctggagggcaggggacagagtcagtatctctggggctgcaggccctcttgccttggccctcctggcatggggtaaccaccagctcagctctcctcctccagctttcctctctctagcacaccccagccagggcaaggatgcccacgggcatagctacagcaacccctgcgggatttggtgtccacacccgagaggccaggccagatgggaaagggattagcgcctcttccctcacactctgccaggctgccaggagcttgggccaggtctaaggtaatgaggtgctcctcttcctgctggaaaaaccggacagactcagaaccacaaaggcaggtgctgccagcctggcgccttcctctctgcttaggctgggtgagcttgtccaggcctgtgcctcaccccttctctcttctaggctcagtgtatgcttaatcaggcatggtgcatcagagcgggaaggagccatcaacagtgtatacttctggagccttctactgataaacagaggccccagaagacgatttgacttacctgagctcccagctgggacttaaacccaggtgtgtctgagtcacaactcttcggggatgccgtggtgagctggggctgagctcctgtattcccactcccccaccccacccccactcctgccatatcagggctggtctctgtggactcagcccagggctgcctcctctttgtcaccccaaagtggggcagccagggacagccagggtgtgttcagaatgggttcttcctgcagggcaggaagggcagattgttaaaggggctgcggcccagaccaccctggtccctcctccggcagtgactcagacccacactgtgccgtgcagctgtgtgccctgcacacccgcttgacggcgcactgctcacttctggggggccctttcagaggcacttttaaagcaaataaaacatttattgttcaaa

SEQ ID NO: 369963 - DNA, 2902 bp, Homo sapiens
  misc_feature (21)..(21): n is a, c, g, or t
  misc_feature (23)..(23): n is a, c, g, or t
aaaacctaggctagtacgagncnggtggtgaatcggccgaggctccgtggccggcttctccatcttcctcgtctggacggtggtctaccgacagccggggaccgcggccatgggagggctcgcaggggtgctggcactgtgggtcctggtgacgcacgtgatgtacatgcaagattattggaggacctggctcaaggggctgcgcggcttcttcttcgtgggcgtcctcttctcggccgtctccatcgctgccttctgcaccttcctcgtgctggccatcacccggcatcagagcctcacagaccccaccagctactacctctccagcgtctggagcttcatttccttcaagtgggccttcctgctcagcctctatgcccaccgctaccgggctgactttgctgacatcagcatcctcagcgatttctgacccagggggtgaggtctctgcaccctgggggggccttaggacctggactcagcctctgagatgttgggagaggctactcccaccccctggtgaccccagaactgtggcagaaaatacacagcaggacgagtgtggtctcccaggaagctgtcctgcccgtcccctttcgaggaaacctgagtgtggtagagaggggatcctgccatgttgctcctcatcagcctggccagagggcagctttagaccttttcaaatgaatctgttttcttttctttcttttttttttcttttttttttttttttgagatggagtcttactctgtcacccaggctggagtgcagtagtgcgatctcagctcactgcaacctccgcctcccaggttcaagcaattctcctgccttggcctctcaagtagctgggattacaggcatctgccaccatgcccggcaaatttttgtgtttttagtagagacagggttttgccatgttggccaggctggtctcgaactcctgatctcaggtgattcacccgcctcagccttccaaagtgctgggattataggtgtgagccaccgtgcccggcctggatctgttttcttagcacgcagtgaggaatctttgtacttaaggccagggcaacaaagtcaagaggtcaaggtgtagggccatgaggcctggacctatgctgcaggcaagggtttccatccccgctgccctaggcactctcttcccaaggccaggttgggcacctggggaggtcagttcagaaatatctagcagagacctcttaaacccccatcccagcaccccatcctgttgttcccagagctggtctcccatgagtgtgctagagccagatagccgtggccccccacccatctcactcacacacacaggcatccatacaccccagaagacttcccaaatgaggccagactcagggtcacggggaatgtgcttctgcccctgtaagggctttggggaagggggcaacatagtagaggctggaaagagcccccaaacctgtacccatgcccctccagccctgcgtttccattctgccttctcagagtgcccttgctgcacccagaccaccggccaggagagaccttctctcccactccagcccctctcactgcccttcaactagagctttcacctttttacatttcccttctgaaggacacaaatctgcttttctgcccatacactggcccaagggctcacctaacttgggagggaaggggctgttggtacaaggatgattttctgttagactgccattttgcacggtctcccccttcccatctgatgtgtcctgcccctcagctctttgccttatctgtgtcactgtcactttagcaaaaatacagcggccatttgtatcagcctctggtggttgcttgtgaggtgggactcttgcgggaacaggtggactttgggaggagtgggcagggagggagtggtagtggcagttctcgagctatctgattaagccattccgctagttcagttgtgccctggagggcaggggacagagtcagtatctctggggctgcaggccctcttgccttggccctcctggcatggggtaaccaccagctcagctctcctcctccagctttcctctctctagcacaccccagccagggcaaggatgcccacgggcatagctacagcaacccctgcgggatttggtgtccacacccgagaggccaggccagatgggaaagggattagcgcctcttccctcacactctgccaggctgccaggagcttgggccaggtctaaggtaatgaggtgctcctcttcctgctggaaaaaccggacagactcagaaccacaaaggcaggtgctgccagcctggcgccttcctctctgcttaggctgggtgagcttgtccaggcctgtgcctcaccccttctctcttctaggctcagtgtatgcttaatcaggcatggtgcatcagagcgggaaggagccatcaacagtgtatacttctggagccttctactgataaacagaggccccagaagacgatttgacttacctgagctcccagctgggacttaaacccaggtgtgtctgagtcacaactcttcggggatgccgtggtgagctggggctgagctcctgtattcccactcccccaccccacccccactcctgccatatcagggctggtctctgtggactcagcccagggctgcctcctctttgtcaccccaaagtggggcagccagggacagccagggtgtgttcagaatgggttcttcctgcagggcaggaagggcagattgttaaaggggctgcggcccagaccaccctggtccctcctccggcagtgactcagacccacactgtgccgtgcagctgtgtgccctgcacacccgcttgacggcgcactgctcacttctggggggccctttcagaggcacttttaaagcaaataaaacatttattgttcaaa

SEQ ID NO: 369964 - DNA, 2962 bp, Homo sapiens
tgggggcgggccgggggcggagcgcggggcgccggctgctctggcggctcccgcggctccggctggcggcttcgggccctgcacctgtgactctcggccgcgctcgccctcggcccgcccggcgccgcagccccatggccccgtccaggctgcagctcggcctccgcgccgcctactccggcatcagctccgtggccggcttctccatcttcctcgtctggacggtggtctaccgacagccggggaccgcggccatgggagggctcgcaggggtgctggcactgtgggtcctggtgacgcacgtgatgtacatgcaagattattggaggacctggctcaaggggctgcgcggcttcttcttcgtgggcgtcctcttctcggccgtctccatcgctgccttctgcaccttcctcgtgctggccatcacccggcatcagagcctcacagaccccaccagctactacctctccagcgtctggagcttcatttccttcaagtgggccttcctgctcagcctctatgcccaccgctaccgggctgactttgctgacatcagcatcctcagcgatttctgacccagggggtgaggtctctgcaccctgggggggccttaggacctggactcagcctctgagatgttgggagaggctactcccaccccctggtgaccccagaactgtggcagaaaatacacagcaggacgagtgtggtctcccaggaagctgtcctgcccgtcccctttcgaggaaacctgagtgtggtagagaggggatcctgccatgttgctcctcatcagcctggccagagggcagctttagaccttttcaaatgaatctgttttcttttctttcttttttttttcttttttttttttttttgagatggagtcttactctgtcacccaggctggagtgcagtagtgcgatctcagctcactgcaacctccgcctcccaggttcaagcaattctcctgccttggcctctcaagtagctgggattacaggcatctgccaccatgcccggcaaatttttgtgtttttagtagagacagggttttgccatgttggccaggctggtctcgaactcctgatctcaggtgattcacccgcctcagccttccaaagtgctgggattataggtgtgagccaccgtgcccggcctggatctgttttcttagcacgcagtgaggaatctttgtacttaaggccagggcaacaaagtcaagaggtcaaggtgtagggccatgaggcctggacctatgctgcaggcaagggtttccatccccgctgccctaggcactctcttcccaaggccaggttgggcacctggggaggtcagttcagaaatatctagcagagacctcttaaacccccatcccagcaccccatcctgtatacaccccagaagacttcccaaatgaggccagactcagggtcacggggaatgtgcttctgcccctgtaagggctttggggaagggggcaacatagtagaggctggaaagagcccccaaacctgtacccatgcccctccagccctgcgtttccattctgccttctcagagtgcccttgctgcacccagaccaccggccaggagagaccttctctcccactccagcccctctcactgcccttcaactagagctttcacctttttacatttcccttctgaaggacacaaatctgcttttctgcccatacactggcccaagggctcacctaacttgggagggaaggggctgttggtacaaggatgattttctgttagactgccattttgcacggtctcccccttcccatctgatgtgtcctgcccctcagctctttgccttatctgtgtcactgtcactttagcaaaaatacagcggccatttgtatcagcctctggtggttgcttgtgaggtgggactcttgcgggaacaggtggactttgggaggagtgggcagggagggagtggtagtggcagttctcgagctatctgattaagccattccgctagttcagttgtgccctggagggcaggggacagagtcagtatctctggggctgcaggccctcttgccttggccctcctggcatggggtaaccaccagctcagctctcctcctccagctttcctctctctagcacaccccagccagggcaaggatgcccacgggcatagctacagcaacccctgcgggatttggtgtccacacccgagaggccaggccagatgggaaagggattagcgcctcttccctcacactctgccaggctgccaggagcttgggccaggtctaaggtaatgaggtgctcctcttcctgctggaaaaaccggacagactcagaaccacaaaggcaggtgctgccagcctggcgccttcctctctgcttaggctgggtgagcttgtccaggcctgtgcctcaccccttctctcttctaggctcagtgtatgcttaatcaggcatggtgcatcagagcgggaaggagccatcaacagtgtatacttctggagccttctactgataaacagaggccccagaagacgatttgacttacctgagctcccagctgggacttaaacccaggtgtgtctgagtcacaactcttcggggatgccgtggtgagctggggctgagctcctgtattcccactcccccaccccacccccactcctgccatatcagggctggtctctgtggactcagcccagggctgcctcctctttgtcaccccaaagtggggcagccagggacagccagggtgtgttcagaatgggttcttcctgcagggcaggaagggcagattgttaaaggggctgcggcccagaccaccctggtccctcctccggcagtgactcagacccacactgtgccgtgcagctgtgtgccctgcacacccgcttgacggcgcactgctcacttctggggggccctttcagaggcacttttaaagcaaataaaacatttattgttcaaa

SEQ ID NO: 369965 - DNA, 2055 bp, Homo sapiens
ctgtgcctaggggggcacgagctatgcccagactactttgggtatcgtatggagtggaggtctcactatattgccaatgccagtcttgaactcctggcctcaagctatcctcgctatctcagccttccaaagtgctgggattataggtgtgagccaccgtgcccggcctggatctgttttcttagcacgcagtgaggaatctttgtacttaaggccagggcaacaaagtcaagaggtcaaggtgtagggccatgaggcctggacctatgctgcaggcaagggtttccatccccgctgccctaggcactctcttcccaaggccaggttgggcacctggggaggtcagttcagaaatatctagcagagacctcttaaacccccatcccagcaccccatcctgttgttcccagagctggtctcccatgagtgtgctagagccagatagccgtggccccccacccatctcactcacacacacaggcatccatacaccccagaagacttcccaaatgaggccagactcagggtcacggggaatgtgcttctgcccctgtaagggctttggggaagggggcaacatagtagaggctggaaagagcccccaaacctgtacccatgcccctccagccctgcgtttccattctgccttctcagagtgcccttgctgcacccagaccaccggccaggagagaccttctctcccactccagcccctctcactgcccttcaactagagctttcacctttttacatttcccttctgaaggacacaaatctgcttttctgcccatacactggcccaagggctcacctaacttgggagggaaggggctgttggtacaaggatgattttctgttagactgccattttgcacggtctcccccttcccatctgatgtgtcctgcccctcagctctttgccttatctgtgtcactgtcactttagcaaaaatacagcggccatttgtatcagcctctggtggttgcttgtgaggtgggactcttgcgggaacaggtggactttgggaggagtgggcagggagggagtggtagtggcagttctcgagctatctgattaagccattccgctagttcagttgtgccctggagggcaggggacagagtcagtatctctggggctgcaggccctcttgccttggccctcctggcatggggtaaccaccagctcagctctcctcctccagctttcctctctctagcacaccccagccagggcaaggatgcccacgggcatagctacagcaacccctgcgggatttggtgtccacacccgagaggccaggccagatgggaaagggattagcgcctcttccctcacactctgccaggctgccaggagcttgggccaggtctaaggtaatgaggtgctcctcttcctgctggaaaaaccggacagactcagaaccacaaaggcaggtgctgccagcctggcgccttcctctctgcttaggctgggtgagcttgtccaggcctgtgcctcaccccttctctcttctaggctcagtgtatgcttaatcaggcatggtgcatcagagcgggaaggagccatcaacagtgtatacttctggagccttctactgataaacagaggccccagaagacgatttgacttacctgagctcccagctgggacttaaacccaggtgtgtctgagtcacaactcttcggggatgccgtggtgagctggggctgagctcctgtattcccactcccccaccccacccccactcctgccatatcagggctggtctctgtggactcagcccagggctgcctcctctttgtcaccccaaagtggggcagccagggacagccagggtgtgttcagaatgggttcttcctgcagggcaggaagggcagattgttaaaggggctgcggcccagaccaccctggtccctcctccggcagtgactcagacccacactgtgccgtgcagctgtgtgccctgcacacccgcttgacggcgcactgctcacttctggggggccctttcagaggcacttttaaagcaaataaaacatttattgttcaaa

SEQ ID NO: 369966 - DNA, 1961 bp, Homo sapiens
tgggggcgggccgggggcggagcgcggggcgccggctgctctggcggctcccgcggctccggctggcggcttcgggccctgcacctgtgactctcggccgcgctcgccctcggcccgcccggcgccgcagccccatggccccgtccaggctgcagctcggcctccgcgccgcctactccggcatcagctccgtggccggcttctccatcttcctcgtctggacggtggtctaccgacagccggggaccgcggccatgggagggctcgcaggggtgctggcactgtgggtcctggtgacgcacgtgatgtacatgcaagattattggaggacctggctcaaggggctgcgcggcttcttcttcgtgggcgtcctcttctcggccgtctccatcgctgccttctgcaccttcctcgtgctggccatcacccggcatcagagcctcacagaccccaccagctactacctctccagcgtctggagcttcatttccttcaagtgggccttcctgctcagcctctatgcccaccgctaccgggctgactttgctgacatcagcatcctcagcgatttctgacccagggggtgaggtctctgcaccctgggggggccttaggacctggactcagcctctgagatgttgggagaggctactcccaccccctggtgaccccagaactgtggcagaaaatacacagcaggacgagtgtggtctcccaggaagctgtcctgcccgtcccctttcgaggaaacctgagtgtggtagagaggggatcctgccatgttgctcctcatcagcctggccagagggcagctttagaccttttcaaatgaatctgttttcttttctttcttttttttttcttttttttttttttttgagatggagtcttactctgtcacccaggctggagtgcagtagtgcgatctcagctcactgcaacctccgcctcccaggttcaagcaattctcctgccttggcctctcaagtagctgggattacaggcatctgccaccatgcccggcaaatttttgtgtttttagtagagacagggttttgccatgttggccaggctggtctcgaactcctgatctcaggtgattcacccgcctcagccttccaaagtgctgggattataggtgtgagccaccgtgcccggcctggatctgttttcttagcacgcagtgaggaatctttgtacttaaggccagggcaacaaagtcaagaggtcaaggtgtagggccatgaggcctggacctatgctgcaggcaagggtttccatccccgctgccctaggcactctcttcccaaggccaggttgggcacctggggaggtcagttcagaaatatctagcagagacctcttaaacccccatcccagcaccccatcctgttgttcccagagctggtctcccatgagtgtgctagagccagatagccgtggccccccacccatctcactcacacacacaggcatccatacaccccagaagacttcccaaatgaggccagactcagggtcacggggaatgtgcttctgcccctgtaagggctttggggaagggggcaacatagtagaggctggaaagagcccccaaacctgtacccatgcccctccagccctgcgtttccattctgccttctcagagtgcccttgctgcacccagaccaccggccaggagagaccttctctcccactccagcccctctcactgcccttcaactagagctttcacctttttacatttcccttctgaaggacacaaatctgcttttctgcccatacactggcccaagggctcacctaacttgggagggaaggggctgttggtacaaggatgattttctgttagactgccattttgcacggtctcccccttcccatctgatgtgtcctgcccctcagctctttgccttatctgtgtcactgtcggactagtcgggggggtccgagctcgaatt

SEQ ID NO: 369967 - DNA, 1520 bp, Homo sapiens
tgggggcgggccgggggcggagcgcggggcgccggctgctctggcggctcccgcggctccggctggcggcttcgggccctgcacctgtgactctcggccgcgctcgccctcggcccgcccggcgccgcagccccatggccccgtccaggctgcagctcggcctccgcgccgcctactccggcatcagctccgtggccggcttctccatcttcctcgtctggacggtggtctaccgacagccggggaccgcggccatgggagggctcgcaggggtgctggcactgtgggtcctggtgacgcacgtgatgtacatgcaagattattggaggacctggctcaaggggctgcgcggcttcttcttcgtgggcgtcctcttctcggccgtctccatcgctgccttctgcaccttcctcgtgctggccatcacccggcatcagagcctcacagaccccaccagctactacctctccagcgtctggagcttcatttccttcaagtgggccttcctgctcagcctctatgcccaccgctaccgggctgactttgctgacatcagcatcctcagcgatttctgacccagggggtgaggtctctgcaccctgggggggccttaggacctggactcagcctctgagatgttgggagaggctactcccaccccctggtgaccccagaactgtggcagaaaatacacagcaggacgagtgtggtctcccaggaagctgtcctgcccgtcccctttcgaggaaacctgagtgtggtagagaggggatcctgccatgttgctcctcatcagcctggccagagggcagctttagaccttttcaaatgaatctgttttcttttctttcttttttttttcttttttttttttttttgagatggagtcttactctgtcacccaggctggagtgcagtagtgcgatctcagctcactgcaacctccgcctcccaggttcaagcaattctcctgccttggcctctcaagtagctgggattacaggcatctgccaccatgcccggcaaatttttgtgtttttagtagagacagggttttgccatgttggccaggctggtctcgaactcctgatctcaggtgattcacccgcctcagccttccaaagtgctgggattataggtgtgagccaccgtgcccggcctggatctgttttcttagcacgcagtgaggaatctttgtacttaaggccagggcaacaaagtcaagaggtcaaggtgtagggccatgaggcctggacctatgctgcaggcaagggtttccatccccgctgccctaggcactctcttcccaaggccaggttgggcacctggggaggtcagttcagaaatatctagcagagacctcttaaacccccatcccagcaccccatcctgttgttcccagagctggtctcccatgagtgtgctagagccagatagccgtggccccccacccatctcactcacacacacaggcatcccccccccaagaagaactgaataaagattaatgagcaaaaaaa

SEQ ID NO: 369968 - DNA, 1035 bp, Homo sapiens
ggcacgagggggaaaaggaggaagagggagttaaggtatatgatgggcctccccatgtggatccttagtgctgtggcagagcccttgttattgtgctgggattttccctccagctcccggccggaagctgggctcacgtgggagctcagtgccctcctgctacagatctgtctcttccttacaatggggtgctggcactgtgggtcctggtgacgcacgtgatgtacatgcaagattattggaggacctggctcaaggggctgcgcggcttcttcttcgtgggcgtcctcttctcggccgtctccatcgctgccttctgcaccttcctcgtgctggccatcacccggcatcagagcctcacagaccccaccagctactacctctccagcgtctggagcttcatttccttcaagtgggccttcctgctcagcctctatgcccaccgctaccgggctgactttgctgacatcagcatcctcagcgatttctgacccagggggctcagtgtatgcttaatcaggcatggtgcatcagagcgggaaggagccatcaacagtgtatacttctggagccttctactgataaacagaggccccagaagacgatttgacttacctgagctcccagctgggacttaaacccaggtgtgtctgagtcacaactcttcggggatgccgtggtgagctggggctgagctcctgtattcccactcccccaccccacccccactcctgccatatcagggctggtctctgtggactcagcccagggctgcctcctctttgtcaccccaaagtggggcagccagggacagccagggtgtgttcagaatgggttcttcctgcagggcaggaagggcagattgttaaaggggctgcggcccagaccaccctggtccctcctccggcagtgactcagacccacactgtgccgtgcagctgtgtgccctgcacacccgcttgacggcgcactgctcacttctggggggccctttcagaggcacttttaaagcaaataaaacatttattgttcaaa

SEQ ID NO: 369969 - DNA, 2819 bp, Homo sapiens
  misc_feature (21)..(21): n is a, c, g, or t
  misc_feature (23)..(23): n is a, c, g, or t
aaaacctaggctagtacgagncnggtggtgaatcggccgagggggtgctggcactgtgggtcctggtgacgcacgtgatgtacatgcaagattattggaggacctggctcaaggggctgcgcggcttcttcttcgtgggcgtcctcttctcggccgtctccatcgctgccttctgcaccttcctcgtgctggccatcacccggcatcagagcctcacagaccccaccagctactacctctccagcgtctggagcttcatttccttcaagtgggccttcctgctcagcctctatgcccaccgctaccgggctgactttgctgacatcagcatcctcagcgatttctgacccagggggtgaggtctctgcaccctgggggggccttaggacctggactcagcctctgagatgttgggagaggctactcccaccccctggtgaccccagaactgtggcagaaaatacacagcaggacgagtgtggtctcccaggaagctgtcctgcccgtcccctttcgaggaaacctgagtgtggtagagaggggatcctgccatgttgctcctcatcagcctggccagagggcagctttagaccttttcaaatgaatctgttttcttttctttcttttttttttcttttttttttttttttgagatggagtcttactctgtcacccaggctggagtgcagtagtgcgatctcagctcactgcaacctccgcctcccaggttcaagcaattctcctgccttggcctctcaagtagctgggattacaggcatctgccaccatgcccggcaaatttttgtgtttttagtagagacagggttttgccatgttggccaggctggtctcgaactcctgatctcaggtgattcacccgcctcagccttccaaagtgctgggattataggtgtgagccaccgtgcccggcctggatctgttttcttagcacgcagtgaggaatctttgtacttaaggccagggcaacaaagtcaagaggtcaaggtgtagggccatgaggcctggacctatgctgcaggcaagggtttccatccccgctgccctaggcactctcttcccaaggccaggttgggcacctggggaggtcagttcagaaatatctagcagagacctcttaaacccccatcccagcaccccatcctgttgttcccagagctggtctcccatgagtgtgctagagccagatagccgtggccccccacccatctcactcacacacacaggcatccatacaccccagaagacttcccaaatgaggccagactcagggtcacggggaatgtgcttctgcccctgtaagggctttggggaagggggcaacatagtagaggctggaaagagcccccaaacctgtacccatgcccctccagccctgcgtttccattctgccttctcagagtgcccttgctgcacccagaccaccggccaggagagaccttctctcccactccagcccctctcactgcccttcaactagagctttcacctttttacatttcccttctgaaggacacaaatctgcttttctgcccatacactggcccaagggctcacctaacttgggagggaaggggctgttggtacaaggatgattttctgttagactgccattttgcacggtctcccccttcccatctgatgtgtcctgcccctcagctctttgccttatctgtgtcactgtcactttagcaaaaatacagcggccatttgtatcagcctctggtggttgcttgtgaggtgggactcttgcgggaacaggtggactttgggaggagtgggcagggagggagtggtagtggcagttctcgagctatctgattaagccattccgctagttcagttgtgccctggagggcaggggacagagtcagtatctctggggctgcaggccctcttgccttggccctcctggcatggggtaaccaccagctcagctctcctcctccagctttcctctctctagcacaccccagccagggcaaggatgcccacgggcatagctacagcaacccctgcgggatttggtgtccacacccgagaggccaggccagatgggaaagggattagcgcctcttccctcacactctgccaggctgccaggagcttgggccaggtctaaggtaatgaggtgctcctcttcctgctggaaaaaccggacagactcagaaccacaaaggcaggtgctgccagcctggcgccttcctctctgcttaggctgggtgagcttgtccaggcctgtgcctcaccccttctctcttctaggctcagtgtatgcttaatcaggcatggtgcatcagagcgggaaggagccatcaacagtgtatacttctggagccttctactgataaacagaggccccagaagacgatttgacttacctgagctcccagctgggacttaaacccaggtgtgtctgagtcacaactcttcggggatgccgtggtgagctggggctgagctcctgtattcccactcccccaccccacccccactcctgccatatcagggctggtctctgtggactcagcccagggctgcctcctctttgtcaccccaaagtggggcagccagggacagccagggtgtgttcagaatgggttcttcctgcagggcaggaagggcagattgttaaaggggctgcggcccagaccaccctggtccctcctccggcagtgactcagacccacactgtgccgtgcagctgtgtgccctgcacacccgcttgacggcgcactgctcacttctggggggccctttcagaggcacttttaaagcaaataaaacatttattgttcaaa

SEQ ID NO: 369970 - DNA, 2051 bp, Homo sapiens
gggactataggcatgcaccaccatgcgcagctaatttttttattttttgtagagaggttttgccatgttggccaggctggtctcgaactcctgatctcaggtgattcacccgcctcagccttccaaagtgctgggattataggtgtgagccaccgtgcccggcctggatctgttttcttagcacgcagtgaggaatctttgtacttaaggccagggcaacaaagtcaagaggtcaaggtgtagggccatgaggcctggacctatgctgcaggcaagggtttccatccccgctgccctaggcactctcttcccaaggccaggttgggcacctggggaggtcagttcagaaatatctagcagagacctcttaaacccccatcccagcaccccatcctgttgttcccagagctggtctcccatgagtgtgctagagccagatagccgtggccccccacccatctcactcacacacacaggcatccatacaccccagaagacttcccaaatgaggccagactcagggtcacggggaatgtgcttctgcccctgtaagggctttggggaagggggcaacatagtagaggctggaaagagcccccaaacctgtacccatgcccctccagccctgcgtttccattctgccttctcagagtgcccttgctgcacccagaccaccggccaggagagaccttctctcccactccagcccctctcactgcccttcaactagagctttcacctttttacatttcccttctgaaggacacaaatctgcttttctgcccatacactggcccaagggctcacctaacttgggagggaaggggctgttggtacaaggatgattttctgttagactgccattttgcacggtctcccccttcccatctgatgtgtcctgcccctcagctctttgccttatctgtgtcactgtcactttagcaaaaatacagcggccatttgtatcagcctctggtggttgcttgtgaggtgggactcttgcgggaacaggtggactttgggaggagtgggcagggagggagtggtagtggcagttctcgagctatctgattaagccattccgctagttcagttgtgccctggagggcaggggacagagtcagtatctctggggctgcaggccctcttgccttggccctcctggcatggggtaaccaccagctcagctctcctcctccagctttcctctctctagcacaccccagccagggcaaggatgcccacgggcatagctacagcaacccctgcgggatttggtgtccacacccgagaggccaggccagatgggaaagggattagcgcctcttccctcacactctgccaggctgccaggagcttgggccaggtctaaggtaatgaggtgctcctcttcctgctggaaaaaccggacagactcagaaccacaaaggcaggtgctgccagcctggcgccttcctctctgcttaggctgggtgagcttgtccaggcctgtgcctcaccccttctctcttctaggctcagtgtatgcttaatcaggcatggtgcatcagagcgggaaggagccatcaacagtgtatacttctggagccttctactgataaacagaggccccagaagacgatttgacttacctgagctcccagctgggacttaaacccaggtgtgtctgagtcacaactcttcggggatgccgtggtgagctggggctgagctcctgtattcccactcccccaccccacccccactcctgccatatcagggctggtctctgtggactcagcccagggctgcctcctctttgtcaccccaaagtggggcagccagggacagccagggtgtgttcagaatgggttcttcctgcagggcaggaagggcagattgttaaaggggctgcggcccagaccaccctggtccctcctccggcagtgactcagacccacactgtgccgtgcagctgtgtgccctgcacacccgcttgacggcgcactgctcacttctggggggccctttcagaggcacttttaaagcaaataaaacatttattgttcaaa

SEQ ID NO: 369971 - DNA, 1992 bp, Homo sapiens
  misc_feature (1961)..(1961): n is a, c, g, or t
tgggggcgggccgggggcggagcgcggggcgccggctgctctggcggctcccgcggctccggctggcggcttcgggccctgcacctgtgactctcggccgcgctcgccctcggcccgcccggcgccgcagccccatggccccgtccaggctgcagctcggcctccgcgccgcctactccggcatcagctccgtggccggcttctccatcttcctcgtctggacggtggtctaccgacagccggggaccgcggccatgggagggctcgcaggggtgctggcactgtgggtcctggtgacgcacgtgatgtacatgcaagattattggaggacctggctcaaggggctgcgcggcttcttcttcgtgggcgtcctcttctcggccgtctccatcgctgccttctgcaccttcctcgtgctggccatcacccggcatcagagcctcacagaccccaccagctactacctctccagcgtctggagcttcatttccttcaagtgggccttcctgctcagcctctatgcccaccgctaccgggctgactttgctgacatcagcatcctcagcgatttctgacccagggggtgaggtctctgcaccctgggggggccttaggacctggactcagcctctgagatgttgggagaggctactcccaccccctggtgaccccagaactgtggcagaaaatacacagcaggacgagtgtggtctcccaggaagctgtcctgcccgtcccctttcgaggaaacctgagtgtggtagagaggggatcctgccatgttgctcctcatcagcctggccagagggcagctttagaccttttcaaatgaatctgttttcttttctttcttttttttttcttttttttttttttttgagatggagtcttactctgtcacccaggctggagtgcagtagtgcgatctcagctcactgcaacctccgcctcccaggttcaagcaattctcctgccttggcctctcaagtagctgggattacaggcatctgccaccatgcccggcaaatttttgtgtttttagtagagacagggttttgccatgttggccaggctggtctcgaactcctgatctcaggtgattcacccgcctcagccttccaaagtgctgggattataggtgtgagccaccgtgcccggcctggatctgttttcttagcacgcagtgaggaatctttgtacttaaggccagggcaacaaagtcaagaggtcaaggtgtagggccatgaggcctggacctatgctgcaggcaagggtttccatccccgctgccctaggcactctcttcccaaggccaggttgggcacctggggaggtcagttcagaaatatctagcagagacctcttaaacccccatcccagcaccccatcctgttgttcccagagctggtctcccatgagtgtgctagagccagatagccgtggccccccacccatctcactcacacacacaggcatccatacaccccagaagacttcccaaatgaggccagactcagggtcacggggaatgtgcttctgcccctgtaagggctttggggaagggggcaacatagtagaggctggaaagagcccccaaacctgtacccatgcccctccagccctgcgtttccattctgccttctcagagtgcccttgctgcacccagaccaccggccaggagagaccttctctcccactccagcccctctcactgcccttcaactagagctttcacctttttacatttcccttctgaaggacacaaatctgcttttctgcccatacactggcccaagggctcacctaacttgggagggaaggggctgttggtacaaggatgattttctgttagactgccattttgcacggtctcccccttcccatctgatgtgtcctgcccctcagctctttgccttatctgtgtcactgtcactttagcaaaaatacagcggccatttgtnaaaaaaaaaaaaccaaggaagtataccttgt

SEQ ID NO: 369972 - DNA, 1437 bp, Homo sapiens
tgggggcgggccgggggcggagcgcggggcgccggctgctctggcggctcccgcggctccggctggcggcttcgggccctgcacctgtgactctcggccgcgctcgccctcggcccgcccggcgccgcagccccatggccccgtccaggctgcagctcggcctccgcgccgcctactccggcatcagctccgtggccggcttctccatcttcctcgtctggacggtggtctaccgacagccggggaccgcggccatgggagggctcgcaggggtgctggcactgtgggtcctggtgacgcacgtgatgtacatgcaagattattggaggacctggctcaaggggctgcgcggcttcttcttcgtgggcgtcctcttctcggccgtctccatcgctgccttctgcaccttcctcgtgctggccatcacccggcatcagagcctcacagaccccaccagctactacctctccagcgtctggagcttcatttccttcaagtgggccttcctgctcagcctctatgcccaccgctaccgggctgactttgctgacatcagcatcctcagcgatttctgacccagggggtgaggtctctgcaccctgggggggccttaggacctggactcagcctctgagatgttgggagaggctactcccaccccctggtgaccccagaactgtggcagaaaatacacagcaggacgagtgtggtctcccaggaagctgtcctgcccgtcccctttcgaggaaacctgagtgtggtagagaggggatcctgccatgttgctcctcatcagcctggccagagggcagctttagaccttttcaaatgaatctgttttcttttctttcttttttttttcttttttttttttttttgagatggagtcttactctgtcacccaggctggagtgcagtagtgcgatctcagctcactgcaacctccgcctcccaggttcaagcaattctcctgccttggcctctcaagtagctgggattacaggcatctgccaccatgcccggcaaatttttgtgtttttagtagagacagggttttgccatgttggccaggctggtctcgaactcctgatctcaggtgattcacccgcctcagccttccaaagtgctgggattataggtgtgagccaccgtgcccggcctggatctgttttcttagcacgcagtgaggaatctttgtacttaaggccagggcaacaaagtcaagaggtcaaggtgtagggccatgaggcctggacctatgctgcaggcaagggtttccatccccgctgccctaggcactctcttcccaaggccaggttgggcacctggggaggtcagttcagaaatatctagcagagacctcttaaacccccatcccagcaccccatcctgtcgggctagtcggggccggggcagcagctgtcgggctagtcgggg

SEQ ID NO: 369973 - DNA, 418 bp, Homo sapiens
acgctcaggatggggacgagacagcaattgctccaagaccgacgcatcttctcacgtgggccaggctttcacgcagccaaagcagatccgcgggggcgaaaacgattgacaaccggcctcatgacccaggcagagacacagaaagaggttcaacaaagacaggccgccatgcaagagacagctctgtggttcacagggcatattcagccaaagacacacaagcacacgggcacacacacacaaacccacagagagtgggaaagaaacacacagagactgagagacagagagagaagggagaatgggagacacacacacacacaaacaaagggtcatacagcagaggcattgaaacacacaccaccaggcaacccctgaggctgcggggttctgctgtcaaccagaacgaccctcgggt

SEQ ID NO: 369974 - DNA, 1207 bp, Homo sapiens
ccagtctccccctctgcgcacacacacacgcaaacacatttaactttccacttgcagtgacctgcccttcagtgtgacttatcagctgtttggcttttgtcactaaaggaaaacaaattgtggaatatcccgctctgcatgctcatgagatggctgagccaactcaggggttatgaggtggtttgcgagtgaggagaagaatgatcttcagtttctgacctcctggcacggtggcgggcggtatttatcaggaggtacatgtgactggttaagactcagagccccagcttgaaggaaacagctgctctcggcgtgctccggcacttggcagctggacaggcagagtgctgatgtgaaaaataccacgacaaaaccaccctaatggagtttcactctgtcgcccaggctggagtgcagtggcacgatctcggctcactgcaagctccgcctcccgggttcacaccattcttctgcctcagcctcccgagtagctgggactacaggtgcccaccaccacgcctggctaatttttttgtatttttaatagagacggggtttcatcatgttagcaggatggtctcgatctcctgacctggtgatccacccacctcggcctcccaaagtgctgggattacaggcatgagccactgcgcctggcctagttatgctatctttcaaagaaagaccaatttcaactatttcatgaccatgcacttacacaatctgtggaattatctttggtgataaaaagttgtgtaatttgtattctcttcagataggcaaagagtgactggataaccgatttgcgacatgccactcatgatatttccaaagcctatggacatttgactttggaaacagggtcagcttagtcttcagacaccgtatttgcttaggataattttgtttgtttgttttttcagacagagtcccactctgtcacccaagctggagtgcagtggcacaatcttggctcactgcaacctctgcctcccaggttcaagcgattctcttgcctcagcctcctgagtagctgggactacaggcgtgcaccaccacacccagctaatttttgtgtttttagtagagatgggttttcaccatgttggccaggctggtctcgaactcctgacctcaggtgatccacccaccttggcttcccaaagtgctgggattataggcatgagccactgtgcctggctagctt

SEQ ID NO: 369975 - DNA, 4797 bp, Homo sapiens
gataccctttacactagattagcaggcaaaactatgatggtttgtgatatccatgcttgtagaagtaataagaagaaagggaacacagaagctttattttatagtggagtcctgactctaggccttaataattgcatggttttggagttttcttgaagtacaactaaggacaggtcaccactaggcactaacatcgctgacttgcatgattatggagatggtctatctgatgctgaaaatgtctctagttttttgacaacggctaaataaccatgggatcaagtggccttgggaaagcagcaacattagatgaactgctgtgcacttgcattgagatgtttgatgacaatggagagctggataatagttatttgccaagaatagttctactgatgcaccgatggtatttatcttccactgaattggcagaaaaacttctctgcatgtatcgaaatgccactggagaaagctgcaatgaatttcgattaaagatctgctacttcatgaggtactggattctgaagtttcctgcagagtttaatttggatcttggtttgattcgtatgactgaggaatttcgggaagtagctagtcaactaggatatgaaaaacacgtcagcctcatcgacatatccagcattccttcctatgactggatgagaagagtcacacagaggaaaaaagtatccaagaagggaaaagcctgtctgctgtttgaccatctggagcccattgaattggctgagcacctcacttttctggagcataaatcttttagaaggatctcattcactgattaccaaagctatgtcatccatggctgcctggagaataatccaaccttggaaagatcgattgctttatttaatggaatctctaagtgggtccagttgatggttcttagcaaaccaaccccccagcaaagggcagaagtcatcacaaagtttatcaatgttgcaaagaagctccttcagctcaaaaattttaacaccctgatggcagtggtgggaggcctcagtcatagttccatttcacgcctcaaagagacccattctcatctttcttcagaagttacaaagaactggaatgaaatgacagagttggtctcctccaacggcaattactgcaattaccgcaaggcctttgccgactgcgatggcttcaaaatccccatccttggagtacacttgaaagacttgatagctgtccatgtcattttcccagactggacagaggagaacaaagtgaacattgtgaaaatgcaccagctctccgttaccctgagtgaactagtctccctgcagaatgcctctcaccacttagaacccaacatggatttgatcaacctgctcacgctttccctggacctctatcacactgaagatgatatttacaaactgtcactggtgctggagcctagaaattctaaatcgcagcctacctcccctacgacgcccaacaagcctgtggtacccctggagtgggcattaggggtgatgccaaagccagaccccacggtcatcaacaagcacataaggaaattagtggagtctgtatttagaaactatgatcacgaccatgatgggtacatttcccaagaggactttgaaagtatagctgccaattttcccttcttggattccttctgtgttctggacaaagatcaggatggcctaattagtaaagatgaaatgatggcttacttcctgagagctaaatcccaactacactgtaaaatgggaccaggatttatccataattttcaggagatgacctatctcaagccaaccttctgcgaacactgtgcgggatttctctggggcataatcaagcaaggatacaaatgcaaagactgtggagccaattgtcacaaacagtgcaaagacctcctggttctggcctgcaggagatttgcccgggcgccctccttgagcagtggtcatgggtcactgcctggaagcccctcgctgcccccagcgcaggatgaggtgtttgagttccctggagtcactgctggacacagggatttagacagcagagccatcacactggttacaggctcttctcgcaagatctctgtgaggctacagagggccaccaccagccaggccacccagactgaacctgtctggtcagaggctggctggggggactcggggtcccacaccttccctaaaatgaaatccaagttccatgacaaagcagcaaaggacaaaggctttgccaaatgggaaaatgagaagcccagggtgcatgctggtgtggatgttgtagaccggggcacggagtttgaacttgaccaggatgaaggagaagagaccagacaggatggtgaggatggctgacttcaggctgcggaaactgaaggcaataatgttggcttttggaaggggcaagacgagaaactctgaagaaagctctgactctcaggaagttatctggaaagatacctggatgtttactgccttgggacactgtgggatctccatgtttggactatgggacagagaattgaccctaactaactatgaactatttatttcctcctcccctacccctagttaagtgccacaaagactgtgttatgtagtcagtacttttctcatgtatctttctctagaccatttatatacgggtgaaatgaaagcttttttgcatgtacttgatactcagtctgtaaactcagacttcgctttttttgtgagactatcctttcaatatttttataaacttttgtgtgtgctgtggcagggaacagttaacaaggagtttatttagaggggtttttttcattttttgtttttcttgttttgttttgttttgttttgttcttcttggtgtgctttttggatgggaccagaacttaacattttcctgaggactaggaagctcatcagacactggaatgcagtgattcttctaatgatggtcaactgcaaggagaaactgtttacatccttcccactacacagttgctatgatatgtaacaagtcacacatgtatatatcacacaagtcttaccaattctgcgtcactaggaagctatagcatggtcgtgaaagctctcctaatacttacttaaatagccatggaagaaaattatgcttgtcccttctgactgggttaagccatctttcttaagattcctgaagtagaaatagcaattaagaaattaattcaagttttgacggttaacatttagcagaaaaacaaaccattgaataagctactaggtgaaatgcaaaacaaccatcaatttttttaaactcaataattttgtgaaaaaaaaaaccaccaccaaacttttggttgtaaaagagaacccttgttcccttcctaagaaactgccttccacaattaaagaatactcatagaaagaaaataatcataaatcatatttgattaacatttcatttaagcttttaaaatatcaattttttaaatagctcccatttacccaaaataactagttatgggtctatttcttccatgattagaggagagagaacttgattcaagatactgaaaaatagagctgggactgagcctgtgaatgacaggaatgatctattaccaggtgactagtcggaaactacacagaggtgcactggtctgcatttgggggctaaagtgtatatattccatttaaaatggaatttgtttgtatttggggcagtcttcagtaaagcctttctcctttcttttctccattgaggacagttctgctcagcaaaattgttgagtacctgttctgggcaggtcccacgctatatgcacaaagttaagaaaaacttggtcttagcccttgggagctgacagcccatgggcattaaggcaaagtagttccagtgatttaaaatacggttccaaatacgctaaaaccaacttgtgccaaccagatttacagattggaaatactgcagatgatgtgaagttatcagttggaggagctgtgattaagctggataataagagaacgtgccatctgtaaagcactcagaaggcagccatccctagatgttggtttcatgtatattacactatctactactatccataaatgcaataatatgcatgttaacaacattaaaaacagcaaacagcaatctaagtacagaaaagctttttgtgtgtttaaaaaaattgaagaaaattcaggaagaaacgtgttaataaacattgtactgttcttttgcttctcaaaggaattattcacttgccactttggttatttttgagttttcgtacataggaagttttatattgccagccttcctgtgataaagatattaaatgtaacttgagtaaaaaataaaaaagaataactatgtatatacatatataaattacatatgggcctgtatattgtgtgtgtatatacacagtaagtcctcatttgtccatagattcttggaaactgctactttaacaacttttttttctcatcaacgttgtaatgaaaggaaattgaatgaaattaccttgtggaggaccagtttgaacacttcatttgacttaaagttgctatttccaagaatctacagaccatgttaagtgaggacttacttactgtatacacacacacacacacacacacacacgcacacccccctattattactttgctgaagactaatttaagtctataacaaaactgccttataattatgattatatcatttactgacaaccagtgactctgatgtttccaatctatcaatttcccatcatcagtaaaataaaataggcaaatccacgatggggcaaaaagaacaatcacaattgactcctcctca

SEQ ID NO: 369976 - DNA, 5152 bp, Homo sapiens
ttgagctcaaagcttagcagcttcaatgttgttgttaggcataaacagcttgcaaatttcaattttttttctctcctcacttttgaactagatttgggcaatggaggtgatgacagcattttagaagacagaacaggaattctaggtgtttaggcacgttgaagagaaacttgctagaggtgatgaagtggaaagaaaaagacaattcactatagggatcaacattattgcagttctgcaaaggatattttcttttaaaacatccatatctcttctttgccatggaaactacacccaatctacctgaacctgcggcacccctctgatgacccatttggattctctgatttcactgccaagattctcagttctccaaaatacttatcattcaggttgaataaaccagttctacagactgcttcttccatgcatttcccaatgatgctaactgcccttaaaattctttcagatttggaactgtatctgtatggaaacaacagagttttcttgaagtacaactaaggacaggtcaccactaggcactaacatcgctgacttgcatgattatggagatggtctatctgatgctgaaaatgtctctagttttttgacaacggctaaataaccatgggatcaagtggccttgggaaagcagcaacattagatgaactgctgtgcacttgcattgagatgtttgatgacaatggagagctggataatagttatttgccaagaatagttctactgatgcaccgatggtatttatcttccactgaattggcagaaaaacttctctgcatgtatcgaaatgccactggagaaagctgcaatgaatttcgattaaagatctgctacttcatgaggtactggattctgaagtttcctgcagagtttaatttggatcttggtttgattcgtatgactgaggaatttcgggaagtagctagtcaactaggatatgaaaaacacgtcagcctcatcgacatatccagcattccttcctatgactggatgagaagagtcacacagaggaaaaaagtatccaagaagggaaaagcctgtctgctgtttgaccatctggagcccattgaattggctgagcacctcacttttctggagcataaatcttttagaaggatctcattcactgattaccaaagctatgtcatccatggctgcctggagaataatccaaccttggaaagatcgattgctttatttaatggaatctctaagtgggtccagttgatggttcttagcaaaccaaccccccagcaaagggcagaagtcatcacaaagtttatcaatgttgcaaagaagctccttcagctcaaaaattttaacaccctgatggcagtggtgggaggcctcagtcatagttccatttcacgcctcaaagagacccattctcatctttcttcagaagttacaaagaactggaatgaaatgacagagttggtctcctccaacggcaattactgcaattaccgcaaggcctttgccgactgcgatggcttcaaaatccccatccttggagtacacttgaaagacttgatagctgtccatgtcattttcccagactggacagaggagaacaaagtgaacattgtgaaaatgcaccagctctccgttaccctgagtgaactagtctccctgcagaatgcctctcaccacttagaacccaacatggatttgatcaacctgctcacgctttccctggacctctatcacactgaagatgatatttacaaactgtcactggtgctggagcctagaaattctaaatcgcagcctacctcccctacgacgcccaacaagcctgtggtacccctggagtgggcattaggggtgatgccaaagccagaccccacggtcatcaacaagcacataaggaaattagtggagtctgtatttagaaactatgatcacgaccatgatgggtacatttcccaagaggactttgaaagtatagctgccaattttcccttcttggattccttctgtgttctggacaaagatcaggatggcctaattagtaaagatgaaatgatggcttacttcctgagagctaaatcccaactacactgtaaaatgggaccaggatttatccataattttcaggagatgacctatctcaagccaaccttctgcgaacactgtgcgggatttctctggggcataatcaagcaaggatacaaatgcaaagactgtggagccaattgtcacaaacagtgcaaagacctcctggttctggcctgcaggagatttgcccgggcgccctccttgagcagtggtcatgggtcactgcctggaagcccctcgctgcccccagcgcaggatgaggtgtttgagttccctggagtcactgctggacacagggatttagacagcagagccatcacactggttacaggctcttctcgcaagatctctgtgaggctacagagggccaccaccagccaggccacccagactgaacctgtctggtcagaggctggctggggggactcggggtcccacaccttccctaaaatgaaatccaagttccatgacaaagcagcaaaggacaaaggctttgccaaatgggaaaatgagaagcccagggtgcatgctggtgtggatgttgtagaccggggcacggagtttgaacttgaccaggatgaaggagaagagaccagacaggatggtgaggatggctgacttcaggctgcggaaactgaaggcaataatgttggcttttggaaggggcaagacgagaaactctgaagaaagctctgactctcaggaagttatctggaaagatacctggatgtttactgccttgggacactgtgggatctccatgtttggactatgggacagagaattgaccctaactaactatgaactatttatttcctcctcccctacccctagttaagtgccacaaagactgtgttatgtagtcagtacttttctcatgtatctttctctagaccatttatatacgggtgaaatgaaagcttttttgcatgtacttgatactcagtctgtaaactcagacttcgctttttttgtgagactatcctttcaatatttttataaacttttgtgtgtgctgtggcagggaacagttaacaaggagtttatttagaggggtttttttcattttttgtttttcttgttttgttttgttttgttttgttcttcttggtgtgctttttggatgggaccagaacttaacattttcctgaggactaggaagctcatcagacactggaatgcagtgattcttctaatgatggtcaactgcaaggagaaactgtttacatccttcccactacacagttgctatgatatgtaacaagtcacacatgtatatatcacacaagtcttaccaattctgcgtcactaggaagctatagcatggtcgtgaaagctctcctaatacttacttaaatagccatggaagaaaattatgcttgtcccttctgactgggttaagccatctttcttaagattcctgaagtagaaatagcaattaagaaattaattcaagttttgacggttaacatttagcagaaaaacaaaccattgaataagctactaggtgaaatgcaaaacaaccatcaatttttttaaactcaataattttgtgaaaaaaaaaaccaccaccaaacttttggttgtaaaagagaacccttgttcccttcctaagaaactgccttccacaattaaagaatactcatagaaagaaaataatcataaatcatatttgattaacatttcatttaagcttttaaaatatcaattttttaaatagctcccatttacccaaaataactagttatgggtctatttcttccatgattagaggagagagaacttgattcaagatactgaaaaatagagctgggactgagcctgtgaatgacaggaatgatctattaccaggtgactagtcggaaactacacagaggtgcactggtctgcatttgggggctaaagtgtatatattccatttaaaatggaatttgtttgtatttggggcagtcttcagtaaagcctttctcctttcttttctccattgaggacagttctgctcagcaaaattgttgagtacctgttctgggcaggtcccacgctatatgcacaaagttaagaaaaacttggtcttagcccttgggagctgacagcccatgggcattaaggcaaagtagttccagtgatttaaaatacggttccaaatacgctaaaaccaacttgtgccaaccagatttacagattggaaatactgcagatgatgtgaagttatcagttggaggagctgtgattaagctggataataagagaacgtgccatctgtaaagcactcagaaggcagccatccctagatgttggtttcatgtatattacactatctactactatccataaatgcaataatatgcatgttaacaacattaaaaacagcaaacagcaatctaagtacagaaaagctttttgtgtgtttaaaaaaattgaagaaaattcaggaagaaacgtgttaataaacattgtactgttcttttgcttctcaaaggaattattcacttgccactttggttatttttgagttttcgtacataggaagttttatattgccagccttcctgtgataaagatattaaatgtaacttgagtaaaaaataaaaaagaataactatgtatatacatatataaattacatatgggcctgtatattgtgtgtgtatatacacagtaagtcctcatttgtccatagattcttggaaactgctactttaacaacttttttttctcatcaacgttgtaatgaaaggaaattgaatgaaattaccttgtggaggaccagtttgaacacttcatttgacttaaagttgctatttccaagaatctacagaccatgttaagtgaggacttacttactgtatacacacacacacacacacacacacacgcacacccccctattattactttgctgaagactaatttaagtctataacaaaactgccttataattatgattatatcatttactgacaaccagtgactctgatgtttccaatctatcaatttcccatcatcagtaaaataaaataggcaaatccacgatggggcaaaaagaacaatcacaattgactcctcctca

SEQ ID NO: 369977 - DNA, 5094 bp, Homo sapiens
ttgagctcaaagcttagcagcttcaatgttgttgttaggcataaacagcttgcaaatttcaattttttttctctcctcacttttgaactagatttgggcaatggaggtgatgacagcattttagaagacagaacaggaattctaggtgtttaggcacgttgaagagaaacttgctagaggtgatgaagtggaaagaaaaagacaattcactatagggatcaacattattgcagttctgcaaaggatattttcttttaaaacatccatatctcttctttgccatggaaactacacccaatctacctgaacctgcggcacccctctgatgacccatttggattctctgatttcactgccaagattctcagttctccaaaatacttatcattcaggttgaataaaccagttctacagactgcttcttccatgcatttcccaatgatgctaactgcccttaaaattctttcagatttggaactgtatctgtatggaaacaacagagttttcttgaagtacaactaaggacaggtcaccactaggcactaacatcgctgacttgcatgattatggagatggtctatctgatgctgaaaatgtctctagttttttgacaacggctaaataaccatgggatcaagtggccttgggaaagcagcaacattagatgaactgctgtgcacttgcattgagatgtttgatgacaatggagagctggataatagttatttgccaagaatagttctactgatgcaccgatggtatttatcttccactgaattggcagaaaaacttctctgcatgtatcgaaatgccactggagaaagctgcaatgaatttcgattaaagatctgctacttcatgaggtactggattctgaagtttcctgcagagtttaatttggatcttggtttgattcgtatgactgaggaatttcgggaagtagctagtcaactaggatatgaaaaacacgtcagcctcatcgacatatccagcattccttcctatgactggatgagaagagtcacacagaggaaaaaagtatccaagaagggaaaagcctgtctgctgtttgaccatctggagcccattgaattggctgagcacctcacttttctggagcataaatcttttagaaggatctcattcactgattaccaaagctatgtcatccatggctgcctggagaataatccaaccttggaaagatcgattgctttatttaatggaatctctaagtgggtccagttgatggttcttagcaaaccaaccccccagcaaagggcagaagtcatcacaaagtttatcaatgttgcaaagaagctccttcagctcaaaaattttaacaccctgatggcagtggtgggaggcctcagtcatagttccatttcacgcctcaaagagacccattctcatctttcttcagaagttacaaagaactggaatgaaatgacagagttggtctcctccaacggcaattactgcaattaccgcaaggcctttgccgactgcgatggcttcaaaatccccatccttggagtacacttgaaagacttgatagctgtccatgtcattttcccagactggacagaggagaacaaagtgaacattgtgaaaatgcaccagctctccgttaccctgagtgaactagtctccctgcagaatgcctctcaccacttagaacccaacatggatttgatcaacctgctcacgctttccctggacctctatcacactgaagatgatatttacaaactgtcactggtgctggagcctagaaattctaaatcgcagcctacctcccctacgacgcccaacaagcctgtggtacccctggagtgggcattaggggtgatgccaaagccagaccccacggtcatcaacaagcacataaggaaattagtggagtctgtatttagaaactatgatcacgaccatgatgggtacatttcccaagaggactttgaaagtatagctgccaattttcccttcttggattccttctgtgttctggacaaagatcaggatggcctaattagtaaagatgaaatgatggcttacttcctgagagctaaatcccaactacactgtaaaatgggaccaggatttatccataattttcaggagatgacctatctcaagccaaccttctgcgaacactgtgcgggatttctctggggcataatcaagcaaggatacaaatgcaaagactgtggagccaattgtcacaaacagtgcaaagacctcctggttctggcctgcaggagatttgcccgggcgccctccttgagcagtggtcatgggtcactgcctggaagcccctcgctgcccccagcgcaggatgaggtgtttgagttccctggagtcactgctggacacagggatttagacagcagagccatcacactggttacaggctcttctcgcaagatctctgtgaggctacagagggccaccaccagccaggccacccagactgaacctgtctggtcagaggctggctggggggactcggggtcccacaccttccctaaaatgaaatccaagttccatgacaaagcagcaaaggacaaaggctttgccaaatgggaaaatgagaagcccagggtgcatgctggtgtggatgttgtagaccggggcacggagtttgaacttgaccaggatgaaggagaagagaccagacaggatggtgaggatggctgacttcaggctgcggaaactgaaggcaataatgttggcttttggaaggggcaagacgagaaactctgaagaaagctctgactctcaggaagttatctggaaagatacctggatgtttactgccttgggacactgtgggatctccatgtttggactatgggacagagaattgaccctaactaactatgaactatttatttcctcctcccctacccctagttaagtgccacaaagactgtgttatgtagtcagtacttttctcatgtatctttctctagaccatttatatacgggtgaaatgaaagcttttttgcatgtacttgatactcagtctgtaaactcagacttcgctttttttgtgagactatcctttcaatatttttataaacttttgtgtgtgctgtggcagggaacagttaacaaggagtttatttagaggggtttttttcattttttgtttttcttgttttgttttgttttgttttgttcttcttggtgtgctttttggatgggaccagaacttaacattttcctgaggactaggaagctcatcagacactggaatgcagtgattcttctaatgatggtcaactgcaaggagaaactgtttacatccttcccactacacagttgctatgatatgtaacaagtcacacatgtatatatcacacaagtcttaccaattctgcgtcactaggaagctatagcatggtcgtgaaagctctcctaatacttacttaaatagccatggaagaaaattatgcttgtcccttctgactgggttaagccatctttcttaagattcctgaagtagaaatagcaattaagaaattaattcaagttttgacggttaacatttagcagaaaaacaaaccattgaataagctactaggtgaaatgcaaaacaaccatcaatttttttaaactcaataattttgtgaaaaactgccttccacaattaaagaatactcatagaaagaaaataatcataaatcatatttgattaacatttcatttaagcttttaaaatatcaattttttaaatagctcccatttacccaaaataactagttatgggtctatttcttccatgattagaggagagagaacttgattcaagatactgaaaaatagagctgggactgagcctgtgaatgacaggaatgatctattaccaggtgactagtcggaaactacacagaggtgcactggtctgcatttgggggctaaagtgtatatattccatttaaaatggaatttgtttgtatttggggcagtcttcagtaaagcctttctcctttcttttctccattgaggacagttctgctcagcaaaattgttgagtacctgttctgggcaggtcccacgctatatgcacaaagttaagaaaaacttggtcttagcccttgggagctgacagcccatgggcattaaggcaaagtagttccagtgatttaaaatacggttccaaatacgctaaaaccaacttgtgccaaccagatttacagattggaaatactgcagatgatgtgaagttatcagttggaggagctgtgattaagctggataataagagaacgtgccatctgtaaagcactcagaaggcagccatccctagatgttggtttcatgtatattacactatctactactatccataaatgcaataatatgcatgttaacaacattaaaaacagcaaacagcaatctaagtacagaaaagctttttgtgtgtttaaaaaaattgaagaaaattcaggaagaaacgtgttaataaacattgtactgttcttttgcttctcaaaggaattattcacttgccactttggttatttttgagttttcgtacataggaagttttatattgccagccttcctgtgataaagatattaaatgtaacttgagtaaaaaataaaaaagaataactatgtatatacatatataaattacatatgggcctgtatattgtgtgtgtatatacacagtaagtcctcatttgtccatagattcttggaaactgctactttaacaacttttttttctcatcaacgttgtaatgaaaggaaattgaatgaaattaccttgtggaggaccagtttgaacacttcatttgacttaaagttgctatttccaagaatctacagaccatgttaagtgaggacttacttactgtatacacacacacacacacacacacacacgcacacccccctattattactttgctgaagactaatttaagtctataacaaaactgccttataattatgattatatcatttactgacaaccagtgactctgatgtttccaatctatcaatttcccatcatcagtaaaataaaataggcaaatccacgatggggcaaaaagaacaatcacaattgactcctcctca
